United States Patent Application Publication US 2005/0228172 A9 - sequence listing, part 144

SEQ ID NO: 675325 - DNA, 614 bp, Homo sapiens
gcagaaaaaccttggttgattaacataattcttacaaactctcttaagagagagcatttggttttgttttcattgtgtttaatcaaaaagttttacacattttatttttacgatcatggcataggctctgaaaagtctccttacctagaaaagaccctaagtaggcactataaataacaagagactcacaggataacacagttggtccgagtgttgtgggttattgttaagttgatttaacattgtctccccccacaaccgcgcttgactagcttgctgttttgcactaataacagtagtagacaacgtttacataaatcaataaaaacgcatataaaagtaacctttagttgacggtttgaacgaaagagtagcttttagttgatttgaaaaactttcaaggaagcctattggttataagcttcttttagtaagattaacttcccagcagcgttgaagtattaaccttcaaaatgcctgagaagaaaatttacacgaaaggaataattttgttttaattacctttgaatgtattaaatattgtattcggtttttaataaaccttataatcaaggttamttttctatatatgtgaaaatatatatatatatata

SEQ ID NO: 675326 - DNA, 934 bp, Homo sapiens
ctatccttattcttatgtgcatgtaggatacgttttgttggaaaggttatctagcaatggagtctctagctcagagagtgcgcacaaattcagtaacagcaaacactgcctagctggattcctaaacaccgtgtcactttacaccctccacatggatgagttctgtttcctcagatcctagcattttgctgacatcgtatcttgatttatcaggtgtgtttgtcagatttcttgaatgcgcatgtcttccttttataatgagaaaacatgttttaaaatcacacggaggctgggtgcaggggctcacgcctgtaatcccrgcactttgagaggctgaggcaggcggatcacctgaggtcaggacttcgaaaccagcctggccaacatggtgaaaccctgtctctactagaaaacacaaaaattagccgggcatggtggtgcgtgcttgtaatcctagctactcaggaagctgaggcaggagaatcgcttcaatccacaaggtggaggttgcagtgagcagagatggcaccactgtactccggcctgggtgacagagtgagactctatctcaaaaaaaaaaaaaaaaaaaaaaaaatctcatggaaatgttgcttttcaaatctgaaagcaaagacaccaaaatggtaaaagtggttctatttgggagatgggctgtaagcaatttttgtttcttttataatctgaaaaaaaggacagttaatgaaaaacaagaatgttaacattcaaacataggtgttatagaaaaaaattagtggttataaaaaaaaaagagaaagagagaaagagaaagataccaaataagtccttgtgcatttagccattgaactagaactggagaactggtttgtttatactgcaaagtaatgctaacttgggctttcaggacacaaaaaacatttatccaggatagaca

SEQ ID NO: 675327 - DNA, 1634 bp, Homo sapiens
tcgaggttcagcacacttctggataaaaaaatccattttaactgttttaaacaaaattataaatgagcactcactcattctggctctctaaaatagttcaaaaatatttttcggaagatagttataacctttttcaaagacccttttttttttttttttttgagatggagtttccttctgtctcccaggctggagtgcagtggcataatcttggctcactgcaacctctgcctcccaggttcaagtgattctcctgcctcagcctcccaagtagctgggactacaggtatgtgccaccacacccagctatttttttgcatttttaatagagacagggtttagccatgttagccaggcttgtctcaaactcctgatctcaggtgatccacttgcctgggcctcgaaaatgctgggattacaggcatgagccactgcatctaacctcaaagcctgttttgtaaaggttgcaagtttcctatctgccttctctgaaaatattttaaaatatggttaaatacattatgtttaccaattataccctcaactaattaatgccactttctgaagatacaaagatgaataagatagcttcaagaaatgtagaaagtagcttcctaatgttttaaactaatctgaaatatatatgtatataatatatacatatatatacatttatatatgtaaaatatatatacgtatacacacacacacacacacatacatatatatatctcaatgctttcgtgatctgctggtccagaggcctgaggaggccaaagtgcagagaaggtgggtaaagctttccgttcagtgggatctcataggtcccacggagttcctatttggatgttaggactactaccatgacgaaccattggtgacaggaaagggacacacacatccatgaatgtggcagtgagagcgatggtgagaggggctagttgtattttcatcttccagaagccatgatctgaattccagctactggggccctgtgacttctgcctcattcattgattctgcacatgtactgcctcctggggctggctcctcaacaccgcctgagttccaccaccaaattgaggctttagccagccatggcatggttctagcagactgaatgctcctgtgtggtggggtatgtcttagtgtgttttggctgccataacaaaacatcagtcacttcagaggcttaaatggcaggcatttatatctcacagttctggagactgggaaatccaagatcaagggctggaagacttggtatctggtgaggacctgcttgctggttcgagatggctccttcttaccatgccctcataggatagaaaggacaagagagctctggtatctctttgtcttgcttataacaagacaaactgcccttataaggcccttataatgtcttgcttataacaagacattagtgcccttataaggcactaattctaacataagggctccatcatcgtgaccttacccaatcttaattaactgccaaagaccccatctccaaatactatcacatttggggttagggcttcaacatatgaactttggrggaacaccatgtggttgatagcagggcacatggtaagacctgtgttcgtctcttcactcatttcccagtaaaa

SEQ ID NO: 675328 - DNA, 625 bp, Homo sapiens
tcactgatgtagttccagtctttcctcactgcaactcacctttcagaaatttatattcttcaaatttctttgtaatatcagagaaggatatacacaagtatcataaaaggttgctaaaattatcctcgcatctttctgaatctacttcaacctaaccacttgttgcaacaaatcaatggaggatatgggacccagctacgttgcattcagcctgacagcaaagagactggcaaacctcgaagctgttcttttcactaaattttcgtaaaaatatgttgtgttsacatgtcgtgggtttataataaataaatattccaacagttctcagtcttaattcttaatatagttaattccaatagaaactacccatataaatgaaacctcttaagggcgcgaagaggttcttgatagtggagaattgctgggtcatggagctgccatgattgctgggcattgaggattcatttgaggttatggattatggattaaaactgggctcagtgaggggctaacatgttgttctccagaaacatccatgtgtgcagtgttggtggagtatggaaagcaaatttgtttctctaacagacgttatagtctttctttacaagccgtaaaattaatgcca

SEQ ID NO: 675329 - DNA, 1385 bp, Homo sapiens
agaatatagctatacttattaccactgaactgtatgcttaagaataataaagacagtaaattttatatgcatattttgtctaaataaaaaawttaaaaaataaaatgtgatctctcatggctcgtacatatttttattgtgtttagtgcaatactgtaaacttgaataacaccagggcacccataaaaagtgccaccactaatgatgctagaagtgctcccaagaagcagagaaaagtcatgatataacagaaaaagttgaattgcttgatatgtattgtcagttgaatatgtgttaatcaattgtttatgttagcaaggattcaactcaatagtaggttattagcaattatgtttctggagattcaaacgttatacttggatttttgactgcctggaggattggcattactaaccaccacccctcttcttacctcctgctgttcaagggtcaactgtatatactttacatagagttttggctccaagagttaatttgtaggttattgtttggaacttgtcattaatttctagtgcgtgtatagaagtaaatttacatatgaggttaggttttaggtaagcctttaaaagcccacttaatatacgatatcattaatatagtgacgggggcagtcataagaaaggggtcgagtgcaccagggagccctgcaacaattacgtgtggggaaaaggtttgaggggccaacattgttaatggggaagataccagtagaggagggtgtgagcaacggggtgtgtttctagctgtaggattgaccagtagctctgtggccagtagccagttcatagttaggccattggtgagtcttgtgttccaatgtcacactgaactttggagttaggaggatctttgacatctaacacctcaccctgcatatcagtaaacctcaataatttgccaaagtccaccatcaataattgaccaaagttcattgccagtcaatgaactttgccagcagagtaaggttgagaacccatgaatcaggtatcagacccgctggcagtttgtagttgtgccttatgtagaagggctatcggcatccagacctagacacggttcttgagttcctgaaaatgaataaagtgaatgaataaaatgagtaaaatgaatgcaggattgccagttcactgacaatttaccctccctggctgaaaaagttccccatttcttctttagaatattctttataatattgacttagctcttctatacccttactggttaaatcttagtggcattgtcttgatatcataaaatataaaaactgtaaaaaattttttgatgaaagggatgcattatatgcacaattataattcattactttaataaccctccttcagtgatatctccaaggatgagaccta

SEQ ID NO: 675330 - DNA, 663 bp, Homo sapiens
tgtcttggcaaagcaaatgtaaacatccctcttcatttttaaagaaaccctactcattcttccaagcccagctaaaataccatccattctatgaaacctattcactttctccagcctgaaaaattctctcctactcttcactgtctctgcaactctgagtcatgccttgcattctgccctgtattagagttatttataaatatataactctcccccactggagrgttctttgagagcaagaaccagtatttctctttgagtctttcttcacatggcccagcacatagtagggatttccaaacagttctggagtacaactgagttgaattagctgtgaatgattactgaaatattcaatattgcttttccttgagttgttttggctccatgatcatatgaacaaacttatatatgcaagaagatatagattaaatgcatgaattttcaacctatttattgtgggtgaaattatactgtttctataccttacttaatgaaggacatataaccattataaacttacttctcttttagtcgagaagtcatcagtcaagatactcgtccccacttcccacttctcttgttttcccttgcccccaatttaaatatttccctattctcacatttaaattacatcctgccaaacctgctggtaatctgcca

SEQ ID NO: 675331 - DNA, 663 bp, Homo sapiens
tgtcttggcaaagcaaatgtaaacatccctcttcatttttaaagaaaccctactcattcttccaagcccagctaaaataccatccattctatgaaacctattcactttctccagcctgaaaaattctctcctactcttcactgtctctgcaactctgagtcatgccttgcattctgccctgtattagagttatttataaatatataactctcccccactggagggttctttgagagcaagaaccagtatttctctttgagtctttcttcayatggcccagcacatagtagggatttccaaacagttctggagtacaactgagttgaattagctgtgaatgattactgaaatattcaatattgcttttccttgagttgttttggctccatgatcatatgaacaaacttatatatgcaagaagatatagattaaatgcatgaattttcaacctatttattgtgggtgaaattatactgtttctataccttacttaatgaaggacatataaccattataaacttacttctcttttagtcgagaagtcatcagtcaagatactcgtccccacttcccacttctcttgttttcccttgcccccaatttaaatatttccctattctcacatttaaattacatcctgccaaacctgctggtaatctgcca

SEQ ID NO: 675332 - DNA, 1231 bp, Homo sapiens
taacaaaaaaggaaaacaactaatcaaatttaacaatgtggaagtagcagctgaagttaattaaagggcaggaaaaaaacccaaaattttattctggatcatttttaaaactagtttcaataatagtttttagttttgcccgataatagactgttcacaaatcagcacttatttgcctcaatattcttcaacatagaatttggtagttgaagggagatggggactatatgctgccatgccttgtacaaagctctaggaattggctcctttacatacaagggacagtttttgtgtgtattttcttttcttttttttttttcttttttttttttttttgagacagagtcttgctctgtcacccaggctggagtacagtggcgcgatctcgactcacggcaacatctgcctcccaggttcaagcaattctcctgcctcagcctcccgagtagctggaattacagacaccagccaccatgcccggctgattttttgtgtttttagtagagacagggttttgcgatgttgcccaggctggtttcaaactcccgagctcgggcaatccgcccacctcggcctcccaaagtgctgggattacaggcgtgagccaccgtgcccggccgtgtgtactttcaatgacaaatgtttgttagctgtttaagaaaaaaaaatcctgggtatttcaatgaggaaagtgtttaaatgatctattctagtataagattccaactagtctctgccaaccactaaacaaaagttctctaaaagtcacacctggtaggcactaaccagaaagataataatgaaagcaaagttgtattaagcacgtactatgtcctatgtatggtgtatttacatgaattgttatcatcagtccttatagggactcaacatgtgaccgtatgctttacagatgaaaatagtttaagtaatttgtccaaggtcaccaggtggtagtaaatggtaaaccaggatttggcctcaggcaatctgattccagcatatgctttcaatgaccgtgttattctgtcagtcaaggtctgctagttgttatatttttcttttctacagttaaacagattcctttttctcctccagcrataatatataggcaattgtatgagaagctattaacaacggtcattgtggttagccaacggagttttgctagaacaaagaaaataaaatacaacattccttttaaaaatctgttaaatcctttcttctctctctt

SEQ ID NO: 675333 - DNA, 926 bp, Homo sapiens
aatgactattctggtttgattactatgcttatcttaccaacatgggacatttggaagaaaggagaggaagtatcataatttagaaaggcagttacaggagtggctgaatgaactcaagactagaggctgcagatcccaagttcaaatattgcctgtgatgtgaagtaacctggtgaacccagtcaagttacctttttactccaagacttgcttaacttattttgattataacaagtaatatgattaagcttcttagaacaatatcttttcatcaaagtttatctatacacctaagttgttccttaagtgctatcaccataawcatacacactccttcccctattaaggtgactagaaatgggttccatgggatggaatttttaattttttaatccactggattagattatcttctgaaattccttccagatctaatatttacagttcttattttgatcagatgaacctacttaaaaatcaacagcaaaaataaataagtacggcaacactccttccacaataaaaggctgaataggtttcttttcaatttctctaccaaatggctgagtctaattttaagtactactgtctctgactgttactttcatatataacatcatttttacactcaacctgtcagctcatgtcatttcaattatgcatttgttttctcactgactaaacattgtgccagcacttctccctattagattaaaaagaaagaaaacatgggctatttgaaaatgacttaacagcaatacatttttccagcttgaaagtctagtatttttcttttatgctgcatgtaatgaacataggctgaatattaatatcttaaagtaaagatacctgatagcatttcagatatttgttgaacttgagatggtgactcatgatgtctctcttggtgattacagtttttaact

SEQ ID NO: 675334 - DNA, 926 bp, Homo sapiens
aatgactattctggtttgattactatgcttatcttaccaacatgggacatttggaagaaaggagaggaagtatcataatttagaaaggcagttacaggagtggctgaatgaactcaagactagaggctgcagatcccaagttcaaatattgcctgtgatgtgaagtaacctggtgaacccagtcaagttacctttttactccaagacttgcttaacttattttgattataacaagtaatatgattaagcttcttagaacaatatcttttcatcaaagtttatctatacacctaagttgttccttaagtgctatcaccataatcatacacactccttcccctattaaggtgactagaaatgggttccatgggatggaatttttaattttttaatccactggattagattatcttctgaaattccttccagatctaatatttacmgttcttattttgatcagatgaacctacttaaaaatcaacagcaaaaataaataagtacggcaacactccttccacaataaaaggctgaataggtttcttttcaatttctctaccaaatggctgagtctaattttaagtactactgtctctgactgttactttcatatataacatcatttttacactcaacctgtcagctcatgtcatttcaattatgcatttgttttctcactgactaaacattgtgccagcacttctccctattagattaaaaagaaagaaaacatgggctatttgaaaatgacttaacagcaatacatttttccagcttgaaagtctagtatttttcttttatgctgcatgtaatgaacataggctgaatattaatatcttaaagtaaagatacctgatagcatttcagatatttgttgaacttgagatggtgactcatgatgtctctcttggtgattacagtttttaact

SEQ ID NO: 675335 - DNA, 539 bp, Homo sapiens
  misc_feature 79: n = A,T,C or G
cccccgaaaggacgctggagagaagcccaggatcacccagtctttgcagcagggtgcaggcttggagttcccccaaggncggctagaatcaggtccagttccccccagtgtcagcaaggcctacacctggagtcgcctcaaagacagctggagtccagtcctcaatccccacgatgtcagccgaagccaagtgaggagcacccaagtgtgctcaggctcagggagtacctggcctcggagttggcccaaagtaaggaggagctgatcccagggggccccccagcatcagctactgccgggcccaggatcaccagagccttaaccccagtcaggaacgtcgggtccggagccctctcagccactactgcagctaacactcgaggcacctggcttcccccagggtcagcacgagcagagcaaaccacctccagctggggagatggtgacagacggcttcggrgcaaagaagccaaagggttcttcatcccaggccccagcgtccaagaagctgaaggaggaggagcttcctgtaatcccga

SEQ ID NO: 675336 - DNA, 1245 bp, Homo sapiens
tcccagcactttgggaggctgaggcatgaggattacttgaacccaggagtttgaggctgcagtgagctaagatcatgctactgcactccagcctggatgacagaatgatacccagcctctacaaataaaaataaaacagtcctaatcacagacatgttaaggtccaattcatcctaaaacaaaacttcagactcgtatccagtttagttctgcctgagtccctgacggcttcctagttgccatctgtaatccccatgaagaccagctgcacctgacttccatgagccactcctatacctgtttaatagtctcctgtctttatttgagcaagctggcaaccttacaacccactagtcaatccctgactagaagaagatggacagtacattctcagcagagattttgaaaaaaagacactttggctattgccacctccaccctggccaccaccctgtaattctgtcaggaatcagctgcctttctctgcctttccaccttgatcagttcatgtgttgtggtttcgtgatttttaactaacatctttatttgtgtaaagacaccaggcacagtggtgcatgcctgtagycccagctacttgcgaggctgaggcagaaggattgcttgagcctgggagtttgaggctgcagtgagctgtgatctcaccactgcaatccagcctaaagacagagcaagatcttgtctcataaataaataaatatcttatatatatggggggtgggttgccggaaggtattttagaaaaggctttgccatagatcctgagggaggtttctgccttctcccctccagtgaggtagggcccccatgcgtcaccctggtaaacttaatatgtaagccctatgaagggccctcgaagctctagcctcctcttggaaagtctactagggccatgcttgctgaatccctttgtgaatccggaggatcgtttcttgttccactctttcaaatacagagttcctttccccccatgtctccatttggaagttcagtcaaaacctaagacaacaggatatgtcccctgtacattgtgttacgtaaacatcggatataatcctcacaacagccttctgaggcagagaataagatccttgctttataaatgaggaagtgtagggagactccatatcttgttctagatcacatctttcgtgatgctaatcccggattccgaccccggaggccggtctgattctgccgcctctccttctccccacctcctggcgg

SEQ ID NO: 675337 - DNA, 1245 bp, Homo sapiens
tcccagcactttgggaggctgaggcatgaggattacttgaacccaggagtttgaggctgcagtgagctaagatcatgctactgcactccagcctggatgacagaatgatacccagcctctacaaataaaaataaaacagtcctaatcacagacatgttaaggtccaattcatcctaaaacaaaacttcagactcgtatccagtttagttctgcctgagtccctgacggcttcctagttgccatctgtaatccccatgaagaccagctgcacctgacttccatgagccactcctatacctgtttaatagtctcctgtctttatttgagcaagctggcaaccttacaacccactagtcaatccctgactagaagaagatggacagtacattctcagcagagattttgaaaaaaagacactttggctattgccacctccaccctggccaccaccctgtaattctgtcaggaatcagctgcctttctctgcctttccaccttgatcagttcatgtgttgtggtttcgtgatttttaactaacatctttatttgtgtaaagacaccaggcacagtggtgcatgcctgtagtcccagctacttgcgaggctgaggcagaaggattgcttgagcctgggagtttgaggctgcagtgagctgtgatctcaccactgcaatccagcctaaagacagagcaagatcttgtctcataaataaataaatatcttatatatatggggggtgggttgccggaaggtattttagaaaaggctttgccatagatcctgagggaggtttctgccttctcccctccagtgaggtagggcccccatgcgtcamcctggtaaacttaatatgtaagccctatgaagggccctcgaagctctagcctcctcttggaaagtctactagggccatgcttgctgaatccctttgtgaatccggaggatcgtttcttgttccactctttcaaatacagagttcctttccccccatgtctccatttggaagttcagtcaaaacctaagacaacaggatatgtcccctgtacattgtgttacgtaaacatcggatataatcctcacaacagccttctgaggcagagaataagatccttgctttataaatgaggaagtgtagggagactccatatcttgttctagatcacatctttcgtgatgctaatcccggattccgaccccggaggccggtctgattctgccgcctctccttctccccacctcctggcgg

SEQ ID NO: 675338 - DNA, 2602 bp, Homo sapiens
caaggctctgtccattttcttacagtcttcttcttttagtctgattagataatttccattcatgtaatttctgtctccaaatccactgactcttttctttgtcacaagcactctgcttttgaacatatccagtgattttcttcaaatttctaattattgtattttccagttataaaatttccatttggttcttttttatagcttctttttcttaactgagattattatttcttaaagcatggttataacagctgttttaaaatcactgcctaatataaaacatctgggtaatctcagggttggtatcttgtctcttcccttgagacttaatcagactttcctggttctttttgtgtcaagtaattttgtatcatatcatgaacatttgggatataagatgctatgagactctgggtcttgctccaattctatgaagaacaggatgtatttgaatctgtcctagatgtgcatcagccaggagccagcctgatatctgggtgggctatctatcccacagctacttggtatgctgtttagggtcagatctatgttgtatggctcaagggtgggcccagaagttcatacataacatcatgcggtccctttatgagctccctcttatctgtgaagggccccactctctgacactctactaccccacctccatcccccactgccacccggtcctctgactagaaagtcttgtacttcctgcaactagatctgtctctgcgggccaaacagcaagagaattaaaaaaagaaaaaagcaataggaatcattctacactgtttggaccatagttcctctgatcagagaggattcacttcccttggatttttaagtgtctggttggctgctgctgccaccacaaaactgcaggttcagaagagaggatcatatggcagagctgggagggaagaaaaacaagacagagcatttcttccactttctctgtctcatagagcctctcttcctgctccttggatcagaaatttcccttggaattcttgttgtttgcacctgtgcacagtcctaggattcatgctgtctttgaattcagactgggagatacaaaaagtggggaaaggatccaggaaactcattgccagagcttttgtacttaaaagttctattttccttctccagtctatttgctatcatttacctttcagagtcctcagacagcttctccaggcactctgcccaaggtttttagacacattcagtaggagagaaaggacagtatatttacttcatcttaaccacaactggaacctactatcattcttggttctgttggatgcaaattctaaggtgacagttacttgtattttgatgatattgttctactgttttctggcttcagttgttcttaggaggtctgctattaacacaaaaggctacctattgtatgaattctacatgcatatgtacatgatatttacatgatatttttacacgatattctagaagaggcaaaactatggtatcagaaagcaaatcagtgtttacctagggctgaggaaggaactgactacaaaaaagcatgcggggagtttctggagtgatagaaactcccctctgccttaaacgtgatgacggttacacgactatatatagttgtccaaattcatcaatctctacacttcaaacaggtaaattttactgtatataaattatacctcaataatgctgggggcggtggggggagtaaaaagaaagtatggtatcagtctgtattgttcttttataggtaatgtgtctttttttcccagctgctttacacgtttgtatttggtactgcgtagttttactatcatgtatttagtaagatttcttttttaaaaaaatttaaactcctatttgatatacattgtccttcctgtttctgtgggtttatgtcaattctgaaaaattctcagatatcatcatgttgaccactctcttcccattctatctagaactccaattagatgcatgcataactttttctttctagctttctattcatgtctcaacttttctttcatattttccatttccaactctttctgtagtacctttgggttatttctttagatatctcatttactaattctctctcttctgctcccatataccatttatctattaatttttaaatttcaatgatttttctaaattcggtcatttctgacattttctggatccttattcattttcaatctatcttttatttttatttttttttgagacggagttttgctctcgttgcccaagctggagtgcaatggtgtgatcttggtytactgcaacctctgcctcccaggttcaagtgattctcctgcctcagactcccgagtagctgggattacaggcatgtgccaccatgcccggctaattttcttgtatttttagtagagacaggatttctccatgttggtcaggctggtctcaaactcctgacctcaggtgatccacttgcctcagccacccaaagtgctgggactacaggcatgagccactgctccaggctatcttttatttctttaaatgttttatgtatagtcatttcatactctgttttggaaacatcagtatctacagttcgtagagattg

SEQ ID NO: 675339 - DNA, 656 bp, Homo sapiens
aagattcagtttcaacatcgccactccccgctgccccctgcagttggcagagttgttagtacaggttgctgtttaccaagcacttgacttaaacctccatagatgtacacaggcagaaacaatgatgatttgcatctgtgtgtgtgtttgtgcatacacagacctagtatatagagacaatagtttctggacagtgatttatatttgctcctacaaaaataatgaccatgataatgatgatgacaataaagtcttgctaatttttcccagccctcgtgtaaataggaacacaataagtgtttgttgaacaagtgaacaagtacattgctccaagtagagaaggtaagaggaagggaggggagtrgaggagaggcactgaaaaaatctcatcctacgggccatggactcacagggtggtcagcatccagttccgctccatagctgagaatctgattggcaaatctgtccagctcttgaatggttcttgggaaccagggcactgaaacacagagaaggcaacgtcctgagtacagattggcagaacatggccaaaggccttgctgagatcagaagtggggatcccagccaatggtgatggcaagtgggctggcttccagataacccccaaattactatcgttcaaaagttaaactcca

SEQ ID NO: 675340 - DNA, 656 bp, Homo sapiens
aagattcagtttcaacatcgccactccccgctgccccctgcagttggcagagttgttagtacaggttgctgtttaccaagcacttgacttaaacctccatagatgtacacaggcagaaacaatgatgatttgcatctgtgtgtgtgtttgtgcatacacagacctagtatatagagacaatagtttctggacagtgatttatatttgctcctacaaaaataatgaccatgataatgatgatgacaataaagtcttgctaatttttcccagccctcgtgtaaataggaacacaataagtgtttgttgaacaagtgaacaagtacattgctccaagtagagaaggtaagaggaagggaggggagtagaggagaggcactgaaaaaatctcatcctacgggccatggactcacagggtggtcagcatccagttccgctccatagctgagaatctgattggcaaatctgtccagctcttgaatggttcttgggaaccagggcactgaaacacagagaaggcaacrtcctgagtacagattggcagaacatggccaaaggccttgctgagatcagaagtggggatcccagccaatggtgatggcaagtgggctggcttccagataacccccaaattactatcgttcaaaagttaaactcca

SEQ ID NO: 675341 - DNA, 477 bp, Homo sapiens
cattttcttgagcgcttattatgcaccagatactgtgctaagtgctttactttcatcatctcctttaattcgcaaaacagtcccaggtggtagacattattgctgttcactgatgagcaaataggctcaaagagacaaagtgatttgctyaagatcactgagctagctgagccgaaagaacaattttgcagccgatgcacttcaccaaaaagcaatgctgggcttagaataaaggtgtggtggtggtgaaggggtgcttttaaattttagattccttttctcccaccttgagaaggaaaggaagcgtgacaaactaaggctctaaaggtgcttgaagaagatccctaggacagccttgagtctgccccatcctgagcatccctggatttagggatagtcactttttaacctaagttctcttcacataccccttattttctttagtgaaggctgcaggtcccttccccctacccggtc

SEQ ID NO: 675342 - DNA, 641 bp, Homo sapiens
cacagtgcaggggcagcacaggtcacaaacacccctcccccccccaatgcagaaagcacatcagaatgccaaatgagtgagagggacagctgcttgctctaattgctttttcattttacttgagtcattcataaatgtcaaaaccctgtttttcatgataaatgacttgagacaccacacctcagaagtgactatgaccacaacccacccatgtgttgcgacactacagttgagaactctggcctaaaggacaagtcacttgggtgtgacacataaagtccttcgggacttgcacccgcccctctccacggtcagctcytgtctgtctgctatgtgcagccacattccagccacagcagatggcccacagccttgggaacatgccaggccatgtcatacttctaggagtctggttgtgccatcctcttgccccataatgttcttcccatctctttgtctgtagtgaacacctgctcagcctataacacccagtttgcacatatcctgtgtgaagtttcactgacccagccaagcagaacacaccaaatgtgggtcctgccttcaaacagtttggtccagtacagtgattctcaaccaggcaatcttcccctccagggggcatttggcagtgtctagagaaa

SEQ ID NO: 675343 - DNA, 670 bp, Homo sapiens
attcctgagagcagagacttcatgacctaatcacctctttttttttttttttttttttttgagacggagtttcgctctttcgcccaggctggactgcagtggcgctgtcttggctcactgcaagctccacctcccgggttcacgccattctcctgcctcagcctcccgagtagctgggactacaggcgcccgctaccacgcccggctaattttttttgtatttttagtagagacagggtttcaccgtgttagccaagatggtctcgatctcctgacctcgtgatccgcccgcctcggcctcccaaagtgctgggattacaggcgtgagccaccgcgcccagccgacctaatcacctcttatctcacctctcaacackgttgcattggagattaagtttccaacacatgaaatttgagggatacattccaaccatagcaccaagggataacctctcaagtatttggggaaaactactccctgatcccaacatttttttcagggtggttacctttcttatgaccaagaacaggaaaaagttgattgacccagggcccctatcagttgatttcatggcatttcccattgtatttttcccacattgcagaaaagaccataaacattgagctgcttaaatctcacagggatgatttctacttatacttcctagta

SEQ ID NO: 675344 - DNA, 638 bp, Homo sapiens
atgctggctaaaactggcctgttcgaggatttggctattatctctcccctgatttatctggaaggttagataaacaacttagtttcagtttggtgatatgaaactttagcatgagtgactccattttggtttggtctgatggggtctagtgcaggaacctagtccaaatcagtggcctcctataaattttatttaataggaggtaatgatcccaaaagtttaatgtgagaatttagaaaatcaactaaaaaaagcctagttatcagctgggcgtggtggctcatgcctgtaatcctagcactttgggaggctgaagcaggcgaatcacgaggtcaggaattcgagatcaacctggccaacatggggaaaccmagtctctactaaaaatacaaaaaattagctgggcatagtggcaggcgcctgtaatcccacctactcgggaggctgaggcaggagaatcgcttgaagctgggaggtggaggttgcagtgagccaagatcgagtcactgcattctagcccaggtgacagagtgagactccgtctcaaaaaaaaaaaaaaaaaaaaaaaaaaagcccagttatccaaatctgtaaatcaaacaaaatctagaatatatagacttttttagtgtagaaaa

SEQ ID NO: 675345 - DNA, 638 bp, Homo sapiens
atgctggctaaaactggcctgttcgaggatttggctattatctctcccctgatttatctggaaggttagataaacaacttagtttcagtttggtgatatgaaactttagcatgagtgactccattttggtttggtctgatggggtctagtgcaggaacctagtccaaatcagtggcctcctataaattttatttaataggaggtaatgatcccaaaagtttaatgtgagaatttagaaaatcaactaaaaaaagcctagttatcagctgggcgtggtggctcatgcctgtaatcctagcactttgggaggctgaagcaggcgaatcacgaggtcaggaattcgagatcaacctggccaacatggggaaacccagtctctactaaaaatacaaaaaattagctgggcatagtggcaggcgcctgtaatcccacctactcgggaggctgaggcaggagaatcrcttgaagctgggaggtggaggttgcagtgagccaagatcgagtcactgcattctagcccaggtgacagagtgagactccgtctcaaaaaaaaaaaaaaaaaaaaaaaaaaagcccagttatccaaatctgtaaatcaaacaaaatctagaatatatagacttttttagtgtagaaaa

SEQ ID NO: 675346 - DNA, 638 bp, Homo sapiens
atgctggctaaaactggcctgttcgaggatttggctattatctctcccctgatttatctggaaggttagataaacaacttagtttcagtttggtgatatgaaactttagcatgagtgactccattttggtttggtctgatggggtctagtgcaggaacctagtccaaatcagtggcctcctataaattttatttaataggaggtaatgatcccaaaagtttaatgtgagaatttagaaaatcaactaaaaaaagcctagttatcagctgggcgtggtggctcatgcctgtaatcctagcactttgggaggctgaagcaggcgaatcacgaggtcaggaattcgagatcaacctggccaacatggggaaacccagtctctactaaaaatacaaaaaattagctgggcatagtggcaggcgcctgtaatcccacctactcgggaggctgaggcaggagaatcgcttgaagctgggaggtggaggttgcagtgarccaagatcgagtcactgcattctagcccaggtgacagagtgagactccgtctcaaaaaaaaaaaaaaaaaaaaaaaaaaagcccagttatccaaatctgtaaatcaaacaaaatctagaatatatagacttttttagtgtagaaaa

SEQ ID NO: 675347 - DNA, 650 bp, Homo sapiens
ttgagagcccacactttgagaagcacaattttatgaatattttctgatttatttttctcttgttgaaatgaaaatagatgcttttttttaaataaatgaaatcggatatgagttgaaaaccaattatacttcttatttcctcagggtaaggaaaaatgaaattgaattttaaccagcttgcaactcacttgcttggtaaatgaaatttaccgcttaaagataaaaacataatcactaatttctaattttagtcaattcccaattatccattctggatagaaggtaggagaaagttaagacagaaagaaagaataatccccaaatcagttatcttagggcttcaaatatgttaatagcagatgtttataagtacatacttattcactttttcgtactcttctccatacatggtccatgttagaaatgagtacttagggccgggcaaggtgcctcatgwctgtaatcccagcgctttgggaggccaaggcaggtggatcacttgaggtccggagttaagaccagcctggccaacatggtgaatccccgtctctaccaaaaatacaaaaattagccaggcatggtggtgtgtgcctataatcccagctattctggaggctgaggtgagagaaccccttgaacccgggaggcat

SEQ ID NO: 675348 - DNA, 655 bp, Homo sapiens
atcaatctttcctttcatgaattactcttccggtctcaagtttaagaatttttttatctacctctagattccaaagttttctctcttcttaaatagccttatactttcatggtttcacattttacatttaagtttatgatctactttgaaaatcttgaattaattttttaataaagtgtgatatttaggctgaagggttttcatttgtttgtttcttttattggtttgtttcttttttttttttttcattttaacctataaaaatgtccaattactccacagtcatttaaaaaggcaatccttcttcaattgaatttccgcctttgtaaaaaatagttgaaaatactgatgtaggccaggggctgtggctcacgcctgtgatctctgcactttgggaggccaaggagggtggatcacttgaagtcagkagttcgagaccagcctggccaacatggtgaaactctgtctctactaaaaatacaaaaaattaaccgatcccagtggtgggcgcctgttatcccagctactcaggaggctgaggcaggagaatcgtttgaaccccggaggtggaggtttcagtgagccgagattgtgccgctgcactccagcctggacaacagaagcaaaactacgtctcgggaaaaaaaaaaaaaaa

SEQ ID NO: 675349 - DNA, 601 bp, Homo sapiens
tctgtataagttctagcatgcagtacatttatgaaccttactwttataatatttcttattcatacaattcaaaaattatgaaaactacatatgcaaaggataaatggaattctgtctttgaggaggaagaattttctatcatatgttaatttttcctgaaataatactaaatgtttaaatttcatagtgaagctcctatttatgtacaaacacttaataaagagaaagtagttgaacttgcttgataactgaggtaaaatatgtgagatggaagcaacctggtaacaagggccatccctggtcctgtttaagtgtcaggtactgtaccttcaaatctttacagatggttttctctacagtcttggatactggcttaaaaacttctcaagccagtaaaccatggtaaatgtatggtttaatcattttaaaccattaatcattaaacaaaattattgatcactttaatcattttgttttctctctcttaggtttcactctccttcactggctgatacccagtgtcatacaaagcacagtttcatatatattactccctttttatttatgttttatgtttgtttacatttgtgtttattttgct

SEQ ID NO: 675350 - DNA, 609 bp, Homo sapiens
cactttacatacttgtaaaaaacagaaattccagtgatccataacagaacaattaaatcagtacatagaagagttgggaaatagattctatacatgaaataaactaccacwgtagtttgagaatcacagagctagaaaagagactgaaatatctcttacaaagatattttaaatgacaatctgctgaccacaccttaaatcctttctcaaaattaattctaagaatttgataaaaagacagatgctcaggtcatttgctcagaggttcatataccatagctggagtttaaccaacagtctgtgttttttaaaagtcttgtagtgattcctttgtaagagtagaattaagaatcatttattatttttaataaatatgttggagactctcatgaaattgatggtttattccaacacataaatttaaaataaaaataatttatcaattttgctcattaggattatatttgatgcatttcagatataatttagaaataattacacatattctttaaattagtataatatttgctcacttaaaaataatacatgcaagaggatactaaatggtatgatatgaaaagttaaactccttcaaatctctactttgca

SEQ ID NO: 675351 - DNA, 579 bp, Homo sapiens
tgcctggccctgcatgtcattatgaattgacaatgtactgatcacacggtttaaaatgttttgtgctaaaatgttaatgtgttaagatggttaaatatacttacccatatgatggacatttaggtatggggactcatcctcacttcagtttggtgtgttgtccttctaatgtggagccttctggttcattttctcccggtcgtaaaattctgttttgtgcggcatcagtgaaggaatccaggcatttaactactycttgcaggtattttcaaccagttccttgaactttcattcctgttccttatgtctgtcttctgaaatttgcaaagactctgcttcctgggcctttctaggattggcttttagttcttcctctctgctaaggcaattaccatgcatccatctctttttcttttttaacagagatgaggtctcatcatgttgcccaggattagtctcaaactcctgggatcaaggcctcccaaatgctgagattacaggcatgagccactgtacctggcccatccatctctttctcatcttctttatttttattttttgagatggagtctcactctg

SEQ ID NO: 675352 - DNA, 692 bp, Homo sapiens
atttcttcccctctggtatccttcggtcagaactcaaggaagcccaaaccttgaaagttgacactggggcaaacaaaaaatgccccagtagaagctctctagttaagaagagtaggaaatgaatatcctaagtcggagagtgcagaaaatgycattattcttttttcctatttttcacctttcggttctttcccatcccagcacccaaacaattctgtggtgatgacagtggcggcagcagcagggacacacagagatctgaaactctcaaggaaggaaactttcctctccaatcaaatgagttgtggtcccaaaagagagtggtatctaataactttttatactctacaccctcttgccattttccgcagacacaggtgcatggcaaggcacggtaaataaaagcccagatttctggtcagagaacctaaaaaggagatcccagagaataagtaccaaggagaccatggagggagagagcttgggaacgtcaccacaacaagttgtttataaactcctggactcactcacaagctgtgtatacgtggagctaacattaaacagcatatacagacttcgataagtaaactaccaatacccaagtcccaggctggtcactgaatggaacacacatgacctgaacaatacttttgctattgaaaactaaacgaacactgtaccccaaacacaga

SEQ ID NO: 675353 - DNA, 525 bp, Homo sapiens
tctttgaacattgctctgaaagcgggaacgctttctcataaagagtaacagaacgaccgtgtagtgcgactgaagctcgcaataccataagtcgtttttgctcacgaatatcagaccagtcaacaagtacaatgggcatcgtattgcccgaacagataaagctagcatgccaacggtatacagcgagtcgctctttgtggaggtgacgattacctaacaatcggtcgattcgtttgatgttatgttttgttctcgctttggttggcaggttacggccaagttcggtaagagtgagagttttacagtcaagtaatgcgtggcaagccaacgttaagctgttgagtcgttttaagtgtaattcggggcagaattggtaaagagagtcgtgtaaaatatcgagttcgcacatcttgttgtctgattattgatttttcgcgaaaccatttgatcatatgacaagatgtgtatccaccttaacttaatgatttttaccaaaatcattaggggattcatcagtrtacagta

SEQ ID NO: 675354 - DNA, 662 bp, Homo sapiens
gatccaagaaccctctcttggaatctggatagggtccccttctgataacagggggagaagatggaagaggtggcagtgaagggaaggaggaaagagaaggtttagaaaaggaagacaaagcaattcaaattctattgagggtagagagtcttccatttgtctctggccagcactgatctcctttctgaatgtagaattttttttttttttttttcgagacrgagtcttgctctgttgcccaggctggagtgcagtggcacgatctcggctcactgcaagctctgcctcatgggttcacaccattttcctgcctcagcctccccagtagctgggactacaggagcctgccaccacgcctggctaatgttttgtgtttttttagtagagacagggtttcactgtgttagccaggatggtcttgatctcctgacctcgtgatccgcctgcctcgggttcccaaagtgctgggattacaggcttgagccaccgagcctggccatgaaagtagaattaatgtgtctttgcaaaggcttggagcatcatcaaggctcattgttgaacaaggtaaggaaactatagcctgtcttgtatctaagccctggtctttactggcactgcctcctctagagtgggtaaagggtctgcttggtgagaccctcaca

SEQ ID NO: 675355 - DNA, 662 bp, Homo sapiens
gatccaagaaccctctcttggaatctggatagggtccccttctgataacagggggagaagatggaagaggtggcagtgaagggaaggaggaaagagaaggtttagaaaaggaagacaaagcaattcaaattctattgagggtagagagtcttccatttgtctctggccagcactgatctcctttctgaatgtagaattttttttttttttttttcgagacagagtcttgctctgttgcccaggctggagtgcagtggcacgatctcggctcactgcaagctctgcctcatgggttcacaccattytcctgcctcagcctccccagtagctgggactacaggagcctgccaccacgcctggctaatgttttgtgtttttttagtagagacagggtttcactgtgttagccaggatggtcttgatctcctgacctcgtgatccgcctgcctcgggttcccaaagtgctgggattacaggcttgagccaccgagcctggccatgaaagtagaattaatgtgtctttgcaaaggcttggagcatcatcaaggctcattgttgaacaaggtaaggaaactatagcctgtcttgtatctaagccctggtctttactggcactgcctcctctagagtgggtaaagggtctgcttggtgagaccctcaca

SEQ ID NO: 675356 - DNA, 662 bp, Homo sapiens
gatccaagaaccctctcttggaatctggatagggtccccttctgataacagggggagaagatggaagaggtggcagtgaagggaaggaggaaagagaaggtttagaaaaggaagacaaagcaattcaaattctattgagggtagagagtcttccatttgtctctggccagcactgatctcctttctgaatgtagaattttttttttttttttttcgagacagagtcttgctctgttgcccaggctggagtgcagtggcacgatctcggctcactgcaagctctgcctcatgggttcacaccattttcctgcctcagcctccccagtagctgggactacaggagcctgccaccacgcctggctaatgttttgtgtttttttagtagagacagggtttcactgtgttagccaggatggtcttgatctcctgacctcgtgatccgcctgcctcgggttcccaaagtgctgggattacaggcttgagccacygagcctggccatgaaagtagaattaatgtgtctttgcaaaggcttggagcatcatcaaggctcattgttgaacaaggtaaggaaactatagcctgtcttgtatctaagccctggtctttactggcactgcctcctctagagtgggtaaagggtctgcttggtgagaccctcaca

SEQ ID NO: 675357 - DNA, 600 bp, Homo sapiens
ggtgagtaaggaagcctcagctatggtttgactacaactccatgagagactacaactgcccagctgagcccagcaacatgagagattataatacataatcactgctgttttatcccacaaagtgtatggtggtttgtgacacagctgtaggaaatcatcacactatcaagatgcgattctttaagcatgtaaagaagtaatacccacaaattccatatctggcaaaactatccttctgcaaggaaagagaaataacattctcatagtaaagaaaactctttaaaaagtccctggcttamagaactggctaaaagaagttcttcatacaaaagaaaatgataaaagaataaatcttggagcatcaggatggaaaaaagaacaatggaaagagcaaatctgggtacatacaatagaccattgttttcctcatgtgctttataaatcatatttgatgattgcaacaaaaattatgaaactatctgatactcaggactgacacgtgaaaaggcagagaaggcaaagagaccccactggaagtaagattttcatgcttcactcaaagtactggaaattctggtactcttagaccatgataagtca

SEQ ID NO: 675358 - DNA, 653 bp, Homo sapiens
tccccaatttccttggtgtgagttgacgaacctcaggtatttaccccacacaacaacaccgcttcattgtgaccaacaccagtggaaaggaagggaaagaagcaatgttgagcagagggagacgttgagccatgttgaagtctcaacagaagcttcagccaaccctttggggagttctcaagatggaatgaccctctacagctagcccatattagggtgagaggacctagcctttacatcctgacatccatcagtcatgggwtgtaggctgttccaggaattgggtgtggcctggggtgaggtgtctctctgctgctaaggtagttcccatagagagtatctgttggtagcatcccagcaactgggataacacatgttttattcctgggccacgacattccctgtatatcaagagctcagagaagacctgttaaagagtagtgtcctcttcttttctggggtccagtgttatatttggttagaaacactgattgcttaggaagatttcaaggtgatgtacatgagattcttatgatctttctagtctcgttgaaatagaatgtacaatacatcctttactgagagtggaacttgtaattgtacatagaaacttgaatagaagtttgatattatctccccgaggagtacaggca

SEQ ID NO: 675359 - DNA, 2515 bp, Homo sapiens
  misc_feature 1373, 1374, 1375, 1376, 1377, 1378, 1379, 1380, 1381, 1382,1383, 1384, 1385, 1386, 1387, 1388, 1389, 1390, 1391, 1392,1393, 1394, 1395, 1396, 1397, 1398, 1399, 1400, 1401, 1402,1403, 1404, 1405, 1406, 1407, 1408, 1409, 1410, 1411: n = A,T,C or G
  misc_feature 1412, 1413, 1414, 1415, 1416, 1417, 1418, 1419, 1420, 1421,1422, 1423, 1424, 1425, 1426, 1427, 1428, 1429, 1430, 1431,1432, 1433, 1434, 1435, 1436, 1437, 1438, 1439, 1440, 1441,1442, 1443, 1444, 1445, 1446, 1447, 1448, 1449, 1450: n = A,T,C or G
  misc_feature 1451, 1452, 1453, 1454, 1455, 1456, 1457, 1458, 1459, 1460,1461, 1462, 1463, 1464, 1465, 1466, 1467, 1468, 1469, 1470,1471, 1472: n = A,T,C or G
gaatgtgatattttgttccttctgacataaatgcacaattctgtcttcyagtctttgtctatagtctgttttagtatattctatattttagaatgatttcacttattatttaatattataaaattctcccatattgaattagagtagatcatttagatttctgaacatttaaataaacttgtctatctaaaatttgacatatatagagccaacgatagacagtttgctaacatagatcactgaagtgctttcaattatccatagtcccccaacagacattcattgtggatttttaatttggaatcagagctttttattagtactctattttaaatttgtctgttcacttaaaataagcagtgttttgcaagttagaatctgaactttttggagtaattgggaagcaaataaagctgcaccacatctgggcaatattgtaaatatttgaagaactttgcggatagttaaataaatggctcattacaacatgcggagttttcatgaaactgcctctttagagcacagatttgattattcagagaataatctgtcactcctcattcccgtcaaccatccattcttctgtattctttctccccctggcacttaaaagcaggactgctggcatccctttcctctctgattcctggtttccagacatacgaaaagccctacttgctaacttgattaaaccattccattaagtcttgattcagatggtttttgtttctacttaataataagttaaggaaaattccatttatctttgatagaaaagttaagcacatttcaaaggcaattatcagaggcaatgttgtaatttttaaaaatgacttttaaaaagttataacatttgctcatttatatttgaatgcttgacatttcatgacttctgaatgtgatattttaatagccaacacctttcaatacatctgttcaattctttgtttgccaaacattcttctcagtgcttgtatgtaagtagtttttcctgagagcgtaggaaatgatcacctccctcattcaggtgcttcgcatcatcataatttccccatattcttgttctgactcttaccattcagtatcagttaggtctggacctctgttactaagtagaaaatgttaaatttatcgatataaatatatttattaatcaaaaagccaagattgttttgcaaccttaaaccttagttttacttcagatagtaaacatcaaataactcttagaatgtcccttcccaagagtaatgactcacttatttttcttaaataccttgattgtgagatactttagtgatgacatatctgacaatgtgcattaaatggtgattcagccttttgattttatggttttttatgtttcttcattgtannnnnnnnnnnnnnnnnnnnnnnnnnnnnnnnnnnnnnnnnnnnnnnnnnnnnnnnnnnnnnnnnnnnnnnnnnnnnnnnnnnnnnnnnnnnnnnnnnnnatggacttctttcttaaaagggttataccagcaaccggaagccctgaagtgggaacagttgagtcagagttttttaaaggttgcagaggcagggaccagctgaagcccagagccgagttagagggactttgggatggttccagctgagagcatacagattgagcacatgcatccaggaactcacatgccagcgccagatccctaaccacgctgacacagtgcatcctctcctgcctaccaatgacccttcaatagtgcagaggtaagagaccgtgtggctcttgtctctcagtcgcagaagcagtgccttggtggaggtgtgagccagcaggtggctgttggggtggcatgccacataagccacgcattttagaccctctcttgtagggctagatgctgaaatagtcccattctgagcaaacaggagaagagtctgcctcatcaaccatatggaaacagaacctgtgagattcctatcagaaataaagtcactcaagtactcttcaaagaaggggaaaaaaagagtttccatttgaaaatgggcaatatgattacatattctctgatttggaaggagatggattaatcgacaattataagcaatctcttcaacagattatattagatgagcattctattttttggtaacttttaatacatggtggaatttttacgtgaagtcttcagcctctccttgaaactcatgttacaactggaggaaaaagtcagtcagttatggccagctgtaatttctgcccttaataacatgctctactgagcaaaaacacctctgctgcagtgaatccccagtgtggaagggagacttgtgacagggcacagggctggggcctaagacctaatccccacaggccctcagagaaaccaccataaagaactccagaggcatcaagttgggatttataaggcaggacagaaggactccacgactttgggacacgaggtggccaggcctggagagtggaggctgggcagcactgcagaatcctcagcctggactgggcaccgagcctcagtcaggaggg

SEQ ID NO: 675360 - DNA, 3830 bp, Homo sapiens
tggaacagcatctctcacatcttctcctgtcttccagatgttactgagttgttaccttctcattcatagcagttcagcaatgaagatttaattgaaatgtaagaaaaagggtccattggacagtcaccatggcaactgcccctcccacaatatttaccattcaaaggcttctgcaggcattcatgtacaaccaattagcaaagaaagattccagattcacaaccctaattttgaatgcagtttgaaggtgcttagagacataaagaatgcctgtgctttctatagggagattactaggaaaagaattgtcttcagttccagcttctgtggcaagatgatttgttcagacattagagtatattttgtttttagtgtaatttttcttccatttccaccatctgctgagggttgccagcccacagtgcttgctggtctcaagagtggtttatattcctgggcataaggcagaaactgcttaaagatcatctctagtcttgcccttagtgaaagctcaagctcactgaagagttttaaactataaatctaagtggggaggggcatggcgaggagaagccaattctctttggaggcaagaggaggagtgagcgaaagcaggagatgctctgcaaagagggcagacctgtaaccactgctgaaaacatctaggttggtgacagaacctggtcgtgatggctggagctcttcaggaagtgcagccctaggcactgggattcccggtcctaacaaaaaatcccagtctcaacggcagaaaagaccagtggctcgcccacttccacaggaccatatttctgacaccctaaggcatctcagccctaaccactatggcctgaggattgttggtgcttccaggcatataacccctgggatacatgagtgactttatggtatattagagtgtcagaagaatcttaacagtaactgaagttacgttttctatcattttagctggccaagagcttgaaattatttttatttttaataatgcgacatccaatttgacacatcagtttgtggattaaaatttacatccagcgcacgtttttagactagtattgttaagaagcctcagccagttcagctcctaacaaaaatcctaccacacacacacacaaagcacatttgtgacatggtttttatattgtttttattttgcccacttagtactttacaaacacattttgctttatttcttttaatgtattttcatgatcaattatagaacttttatgggagaaaataggtttcctgaaaagatactttggttatgacttttcatcagtagggattaagtgttaagtattttgaagtctgacttgtcatattcgccagttagttcaaatcaaggatggcctggatggttctctactgccctccagtgggaaagctagatggaggtcaaagcatttttgaaatggaaaatggactggtttatgtgtctctaatattgggacgtaaaatatatagacagaaggagataaaagaactgaaggatgttttcttctcagtgtgttcagaaataagtgaactgttgaacaatgaaccattcagcaccatgacttcttacaacttcaaaaggatattgtaaatactgtatttaaaaccgaggtcttggccaggcacggtggctctcgctygcctataatcccaacactttggcgggccaaagcaggaggatcacttgaggtcagaagttggagaccagcctggccaacacggtgaaaccccatctctactaaaaatacaaaaattagctgggtgtggtggcatgtgactataatcccagttacttgggaggctgaggcaggagaatagcttgaacctgggaggtggaggttgcaatgagccaagattgcaccagtgcactccagcctgggtgacagagtgagattctgtcaaacaaaaaacaaacaaacaaaaaaaaaacaaacaaagaaggaaggaaaaagaaaaagaaagataaaatggaggtctttctgccaggacaaaaatagtacacaactttgaacttaaacattttaagcattctgagtctctatgtatacttatataatcttgctttacttctgtataattatttaattatgatcttctagtctattatatatcataacacccttatttcttcaaagaagactattaaagggctatgaagaaattatgcggcttcttagtttctccgtgaatctgattaatatccgtgataggcttgcattaaaaagtttattttgtttacagaaaaagtttgccaaaccctgctaagtcagaattcccaccacatttgcatcctgctttaaccaactgatagatatattttacagtgaaggaaaaacttagaaaaagtacattttactaacataaaaacaaacaaaaaaaaaccaaaaatggttatacaaaaggagtggattaatctctgaatactgactgattcttacgtgctcatttccccctgtacttctaaatatacttctagaactgatgtgtttaaaacagattgatgtctgtgtcaggagcagggcaataaaataaactcagttgctcaaaaaattagtttatttagcatttctgcattatttaaatgagtcttattctattcttttaaaaatctgtctttaaaatatccaaattaacatattaatcactaacagacagtggtggttataaataaaggctctaattatgttgcatttttaaatatattttcaaaatatattaattcctcttgaacaaacaaaaaatatgaaaacactcaccgctcccctctggtaaacaagatgccaactctagggtacggtggaaagacatactggatactttcactgtgttcagcaaatggattgaacatggagccaaaaacatgcgaagcactgggacaatctgaaaacaacaacaacaacaaaaaaaacaagctttatcatttcacaagaccttttccaggttgtaaaagcaagagaggaggcaagaaaaacagaaaatttcaaactgatttgaaaatttttaaaaagtgatagagcctgtattacataaaacttatgagacagttgactctaggaaattataacactttgccaatgtttcctgggcaagctgattattaaaaataatacctaaaatatattgaatatttcctgcatactaagtgctatgctaagatcatctcatttgaattcagaagacccatatgaaatgggtaccatttttattaccattttacagataaagaaattgaagatgagagaaactggccaggcacagtggctcatgcctacaatcccaacactttgggaggccgaggtgggcagatcacttgaggtcaggagttcgagaccagcctggccaacatggcgaaaccctgactctactaaaaatacaaaaattagccaagctatggtggcgggcgcccgtaatcccagctactggggaggctgaggcaggagaattgcttgaacctgggaggtggaggttgcagtgagctgagatagcgccactgcactccagcctgggtaacagaaggaggttgcatcttgaaaaaaaaaaaaagagagagagagagaaaacttaattaacttgctcaggtaattggcagaagaaagatcaaacttcagaggatgatttaacaatagcaagtctggtttgtttggaagcagaagccttctaaaactcttatttactttttatatttactttttatatttactacatttttgtttattagacatgtgaggtttctttccagatgttaaacttttttcatgtacaatctacattttattgcacaaaaatgcttaaaacaaagattcgagactcaaaga

SEQ ID NO: 675361 - DNA, 3830 bp, Homo sapiens
tggaacagcatctctcacatcttctcctgtcttccagatgttactgagttgttaccttctcattcatagcagttcagcaatgaagatttaattgaaatgtaagaaaaagggtccattggacagtcaccatggcaactgcccctcccacaatatttaccattcaaaggcttctgcaggcattcatgtacaaccaattagcaaagaaagattccagattcacaaccctaattttgaatgcagtttgaaggtgcttagagacataaagaatgcctgtgctttctatagggagattactaggaaaagaattgtcttcagttccagcttctgtggcaagatgatttgttcagacattagagtatattttgtttttagtgtaatttttcttccatttccaccatctgctgagggttgccagcccacagtgcttgctggtctcaagagtggtttatattcctgggcataaggcagaaactgcttaaagatcatctctagtcttgcccttagtgaaagctcaagctcactgaagagttttaaactataaatctaagtggggaggggcatggcgaggagaagccaattctctttggaggcaagaggaggagtgagcgaaagcaggagatgctctgcaaagagggcagacctgtaaccactgctgaaaacatctaggttggtgacagaacctggtcgtgatggctggagctcttcaggaagtgcagccctaggcactgggattcccggtcctaacaaaaaatcccagtctcaacggcagaaaagaccagtggctcgcccacttccacaggaccatatttctgacaccctaaggcatctcagccctaaccactatggcctgaggattgttggtgcttccaggcatataacccctgggatacatgagtgactttatggtatattagagtgtcagaagaatcttaacagtaactgaagttacgttttctatcattttagctggccaagagcttgaaattatttttatttttaataatgcgacatccaatttgacacatcagtttgtggattaaaatttacatccagcgcacgtttttagactagtattgttaagaagcctcagccagttcagctcctaacaaaaatcctaccacacacacacacaaagcacatttgtgacatggtttttatattgtttttattttgcccacttagtactttacaaacacattttgctttatttcttttaatgtattttcatgatcaattatagaacttttatgggagaaaataggtttcctgaaaagatactttggttatgacttttcatcagtagggattaagtgttaagtattttgaagtctgacttgtcatattcgccagttagttcaaatcaaggatggcctggatggttctctactgccctccagtgggaaagctagatggaggtcaaagcatttttgaaatggaaaatggactggtttatgtgtctctaatattgggacgtaaaatatatagacagaaggagataaaagaactgaaggatgttttcttctcagtgtgttcagaaataagtgaactgttgaacaatgaaccattcagcaccatgacttcttacaacttcaaaaggatattgtaaatactgtatttaaaaccgaggtcttggccaggcacggtggctctcgcttgcctataatcccaacactttggcgggccaaagcaggaggatcacttgaggtcagaagttggagaccagcctggccaacayggtgaaaccccatctctactaaaaatacaaaaattagctgggtgtggtggcatgtgactataatcccagttacttgggaggctgaggcaggagaatagcttgaacctgggaggtggaggttgcaatgagccaagattgcaccagtgcactccagcctgggtgacagagtgagattctgtcaaacaaaaaacaaacaaacaaaaaaaaaacaaacaaagaaggaaggaaaaagaaaaagaaagataaaatggaggtctttctgccaggacaaaaatagtacacaactttgaacttaaacattttaagcattctgagtctctatgtatacttatataatcttgctttacttctgtataattatttaattatgatcttctagtctattatatatcataacacccttatttcttcaaagaagactattaaagggctatgaagaaattatgcggcttcttagtttctccgtgaatctgattaatatccgtgataggcttgcattaaaaagtttattttgtttacagaaaaagtttgccaaaccctgctaagtcagaattcccaccacatttgcatcctgctttaaccaactgatagatatattttacagtgaaggaaaaacttagaaaaagtacattttactaacataaaaacaaacaaaaaaaaaccaaaaatggttatacaaaaggagtggattaatctctgaatactgactgattcttacgtgctcatttccccctgtacttctaaatatacttctagaactgatgtgtttaaaacagattgatgtctgtgtcaggagcagggcaataaaataaactcagttgctcaaaaaattagtttatttagcatttctgcattatttaaatgagtcttattctattcttttaaaaatctgtctttaaaatatccaaattaacatattaatcactaacagacagtggtggttataaataaaggctctaattatgttgcatttttaaatatattttcaaaatatattaattcctcttgaacaaacaaaaaatatgaaaacactcaccgctcccctctggtaaacaagatgccaactctagggtacggtggaaagacatactggatactttcactgtgttcagcaaatggattgaacatggagccaaaaacatgcgaagcactgggacaatctgaaaacaacaacaacaacaaaaaaaacaagctttatcatttcacaagaccttttccaggttgtaaaagcaagagaggaggcaagaaaaacagaaaatttcaaactgatttgaaaatttttaaaaagtgatagagcctgtattacataaaacttatgagacagttgactctaggaaattataacactttgccaatgtttcctgggcaagctgattattaaaaataatacctaaaatatattgaatatttcctgcatactaagtgctatgctaagatcatctcatttgaattcagaagacccatatgaaatgggtaccatttttattaccattttacagataaagaaattgaagatgagagaaactggccaggcacagtggctcatgcctacaatcccaacactttgggaggccgaggtgggcagatcacttgaggtcaggagttcgagaccagcctggccaacatggcgaaaccctgactctactaaaaatacaaaaattagccaagctatggtggcgggcgcccgtaatcccagctactggggaggctgaggcaggagaattgcttgaacctgggaggtggaggttgcagtgagctgagatagcgccactgcactccagcctgggtaacagaaggaggttgcatcttgaaaaaaaaaaaaagagagagagagagaaaacttaattaacttgctcaggtaattggcagaagaaagatcaaacttcagaggatgatttaacaatagcaagtctggtttgtttggaagcagaagccttctaaaactcttatttactttttatatttactttttatatttactacatttttgtttattagacatgtgaggtttctttccagatgttaaacttttttcatgtacaatctacattttattgcacaaaaatgcttaaaacaaagattcgagactcaaaga

SEQ ID NO: 675362 - DNA, 542 bp, Homo sapiens
ttaaaagggacctacacagacagtagaggatccagggaagagtgacagagtttattcaagttatccaaaattggtcctggaagagtgttctcaaagtgtgttctgtgtttcacttgcatcccaattatatggggaatttattttaaaatgcaaaactttaaaataagttctcctggtagttcttaggttcatttggtcttagagcctttgccattttatggaggctgattatttgggaagtggtgacataggggcaactgaatgacattaacctgacgttaagttaatgatgcatttaacaagacccagttagaattattcatcttgctttcctggatcccttytcagttattgatgaagtggaaaatacaaatactttttactatttgtatatgtatcaaatgacattttttcttatcatgtcttatagcctttcatttctgtctttaagttttgtttatttttattttttgaggcggagtctcgctctgttgcccaggctggagtgcagcgcgcaatctcggctcactgcaagctccgcc

SEQ ID NO: 675363 - DNA, 666 bp, Homo sapiens
ctgggaagggtgacaagtccaaagtgcttaggcccaaaggaaaaggttgcctgcctgggaagcaccacgcaagctaaggcattttcattctaccctgcaggcagtgaggaaactagaggtggttttaagtaggacacagagtctccttccttacttttttttttttttgagatggagtctcgctctgtcgcccaggctggagtgcagtggccagatctcaggtcactgcaagctccgcctcctgggttcacgccrttctcctgcctcagcctccagagcagctgggactacaggtacccaccaccacgcccagctaattttttgtatttttagtagagacggggtttcagtagagacggggcttcaccgtgttagccaggatggtctcaatctcctgacctaacaggtgatccgcccaccttggcctcccaaagtgttgggattacaggcgtgagccactgctcctggcctccttccttacttttttaaagcatgactggatttgaaaagaaaaaaaaagattaccaatgtgaaaaaagaaaatacccaaaaataatgtatctgctaagataggttaaaatataatctttgttcttctatatgaagatatcaaattctaaatcattaataatggggcagaatcaccttttaattgatcagaattaa

SEQ ID NO: 675364 - DNA, 624 bp, Homo sapiens
gagatcaccttattcagtgagggatcactacaaggtaggaggggaagacttgaacttccagagagtcaagggcagacagagttctgcaatcctgtccaaagcagtagcacgaagtaccacagctggaaagccccttacaaataacggtgcagccctttcattttacatataggcatatgtaaaatgccttccttctttgggcctcggttccctaatgtgacaagtgaccagggcagagtaccgaggataagaatcttgggtatcttggttgttgaataattcttwttaccaacacaccaagctgcttccagatatggataatcacttttcacctcccagctcagagaatgcctttaaaacatattcaaatcctatgcagtctaaaagcttgacaagaattcttgttttggcaagattcatgaattgatagtccacagaagagcacattcaaatggccaacaaacacaaggaaggatgcccaaccttaggggttgtcagggaaacgcaagtcacagcaacgatatgctatcgctgtcactctttttaatttttaccaatctgataggtgagaaatcccactgctggtgggtcaggctgggtatggctcaacatcacgggtggaaa

SEQ ID NO: 675365 - DNA, 584 bp, Homo sapiens
taattgcattatgtacccaaaagtcattcaggagcatggcgtttaatttccatataattatgtggttttgagtggttcttctattagccatgacttccatctttaatggtccaagagtaatttgtggtgattttggttcttttgcatttgctgaggattgtttttcatggtagtcttttaactagagcagtcactcaaatgcattcaacatatgtgtcacaaagaaccacactgtcctggttccaaaatacttactttgcccagtaagttcagttgtcttcacttttttaatgggtttaaatattcccaaacctaaactggtgtcaaagtcaggtagtcaagatttaaaattagaaggtgctgtaagagacatagttcagccaatcatttccattgagtggacacagggaaataayatcacttctctaaggccacataatggttggccaagacagcaggaaaccaaatctcctgatgcactattttatttacaccagtgggtctcaaccctatcacacctaacaccccgttttaatataaatattttctaattttatctttctcaccttgaaatgtaattcata

SEQ ID NO: 675366 - DNA, 1170 bp, Homo sapiens
ttttttttttttttttgagacagagtccagcttgtcacccaggctggagtgcagtggtgcgatctcagctcactgcaacctccacctcctgggtttaatcacttgccttggcctcctgagtagctgagattacaggcgtgcacccccaygcctggctaatttttgtatttttggtagagatggggtttcaccacattggccaggctggtctcaaactcctgacctccagtgatccacccatctcagactcccaaagagctgggattataggcttgaaccaccgtgctgggcctttctcagagaatttatagtttacctggaaatgtaaaccatatgtacttaaactgagggatatttacaaaagagctttctacttaacccacaagaagctgtattcataacaaagcaaatcaagcttgttcacaggcaactgaatagaatgaatggttttgattggtcttgccagttatatttctaacaagagaaaattcaatgtgagcctcatttggaaacaagatattacagagaggaaaatttgggattaaggtcagatttggtgcaactatgctagatacagaaaaggcaaactttcagctcaatccccagctaagtacaagttcaatggtgaaggcataagaaaatgagccattataataagtctgaaataagtttatgattccacctcaatatgggcatgcaatatattctaacatttaatccctggaaaaaatgatgacatcacactgaaatcttgactcataagagaacttttttatgctgttccctaagtcagtttatttctacttcattcttgtgttaagggtaggctcaattcttactcattcaaaaacggtatcacctgaagcttttctttaattcttgttttctctgcagtgagaaaattaatcaaggggttaaaatgtatattaaattatatatgtattatatgtaaaagttatataatatagatcagagaagaatatattgcatatgttataggctgaattgtgtcctttccccaaattaatatgctgtaccctgccccctgccatcccagtatatcagaaggtggctatatttggagatagagacttttaagaggtaactaatgtaaaatgaggtcacatgtctgggtcctaatccaatatcactggtgtccttatttgaaga

SEQ ID NO: 675367 - DNA, 1170 bp, Homo sapiens
ttttttttttttttttgagacagagtccagcttgtcacccaggctggagtgcagtggtgcgatctcagctcactgcaacctccacctcctgggtttaatcacttgccttggcctcctgagtagctgagattacaggcgtgcacccccacgcctggctaatttttgtatttttggtagagatggggtttcaccacattggccaggctggtctcaaactcctgacctccagtgatccacccatctcagactcccaaagagctgggattataggcttgaaccaccgtgctgggcctttctcagagaatttatagtttacctggaaatgtaaaccatatgtacttaaactgagggatatttacaaaagagctttctacttaacccacaagaagctgtattcataacaaagcaaatcaagcttgttcacaggcaactgaatrgaatgaatggttttgattggtcttgccagttatatttctaacaagagaaaattcaatgtgagcctcatttggaaacaagatattacagagaggaaaatttgggattaaggtcagatttggtgcaactatgctagatacagaaaaggcaaactttcagctcaatccccagctaagtacaagttcaatggtgaaggcataagaaaatgagccattataataagtctgaaataagtttatgattccacctcaatatgggcatgcaatatattctaacatttaatccctggaaaaaatgatgacatcacactgaaatcttgactcataagagaacttttttatgctgttccctaagtcagtttatttctacttcattcttgtgttaagggtaggctcaattcttactcattcaaaaacggtatcacctgaagcttttctttaattcttgttttctctgcagtgagaaaattaatcaaggggttaaaatgtatattaaattatatatgtattatatgtaaaagttatataatatagatcagagaagaatatattgcatatgttataggctgaattgtgtcctttccccaaattaatatgctgtaccctgccccctgccatcccagtatatcagaaggtggctatatttggagatagagacttttaagaggtaactaatgtaaaatgaggtcacatgtctgggtcctaatccaatatcactggtgtccttatttgaaga

SEQ ID NO: 675368 - DNA, 1645 bp, Homo sapiens
gcatgtgcacacatgtgtgcatacacacatatgacaggaggacggagagacactaaacttcattcctaactactgtatgttgagaggaggcctaatgaaaacctctatcacacccacatatttatgctagcttaataaattttaaagtgcttggaaatttttagatgattactttttctcatattctgatatcccccattcctttgctatcattcataagggcagatgtagacaaaattaaagaatttaattaagcctctccatatcctgaaagagaaatatttctcattttgcttagtcacaaaaaaagggagaaaaaaagaattcctgtgtgaaattaatggtgctaacgagacatgcctgaataagaaacttcacataagattacgattgacctggagactgtgttgaaagaaacctagctaaattcacatctattaatgccagactgcaggccaaaatttgttgatttaatttcttggcagttacccaagacaggtaaaaggatataggcagagcctaagaaccagattctcctacttcttcactgaacactgaaatatataaaggtcccaactgaaagaataaaaattagttgaaaatagtatggaaattatgttgctatgtgttaagaagctactaactggccaggcacagtggttcaggcctgtaattccagccctttgggaggcagaagtgggaggatcacttgagcccaggaatttgagaccagcctgagcaacatgtgagaccgtatctctataaaaagttttaaaaatgggagactgaggcaggaggatggatggcttgagcctaggaggtggaggctgcagtgatccatgattgctctactgcactcaagcctgggccacagatggagatgctagtaaccaagacttcctttacaaaagaccccttagggaaacatcatatttgataaaggattttaataggacataagtattaataagaatcacttaggaatggtactgttaaagggtccagatctcaagtcctaatacaaggaaaagcctcacaggacatactcatatgcatctgtaactcactatgcaaatgtaaggtgccatattcaacaacttgtgacttttgtgctggcaacaacatttatcaaaaatcactgaatttaacctgtctcaatttcacaactgcataaatctgtctggacttgctcctgttccattagtaaaaagaaaggagaagtttcaaattagttctctctactgaagcacactttaatagacaatatcctctatccccaccttcactgccctcttcttctatttcatccacagttattacattgagctttcatgttaaaggccatttctcagaaatgcagtattcaccaaacctggcccatgtacactcatgtaactatatgcagatttagtgttctagaatgatatgaggtactcaggcctacctaatgctactgtctttaaatttagaaattacataaagcagtgttttaatcatattcctgatctgaaaagtcccctttttgtatactttcaaatgttccacacttccatttcagaaggttccatttgaactacmaacttaaaacaggtaattctgtcccattttattgacaggcaaactgagactcaacgtgacagtacat

SEQ ID NO: 675369 - DNA, 1645 bp, Homo sapiens
gcatgtgcacacatgtgtgcatacacacatatgacaggaggacggagagacactaaacttcattcctaactactgtatgttgagaggaggcctaatgaaaacctctatcacacccacatatttatgctagcttaataaattttaaagtgcttggaaatttttagatgattactttttctcatattctgatatcccccattcctttgctatcattcataagggcagatgtagacaaaattaaagaatttaattaagcctctccatatcctgaaagagaaatatttctcattttgcttagtcacaaaaaaagggagaaaaaaagaattcctgtgtgaaattaatggtgctaacgagacatgcctgaataagaaacttcacataagattacgattgacctggagactgtgttgaaagaaacctagctaaattcacatctattaatgccagactgcaggccaaaatttgttgatttaatttcttggcagttacccaagacaggtaaaaggatataggcagagcctaagaaccagattctcctacttcttcactgaacactgaaatatataaaggtcccaactgaaagaataaaaattagttgaaaatagtatggaaattatgttgctatgtgttaagaagctactaactggccaggcacagtggttcaggcctgtaattccagccctttgggaggcagaagtgggaggatcacttgagcccaggaatttgagaccagcctgagcaacatgtgagaccgtatctctataaaaagttttaaaaatgggagactgaggcaggaggatggatggcttgagcctaggaggtggaggctgcagtgatccatgattgctctactgcactcaagcctgggccacagatggagatgctagtaaccaagacttcctttacaaaagaccccttagggaaacatcatatttgataaaggattttaataggacataagtattaataagaatcacttaggaatggtactgttaaagggtccagatctcaagtcctaatacaaggaaaagcctcacaggacatactcatatgcatctgtaactcactatgcaaatgtaaggtgccatattcaacaacttgtgacttttgtgctggcaacaacatttatcaaaaatcactgaatttaacctgtctcaatttcacaactgcataaatctgtctggacttgctcctgttccattagtaaaaagaaaggagaagtttcaaattagttctctctactgaagcacactttaatagacaatatcctctatccccaccttcactgccctcttcttctatttcatccacagttattacattgagctttcatgttaaaggccatttctcagaaatgcagtattcaccaaacctggcccatgtacactcatgtaactatatgcagatttagtgttctagaatgatatgaggtactcaggcctacctaatgctactgtctttaaatttagaaattacataaagcagtgttttaatcatattcctgatctgaaaagtcccctttttgtatactttcaaatgttccacacttccatttcagaaggttccatttgaactaccaacttaaaacaggtaattctgtcccattttattgacaggcaaactgagactcaasgtgacagtacat

SEQ ID NO: 675370 - DNA, 3449 bp, Homo sapiens
aaggcaataatttgttacctcactaatggatctctcctttttcttttcaaactcttccttatgttagccatgaaatctagctggggctgtgtggtttctgattccccctggcttattctttactttttcccacttttccaggctcagcagggagctgctggatgagaaagggcctgaagtcttgcaggactcactggatagatgttattcaactccttcaggttgtcttgaactgactgactcatgccagccctacagaagtgccttttacatattggagcaacagtgtgttggcttggctgttgacatggatggtgagtacctttctatgaaggtgataaggatccactgagtcttctggttagggtcatattcctactgcaagtggcccttactgagctgagagatgtcattgccacagggaggacctataggcacatgtaggttgaatgaaactctagttccacttggcagcccagacaagggatgggtcagtgagcaaggctctctccctagtctcaggccatacctgtggagccctaatcctactctcatgacactggacctgggcagatgtgacaaattcacacaactctgattttgtctcaattttgtagatcttgtagatttcatccttcactctaatttcagcgtctaaaatcctcgctaccatgaacaatctgagtatttgatgagacagggctgaatagtgcagtttttctcctagcaaccatttgggggtatttgctttaaatcgattggaaaaatatggcataaccatttgcacaaacttgggacaaatgatattgggataacgatctaccagaatagggaattttacccacagtttctgggacaaaaaccaaggaatctctatggtgatcagccttcaggcctcctgaagaatatctctcacagtgtcctattctcatgctgaggagcctgaagtcyctgtgtgaggattagacagtggattgttatgtgtgtaggagaaccagcttcatatgtctgtccatgtctgaacttattgcagaaattgaaaagtaccaagaagtggaagaagaccaagacccatcatgccccaggtaactttgagcaattatggatgcttaattctgtgttgacacctggagatgccaggtccagggaaaacaagagtgtgttcaatttcatgttttcaacgaaggttgaattactcctactgacatggctgttggttttcattgcagtagatgtttaggtttccatttcttcctccccttatcatttactaacttactataggttgaccatacctcaaaggctgtatggcaactgcatggaatcttgagcaagtttatggaaaattattgagcccactcttttcatgatcactgttcgctgtgtgtcccgagggcactaactcagagtgtcctttgaccccttcatcagtgtgtcacccggccaactcgctgagctcactttctcctctctctctctctctctctctccctctccctgtctttctctttcattcttctctacctggccctggtctatcccaacataaaggcaataattcattacctcattaatggatctgtcctttttctttttaaacagttccttatgttagccatgaaatctagctggggctgtgtggtttctgattccccctggcttattctttactttttcctacttttccaggctcagcagggagctgctggatgagaaagagcctgaagtcttgcaggactcactggatagatgttattcgattccttcaggttatcttgaactgcctgacttaggccagccctacagcagtgctgtttactcattggaggaacagtaccttggcttggctcttgacgtggacagtgagtaccttactatgaaggtgataagcctccacctggtcttccagataggggtgatattcctgttccaagtggcccttactgacccgagagatgtcattgccacaggcaggacctatgggcgcatataggttgtaatgaaactgtagtctcagttggaagcctagacatgaaatgggtcagtgagcaaggctctattcctagtctccagccatgcctgtggcaacctgagcccgctctcagcacattggacccaggcagatgcaaaaaattcacagaactatgatttggactcaagggtttgtagatttcctccttcattctaatttcagtgtctaaaattcttgcatccatgaacgagctgggcatttgatgagacagggctgaatactgcagttttcctcctagaaatcatctggggcattttctttgaactgatgggaacaataaggcataactgtttgcacaaacttgggataagtgattttgggataacgatcttccagaatggggatatttcacccttggttctgagatgcaaaccaaagaatatcatgaccagctttcaggcctcctgaagtatatctctcacattgtcctgttctcatgctgaggagcctgagatccctgtgtggggattagacagtggactgttatgggtgtaggtgaattggcttattttgtctgtccctgtctgaatgtattgcaggaattaaaaaggaccaagaagaggaagaagaccaaggcccaccatgccccaggtaactgagcaattgtgaacagctacttctgtgttgacatctggagactcctggttcagggaaaacagagcgggctgacattatcgattacatcttttcaagcaagcctgaattattcctactaacattgctgttggttttcattgcagtagatatttaggtttccatttcttcctccccttatcatttactaacctactgtacgtggaccagacttcaaaaactgtattctcatggcgactgcatggaaacttgaacacattttatggaaaattattgagcacagtcttttcatgatcactgtatgctgtgtgtcctgagggcactaactcagagtgtcctgttactccctcatcagtgtgtcacctggacaattcactgagctcgttctctctctctctgtgtgtgtgtctgtgtgtgtgtgtgtgtctatctgtctttctctttcattcttttccatttggccctgttctgtcccaacatgaaggcaataatttgttacctcattaatggatctatccttttactttcttaaccacttccttatgctacccatgaaacctagttggggctctgttgtgtgtgatttcccctggcttattctttactttttcctccttttccaggctcagcagggagctgctggaggtagtagagcctgaagtcttgcaggactcactggatagatgttattcaactccttccagttgtcttgaacagcctgactcctgccagccctatggaagttccttttatgcattggaggaaaaacatgttggcttttctcttgacgtgggaggtgagtacctttctatgaaggtgataa

SEQ ID NO: 675371 - DNA, 3449 bp, Homo sapiens
aaggcaataatttgttacctcactaatggatctctcctttttcttttcaaactcttccttatgttagccatgaaatctagctggggctgtgtggtttctgattccccctggcttattctttactttttcccacttttccaggctcagcagggagctgctggatgagaaagggcctgaagtcttgcaggactcactggatagatgttattcaactccttcaggttgtcttgaactgactgactcatgccagccctacagaagtgccttttacatattggagcaacagtgtgttggcttggctgttgacatggatggtgagtacctttctatgaaggtgataaggatccactgagtcttctggttagggtcatattcctactgcaagtggcccttactgagctgagagatgtcattgccacagggaggacctataggcacatgtaggttgaatgaaactctagttccacttggcagcccagacaagggatgggtcagtgagcaaggctctctccctagtctcaggccatacctgtggagccctaatcctactctcatgacactggacctgggcagatgtgacaaattcacacaactctgattttgtctcaattttgtagatcttgtagatttcatccttcactctaatttcagcgtctaaaatcctcgctaccatgaacaatctgagtatttgatgagacagggctgaatagtgcagtttttctcctagcaaccatttgggggtatttgctttaaatcgattggaaaaatatggcataaccatttgcacaaacttgggacaaatgatattgggataacgatctaccagaatagggaattttacccacagtttctgggacaaaaaccaaggaatctctatggtgatcagccttcaggcctcctgaagaatatctctcacagtgtcctattctcatgctgaggagcctgaagtctctgtgtgaggattagacagtggattgttatgtgtgtaggagaaccagcttcatatgtctgtccatgtctgaacttattgcagaaattgaaaagtaccaagaagtggaagaagaccaagacccatcatgccccaggtaactttgagcaattatggatgcttaattctgtgttgacacctggagatgccaggtccagggaaaacaagagtgtgttcaatttcatgttttcaacgaaggttgaattactcctactgacatggctgttggttttcattgcagtagatgtttaggtttccatttcttcctccccttawcatttactaacttactataggttgaccatacctcaaaggctgtatggcaactgcatggaatcttgagcaagtttatggaaaattattgagcccactcttttcatgatcactgttcgctgtgtgtcccgagggcactaactcagagtgtcctttgaccccttcatcagtgtgtcacccggccaactcgctgagctcactttctcctctctctctctctctctctctccctctccctgtctttctctttcattcttctctacctggccctggtctatcccaacataaaggcaataattcattacctcattaatggatctgtcctttttctttttaaacagttccttatgttagccatgaaatctagctggggctgtgtggtttctgattccccctggcttattctttactttttcctacttttccaggctcagcagggagctgctggatgagaaagagcctgaagtcttgcaggactcactggatagatgttattcgattccttcaggttatcttgaactgcctgacttaggccagccctacagcagtgctgtttactcattggaggaacagtaccttggcttggctcttgacgtggacagtgagtaccttactatgaaggtgataagcctccacctggtcttccagataggggtgatattcctgttccaagtggcccttactgacccgagagatgtcattgccacaggcaggacctatgggcgcatataggttgtaatgaaactgtagtctcagttggaagcctagacatgaaatgggtcagtgagcaaggctctattcctagtctccagccatgcctgtggcaacctgagcccgctctcagcacattggacccaggcagatgcaaaaaattcacagaactatgatttggactcaagggtttgtagatttcctccttcattctaatttcagtgtctaaaattcttgcatccatgaacgagctgggcatttgatgagacagggctgaatactgcagttttcctcctagaaatcatctggggcattttctttgaactgatgggaacaataaggcataactgtttgcacaaacttgggataagtgattttgggataacgatcttccagaatggggatatttcacccttggttctgagatgcaaaccaaagaatatcatgaccagctttcaggcctcctgaagtatatctctcacattgtcctgttctcatgctgaggagcctgagatccctgtgtggggattagacagtggactgttatgggtgtaggtgaattggcttattttgtctgtccctgtctgaatgtattgcaggaattaaaaaggaccaagaagaggaagaagaccaaggcccaccatgccccaggtaactgagcaattgtgaacagctacttctgtgttgacatctggagactcctggttcagggaaaacagagcgggctgacattatcgattacatcttttcaagcaagcctgaattattcctactaacattgctgttggttttcattgcagtagatatttaggtttccatttcttcctccccttatcatttactaacctactgtacgtggaccagacttcaaaaactgtattctcatggcgactgcatggaaacttgaacacattttatggaaaattattgagcacagtcttttcatgatcactgtatgctgtgtgtcctgagggcactaactcagagtgtcctgttactccctcatcagtgtgtcacctggacaattcactgagctcgttctctctctctctgtgtgtgtgtctgtgtgtgtgtgtgtgtctatctgtctttctctttcattcttttccatttggccctgttctgtcccaacatgaaggcaataatttgttacctcattaatggatctatccttttactttcttaaccacttccttatgctacccatgaaacctagttggggctctgttgtgtgtgatttcccctggcttattctttactttttcctccttttccaggctcagcagggagctgctggaggtagtagagcctgaagtcttgcaggactcactggatagatgttattcaactccttccagttgtcttgaacagcctgactcctgccagccctatggaagttccttttatgcattggaggaaaaacatgttggcttttctcttgacgtgggaggtgagtacctttctatgaaggtgataa

SEQ ID NO: 675372 - DNA, 1010 bp, Homo sapiens
catgtctttgaagaactcgattcaagagagagtcagcaagagaggttcagcattctatccctaaagcagtgaggttggtgatggcagagttttccgtgcttctgtggttttaggtgtccaagcatagaggatagatttcaaatgtttccggagaggtgcgagccacagtcattcatggcatctgagttcgggttggggtttctgacagtgccttaagggccaggatctgctaaggcccgtgttctagggtggggacgttggaatccaaggtagagggagcaatcagtccacactgagctcctgccctaggccccaccatgcagaccaaatcagaaggaacacgtcccttgtcctcatgccacatccatccactgaacttgagatcggatttgttttccaaacatgaggtgactcttggtttgaaatgtatgacaaggggcctggctttcctgagttggcaggataaagaagtcattctgtggcatagaatgagatgtgccttgaatctaaaatctccagttaaaaccaatgatggtggcccagtgcagtggctcacaactgtcattcaagcaatttgggaggctgagactggcagatcacgaagtctggagatctagatcagactggccaacatggtaaaaccctgtctctactaaaaaaactaaagttagatgggtagggtggcacgcacctgtaattgcagctactcaggwggctgaggcaggagaatcgctttaaccagggaggcagagattgcagccagccgagaccacgccacagcccgggtgacatttactcaggaggataaaagaacaataggggccccaccagggtggaggttccctaggcagtgagggagagagggaggggcctccaggagggacagagagaaaccagttgccccaggctctgtgaagtcagccagacttccatcagtgccacctggactttcaataacagtggccactcggtgatgccctatttattttttaaaaacttacttattttga

SEQ ID NO: 675373 - DNA, 593 bp, Homo sapiens
tttaactgttccatccaattgtttccaaatgaaaagaagggcaaattatatattccttttgtctctcttttgtgatatattgtgggctttgtattttgtaaaagctgaacgtattcagtaacaactacgttcttccaacaaaatgtattttaaaagaattacaaaacctctaagtgaacatgccaggttatgcaytgccggcacaaaaggaaatctgtcatgtggattctcatagtctttattactcaaagtatccagtagatggaagcctttcccttttaaaacttaaagctgcttcaaaagcatacatgcagtcggatttgctaatccctccgtgcaaaaaaacagtccctctcctaagagcgtatcagaaagaccacagtttgcgtgatttgtaagtggtttgaaaatcgcattattaaagtcaagttgtcttgacccccatgaggtgaatgagaatgggaagaataaattgattcttgaagctagtctcttggtggctgcgtgggtttgtttgtcttcctgcattagtgtccacgttcttgttgccctttttcagtgataaatttcccaggctagtggttacatctctt

SEQ ID NO: 675374 - DNA, 593 bp, Homo sapiens
tttaactgttccatccaattgtttccaaatgaaaagaagggcaaattatatattccttttgtctctcttttgtgatatattgtgggctttgtattttgtaaaagctgaacgtattcagtaacaactacgttcttccaacaaaatgtattttaaaagaattacaaaacctctaagtgaacatgccaggttatgcattgccggcacaaaargaaatctgtcatgtggattctcatagtctttattactcaaagtatccagtagatggaagcctttcccttttaaaacttaaagctgcttcaaaagcatacatgcagtcggatttgctaatccctccgtgcaaaaaaacagtccctctcctaagagcgtatcagaaagaccacagtttgcgtgatttgtaagtggtttgaaaatcgcattattaaagtcaagttgtcttgacccccatgaggtgaatgagaatgggaagaataaattgattcttgaagctagtctcttggtggctgcgtgggtttgtttgtcttcctgcattagtgtccacgttcttgttgccctttttcagtgataaatttcccaggctagtggttacatctctt

SEQ ID NO: 675375 - DNA, 593 bp, Homo sapiens
tttaactgttccatccaattgtttccaaatgaaaagaagggcaaattatatattccttttgtctctcttttgtgatatattgtgggctttgtattttgtaaaagctgaacgtattcagtaacaactacgttcttccaacaaaatgtattttaaaagaattacaaaacctctaagtgaacatgccaggttatgcattgccggcacaaaaggaaatctgtcatgtggattctcatagtctttattactcaaagtatccagtagatggaagcctttcccttttaaaacttaaagctgcttcaaaagcatacatgcagtcggatttgctaatccctcsgtgcaaaaaaacagtccctctcctaagagcgtatcagaaagaccacagtttgcgtgatttgtaagtggtttgaaaatcgcattattaaagtcaagttgtcttgacccccatgaggtgaatgagaatgggaagaataaattgattcttgaagctagtctcttggtggctgcgtgggtttgtttgtcttcctgcattagtgtccacgttcttgttgccctttttcagtgataaatttcccaggctagtggttacatctctt

SEQ ID NO: 675376 - DNA, 664 bp, Homo sapiens
agattggttatttagctcgttgtctttttgaaagatatttaaaacaagggtagttaaaaaaataaaaatctgggcttggagcatttcaaagtacagtataagctgggtttgtcagttcaaacctcaatatggaatcaacacttcatcagggaagccacacttttctttgactgcaaaaggggcagttgaatcatgtttccatgtgtttacaagtcataactaatgaaacaattatgtgcaatgacaacttctgctggtatrgttagagtacttgaaataaactttacatacttgccactgaattgcatcataattagataggtaatggttctcccatcctttttttccttactcaattttgaagtttatagttcagctttaatttagagccttatctctggtaatggcttctaactcttccaacagctcatcggttttccttgtactaaacaagagccatcagctcacttttcattgaaaactcatttaactgtctccccatatgcttttaaggacaaaaaggcaataatgcttaattaagatttgaaaaacaacaactaccacaacttctccagattaataagtattccttcttcaacaaagggagatctagataaaatatttgaatgatgcttaccgaatattagaaattcaccctgtatct

SEQ ID NO: 675377 - DNA, 664 bp, Homo sapiens
agattggttatttagctcgttgtctttttgaaagatatttaaaacaagggtagttaaaaaaataaaaatctgggcttggagcatttcaaagtacagtataagctgggtttgtcagttcaaacctcaatatggaatcaacacttcatcagggaagccacacttttctttgactgcaaaaggggcagttgaatcatgtttccatgtgtttacaagtcataactaatgaaacaattatgtgcaatgacaacttctgctggtatagttagagtacttgaaataaactttacatacttgccactgaattgcatcataattagataggtartggttctcccatcctttttttccttactcaattttgaagtttatagttcagctttaatttagagccttatctctggtaatggcttctaactcttccaacagctcatcggttttccttgtactaaacaagagccatcagctcacttttcattgaaaactcatttaactgtctccccatatgcttttaaggacaaaaaggcaataatgcttaattaagatttgaaaaacaacaactaccacaacttctccagattaataagtattccttcttcaacaaagggagatctagataaaatatttgaatgatgcttaccgaatattagaaattcaccctgtatct

SEQ ID NO: 675378 - DNA, 646 bp, Homo sapiens
taagattttctactcgaaattggaatggacactaggctgtttccatggttacctactgaagctttttttcctttaatggaaaggtatcatttctgtatacaccacatgtagcttcatgctttgtattggatcaaatcctttgatagcagaataaaagaaatgaattgaaaaagtttctacagtctgcccctgcttgctgtgaaattagacttcaacactaaataacrtgaataagaagcccttttcatatttggctgaattcacagtgtcatttttaataacaaaagtgcagtccaagtattttcatgatgcttattacacacgatcctttgacaacctttgtagtctgaaagctcattgcttcttttgtcccctcaagtcaaaattcccttgcttgacatttaccttctattgtaatcttagctcttctacttgtaaaacttaattttccactgtcccactccagactttcaattccatttgtggcagtgtccttgctgtccttactcaccctctgctctctgtgcacgctgagtgctttgtggagtcttttagacccattcctgtccttatcagaacttttcctgaatgcctcctgtagagcattatgaatgcttgctgtattgttaatgattcttttgtattc

SEQ ID NO: 675379 - DNA, 881 bp, Homo sapiens
cttctaataaatgggatatttcagatttttacttagtctcaaccccaagtatgtatttatgcttgtccactctgcttttgaaaagtttgtatctccgaaccatagacatgcatattttactgttcagttggtagaattattggacacatatatttacttatctatgctctgagtacatgtttcctcacattggctaatgaataagacaggaaacttactacataaacatatagaggatgaatttggtttatacaattcactttttctgtggtgcagaacctcatggccaagtactagtacctggagttggggaaagtggtatgacttgcattaaggcccccatcaataactgagaatagtatggatcagaattcccatttggtaaatgttagaaaaaactggacagagtcatcaagccctgtttcaaggggctgagatttagagcagagttatatgtgttttcataaaaaaatctgagcagcaacccattaaaaaagacaaaacacacactgaatattacaaggaaagggcacgggcttctagaagcaaaacccgtaccwgttcatatagggctgaaatatattctcaatctgatttcaggtggtccagacactagaagggattgaacctataggcaaaagacctttcaggacctgcagctggagaggattaaggaaggtaacaactgataaattgtagtatgatgtagtaaataggatggtataggttgcacatagtctgatcaaattatataagttgaattatttttaaatcccttacatcagattttattgacttttcataaaaggaagatttcttgaaaataagattatacattattgctatttagttcctaaaagagtgtaggacagtataatgcc

SEQ ID NO: 675380 - DNA, 634 bp, Homo sapiens
aacacacactgggacctattggaggttggatggtgggaggagagagagtatcaggaaaaataactaatgggtactaggcttaatccatgggtgatgaaataatctggacaataaacccctatgacacaagtttacctatgtaacaaacctgcwcttgtacctctgaacttaaaataaaagttaaattttaaaaaatgaaaaaaagataactaaatttaaaagtccaaattagggcccatagaaacataatgtaaaattagggacaagaagtagtcatgctgaggacttggaagaaaggagactgcttataactgaaaatgaccaattgtagaatcctgaggaaaaaattcaaaaagttgtttagaatttccagtaaaaatgaaaaaaaaatggcttctacaaaacagttaaaagtaataaggagaaaagagagaaagacaaaaagtgacagcaggatcagatatacaagtagatgaatctgatgagaaataattatttagtaggattaatatcctactattattacagaaaaaaaatcatagcttggtgcctaggaaataaactcaaagatgcaaaggactaatttgataacttttcctggagagtttaaaaaaagaaacaaaggtgaaactat

SEQ ID NO: 675381 - DNA, 634 bp, Homo sapiens
aacacacactgggacctattggaggttggatggtgggaggagagagagtatcaggaaaaataactaatgggtactaggcttaatccatgggtgatgaaataatctggacaataaacccctatgacacaagtttacctatgtaacaaacctgctcttgtacctctgaacttaaaataaaagttaaattttaaaaaatgaaaaaaagataactaaatttaaaagtccaaattagggcccatagaaacataatgtaaaattagggacaagaagtagtcatgctgaggacttggaagaaaggagactgcttataactgaaaatgaccaattgtagaatcctgaggaaaaaattcaaaaagttgtttagaatttccagtaaaaatgaaaaaaaaatggcttctacaaaacagttaaaagtaataaggagaaaagagagaaagacaaaaagtgacagcaggatcagatatacaagtagatgaatctgatgagaaataattrtttagtaggattaatatcctactattattacagaaaaaaaatcatagcttggtgcctaggaaataaactcaaagatgcaaaggactaatttgataacttttcctggagagtttaaaaaaagaaacaaaggtgaaactat

SEQ ID NO: 675382 - DNA, 1681 bp, Homo sapiens
  misc_feature 1250, 1251, 1252, 1253, 1254, 1255, 1256, 1257, 1258, 1259,1260, 1261, 1262, 1263, 1264, 1265, 1266, 1267, 1268, 1269,1270, 1271, 1272, 1273, 1274, 1275, 1276, 1277, 1278, 1279,1280, 1281, 1282, 1283, 1284, 1285, 1286, 1287, 1288: n = A,T,C or G
  misc_feature 1289, 1290, 1291, 1292, 1293, 1294, 1295, 1296, 1297, 1298,1299, 1300, 1301, 1302, 1303, 1304, 1305, 1306, 1307, 1308,1309, 1310, 1311, 1312, 1313, 1314, 1315, 1316, 1317, 1318,1319, 1320, 1321, 1322, 1323, 1324, 1325, 1326, 1327: n = A,T,C or G
  misc_feature 1328, 1329, 1330, 1331, 1332, 1333, 1334, 1335, 1336, 1337,1338, 1339, 1340, 1341, 1342, 1343, 1344, 1345, 1346, 1347,1348, 1349: n = A,T,C or G
tctcttgacctgacttctgcagcacctactctagtagtctccttgtctcactgcaatcctttcaaattctccatactgacccacaattgcctctgaaaaacaagacaaaacaaacaaacaaaacaacaacaacaaaactagataccttcatgtggcataagagcataagaggcttttttggatctaactgctgcctccctatccagcctaattgaacacctactactcccaggcttttaatttagactgagcttgtccaacctgtggcccacaggccacatgcagaccgggatggytttgaatgtggcccaacacaaatttgtaaactcttcaaacattatgagaattttttgtgattgtttttagctcatcagttattgttagtgttaatttattttatgtgtagcccaagaccattcttctccttccaatgtggcctagggacactaaaaaaattggacacccctgattgagactctactcactgaactaatttgagtttcctgagtatacacaacctcataattcattgtttttgtttacaatgtttcctttgcctagactatcctctctcaacttatctacctaacttttaatcatctcttggaggggctgtctttgaagggactcattatataatatcctcttccctgtctcaattctcaataaattgaaaaataaggaatgatggggctaggatatcaaaatagcacttagatcatggctggagcccagatatgaggtcatgtctttaggtctgtgaacacagagtggatgctaataaagatcccgagttgggtagctcacctgccaactgcagcagcagtgggtgggatttagccttccccgatggccaagcagaacctgaagaagccctgctgcctgtggtccctgcaagcagcagatcccaagagaagtgagagagaaactgagcctggaaaactctttcatgatgtttcatgatggaacaactttccatcctgaaaggattacctgtgattcaaactcattaacccaaattcaagaactgcaagtgcttgttattatacccagagcctcctacctttgactttctcattgtcctttgatctttcatgactctttggtcacatttgctgtgccaacacatagttagtcttcatatattgtatcttgagcattttcttagtaaatgctctttgcaaacttaccaattaggcaaatcattttattttcactgggccagagcaagtaaaagggcagagagaagnnnnnnnnnnnnnnnnnnnnnnnnnnnnnnnnnnnnnnnnnnnnnnnnnnnnnnnnnnnnnnnnnnnnnnnnnnnnnnnnnnnnnnnnnnnnnnnnnnnntggactcccgaaacatagttgtatgcatgacacttttgggtccttggatctaggcagctcttctgtcttgatttacttctaattctccccctttcaaccccaatgcccactccaccaacagacagccactctaatagtcactcttaatttgtgtaattatatcctttgatatgcatatatctttgaaaactgtattaatatgtccactgctttggtaacctaacacaatttttaaaaatctatccagttgctgtatgtacatctagtgtattgcttctaactaccgtatggaattccaaataatatgcatctgctacgttttatttatacat

SEQ ID NO: 675383 - DNA, 702 bp, Homo sapiens
gaactctgattattgaaggggttgattatccttttctktcgcaagacttttagttcgaatagaacatatgtccaaatatttggaaatatattcacgatcctaacaaaggcattcctttcacagttgtctaggttacttggctttttcactactttgttttggaaggactttcttggaagtagtaaaactgagttgggaaatctttaaaatgtatcagtgcatctggctgttttccaaatcagaagtcaggagattgttcaatgatgcggaaatgtactcaggtgtggaagattccagttggggaggggctcaggtggacaggtgtgagtagcatagagggggcgtggagtgggggcttaacctggggggctcctggttccagtccggcattctgtagatttagcacccggatcttgtcaggggaggtgagagaaacctccgaggcagactcccatgaatcaagctcacagtctaggcttacaatcagggtgtgggctttcctattatttttattcactaacactaacggagtgcctgctatgagccgggctctgtattaaaggcttcgtgtgttgccacagtaacccgatgaggtggatacatctttatctggcaaggaggaaactgaggcaccgggtttcaattcagtacttcggcaatggctgaaccgaagctgagatatacctgtgtcccacgccaaag

SEQ ID NO: 675384 - DNA, 652 bp, Homo sapiens
ggaaacccctgataaactcatcagatcttgtgagacttactcactatcatgaaaatagcacgggaaagaccggcccccacaattcaactacctccctctgggtccctcccacaayatgtgtgaattctgggagacacaattcaagttgagatttgggtgtggacacaaccaaaccatattagggcttaaacccttgatttaaaatctttaatggcaagtatagtgattcctattctgtacagcttttttttttctttcataagattgtattttttctttcctttttttttttttttctggaaacggagtcttcatctgttgcccaggctggagtgcagtggtgccatcttggcttactgcaacctctgcttcttgggttcaagtgattctcctgcctcagcctccccagtagctgggactacaggcacctgctaccacatctggttaatttttttttttttttttgtagttttggtagagacagggtttcaccatgttggccaggctggtctcaaactcctgccctcaggtgatctgcccaccttggcctcctaaagtgctgggattataggtgtgagccactgtgcctggccaagattgtatcttttcaattgaaagaacatacacagcttaaggacaaaagcgataacaa

SEQ ID NO: 675385 - DNA, 635 bp, Homo sapiens
gtatgactttccagagagccttacagtcatttttataaaagcaagagttcaacaacagttcagcaacacagcatctgcctaccatctccctgtagaatttttactgccagtatttcaccaccagcatttacaatgattataggcttaacgaattcattaaactatatttaaaaagtctttccagaataaaaaaaattgttgttgtttcaaacaacttgccctttcttcatcttcattctttttatatctaccagatgctgggtttttttcttaatgaaagtctaaaaaacatagtatttttttccttggggttttttttgtttgtttgtttgttttttgctttcctcctaatgtttacaaaacgattaatcaaggaataaagtttgggaccttagggctagtgaaatatttaatttttcttcacattcactgattattttaaatatgaaaagaagaaagatcacgaaaaaagctttacataatttatgtgcagtcatttatrgtaaatatatttgcagcaaaaacaagctcagagtaaaatttgactttagttacagagtttagttttttccacatataggattgtcttcctatttaggcacacgggcttttaaaagtactaaagatacagaaag

SEQ ID NO: 675386 - DNA, 577 bp, Homo sapiens
aagtaactaaaaataaatgccacaaaaataaagccattttgttttatctgtagcctaaggctctgagcccgaggtctgaattatcctattatcacaaaaggggattgacaaacattagaaatatcttagatacctattaatgtcaatttgagactttctgcttagcataaggatttgtcttcgttagtttggactgttataacagaataccatgaactgggtggcttaaacaataagmattgttgagacaggcattttgacacacacctggagtcccagctacaagggaagctgaagtgggaggattgcttgaacccagtagttcaaatccagcctgggtaacataacaagaactgtctggtgagaggaccctcttcttgattttcagacagctgcctttttgctgtatcttcacatggcaggaaatgaaagcccttcccctttttacatggggcattaattccatcacgagaatctgacctttggttaattaactcctaaaggctcctcctccaaataccattacattaggaattagggacccaaaggtgagagagggagacagaagggtgcgttg

SEQ ID NO: 675387 - DNA, 469 bp, Homo sapiens
agcaactcacacatctcactgctccagatcagatacttatcggtacagtatatcaggactgaaaactcctctatctacccttctgtccatccaagtctcataaatacatcacaatccaccaaaggtctcacttccttcatgaaatctttctagcacaaagaaccctcagtcatcagacaaccctgatttaaactgaagggcattctatggaataactaaccagaacatttcttcaaaagtgtcaacatcatgaaagaaaaggcaagactaaggaactgtctccattggagacatgacaaagatatgcaatgtgagacactggtttggatcctgcaacacaaaaaggacattagtggaggggaaaatggtgaactccaaatagtcatggtttaggtaatagtactgtacatgttaatagtacatggwttagttaatagccaatgttaatttcctgattttgatcatgata

SEQ ID NO: 675388 - DNA, 601 bp, Homo sapiens
acagtctctccggcggcaatgtaagtaacaggatagcaaagtcactatgatggctagtatgaggtgaatgagaaaggtgataagaccagttgagaagtgacacaaatttgtagccattttgatgtcttaagtgggtatggtatttaattatttcggtgatgactagaagtgatgttttgggtttttggggtttttttgagacagagtctcactgtgtcgcccaggctggagtccagtggcatgatcttggctcactgcaatgtctgcctcctggattccagtgattctcctgcctcagcctcccgagtagctgggattacaggtgtccgccaccatagccggctaatttttgtatttttagtagagacggggtttcaccatataggtcaggctggtctcaaactctggacctcaagtgatccgcctgcctcagcctcccgaagtgctgggattacaggtgtgagccactgcwcctggctgaagtgatgttgaagttaaaaatattaagttagtggcaagtaaaattggattgaattgaagcatgccttcacttattcttatggaaaatattagtgcatgactagaagaaaacagtgtaaca

SEQ ID NO: 675389 - DNA, 602 bp, Homo sapiens
tttttagtagagacagggttccaccatgttggcaaggctggtcttgaactcctaagctcaagtgatctgccctcctcggcctcccaaagtgctgcaattacaggcgtgagtcaccacgctcgggccaagacatatcttgaagataacagctatacatgttccattatgcatcctgttatagatataaaatttgaatatttttactatgattttttaaaaggtacaatatcttccttttgcatggagatgatcaataaattccttatagtagaattgttgaatcaaaggagtttctaaatgtttaattctgaaaggtgttgtcttcgtgcattatttttcattcccactggcctatgagtgccccgttttcccactcttgggcgaccacttggtcttataaaagttgtaattatttcgaaattgatgggttaaaaagttgcatcttaatgttttgatttatgatttctttcattatcgatgagaccrggatattttcccaggtaaacaagtcatttgaatgtttttgtgtgcctatgtgaacagcttgttcatattttttgcttttttttctgttaaattgttggcatatgagacttttttgg

SEQ ID NO: 675390 - DNA, 604 bp, Homo sapiens
gaagaaagctagcagcaaatgaaaatggaagcagagggaagaagccataccatcacccttgttcctccatctggaggcagaatagatgctgctcgtgccatcgctgttgaattagtttatgaaggacacctcctgtgaggttaaatagcaactgtgggctgccatcacatgttgtactaaatcctcttctgccctttctgttctataactcaacaaatggtaaacactcctctagtgagtgccaaagaagggagcaataactaccgagcaggcatctcaggtcacctggggacacaccaatagctgtgcctaatgatcagatcagaaagcccaattaaactccagagagttcctttgagcaatcactgacagggcattgacttctgtatggcctcagcaatgcagagcacctggaaaagggctcattagctacaggaagcctctttcaccgttcractgcagctccaactcagaaacatgaaactcttggcaggtagctctgtcagcagctcaggggaatctttcctttggtttcagttcataatatttggcaacgtctgcagtcacctgtgaagaagctaaaaatccacggtaagaggcagcc

SEQ ID NO: 675391 - DNA, 636 bp, Homo sapiens
tttctcaaaattgtcccactgtgtgaattccagtgrctgccttttagaaatttggggttcttctggtctcaggtccatcataggcctaattgttttcctctgctttcctcaacacagatgtttatactacaagactttggaactggaaagtgttcaaccctaccagatcttaattttggtttgtaggtgataaaaatttgcctgatttttatcagtcatggatgttttctgtgttttaagttatgcaagcctagtcataatgtctgttttgtgtgtgtgtgtatatatatatatatatatacatatacatatttgtatgtatttttattgtgtgtgtgtgtatatatatatatatgtatttttatttttggtggatgcattagaggggagattaaaaatctatgctgcttggccaggcatggtggctcacaccggtaatccctgcactctgggagactgaggtgggagaatggcttgagcccaggagttcgagaacagcctgggaaacatagggagatccggtctttacaaaaacatgttttaaagaattagctgggcatggtggtgtgtgcctgtggtcctaactactcaggagactgaggtgagaggattggctgagactggaaggtcaaggct

SEQ ID NO: 675392 - DNA, 633 bp, Homo sapiens
tcaagaagtaatttcttttaaaggctcatgtttagacctcagatgtccttgcttctgcttcagaaactgcctcggatcacctgcgatgaacttgagggagargggcagcaaaaaagagccaacactgtttaccacagatacattaactttcttattctttacaacaaggctaaaaagataatattactgtccccacattacaaataagaaaactaaggcacagcgagtttaatctgctttaaggttatgattccttatttcctcctcccacatctgctacctagtcttcatggtaaggctggatggagttaagaattcaatctctggaccagatgcccggattatcacttactagttttgtgactagtgagtgataatctgggcatctggtccagagatttgtatgccaacttttgacatagatttgtatgtcaactttttggtgctcaaaacagactctcttgctaggtctgctttctaaatgcagtacatggagggattgagtaaccacgtagaatgggatggcagcagaccacaagaagtgcatggaatgaggctctttgaactggaaagcaaaaactacagaatcctgatactccttagaggctctgtaggccttgaaggatgctcttc

SEQ ID NO: 675393 - DNA, 604 bp, Homo sapiens
ggccttcctggctcctggcagggtttgagattagtgttgataatagcttcaccataggaccacaaaaaatcaatggaactgggactgaggcaggatccatttatcttcttggggtgaaatagaaggtgtgatttttaaaaaggcaaattataacaaatgtgtgtaattgatgtgcatacacagaaccatgcaagacgggccaactgcacacaattgcacaatatcaggcattattctcatcaagagtttttgtaacaatgccaaccccaggacacggttcaagtactctggagagtagtactaggaattgagttctagaatgtgttgcattatttttgcatgattaattatttgtttgaaaaggtgaggaagaatacraaaaagaaaagccaatttgcaggtcctgttttataataaaatgacttgcttgggatagggcttcagctgtcacttaatctatccctctgcctctcatttaaatggactatttcccccatggaatgatttttttccctcttaaaggtctttctgtcagtttcctgtattgagctatatgtacccttctcatgggcagagatgatgcctcatcacctctatggtgtca

SEQ ID NO: 675394 - DNA, 1029 bp, Homo sapiens
tggtgggtggaaccacaagaaaaaatggagaacactgtgactaatgtyagagagctgtggtcaagctaagcctgaagaggtgaggagatggagaggaccccttcccaggagctgcaactttcagtcacaagactcagccagcctgtggtgacctagagcctggagaaatagatacccagtagatacccagctccacatatcttcatgttctagtggccaaacccaacagaaaccatagcacaagggattgtttgatgcaatccataaaagccaactctttacaatgagtcattgagtagagaaggatggagagtaaaacttgagaggcagatggaattgatctagcacatattgtttaatgcaaacctgtagtcaatcaatggttggaggcagaatgcatacttttgctgtaaacatgtctctgatcttcactagatctacacattgccttcattcagtcaaaatttatgaaacactgagttgtctatagtgcttcaaaaaatctatattcaaaaaatatagtaatgattatggctattttgactcttcattttttgagggaagcaaacatccaaacctagcattatggtaattgtgaaaatatgtttgtaaatcacaacttaaaagcttatcttttatttcttcatatgtaaaagttataaaaataaacaagctaactttttgaaaatcaaaatttaaaaatttccaacatcaattcttgaagccagttttaaatgcagtatacacattgaatatcccttatctgaaatgccgggaaccagaagttttttggatttagatttttttcagattttggaacatttgcgtatacataagatatcttggggatgggacccaagtctaaatatgaaattcatttatgtttcatgctacacttaaacacaaagcctgaaggtaattttatacaatattttaaataatcttgtgcatgaaacaacgtttttactacgagctatcacatgaggtcaggtgtgaaattttccacttgtggcatcatgttggcactca

SEQ ID NO: 675395 - DNA, 1029 bp, Homo sapiens
tggtgggtggaaccacaagaaaaaatggagaacactgtgactaatgtcagagagctgtggtcaagctaagcctgaagaggtgaggagatggagaggaccccttcccaggagctgcaactttcagtcacaagactcagccagcctgtggtgacctasagcctggagaaatagatacccagtagatacccagctccacatatcttcatgttctagtggccaaacccaacagaaaccatagcacaagggattgtttgatgcaatccataaaagccaactctttacaatgagtcattgagtagagaaggatggagagtaaaacttgagaggcagatggaattgatctagcacatattgtttaatgcaaacctgtagtcaatcaatggttggaggcagaatgcatacttttgctgtaaacatgtctctgatcttcactagatctacacattgccttcattcagtcaaaatttatgaaacactgagttgtctatagtgcttcaaaaaatctatattcaaaaaatatagtaatgattatggctattttgactcttcattttttgagggaagcaaacatccaaacctagcattatggtaattgtgaaaatatgtttgtaaatcacaacttaaaagcttatcttttatttcttcatatgtaaaagttataaaaataaacaagctaactttttgaaaatcaaaatttaaaaatttccaacatcaattcttgaagccagttttaaatgcagtatacacattgaatatcccttatctgaaatgccgggaaccagaagttttttggatttagatttttttcagattttggaacatttgcgtatacataagatatcttggggatgggacccaagtctaaatatgaaattcatttatgtttcatgctacacttaaacacaaagcctgaaggtaattttatacaatattttaaataatcttgtgcatgaaacaacgtttttactacgagctatcacatgaggtcaggtgtgaaattttccacttgtggcatcatgttggcactca

SEQ ID NO: 675396 - DNA, 671 bp, Homo sapiens
cactcccttgaacatacccactacaccagctgggctgcataggggagcaggtaggggctggcaaaagttactcacactccccactgcctgcctcactcctcttctcrtcaaagtcctccccatcctttaaggcctagcttgaggctctacttctccaggaagccttccttgatcaccagtgcccccaccccccacctccttcctccaggctggattctttcttagagcccataactctcctcattttcacttatttggattttaattatatatcacctttttacatctcatatgtgaaatcagaatttttaggagctgcaagaatccttatgaatcatgcagctcaattctcttgtttttttaagggtcaagaaccgtatcatctttaacagtgacctaattcttgcttgtgtaatcaggttgattttcccaaatcatctgaaaaatctggtagattactttaaagccaaactttagcatgtgtgtcccatctccccatctagtcctcagaagcaaggactgggtcacacataggtgaactgtcactatcaagcgagtaagtacaggcatgagtctaggtcctgctctgataggtgaccccgcttccagcctcagactgaacttggcagtgcctccctgcttccctacatggcgtcttacccctaggatca

SEQ ID NO: 675397 - DNA, 625 bp, Homo sapiens
ccagatactgactggctgtttctgagcccaacagagttggagagcgacagcgagagagagaaagtgtgtgtgtgtgtgtgtgtgtgtgtgcacgcatgtgtgcatgtgtctgtgcatgtttgtatgtatacaaatgcatttttttttttttgagacagagtctcactctgtcacctaggctggagtgcaagggcacgatctcggctcactgcaacctccgcctcccaggttcaagtgattctcctgcctcagcctcccgagtagctggaattacaggcacacgccaccacccccaactaatatttgtatttttagtagatatggggttttgccatgttggccaagctggtctccaacttctgacctcaggtgatctgcccgcctcagcctcccaaagtgctggaattacaggcgtaagccaccacgcccagcctacaaatgcatttttataattagttaccaatacttaaaaatcaagagataacacataaaaatctagatttgaacttctagctcaattgttkttgtggtaaaaattggctggaattgagtaatgggtatttcttatggacaggccagtctactttagcctctacactcctactactcctcaaaaaggaaacca

SEQ ID NO: 675398 - DNA, 611 bp, Homo sapiens
cagtaaggatatttcaggattcaaacaggacaaggtaatatggtaaatcttatacatttcattgatatttaatttcaaaagtctccctccaatgataaattaaaattaggcagcaatagaatggcatcccatggaatgaaatatatgagaaaagttttctaaagtgtgttctctctgctccccacaacaaattatctttctttacatttgttcagaacttgtgctgatatttaggtgccctttgacatttttaatctcgcttggagtgtaattttctctaagacagctgaaatggctttggtgtgaaacttgagattgaaatacgggtcagttacttgctgacaagtgtgtgacccatgactgcctacagttcaytctgcattttacagatgagaaaactgaggtcaatagcattcgataacatatcaaactagttgatggaaaagccaaaattcaaatacaaatcagtctgattccaaaatatatgttatcttattacacagggccaatttcaattgctactgttttgaatactgtttaaaacattattcatgacgcttgttaaaatgtaaagtagattttattcaggactattgcaataagtatgggga

SEQ ID NO: 675399 - DNA, 1033 bp, Homo sapiens
gtatttagaaatcaagatctagggccaggtgcggtggctcatgcctgtaatcccagcatgttgggaagctgaggtgggcagatcacctgagctcaggagttcaagaccagcctgggtaacatggcaaaatgccatctctacaaaaaatacaaaaatcagccaggcatggtggcatgtgcttgtagtttcagctacttgggaggctgcggcaggagaatcacttgagtccaggaagcagaggttgcagtgagccaaaatcacgccactgcactccagcctgggcgacacggagagagaccccgtctcaagatctgggtgtaaggtgtactcattgctactgggtgtcactgcctctagtctgtctcagaggacaaatctagggaatatgtctacctatattaacccccatatacccacatatctatatgtctgtatctatctgtgtgtgtgtgtctattaaacatgattgtaggctacgttctactctaatccagcattacatggttcattctagtctcatgcagttttgaaggctgtgatggtggtagttaatgttgtaggttgctgggaggctacagtaaacggcaattatccctgatgacttcagagtctttcatctccacgtacccttgacctggcaggcattttgctgcttgacactggactcatcaagatgagctgatgtgctgccagaatgacccttctgcgcccaagctcatcctggatccgccctgaggctgcaagtgatgtcaactaagcagaaacagagccgggactaggaaatcgggtctgggctgttagcacctgcacctgcactgggctgccctgtgattgttgaggcaccaggaaaaggctaggaagtccatgtggttaggcctaagatgaamtgacagggtctcttgcatttaattcatgctccttacttcagtggaaagcttaacagggacataagttaggacagcaatttataactgcagctgacactggaatcatgagtgccgggtccagaccctgccgattataaggcaccatc

SEQ ID NO: 675400 - DNA, 585 bp, Homo sapiens
tgagacagagtttctgtcttgttgcccaggctggagtgcaatggcgggaccttggctcactgcaacctcygcctcctgggttcaagcgattctcctgcctcagtctcctgagtagctaggattacaggtgtgcaccatcatgcccagctaatttttgtatttttttagtagagatggggtttcaccatgaacaggccaggctggtctcgaactcctgacctagtgatctgcccacctcggcctcctaaagtgctgggattacaggtgtgagccaccacgcacggctcttctcttctttaacaggacagaatacatttcagctccaaaaccagcattgtctttaatggggactcctagaggcattcccaccaagttaggaacaagacagcacgcccactgttaccagcgtaaatcaacaatgtaccggaggtgctaacccacacaataaggtaaggcaaagaaaacagagataggaaagttggaaaggagaaagtaaaaccttcataatttgaagataataagattataaagccaggcatggtggctcgcacccgtaatcccagctctttgggaggctgaggtggg

SEQ ID NO: 675401 - DNA, 424 bp, Homo sapiens
agtgggcaaaggatatgaacagacacttttcaaaaaaagaaatttatatgatcaacaaacatgaaaaaaagcaacatcactgatcatcagagaaatgcaaatcaaaaccacaacgagataccatctcacgcctgtcagaatggcaattattaaaaagtcaagaaatgatagawgctggcatggatatggagaaataggaattattggtgggaaagacaaactttttatgcaatcaatttttatatcaataagatgtaaaggctgatgacaattatattaaattataaatcagtgaaagttttctgaagaaaactagaatacttacacattcagtgtgttttattctactgatctgctctgacatagatccaaatcttaaactggtccctttggatagaccacaggtgtccaggatactgaaatt

SEQ ID NO: 675402 - DNA, 628 bp, Homo sapiens
ggaaatcaactgtccaaccgtatttgtattacaataataacctgaaagaacttgtttaatatcagaagacttagtggagcagatgaatagttccaacatgatatccatgggatagmaattcaattaaaaactgcaagtagtgctggagagaggtagttattgttcaacacataccacagggccctttgctgaagctcagctattagccgaactggttgagaaattctgttttcctttatgacaatctgttagcttgtacaaagttaaattaataaaaacaccaaactgcctctgtggtgggagagcagaatgaggccaagggctagttgcatattttataattatggattaagtgcattatgccaagcaaattaaagatatgccacaattataataaaaatgagagattgcatatctccaaatggtgactgtatgactactgcatccaaaagagaatgctggtgctctgcccccaaaaggcaattgtttccactataaaaaaggagaaggaaattacttttcatgcacactttccttctcaacaggtataacagtccttcttctgaaggtagtcagctcaaagctaaatggggctgttgattgcctgtgttcagtgctcagaactggc

SEQ ID NO: 675403 - DNA, 588 bp, Homo sapiens
tgtgctatttcctctgcccagaaaaccctccccaacccaccccaccattagtcctcagcaaacctctactgatgtgttgcctctgcttcaatatagcttccttctgagcttcctagacctgccgggcagaatcagtgcctctttcctcttgtgacttgcaatgcttatcactctcctgggaatgactccagaaaagcaaagaccagggacacaaaagacactaaataaaatttgatggatgaatgaatttttttcactccaactagacccatggttcttgatgctggaagtacaatagaattacctcaaaagctttataaattgccaaccctggaccccaccctagatgtatttaaacatctccttggctgaggcctgagcatgggtatgttttaaagctcctccaggtaatcctaaagagcagccagagttgagatctaatgaaacagactccaaatctgctgaaagcagtgatacatgctttctagaactcaatagagttcagtgggtcagagcctgmaatcctgagtcaatcaaatctgagttcataacctaggtcatcagcttcctagtgaggtaagtttttaa

SEQ ID NO: 675404 - DNA, 583 bp, Homo sapiens
cattctctcccacacaccaggcagcagggccagatgttgatgtgtgggcactccagactaattggccctcatccaaccaatattacttacaaagttgttcaatatttatttatctagggaggagagagaagttgaaagaaaaaaaatttgtattggccaggagcagtggctcacgcctgtaatcccagcactttgggaggcsgaggcaggtggatcacgagcccaggagatcaagaccatcctgactaacatggtgaaaccctgtctccactaaaaatacaaaaaattagccgggcgtggtagctggtgcctgtagtcccagctactcgggaggctgaggcaggagaatggtgtgaacccgggaagcggagcttgcagtgagctgagatcgcaccactgcactccagcctgggtgacagagcaagactccatctcaaaaaaaaaaaattgtattaataaaaattatatttgctagtttacttcaacaaggctaatcagagtcactgaaaaactccctaaaatattcccttttttgtgtgttcttgttctctcccctgatttctttagtccatttcttgggagt

SEQ ID NO: 675405 - DNA, 331 bp, Homo sapiens
atagattttataaaccaaaaaagtgactgttgcatagaaaaaacaaactccataaaaaggacacaaaaacaaaatggacaattatttgcaaaattggtaacacaaattgttaccacttcrtggcggttaactaggaagtgggacttttaagtcattctcccttattccctgctatcctcgggaaacgagcgtgtctgtattcttgttccctcataaacagcatcaggcctctgtagaatggaagcatctcaccttttatttatgcttctctgtaagtatttgctgttttacaattagcaagtatcattttcataataataatgcttctaaa

SEQ ID NO: 675406 - DNA, 678 bp, Homo sapiens
cttttccccttggccatctcaaatggagctgctcacctgccagcatggcctggaggtgggcctgggagtcagcatctccggtgccagatgctccctcatttcctacaatcctcgtcttcagcgcagctaattgggaggaagcagcactcggaacacagcgagcactcgataactgcttcttgaatgatttcattagaaacctcaccacagagaaattatcttaattataaaacagtagcaccaaaaaaggttactgtaacacaattgcccaaactaccgagtgaaaaataaagaaaaattagctgaaaaaagcatggtttgaaaggtcaagattattatcgttcagcaaagtagtcactgagaacaatttttctgtccaaaaatgcagtaaaacagaaagaataagatctagtattcagtaacagagtagggagactatggttwacaataatttcttgtgtctttcaaaataactaaaatagtggaattggaatgttcctaacacaaagaaatgatgaatgctcaaagtgatggataccccaattacccttatttaattattatccattgaatgcttttattaaaatatcatatgtacctatgtacaattattgcatatccataattttttaaaactttaaaaaacaaatgtagaaatgcaagctcacacatacagac

SEQ ID NO: 675407 - DNA, 887 bp, Homo sapiens
tgtgttactagactacagtgagtagagctaaataaggctgtgggataaattattagtatcctgtccatcaatttcctgtttgtaaattgtttataatgccattgatctgatgttcacaggttactagaatgaatatccataaatccatgatccctgaaacctgcagacattttctgattgaagagaggatgtgcattgcacgagtgttccctgaccatttaatacaaattggctaaggattttatagaacccacaattttctacaaatatcacagagactttagattttgtgaatccatctttatgttccacaaaaacacattatgctacattttattttgtggattgtacacatcggtcaattaattaagcatttgttagtatctagagtgcctttgtgtcagattctgttccaagcacggaatatatctatgatcaaaagaaattgttattcttttgaagctttaatgtaggggaagataaataacaaatttaaaatattatggtaaatatcacataataataagctctataaagaaaataaagcaaaggaatggggtgagaactggagatgggtctgagaaagtgacatttgagtagaaatttgaatgaatttarggagtaagctaagtggaatctgggaagagaaacttccagcagaagaaatagtaaaggaataactctagatagattcttatttagaatttggtaaaataagaggaggatcaatatggtgaagctggtgtatggcgaatagcgaagacaatgttaaatggccaagctcaaatcatagagattatatgggtcatagataggaatttggatttcattctgagtgtacctggaatatattcaagtgagaaatcaaggatgaattccaagtattt

SEQ ID NO: 675408 - DNA, 521 bp, Homo sapiens
atttttagtagagacggggtttcgtcatgttggccaggctggtttcgaactcctgacctcaggtgttccacctgctttggcctcccaaagtgttgggattayaggcatgacgactgtgcccagccatgcaattcttaaaattacattcttaaaaaaaaaaaattgcattttggctacactttggacatatatggttctctgcatacaggtcccacagatttctgatgcaaactaaaaagcagtacaaatctggtaaaatctgattgtctgaagcctctcaatctttctgctccttttgggaggtgggggtagaacaggggaataggatttgaagcaggagcgtcatcagtatggaacaatgcagtataaagcatgaaagctgagcaaacagtcagatctggacaagcttctttctctttgttgccaaatttggagtaaaaaatgcctcatcatgtcatggttgtgaagattgaactaaatcatgtatgtaagctgcctaacaccgtgcctgatacatagta

SEQ ID NO: 675409 - DNA, 521 bp, Homo sapiens
atttttagtagagacggggtttcgtcatgttggccaggctggtttcgaactcctgacctcaggtgttccacctgctttggcctcccaaagtgttgggattataggcrtgacgactgtgcccagccatgcaattcttaaaattacattcttaaaaaaaaaaaattgcattttggctacactttggacatatatggttctctgcatacaggtcccacagatttctgatgcaaactaaaaagcagtacaaatctggtaaaatctgattgtctgaagcctctcaatctttctgctccttttgggaggtgggggtagaacaggggaataggatttgaagcaggagcgtcatcagtatggaacaatgcagtataaagcatgaaagctgagcaaacagtcagatctggacaagcttctttctctttgttgccaaatttggagtaaaaaatgcctcatcatgtcatggttgtgaagattgaactaaatcatgtatgtaagctgcctaacaccgtgcctgatacatagta

SEQ ID NO: 675410 - DNA, 1521 bp, Homo sapiens
tcagccataaaactaatggcaattatatcatttgcaacttatgaatgaacctggaatatattatgctaagtaaaataagccagacacagaaagctaatgactggatgatctcacttatatgtggaatctaaaaatgtattgaattcataactacagtgagtagaacagtggttaccagaagctgggggggtgagggaagtggggagatgtttgtcaaagggcacaaattttcagttgcaaaatgatcaagttctggtgatctagtgyacaacatgggcagtgatggatgtgttaattaatttgatggtggtaataattactcaatgcatatgtatttaaaaccataacattgtacatcttgaatatatataatctttatttgtcaattaaacattaaaaataaaaaattaaagaaattatcaggaggattttacaaaggagttgaatccttaatccttctcttacataaaatcagtgatccatgtaggcaaaaacacatcttataaacaataaaaagatagtactattttaaagtgagtcctaaaactaaacacatgtattatatcttgtaattctaatgaggtaggcactattattatgacatcttacagacagtgcaactgggactttaagaattaaattaaatactgggccaaagttatgcaactagaaaatgacaatattcaagccctggtatttttaactccagagcaaggctcttggcatttacatttgactttcctaatcttatactagacaatactacctagcaaataacttaaatgtaatataatgtcagataatattatataaaaatctttctactctacccttttaagaaatctctcttcatcttacctttccactccctcccccaggctttcacaattccactcaaaccttcaaaacaacttgttcacaacttcgttagaatcaactgatcaatatgcttttcataatcaaatatctttatttcactcctaaagtgaaaatgtggaataaatggtcttcttcagaagaccactgtcaattttgattttctttttccttagagtggctggaatatttattacaatggcgcattttcacgaagaacaagaacccatcagagccttgcttttaaataatgctttgcacagttgattcaatcagcccatgactaattctaacttctgaatgaggggaaatagctgattttccaactctcctgagaacgctatacatattcatagaaatttggagtaataattgggaacaagcactattaaatcatcatttgttatatatatatttttctaatagaataaaaagagagattggaaaatgtcaacaagtgatttgtgtaaagtctcctaattcacaagctgacatttcttcaatggaaacgagttagaagtaatgctggcaaagactacattgttaattcagataatgtcactttgtctctttggaggcacttaatcaggcttgaataaaaatgaacaatgtgaaaattcctagagaaaatgcgattatggtatg

SEQ ID NO: 675411 - DNA, 1967 bp, Homo sapiens
tcaattattgataattagttgcaattcaagagggcaaaaggacaaargcacacagggtgctgcccattgaaatagtcccggagtgtatcagatgaggaaaagaagttctgattggccgtaatcactgcctgtcatttctctcttattgggtgtaacatttccctctttgaagtagttgcatgattgtgtccgcagatgctaactttgtgttggccactgtggagcccacaagaatggccttatggatatcctaccacaggaagtataactggctgagtgccctatgtgcagctgcacattaaaatctaatattgcatttgtgcagaggcctgcctcccatggaccactctacaccaatgaccaagtgaggtggggatactaaggcagagacctctttttgggagacagatgactctttcattggccaactttggcctgaaaaaattcacaaatgttgccaaaactgcagcctcccctccctctcttccacacacggggcagattcacgtcatggcctaagggctctccctttctttttctccctttctatttgcccttatatggttattttccctaagaactccacttcatgtctaatcctgtcttcgttgtgccttctacgtttgcagagttgacccaacatcttttagtaaggaagggttaggaattctactttgctgaaagatgctgcagaagccttctccttttcttctgacacaaggaaacaggtgtcctctcagaaccttcactcacttcctttcttggctgctgggctgataattagggttaaagcccagcatcacctggctgggacattctggatctgaaaagggaggaaaaagactatacatgtaaaacagggcttatcaaacatggcactagtgacaatttagattgaatattttgttttccttgtggagggtttcctgggtattgtaggatgtttagcatgatccttggcctctccccattagatgctggttgtgacatccttggttgtgataaacaaaaatatctccagatgtttcgaaatgttgcttgggggaaaagatgcctgcagctgagaacaattaacctaaagaataacaagaactggttgaggtcctttttatcagtgccccaacattggcatagagcagtaaattaagggagtattttgggattttgatggtacttgattagatggctggattctaaagcaagataagcaagtattcatttcttaggacatgaaatttaacatgctgcatggcagatggcaggtgagagaataaaaagattgagagaaatgggcataatgggatggatatattttgtatggccagaagacccaccagaggtctgggatccaagagagatcccagataatacaccatttaccaaggtcatcaggattatactggtgagacaggcatcagcatcaccaagaagtgtatacaggccagtgatgatagtaggaggtgcagccgcagagctgggcttattagcatctgtgggaatggtcgggctccacagtaatacaggccaggtggtattgcttaattatcacaagccagaaagctggaataatcattataattggtaaagtcattgtggagatggtaactatagcctggtattcctagaagcaagtaaatggaaagccagcaagagtgctatggagaaaacactttctacgcttagaaatattgctctggcacatatacctggtgacatagagggctgctatctttggctggggccaagagaagtaaaagttactgtagcatatccacttggcagtgcaatcagccccactacttggccagtacaatacagcatatcttatggtgatggaagtatcaatgagtgagaagaaatgcagcatagagctaatagaatgatccagtatgaaaaatcacatataaacactcctgggattctaggcttcaggtcatgcatcccaccaacaaagagttatatgtcct

SEQ ID NO: 675412 - DNA, 1967 bp, Homo sapiens
tcaattattgataattagttgcaattcaagagggcaaaaggacaaaggcacacagggtgctgcccattgaaatagtcccggagtgtatcagatgaggaaaagaagttctgattggccgtaatcactgcctgtcatttctctcttattgggtgtaacatttccctctttgaagtagttgcatgattgtgtccgcagatgctaactttgtgttggccactgtggagcccacaagaatggccttatggatatcctaccacaggaagtataactggctgagtgccctatgtgcagctgcacattaaaatctaatattgcatttgtgcagaggcctgcctcccatggaccactctacaccaatgaccaagtgaggtggggatactaaggcagagacctctttttgggagacagatgactctttcattggccaactttggcctgaaaaaattcacaaatkttgccaaaactgcagcctcccctccctctcttccacacacggggcagattcacgtcatggcctaagggctctccctttctttttctccctttctatttgcccttatatggttattttccctaagaactccacttcatgtctaatcctgtcttcgttgtgccttctacgtttgcagagttgacccaacatcttttagtaaggaagggttaggaattctactttgctgaaagatgctgcagaagccttctccttttcttctgacacaaggaaacaggtgtcctctcagaaccttcactcacttcctttcttggctgctgggctgataattagggttaaagcccagcatcacctggctgggacattctggatctgaaaagggaggaaaaagactatacatgtaaaacagggcttatcaaacatggcactagtgacaatttagattgaatattttgttttccttgtggagggtttcctgggtattgtaggatgtttagcatgatccttggcctctccccattagatgctggttgtgacatccttggttgtgataaacaaaaatatctccagatgtttcgaaatgttgcttgggggaaaagatgcctgcagctgagaacaattaacctaaagaataacaagaactggttgaggtcctttttatcagtgccccaacattggcatagagcagtaaattaagggagtattttgggattttgatggtacttgattagatggctggattctaaagcaagataagcaagtattcatttcttaggacatgaaatttaacatgctgcatggcagatggcaggtgagagaataaaaagattgagagaaatgggcataatgggatggatatattttgtatggccagaagacccaccagaggtctgggatccaagagagatcccagataatacaccatttaccaaggtcatcaggattatactggtgagacaggcatcagcatcaccaagaagtgtatacaggccagtgatgatagtaggaggtgcagccgcagagctgggcttattagcatctgtgggaatggtcgggctccacagtaatacaggccaggtggtattgcttaattatcacaagccagaaagctggaataatcattataattggtaaagtcattgtggagatggtaactatagcctggtattcctagaagcaagtaaatggaaagccagcaagagtgctatggagaaaacactttctacgcttagaaatattgctctggcacatatacctggtgacatagagggctgctatctttggctggggccaagagaagtaaaagttactgtagcatatccacttggcagtgcaatcagccccactacttggccagtacaatacagcatatcttatggtgatggaagtatcaatgagtgagaagaaatgcagcatagagctaatagaatgatccagtatgaaaaatcacatataaacactcctgggattctaggcttcaggtcatgcatcccaccaacaaagagttatatgtcct

SEQ ID NO: 675413 - DNA, 1967 bp, Homo sapiens
tcaattattgataattagttgcaattcaagagggcaaaaggacaaaggcacacagggtgctgcccattgaaatagtcccggagtgtatcagatgaggaaaagaagttctgattggccgtaatcactgcctgtcatttctctcttattgggtgtaacatttccctctttgaagtagttgcatgattgtgtccgcagatgctaactttgtgttggccactgtggagcccacaagaatggccttatggatatcctaccacaggaagtataactggctgagtgccctatgtgcagctgcacattaaaatctaatattgcatttgtgcagaggcctgcctcccatggaccactctacaccaatgaccaagtgaggtggggatactaaggcagagacctctttttgggagacagatgactctttcattggccaactttggcctgaaaaaattcacaaatgttgccaaaactgcagcctcccctccctctcttccacacacggggcagattcacgtcatggcctaagggctctccctttctttttctccctttctatttgcccttatatggttattttccctaagaactccacttcatgtctaatcctgtcttcgttgtgccttctacgtttgcagagttgacccaacatcttttagtaaggaagggttaggaattctactttgctgaaagatgctgcagaagccttctccttttcttctgacacaaggaaacaggtgtcctctcagaaccttcactcacttcctttcttggctgctgggctgataattagggttaaagcccagcatcacctggctgggacattctggatctgaaaagggaggaaaaagactatacatgtaaaacagggcttatcaaacatggcactagtgacaatttagattgaatattttgttttccttgtggagggtttcctgggtattgtaggatgtttagcatgatccttggcctctccccattagatgctggttgtgacatccttggttgtgataaacaaaaatatctccagatgtttcgaaatgttgcttgggggaaaagatgcctgcagctgagaacaattaacctaaagaataacaagaactggttgaggtcctttttatcagtgccccaacattggcatagagcagtaaattaagggagtattttgggattttgatggtacttgattagatggctggattctaaagcaagataagcaagtattcatttcttaggacatgaaatttaacatgctgcatggcagatggcaggtgagagaataaaaagattgagagaaatgggcataatgggatggatatattttgtatggccagaagacccaccagaggtctgggatccaagagagatcccagataatacaccatttaccaaggtcatcaggattatrctggtgagacaggcatcagcatcaccaagaagtgtatacaggccagtgatgatagtaggaggtgcagccgcagagctgggcttattagcatctgtgggaatggtcgggctccacagtaatacaggccaggtggtattgcttaattatcacaagccagaaagctggaataatcattataattggtaaagtcattgtggagatggtaactatagcctggtattcctagaagcaagtaaatggaaagccagcaagagtgctatggagaaaacactttctacgcttagaaatattgctctggcacatatacctggtgacatagagggctgctatctttggctggggccaagagaagtaaaagttactgtagcatatccacttggcagtgcaatcagccccactacttggccagtacaatacagcatatcttatggtgatggaagtatcaatgagtgagaagaaatgcagcatagagctaatagaatgatccagtatgaaaaatcacatataaacactcctgggattctaggcttcaggtcatgcatcccaccaacaaagagttatatgtcct

SEQ ID NO: 675414 - DNA, 911 bp, Homo sapiens
gatacgaacaacatttattggaagttttatggcaactcagatagagattgtttttattacattctcatggaaatagggtgttttggaattatgatccacttgtaactgcttcttctgtttgcttaaatatcctgttttcataaatatacatctatctggttgatgttttgatgaaacatacaatattttgtggtgcatgcacactattttctcaaactgacaaatcttgtaaaggtccaatggcagcaatctatatgactttattaacacctgccttggcatgccagaaattctgtaggcattttaggaattggacttgggataatgcttcttgctgagttagggtgaactaactaatgcaactggagccttaaaaccataagtcagcatagaaaattcagtttccactccaacatgtaaacaaactgaaagtcatctttttcrtacttacaaagagaaaaaaaatctgaacagactaaaaaaatcaatggcatttattgggtccttctaagaattgaggtttcagggaaaactgcctccatgaaatctgaaaaacaggtgaatacagagaatcactgctgggatcagcttactatatgcagaaactgctggagccataaactagtaggaacacttaagtaataactatgataaactgctggaggataaatgtggatgatgaagagagcatgaaagtttacagggaatcagtcacatacagacccctaatctttgagggacttttccttgggaaactcatcagattctcacagtaaagagccaatgaaaatcctcatgtcattcttgcaggggtaggggaaaagtaatcattttgaaatatacccagtgttctctgtaacaaagacctactcatcatgggaaaacacattactagagccatattcaacatg

SEQ ID NO: 675415 - DNA, 911 bp, Homo sapiens
gatacgaacaacatttattggaagttttatggcaactcagatagagattgtttttattacattctcatggaaatagggtgttttggaattatgatccacttgtaactgcttcttctgtttgcttaaatatcctgttttcataaatatacatctatctggttgatgttttgatgaaacatacaatattttgtggtgcatgcacactattttctcaaactgacaaatcttgtaaaggtccaatggcagcaatctatatgactttattaacacctgccttggcatgccagaaattctgtaggcattttaggaattggacttgggataatgcttcttgctgagttagggtgaactaactaatgcaactggagccttaaaaccataagtcagcatagaaaattcagtttccactccaacatgtaaacaaactgaaagtcatctttttcatacttacaaagagaaaaaaaatctgaacagactaaaaaaatcaatggcatttattgggtccttctaagaattgaggtttcagggaaaactgcctccatgaaatctgaaaaacaggtgaatacagagaatcactgctgrgatcagcttactatatgcagaaactgctggagccataaactagtaggaacacttaagtaataactatgataaactgctggaggataaatgtggatgatgaagagagcatgaaagtttacagggaatcagtcacatacagacccctaatctttgagggacttttccttgggaaactcatcagattctcacagtaaagagccaatgaaaatcctcatgtcattcttgcaggggtaggggaaaagtaatcattttgaaatatacccagtgttctctgtaacaaagacctactcatcatgggaaaacacattactagagccatattcaacatg

SEQ ID NO: 675416 - DNA, 911 bp, Homo sapiens
gatacgaacaacatttattggaagttttatggcaactcagatagagattgtttttattacattctcatggaaatagggtgttttggaattatgatccacttgtaactgcttcttctgtttgcttaaatatcctgttttcataaatatacatctatctggttgatgttttgatgaaacatacaatattttgtggtgcatgcacactattttctcaaactgacaaatcttgtaaaggtccaatggcagcaatctatatgactttattaacacctgccttggcatgccagaaattctgtaggcattttaggaattggacttgggataatgcttcttgctgagttagggtgaactaactaatgcaactggagccttaaaaccataagtcagcatagaaaattcagtttccactccaacatgtaaacaaactgaaagtcatctttttcatacttacaaagagaaaaaaaatctgaacagactaaaaaaatcaatggcatttattgggtccttctaagaattgaggtttcagggaaaactgcctccatgaaatctgaaaaacaggtgaatacagagaatcactgctgggatcagcttactatatgcagaaactgctggagccataaactagtaggaacacttaagtaayaactatgataaactgctggaggataaatgtggatgatgaagagagcatgaaagtttacagggaatcagtcacatacagacccctaatctttgagggacttttccttgggaaactcatcagattctcacagtaaagagccaatgaaaatcctcatgtcattcttgcaggggtaggggaaaagtaatcattttgaaatatacccagtgttctctgtaacaaagacctactcatcatgggaaaacacattactagagccatattcaacatg

SEQ ID NO: 675417 - DNA, 610 bp, Homo sapiens
aaaacaaagaggacatcctgaaaacaaccagaggaaataaccagattggcttctaaggaaaactactagattaacaatagactcttctatggtaaacatggaagtcagaagacaatggactaacatctacaaagtggtaagagaaaataactgtcaatgaagattttataccctgatcaactattatacaacagcaaaaccaaacaaatatgttttcagaaaataaaaactgagatattccattcatagaccctcactgaaaaaaaactactaaggactatcttttgggaagaagaaacttgaactcagtaggtaaatcctgtaggagaaggatataagaagaaacaatggtgagaaaaaagatcagtaaatgtgrgtaaatcttaacacgcattgactttataaaacaatacaaattttagggataccaaaaaaatggaactaaaatactaggaaacaatcacatgtaaggtggatggagtatgattaaaatgaaagcattctatggtccttgtgacttcaagaaaagggcagagatatcaattacatatagactttgtgagtcaaacacacatgtttaaaatgttcattaaaactgctagataaatag

SEQ ID NO: 675418 - DNA, 676 bp, Homo sapiens
aattaataatccaatttaaatatttgaaagatatgccttataagaaataccgcattaaaagatagagtaagaatatagtaggaaagatgttcttcctaataacatttaattttattatcacaaaaataaagtatgtggagtccatgcaatttgtaaaatctatctaaaatacacatctctaataaggaaactgctttaaggcagaaataatactctcatggcagttaasgttaatttgtgaatttagtgatagagaaggagaattatcctaccttaaagagaaaaatcaaaagataagtcaaattaaaacataaacaccgctagcaacaatgtcgctttaggtaaaaaactttaaaaatgtacatgccttggtacaatctaagtttggtagaaacctcgatgggtcagtaagttaaaggtgagtgttcaaatttactcattatctcagacaagggaagcactaaaactccaaagctatcttaccatcctaattagagttttctcacaatgaatatgcttgcatatatgaaaatagtgtgttgttttattggttatattcaaagaagtgttgaggagagtccggaagacatacattacatgcagtacttaactcacatatagacatgatggcaaatcagtcctcattatcaataaatctgctctcactgaaattgag

SEQ ID NO: 675419 - DNA, 1427 bp, Homo sapiens
ttgcagatctggtwtctgcataatttcaacagaaactattttttagagaggcagaaatgatgttggccccaatccaagcctcgggggtttctagtctcaatcaaggaagtgaagatcaaagagaacatgactgattagggctttgactctcagagtttggtgtgaatcagaatcaccccgagccctgttaaagaattcagacgcctggctccaccctacagactctgatttaatgagtttaaagtggggcccaggcatctgcatctgtttataacaaaccaccctggtgacattgatgcccacttgcgtgtggaggacctgctggaggagtctgaggaaggctggaaagggaagcattcagctgtgatcaatcctaagactctgggcacggtgacgcacatctatagtcccagctacttgggagacaggctgagggtcacttgagcccaggagtttgagaccagtgcccctacactccccacctccatatcttaaaaaaaaaaaaaaaattccggccaggtgcggtggctcatgcctgtaatcccagcactttgggagaccgaggcgggcggatcacaaggtcaggagttcaagaccagcctggccagcatggtgaaaccccatctccactaaaaatacaaaaaattaaccgggcatggtggcacgtgcctgtaatcccagctactcaggaggctgaggcaggagaattgcttgaacccaggaggcagaggttgcagtgagccaagatcgcaccactgcattccagcctgggtgacagagcgagactctgtctcaaaaaaaaaacaaaaacaaaaacaaaaatcctagggctatgagactatgagaggccttgaactgggccctggaggggcagaaggcttgggaggactgtgatcacatctctgcttaggcacagtgggctgggtttggaccagatcatccatgaaaagccaccattcatctctggccaagacctgcccttgtgagaggcagctgaacattgaccttctgccccttactgtaaccttttggttttctgctctttggtcagttctggggaagagacaaacatatccctgaggtgctgaaaattctgctggtgccttgggagcatgttcaggactggagatcatccaacctaccacagtgtctaaaaatagaatcaagccagtgagaagccagctagttggggatcctgaggtctccccagtgatggagaggcctctgaggagttggtgctccagggaatgacagccttctctcaagcactgctcctcgcagctcctgcagcttccggtagccagcacctgaccccaaaacaaagccactcttctccagagcagccagacaagcaggcaggctggcgggctgggagattcagccccactgccacattgggccagctaggctgcggtgtgccttgcaag

SEQ ID NO: 675420 - DNA, 1427 bp, Homo sapiens
ttgcagatctggtatctgcataatttcaacagaaactattttttagagaggcagaaatgatgttggccccaatccaagcctcgggggtttctagtctcaatcaaggaagtgaagatcaaagagaacatgactgattagggctttgactctcagagtttggtgtgaatcagaatcacccygagccctgttaaagaattcagacgcctggctccaccctacagactctgatttaatgagtttaaagtggggcccaggcatctgcatctgtttataacaaaccaccctggtgacattgatgcccacttgcgtgtggaggacctgctggaggagtctgaggaaggctggaaagggaagcattcagctgtgatcaatcctaagactctgggcacggtgacgcacatctatagtcccagctacttgggagacaggctgagggtcacttgagcccaggagtttgagaccagtgcccctacactccccacctccatatcttaaaaaaaaaaaaaaaattccggccaggtgcggtggctcatgcctgtaatcccagcactttgggagaccgaggcgggcggatcacaaggtcaggagttcaagaccagcctggccagcatggtgaaaccccatctccactaaaaatacaaaaaattaaccgggcatggtggcacgtgcctgtaatcccagctactcaggaggctgaggcaggagaattgcttgaacccaggaggcagaggttgcagtgagccaagatcgcaccactgcattccagcctgggtgacagagcgagactctgtctcaaaaaaaaaacaaaaacaaaaacaaaaatcctagggctatgagactatgagaggccttgaactgggccctggaggggcagaaggcttgggaggactgtgatcacatctctgcttaggcacagtgggctgggtttggaccagatcatccatgaaaagccaccattcatctctggccaagacctgcccttgtgagaggcagctgaacattgaccttctgccccttactgtaaccttttggttttctgctctttggtcagttctggggaagagacaaacatatccctgaggtgctgaaaattctgctggtgccttgggagcatgttcaggactggagatcatccaacctaccacagtgtctaaaaatagaatcaagccagtgagaagccagctagttggggatcctgaggtctccccagtgatggagaggcctctgaggagttggtgctccagggaatgacagccttctctcaagcactgctcctcgcagctcctgcagcttccggtagccagcacctgaccccaaaacaaagccactcttctccagagcagccagacaagcaggcaggctggcgggctgggagattcagccccactgccacattgggccagctaggctgcggtgtgccttgcaag

SEQ ID NO: 675421 - DNA, 1435 bp, Homo sapiens
gcctgggcgacaagtttgtagtctttggacaaggcttttatcttttttgaaactctgtctcaaacaagacagaaaaaaaaacccaagggtttccatgtcagttctctctttttgctctcccatgttgagaacaaatgagatggagaagagctacagaagtgtatgttatgtgaaaatgtgctttttttttttttttgagacatggtctctgtcacccaggctggagtgcaatggctaatttttaaattttttatggagatggrgtctcactatgttgctcaggttggtctgaactacactcaagtgatcctcctgccttggcctcccaaagtattgggattaccggtgtgagccaccgcacctggcccaaaattttcctaatgctatcaacgtcaggccacatgcttgctggggcacacagtcctgctctttgtttcttagcctaagcatagctctaaatttcctctttccaatctccagctgctttccccttccactgcctatgctggtctgccttcttcttatcaagaggaggccagtcatgtcttccggacccctttcaaagtaggttcttcaagggaccagaatggaagccctcgtccccaggccaaggttgcaaggcaaagttagctccgcctccaaactcctacattgatgataaacatgtatttgttcatttaggtaacaaatatttcctgagcatgttctctgtaccaggcacctgctgagtgccagggctgccatcacaggaaggtcatgtggtggaggggaaaggagcggttgagaagttccaatgagtgtctgttttgttttgttttgttttgttttttgatatggagtctcgctctgttgccaggctggagtgcagtggtgtgatctcggctcactgcaacctccacctcctgagttcaagtgattctcctgcctcagcctccggagtagctgggactacaggcgcatgccaccatgcccagctaaattttttttgtatttttagtagagatggggtttcaccaaggatggctgaccaggaaggtgtcccctcccctgtagatccttggcctccattcagtccccggggtttgggggtaaggatcggaagctaacctgactgttcacaactggtttggagacttggacggtgcactgcagctttggggcgcactgatgaggtcgggcactgaattggggagggggttatcatccccacatagacaaggaactcagtttcttggggcacccagacacatagcagctttgactctctcaagtgactttgaggtaggtgaggtcagctagtaggagccaaagccagagacagagaaccggatgtatggtgaccatggtgactgtccatgacagattggcttttggacacaggtgaagatctggggaccctgggtggcactaaattccctctccggcagtcaagggg

SEQ ID NO: 675422 - DNA, 1435 bp, Homo sapiens
gcctgggcgacaagtttgtagtctttggacaaggcttttatcttttttgaaactctgtctcaaacaagacagaaaaaaaaacccaagggtttccatgtcagttctctctttttgctctcccatgttgagaacaaatgagatggagaagagctacagaagtgtatgttatgtgaaaatgtgctttttttttttttttgagacatggtctctgtcacccaggctggagtgcaatggctaatttttaaattttttatggagatggggtctcactatgttgctcaggttggtctgaactacactcaagtgatcctcctgccttggcctcccaaagtattgggrttaccggtgtgagccaccgcacctggcccaaaattttcctaatgctatcaacgtcaggccacatgcttgctggggcacacagtcctgctctttgtttcttagcctaagcatagctctaaatttcctctttccaatctccagctgctttccccttccactgcctatgctggtctgccttcttcttatcaagaggaggccagtcatgtcttccggacccctttcaaagtaggttcttcaagggaccagaatggaagccctcgtccccaggccaaggttgcaaggcaaagttagctccgcctccaaactcctacattgatgataaacatgtatttgttcatttaggtaacaaatatttcctgagcatgttctctgtaccaggcacctgctgagtgccagggctgccatcacaggaaggtcatgtggtggaggggaaaggagcggttgagaagttccaatgagtgtctgttttgttttgttttgttttgttttttgatatggagtctcgctctgttgccaggctggagtgcagtggtgtgatctcggctcactgcaacctccacctcctgagttcaagtgattctcctgcctcagcctccggagtagctgggactacaggcgcatgccaccatgcccagctaaattttttttgtatttttagtagagatggggtttcaccaaggatggctgaccaggaaggtgtcccctcccctgtagatccttggcctccattcagtccccggggtttgggggtaaggatcggaagctaacctgactgttcacaactggtttggagacttggacggtgcactgcagctttggggcgcactgatgaggtcgggcactgaattggggagggggttatcatccccacatagacaaggaactcagtttcttggggcacccagacacatagcagctttgactctctcaagtgactttgaggtaggtgaggtcagctagtaggagccaaagccagagacagagaaccggatgtatggtgaccatggtgactgtccatgacagattggcttttggacacaggtgaagatctggggaccctgggtggcactaaattccctctccggcagtcaagggg

SEQ ID NO: 675423 - DNA, 665 bp, Homo sapiens
attcaaagaataatgaagaaggcgtgtattaataaataatttggtaactgttctaaaagaagttgatgcaaagtgtgatggtaccagggaaaaggaaataactaaaaagcgtgggtgactttctaaaaagtcagtaggagaaaagaacaaattgagaaaacacaagtacaaaggaaaakaggttaaaaatgtatatataaattccaggtgattttatgtgattggaaaggtgggtttgattgttaaggtaaactggttaagattatgaaaggtgttgtttgccattatacaaaatttgaattttactttttaaggaatgggaacaatgagaagacttttaagcttctaagtgacaccatcaaatttatgtttcagatatacaaacaacttaggcaacagttgaagagaatgagttggaagagatgaggcctttcattagaggcatgagactagaaaaaatgaaagctaaaccaaaagcaaacagaagaaaggaaatattaaagattagaaaagaaggagacagaatatcaataaagaaaatcaatgaaaccaggaattggttccctaaaaggatcaacaaaattggcaaacctttagtgaaactaagaaaaaaaagagagaagatttaatacaagcaagaataaaagaaccatcactaatagcct

SEQ ID NO: 675424 - DNA, 1355 bp, Homo sapiens
ataaatcatgctgctataaagatacatgcacatgtatgtttattgcagcattattcacaatagcaaagacctggaaccaacccaaatgtccaacaatgatagactggattaagaaaatgtggcacatatacaccatggaatactatgcagccataaaaaatgatgagttcatgtcctttgtagggacatggatgaaattggaaatcatcattctcagtaaactatcgcaagaacaaaaaaccaaacaccgcatattctcactcataggtgggaattgaacagtgagaacacatggacactggaaggggaacatcacactctggggactgttgtggggtggggggaggggggagggatagcattgggagatatacctaatgctagatgacgagttaatgggtgcagcacaccagcatgtcacacgtatacatatgtaagtaacctgcacattgtgcacatgtaccctaaaacttaaagtataataataaaagtatttttttctcctactttataaaacgagtaattatgtaatacctaggagtcattattaatgtataattatcattagccatttggaaattttagaaatagttcattactaattagctaacatttattatatgcttattgtgtgccaggcactgtttgctaagtactttatatacactactttatttaattcttggaagaaactttgatgttgaaactactaatatcccatttcacaagtgtggaatatgagacttaggttaagaaacctctgtatctcaaagtcatatagctagtaagtatcaggaactgtgaggggtctggcgttttaccctatgtacaaactaataaattagtcactgtttcttggatgctgggtcaaaggacacatgcaaaagaagtagccagtgcttcaagtttgtgccaatttcccaagccccacccagtccaacaggggaaacaccagtgagtctacatggatgcttgcacatggggaatttactgcttttacagtaaaccaaagaaagcctgctctttgttttggggaaagagtttatctcagctgttgcagtttctcggtgcaaacrgaaccctgagaaatggtctgggtaaacagtggtcatggccttgcatttttgtcacacccacaggaacatgtagggacactcaagacccatggccgattgcttctttcaacaagaagttgttaagtctagattcaaactcaggtgggctggctccagtcagcccttctgatattccactttaggaaaccaaagctgagaatcactgtactgcatggcaatgaagtcatgacttagaaaccttgacatttcttatttttaggttgaataaatgcttatcac

SEQ ID NO: 675425 - DNA, 2681 bp, Homo sapiens
tggaaagacacaaacgtgcatggacctggttatttctaaccttgcactgctcatgacatctgctctccactccttgaccaagtggactgagggagaaggaagggagggaaggcacaggcagccactgcgttttgtttttctcccttttggccccttgttctgctgccataatgtggttattgcttttcaccagaatctgagttgtcctatgaggcggatacacttggttccccaaattgaaatccaaacagctgtatgtcttttcagcttatgcttctttcccacttataaaagagactcrcattttacataatactgtgcatggcattgggggacccttatggtttatggtttttctaatgtttgggaacaggcgagagcactgtgggcattctataaaatatttaccttgaattgctgagaagaaagctgtgcctgcatattaaaaagtcctatttccttctagatgagttatttaaaaattactaagctcatttccacagaatcattacagatttttctatgtgacgaagccaccccaactgtcgggtctttatttcatgtaggtgtgtaaaaatcgctccagtggtgaattggaaactcgcagtgccaggaagtgcttccacaggcttaatgcatctctgctcctcttttttcataaaaattcaaaggtaagcagaactgctccttttcaccctctatgtgcagctcatcacagaagtgcagccataactgagtcacttgtcaatctttttcctcccaattacagtgtttagacgggggatgctgagagagaagccggtttgctgggaggtgcgagcccagagcacacgctccacctagactgcgggcagtgccccaccatgaggagctcagcagtttcttcacgtggtgttttccaccatgcaaaaacatccaagatctattgtttatgtagcttgtactttgggtcaggccccggttcaattcctaacagtgacattttgtatttgtgtgactaatacacgtgttattaagaaagttactactgtctttaagatgcagtttcctcatctgtgaaatggaatatttgtgtattccatatgttatataatattactgtctgcttaaccttggcatagtgtttgaaggacacaaagcctgagtccagcacagagcaggtgcttgatgaatatcccagacacggaggaaggcagcatctcgattccaagttcttttcctgtatatacatttatatctctctgaataggcatctgcatttgtttcttttattatagacaggttgtctgatctcaatccgttagagatggggtagccttagggaccctctggtcccacatctcactgtacaggggatgcaggatttgccaaggtcctacccattagtgagtagcagagcctggatgagttcctcggatcaggaggaggtggtgtgctcctgtcctcctgtgagatgaagccattcttaatcagagcctcggatcaggaggaggggctgtgcgcctgtcctcctgtgagatgaagccattcttaatcagagcctcggatcaggaggaggggctgtgcgcctgtcctcctgtgagatgaagctgtgctcaaccccggcctcagatcaggaggaggggctgtgctcctgtcctcctgtgagatgaggccatgctcaatcccaggacaggtgcaggcgattgctttcaccttctaactttagaatctggagagtccgcatagctcctactttcgaagctgcctcagagagtctttgttattgcaaaatgcgtgtgggcaggctggaccaggcagtggatcttgttgttttgttagggagaaaggaaaactgaagttccatcacctgccagttagtcttggtctacctccaacccaaacttgggctcagtgaagcagattaataaagcaatggggcatctctggctgctgcgagcaccatgaatatgcatgcagtgcaggccaccggctggaacgcttttcccaccctggaattcgccagtcacgtttctactctctgggtttctttctaagttgaaagattctggaattgtggagctggaagggatattagtgaagaccatctggtccagtgtcctcattttacagatgagctaactgaggccagaggggaagggccactccagggcacactgcgaatggctcacaaacccaggaccaggccagatctcgcagctcttgctccagaggatgcttagtgcctgcagtgcttagggcactcatttttttgctgaattttgtttattgagaccatatggaaagcgagttgaggctgaagttacatgcattcaggaccaagagaaatgcaattgatcacaagatccttctgtgttgggccgctgagcaaatcgtggggtcaccctctctcttagcagtacaggctatgtcgatatgatgatatcaccttagagctaatgaaatgcattcctgagaaataaaatgatcgtttctgttttctgcagagcaattccaaatgagagaagcaataacactttttatgacctattaaaatcactctcatttcactaaacaaccttcacacctgtggcagtccttgcttccctcgcaggggaaataccctgatgtcggaaaaaactatccttgagtgaggcctgacactgtgcctgtgatgatgtgagccatctgcaaaattcacc

SEQ ID NO: 675426 - DNA, 2681 bp, Homo sapiens
tggaaagacacaaacgtgcatggacctggttatttctaaccttgcactgctcatgacatctgctctccactccttgaccaagtggactgagggagaaggaagggagggaaggcacaggcagccactgcgttttgtttttctcccttttggccccttgttctgctgccataatgtggttattgcttttcaccagaatctgagttgtcctatgaggcggatacacttggttccccaaattgaaatccaaacagctgtatgtcttttcagcttatgcttctttcccacttataaaagagactcacattttacataayactgtgcatggcattgggggacccttatggtttatggtttttctaatgtttgggaacaggcgagagcactgtgggcattctataaaatatttaccttgaattgctgagaagaaagctgtgcctgcatattaaaaagtcctatttccttctagatgagttatttaaaaattactaagctcatttccacagaatcattacagatttttctatgtgacgaagccaccccaactgtcgggtctttatttcatgtaggtgtgtaaaaatcgctccagtggtgaattggaaactcgcagtgccaggaagtgcttccacaggcttaatgcatctctgctcctcttttttcataaaaattcaaaggtaagcagaactgctccttttcaccctctatgtgcagctcatcacagaagtgcagccataactgagtcacttgtcaatctttttcctcccaattacagtgtttagacgggggatgctgagagagaagccggtttgctgggaggtgcgagcccagagcacacgctccacctagactgcgggcagtgccccaccatgaggagctcagcagtttcttcacgtggtgttttccaccatgcaaaaacatccaagatctattgtttatgtagcttgtactttgggtcaggccccggttcaattcctaacagtgacattttgtatttgtgtgactaatacacgtgttattaagaaagttactactgtctttaagatgcagtttcctcatctgtgaaatggaatatttgtgtattccatatgttatataatattactgtctgcttaaccttggcatagtgtttgaaggacacaaagcctgagtccagcacagagcaggtgcttgatgaatatcccagacacggaggaaggcagcatctcgattccaagttcttttcctgtatatacatttatatctctctgaataggcatctgcatttgtttcttttattatagacaggttgtctgatctcaatccgttagagatggggtagccttagggaccctctggtcccacatctcactgtacaggggatgcaggatttgccaaggtcctacccattagtgagtagcagagcctggatgagttcctcggatcaggaggaggtggtgtgctcctgtcctcctgtgagatgaagccattcttaatcagagcctcggatcaggaggaggggctgtgcgcctgtcctcctgtgagatgaagccattcttaatcagagcctcggatcaggaggaggggctgtgcgcctgtcctcctgtgagatgaagctgtgctcaaccccggcctcagatcaggaggaggggctgtgctcctgtcctcctgtgagatgaggccatgctcaatcccaggacaggtgcaggcgattgctttcaccttctaactttagaatctggagagtccgcatagctcctactttcgaagctgcctcagagagtctttgttattgcaaaatgcgtgtgggcaggctggaccaggcagtggatcttgttgttttgttagggagaaaggaaaactgaagttccatcacctgccagttagtcttggtctacctccaacccaaacttgggctcagtgaagcagattaataaagcaatggggcatctctggctgctgcgagcaccatgaatatgcatgcagtgcaggccaccggctggaacgcttttcccaccctggaattcgccagtcacgtttctactctctgggtttctttctaagttgaaagattctggaattgtggagctggaagggatattagtgaagaccatctggtccagtgtcctcattttacagatgagctaactgaggccagaggggaagggccactccagggcacactgcgaatggctcacaaacccaggaccaggccagatctcgcagctcttgctccagaggatgcttagtgcctgcagtgcttagggcactcatttttttgctgaattttgtttattgagaccatatggaaagcgagttgaggctgaagttacatgcattcaggaccaagagaaatgcaattgatcacaagatccttctgtgttgggccgctgagcaaatcgtggggtcaccctctctcttagcagtacaggctatgtcgatatgatgatatcaccttagagctaatgaaatgcattcctgagaaataaaatgatcgtttctgttttctgcagagcaattccaaatgagagaagcaataacactttttatgacctattaaaatcactctcatttcactaaacaaccttcacacctgtggcagtccttgcttccctcgcaggggaaataccctgatgtcggaaaaaactatccttgagtgaggcctgacactgtgcctgtgatgatgtgagccatctgcaaaattcacc

SEQ ID NO: 675427 - DNA, 2681 bp, Homo sapiens
tggaaagacacaaacgtgcatggacctggttatttctaaccttgcactgctcatgacatctgctctccactccttgaccaagtggactgagggagaaggaagggagggaaggcacaggcagccactgcgttttgtttttctcccttttggccccttgttctgctgccataatgtggttattgcttttcaccagaatctgagttgtcctatgaggcggatacacttggttccccaaattgaaatccaaacagctgtatgtcttttcagcttatgcttctttcccacttataaaagagactcacattttacataatactgtgcatggcwttgggggacccttatggtttatggtttttctaatgtttgggaacaggcgagagcactgtgggcattctataaaatatttaccttgaattgctgagaagaaagctgtgcctgcatattaaaaagtcctatttccttctagatgagttatttaaaaattactaagctcatttccacagaatcattacagatttttctatgtgacgaagccaccccaactgtcgggtctttatttcatgtaggtgtgtaaaaatcgctccagtggtgaattggaaactcgcagtgccaggaagtgcttccacaggcttaatgcatctctgctcctcttttttcataaaaattcaaaggtaagcagaactgctccttttcaccctctatgtgcagctcatcacagaagtgcagccataactgagtcacttgtcaatctttttcctcccaattacagtgtttagacgggggatgctgagagagaagccggtttgctgggaggtgcgagcccagagcacacgctccacctagactgcgggcagtgccccaccatgaggagctcagcagtttcttcacgtggtgttttccaccatgcaaaaacatccaagatctattgtttatgtagcttgtactttgggtcaggccccggttcaattcctaacagtgacattttgtatttgtgtgactaatacacgtgttattaagaaagttactactgtctttaagatgcagtttcctcatctgtgaaatggaatatttgtgtattccatatgttatataatattactgtctgcttaaccttggcatagtgtttgaaggacacaaagcctgagtccagcacagagcaggtgcttgatgaatatcccagacacggaggaaggcagcatctcgattccaagttcttttcctgtatatacatttatatctctctgaataggcatctgcatttgtttcttttattatagacaggttgtctgatctcaatccgttagagatggggtagccttagggaccctctggtcccacatctcactgtacaggggatgcaggatttgccaaggtcctacccattagtgagtagcagagcctggatgagttcctcggatcaggaggaggtggtgtgctcctgtcctcctgtgagatgaagccattcttaatcagagcctcggatcaggaggaggggctgtgcgcctgtcctcctgtgagatgaagccattcttaatcagagcctcggatcaggaggaggggctgtgcgcctgtcctcctgtgagatgaagctgtgctcaaccccggcctcagatcaggaggaggggctgtgctcctgtcctcctgtgagatgaggccatgctcaatcccaggacaggtgcaggcgattgctttcaccttctaactttagaatctggagagtccgcatagctcctactttcgaagctgcctcagagagtctttgttattgcaaaatgcgtgtgggcaggctggaccaggcagtggatcttgttgttttgttagggagaaaggaaaactgaagttccatcacctgccagttagtcttggtctacctccaacccaaacttgggctcagtgaagcagattaataaagcaatggggcatctctggctgctgcgagcaccatgaatatgcatgcagtgcaggccaccggctggaacgcttttcccaccctggaattcgccagtcacgtttctactctctgggtttctttctaagttgaaagattctggaattgtggagctggaagggatattagtgaagaccatctggtccagtgtcctcattttacagatgagctaactgaggccagaggggaagggccactccagggcacactgcgaatggctcacaaacccaggaccaggccagatctcgcagctcttgctccagaggatgcttagtgcctgcagtgcttagggcactcatttttttgctgaattttgtttattgagaccatatggaaagcgagttgaggctgaagttacatgcattcaggaccaagagaaatgcaattgatcacaagatccttctgtgttgggccgctgagcaaatcgtggggtcaccctctctcttagcagtacaggctatgtcgatatgatgatatcaccttagagctaatgaaatgcattcctgagaaataaaatgatcgtttctgttttctgcagagcaattccaaatgagagaagcaataacactttttatgacctattaaaatcactctcatttcactaaacaaccttcacacctgtggcagtccttgcttccctcgcaggggaaataccctgatgtcggaaaaaactatccttgagtgaggcctgacactgtgcctgtgatgatgtgagccatctgcaaaattcacc

SEQ ID NO: 675428 - DNA, 2681 bp, Homo sapiens
tggaaagacacaaacgtgcatggacctggttatttctaaccttgcactgctcatgacatctgctctccactccttgaccaagtggactgagggagaaggaagggagggaaggcacaggcagccactgcgttttgtttttctcccttttggccccttgttctgctgccataatgtggttattgcttttcaccagaatctgagttgtcctatgaggcggatacacttggttccccaaattgaaatccaaacagctgtatgtcttttcagcttatgcttctttcccacttataaaagagactcacattttacataatactgtgcatggcattgggggacccttatggttyatggtttttctaatgtttgggaacaggcgagagcactgtgggcattctataaaatatttaccttgaattgctgagaagaaagctgtgcctgcatattaaaaagtcctatttccttctagatgagttatttaaaaattactaagctcatttccacagaatcattacagatttttctatgtgacgaagccaccccaactgtcgggtctttatttcatgtaggtgtgtaaaaatcgctccagtggtgaattggaaactcgcagtgccaggaagtgcttccacaggcttaatgcatctctgctcctcttttttcataaaaattcaaaggtaagcagaactgctccttttcaccctctatgtgcagctcatcacagaagtgcagccataactgagtcacttgtcaatctttttcctcccaattacagtgtttagacgggggatgctgagagagaagccggtttgctgggaggtgcgagcccagagcacacgctccacctagactgcgggcagtgccccaccatgaggagctcagcagtttcttcacgtggtgttttccaccatgcaaaaacatccaagatctattgtttatgtagcttgtactttgggtcaggccccggttcaattcctaacagtgacattttgtatttgtgtgactaatacacgtgttattaagaaagttactactgtctttaagatgcagtttcctcatctgtgaaatggaatatttgtgtattccatatgttatataatattactgtctgcttaaccttggcatagtgtttgaaggacacaaagcctgagtccagcacagagcaggtgcttgatgaatatcccagacacggaggaaggcagcatctcgattccaagttcttttcctgtatatacatttatatctctctgaataggcatctgcatttgtttcttttattatagacaggttgtctgatctcaatccgttagagatggggtagccttagggaccctctggtcccacatctcactgtacaggggatgcaggatttgccaaggtcctacccattagtgagtagcagagcctggatgagttcctcggatcaggaggaggtggtgtgctcctgtcctcctgtgagatgaagccattcttaatcagagcctcggatcaggaggaggggctgtgcgcctgtcctcctgtgagatgaagccattcttaatcagagcctcggatcaggaggaggggctgtgcgcctgtcctcctgtgagatgaagctgtgctcaaccccggcctcagatcaggaggaggggctgtgctcctgtcctcctgtgagatgaggccatgctcaatcccaggacaggtgcaggcgattgctttcaccttctaactttagaatctggagagtccgcatagctcctactttcgaagctgcctcagagagtctttgttattgcaaaatgcgtgtgggcaggctggaccaggcagtggatcttgttgttttgttagggagaaaggaaaactgaagttccatcacctgccagttagtcttggtctacctccaacccaaacttgggctcagtgaagcagattaataaagcaatggggcatctctggctgctgcgagcaccatgaatatgcatgcagtgcaggccaccggctggaacgcttttcccaccctggaattcgccagtcacgtttctactctctgggtttctttctaagttgaaagattctggaattgtggagctggaagggatattagtgaagaccatctggtccagtgtcctcattttacagatgagctaactgaggccagaggggaagggccactccagggcacactgcgaatggctcacaaacccaggaccaggccagatctcgcagctcttgctccagaggatgcttagtgcctgcagtgcttagggcactcatttttttgctgaattttgtttattgagaccatatggaaagcgagttgaggctgaagttacatgcattcaggaccaagagaaatgcaattgatcacaagatccttctgtgttgggccgctgagcaaatcgtggggtcaccctctctcttagcagtacaggctatgtcgatatgatgatatcaccttagagctaatgaaatgcattcctgagaaataaaatgatcgtttctgttttctgcagagcaattccaaatgagagaagcaataacactttttatgacctattaaaatcactctcatttcactaaacaaccttcacacctgtggcagtccttgcttccctcgcaggggaaataccctgatgtcggaaaaaactatccttgagtgaggcctgacactgtgcctgtgatgatgtgagccatctgcaaaattcacc

SEQ ID NO: 675429 - DNA, 704 bp, Homo sapiens
gaagaagttcctgtcctgtcttgttatttactgtcctagacctggaattggccatttctctaaggaatcccaatcccttccaatgggaaatggtatttagagaccgaagtcttgtcagtgagggtgctcattgccactaggttgccattgtttctaagccttttccatgaacaaagctagacaacactgatttttgtttttttagaaagagtaaggtaaatcattatttcatactaatgtcttctgttcaaatttgtaattaccaggtatttacttcttatattttatatttacttttcactgaaagtcttggttcttattgacatcatttcttatttgacttatcctacaatatataaataatagtttcaaaataagaatactaacaagttgattgratgaggtttaatatttctttatggtttgttttgtccctaggatatattccattatagatgtacaaccaatgtctttaaaattatttgacataattttctctgtgtgattataccacctccttgatatagactattagagctatatggcattgaacaattaagttcacttttgttttttcttttctaccgaggctacaagtcagttaactaaactcagttgacctaaaattttagcattctttaggtattgctgtgtagtcacagccacatgcaccaaacactctgcttttaggttgattctaccca

SEQ ID NO: 675430 - DNA, 1502 bp, Homo sapiens
gaggcatcatctgcaggacttggtgatggattggctggcgcctagggaggaagtggtgaggatggtgcctggctttctttctggtatatgtagcttccttgctcaatttgagtgacggaggtcgtggggagagagaacacactgtctttctgctccgggccacctgctataatagcatgcaagctctttcaagagagagctgccccctgttagtgccttgaagatccctggaaaagtggctttcacataatcagggcacccagggttctcaatttaatggcacaattgaaaactctcaccagaatattttggatccaaacctacttatgcccgaatgatccttcctgctgcttttgagaaactcctggcctctaaaagtcacaggacaagaccagaccttgaatattagaattctatgacaaggtgagaacagctgcctcactgttagggcagtagattccaaagtggggtacacaagatgatgtggaccattagagggacaagaggaatatattagcactcatattctaatgtcatttttggatttctatatatctaaatttttcatgtgtaaaatatattagcatagtagtatgtgcatgtactgaaaaataaataaagtaaayatattggagaaggtatgctttacatttttaaacatcaaaaatgtttggagcccatagcctgtgagcatagtgaatataaatgaaccagtcatgttggctttgatggcttggcctcctctttcctccctggctgcctaggctcctcagtgacaggtgcccaggggagcaggtggcctgggcagtacctggcaccctgcatcctcatttgttgcctgtggctcttccggggtccctgaagctactatccagctgtccaggctgtggcagagcacagcccttgcttaaattctttcagcttctgtaaaattgagtcatcagatcacaaccctggaaatgatattagaagccttctaagctggtggctctcaaatgtggctacacatctcaatcccatggggggcctttttacatacacccaggtgcctcaacttcatccctggggaatgtgatttatagggctggggtgggatccaggtgtttgcaattttatttcattttatggatggatggatggatggatggatggatggatggatggatggatggatggatgggtggatggatggatggattgacagggtcttgctctgtcatccaggctggagtgcggtggcatcatcatagctcaccgcagccttgaattcatgggctcaagtgatcctcctgtctcagcctcctgagtagatgagaccaccgccatgtgccaccacacctggctaattatttaattttcttttgtagaggctggtctcgccatgttgcccaggctggtcttgaactcctggcctcaaggaatcctgctgcctcagcctcccaaattgctgggattccagtcatatgccactgcgctgggcctagtgaaagtgtttagtaaat

SEQ ID NO: 675431 - DNA, 1502 bp, Homo sapiens
gaggcatcatctgcaggacttggtgatggattggctggcgcctagggaggaagtggtgaggatggtgcctggctttctttctggtatatgtagcttccttgctcaatttgagtgacggaggtcgtggggagagagaacacactgtctttctgctccgggccacctgctataatagcatgcaagctctttcaagagagagctgccccctgttagtgccttgaagatccctggaaaagtggctttcacataatcagggcacccagggttctcaatttaatggcacaattgaaaactctcaccagaatattttggatccaaacctacttatgcccgaatgatccttcctgctgcttttgagaaactcctggcctctaaaagtcacaggacaagaccagaccttgaatattagaattctatgacaaggtgagaacagctgcctcactgttagggcagtagattccaaagtggggtacacaagatgatgtggaccattagagggacaagaggaatatattagcactcatattctaatgtcatttttggatttctatatatctaaatttttcatgtgtaaaatatattagcatagtagtatgtgcatgtactgaaaaataaataaagtaaatatattggagaaggtatgctttacatttttaaacatcaaaaatgtttggagcccatagcctgtgagcatagtgaatataaatgaaccagtcatgttggctttgatggcttggcctcctctttcctccctggctgcctaggctcctcagtgacaggtgcccaggggagcaggtggcctgggcagtacctggcaccctgcatcctcatttgttgcctgtggctcttccggggtccctgaagctactatccagctgtccaggctgtggcagagcacagcccttgcttaaattctttcagcttctgtaaaattgagtcatcagatcacaaccctggaaatgatattagaagccttctaagctggtggctctcaaatgtggctacacatctcaatcccatggggggcctttttacatacacccaggtgcctcaacttcatccctggggaatgtgatttatagggctggggtgggatccaggtgtttgcaattttatttcattttatggatggatggatggatggatggatggatggatggatggatggatggatggatggrtggatggatggatggattgacagggtcttgctctgtcatccaggctggagtgcggtggcatcatcatagctcaccgcagccttgaattcatgggctcaagtgatcctcctgtctcagcctcctgagtagatgagaccaccgccatgtgccaccacacctggctaattatttaattttcttttgtagaggctggtctcgccatgttgcccaggctggtcttgaactcctggcctcaaggaatcctgctgcctcagcctcccaaattgctgggattccagtcatatgccactgcgctgggcctagtgaaagtgtttagtaaat

SEQ ID NO: 675432 - DNA, 602 bp, Homo sapiens
ctttaaaatatgcttgaatatggatgcagctggaggtcattatcctaatcaaattaatgcagaaatggaaaaccaaacaccacatgttctcacttagtagtagctaaacattaggtacacatgggcacaaagatgggacccatagacactgtggaccccaaaagggtagaggaaaagaagggagaaagggctgaaaaactacctattgggcgctatgctcactacctgggtgatgggatcaatcgtaccccaaaccttagcatcacgcaatatacccatgtaacaaacctgcacatgtaccccctaaatttaaaagytgaatttaaaaatataaaataaaatatgcttgaataaatgcctctaaaattataatgtaataaacatttaaaacacaaaggtataatatccacttaattacaaccattgttataggatccctggtaccaagcttagttttacttactataatattagaccggtatatcaaattatcaaatcctacttcaggaagtcctactcaggtattatccaaaatatctacctgatagcgacatatttttacagtatcaggcaaacctgaaggactgatcacatggcatcac

SEQ ID NO: 675433 - DNA, 636 bp, Homo sapiens
agctttccaaaccctgtccttttgggtgttcatggaagtttcattacataggcatgattgattaaaccattggccattggtgatcagcttaaccttcagcccctctctcctccccagagtttaggcggggggtgttgctgaaagtcccagtcctctagttgtgtcttaatatttccagtgaccaacccccatcctgaagctacccaggggaccatcagtcaactcactagcacacaaaaagacatcacttcagaatatctaagaattttaagagttgtatgtcagraaacaaggaagaaaaccaaatacatatttcaccatatcacactatctatattagttaattgactttatccagagtgtcatccaaaaggctatcaggatggctaaatagtagaaaggagagctttttgggcaatattggtttgcaaacttgtaagagacattctctggcatgtgccaaaggtgttctctcttggaaaaggggaaggacaggttggattttatgcctcacagggcctgtatcacacaatagagtcatagatattcaacaggttggggggaaaagctacacgcatttaggagaggagctgagtgcatgcacagtgagtaaatacatatgtcacatacattcca

SEQ ID NO: 675434 - DNA, 667 bp, Homo sapiens
tgggaggcagaggttgcagtgagtgttcatggcactgcactacagcctgggggacagagctagaccctgtctcaaaaaaaaaaaaaaaagaaaaagaaaaatcagtcctttagtgcytttctcctctgtgctgtctcagaggtgagccaggcacagttcctgccctccaggcgctcggtactggatgaagacgaaatgaaattaggaggcccagagaagcgaagtggcccagagtcacagcaaatctccacattcctccaccaaggcccaggccacagttctaacagggtaactgggaggtgtgctgagggaagcctcagcatggaaaggttggaaaggttggaaacgtagagtggaatccctcagagagtatatgggatcagaggaggttggcagtggccagtaaacagagcccagagaagtcaattcctattcctgttcctgctttactggggggacctggggcttgtgcctgtggaaacccatatatgtgtgtctgcttccagatgtgcagcccccagagggccggagccgagatggcctgctgactgtgaacctacgggaaggcggccgcctgcacctctgtgcggagaccaaggatgatgccctgtgagtcactcccaggagaggatggggtggaatctcggggaaagttaccatgtgcccc

SEQ ID NO: 675435 - DNA, 1017 bp, Homo sapiens
cagaggtttgcagatatcttaagtggtcatcaggagacttcattgtcagaatcatggtccaatcagtctatcacccttaaacctgaagcacagaaccctgaggtttgaccctttctaggttggtcacragccttggggatggagaggggtaacaagctaaggccaggatatgcttaggcaggaacatatactgaatatagaaagagttccaactacaaagcagatgtcagcctctgtcctctcagattgtcaccatctggctgggtgtggtggctcacgtctgtaatcccagcactttgggaggctgaggcaggtggatcacttgaggtcaggagttcaagaccagcttggccaacctggtgaaacgctgtctctactaaaaatacaaaaattagccgggtgtggtggcaggcacctgtaatcccagctactgaggaggctgaggcagtacaatcgcttggactcgggaggtggaggttgcagtgagctgagatggcgccactgcactccagcctgggcaacagagtgagacgccttctcaaaaaaaaaaaaaaatcaccttcttctagtatatcggggaggaaggaggccttctccactggccagctgctctcccccacaccttagtctgtctggacccactggttaccatttgaacatcttagtgagattctctcacatggatgcctgttctctctacctggacaccaattatgggatcaatgtggggtggttttcctttactgcccgagttttcattctccatgtcatcaccagccccaacaaagcacgtgcatcagacttcatagaaatggtggagtaacaaaggaaaaagaaggaaatgaaaaaataaaatgaaattactctttatccccccagtaaggggacaggtttttagttcacttgcagaagttcctacttcctcacttcaatcccctgtcctctgttctggctttctccaaaaacctctccacatttgtgctttccagtcaccccaatgaacaaagcaatgagtgc

SEQ ID NO: 675436 - DNA, 1017 bp, Homo sapiens
cagaggtttgcagatatcttaagtggtcatcaggagacttcattgtcagaatcatggtccaatcagtctatcacccttaaacctgaagcacagaaccctgaggtttgaccctttctaggttggtcacaagccttggggatggagaggggtaacaagctaaggccaggatatgcttaggcaggaacatatactgaatatagaaagagttccaactacaaagcagatgtcagcctctgtcctctcagattgtcaccatctggctgggtgtggtggctcacgtctgtaatcccagcactttgggaggctgaggcaggtggatcacttgaggtcaggagttcaagaccagcttggccaacctggtgaaacgctgtctctactaaaaatacaaaaattagccgggtgtggtggcaggcacctgtaatcccagctactgaggaggctgaggcagtacaatcgcttggactcgggaggtggaggttgcagtgagctgagatggcgccactgcactccagcctgggcaacagagtgagmcgccttctcaaaaaaaaaaaaaaatcaccttcttctagtatatcggggaggaaggaggccttctccactggccagctgctctcccccacaccttagtctgtctggacccactggttaccatttgaacatcttagtgagattctctcacatggatgcctgttctctctacctggacaccaattatgggatcaatgtggggtggttttcctttactgcccgagttttcattctccatgtcatcaccagccccaacaaagcacgtgcatcagacttcatagaaatggtggagtaacaaaggaaaaagaaggaaatgaaaaaataaaatgaaattactctttatccccccagtaaggggacaggtttttagttcacttgcagaagttcctacttcctcacttcaatcccctgtcctctgttctggctttctccaaaaacctctccacatttgtgctttccagtcaccccaatgaacaaagcaatgagtgc

SEQ ID NO: 675437 - DNA, 1017 bp, Homo sapiens
cagaggtttgcagatatcttaagtggtcatcaggagacttcattgtcagaatcatggtccaatcagtctatcacccttaaacctgaagcacagaaccctgaggtttgaccctttctaggttggtcacaagccttggggatggagaggggtaacaagctaaggccaggatatgcttaggcaggaacatatactgaatatagaaagagttccaactacaaagcagatgtcagcctctgtcctctcagattgtcaccatctggctgggtgtggtggctcacgtctgtaatcccagcactttgggaggctgaggcaggtggatcacttgaggtcaggagttcaagaccagcttggccaacctggtgaaacgctgtctctactaaaaatacaaaaattagccgggtgtggtggcaggcacctgtaatcccagctactgaggaggctgaggcagtacaatcgcttggactcgggaggtggaggttgcagtgagctgagatggcgccactgcactccagcctgggcaacagagtgagackccttctcaaaaaaaaaaaaaaatcaccttcttctagtatatcggggaggaaggaggccttctccactggccagctgctctcccccacaccttagtctgtctggacccactggttaccatttgaacatcttagtgagattctctcacatggatgcctgttctctctacctggacaccaattatgggatcaatgtggggtggttttcctttactgcccgagttttcattctccatgtcatcaccagccccaacaaagcacgtgcatcagacttcatagaaatggtggagtaacaaaggaaaaagaaggaaatgaaaaaataaaatgaaattactctttatccccccagtaaggggacaggtttttagttcacttgcagaagttcctacttcctcacttcaatcccctgtcctctgttctggctttctccaaaaacctctccacatttgtgctttccagtcaccccaatgaacaaagcaatgagtgc

SEQ ID NO: 675438 - DNA, 784 bp, Homo sapiens
ctcttgtgatttcatctttgacattaattatttaggagtgtattatttaattttcacatatttgtgaatgtgccaaatatccttctgttaatgatttctaatttcattattcatttattcttaatttcaaatgtagataaaaaatgtcacagaatcctaggcttggacaaaatctatagagaatatccaccattacttctaatgccatcctagatgatattggagatatatttcaacagactttggaagagacaaaagaaatcaaatgataaaagtttatcctaggactggacaaaatcatttacacattgtatttatacagcattttacagattatagaaagtacttttacatccacaactgcaagtaaataattttttaaaaatatcttgaatattacttgtaacamaaaatagacaacaaataaattggcaaaaacaaaatacctgataggtgttgtcaaaactgtcatacatgaatctggtgatcaaagatgtctttccaactgaaatgaaacgaaaaaaagatttgctcagtgaacacattacattgggttctcagaaaatttttctacagagaactgcaattaaagtcaatgggaaatacctgcaatggttctactaagaataattaaaacccatatagccccaagattgtcaaaatgactttctccaaacacagacaaccatctcccaatttaaaagcacaggtaaacagtctatagttaaaagttgaaaacattctgttattatatactgacattcctaattcacaaaaggccaag

SEQ ID NO: 675439 - DNA, 1532 bp, Homo sapiens
ggaaaactctgactaaattagatgaacgtcaacttgataataaacaaatgcctgccgggcgcggtggctcacgcctataatcccagcactttgggaggcgggcggatcacaagttcaggagatcaagaccatcctggctaacacggtgaaaccctgtctctactaaaaatacaaaaaaaaaaaaaaaaaaaaaaattagccgggcgtgttggcaggcgcctgtagtcccagctacgcgggaggctgaggcaggagaatggcgtgaacccaggaggtggagcttgcagtgagccgagatcgcgccactgcactccagcctgggctacagagcgagactgtctcaaaaacaaaacaaaacaaaacaaaaaaacaaaaaacaaaaaaagccaattatgagtatcttcaattaaatataaaaaaaggatttaatggctgggcacagaggcagatcacctgaggtcaggagttcaagaccagcctagccaacatggtgaaactcygtctctactaaaaatacaaaaattagccatgcgtggtggcacacgcctgtaatcccagctactcagtaggctcaagcagaagaactgcttgaacctgggaggcagaggttgcagtgagctgcgatcacgccactgtactccggcctggatgacagagcaagactccgtctccaaaaaataaataaataaataaataaataaataaaggatttaaggatttaattaacataagcaaatataattggaatgaatgaaagttaagagaccaaaagattaaccagtaggtacatgaatcagagaaatatgtgtttaaagaaagcaacagggccagatgcagtggctcacgcctgcaatcccagcactttgggaggctgaggcgggtggatcacttggagtgtaggagtttgagaccagcctgggcaacatagcaagactccatcttttttttttttttttttttttaaagaagaaagaaaagaaagcgacaggctgggcgctgtggcttatgcatataatcccagtactttgggagcccaaggcaggagatcacttgagctcaggggttcaagaccagcctagtaacatagtgagacctcgtctctactaaaaatttaaaaaatcaggtgtggtggtggacgcctgtagtccctacttgggaggctgaagtaggaggactgcttgaacccaggagatggaggctacagtgagttatgatggcgccattgcactccagcttgagactgtttcaaaaaaaaaaaagctaggtaagagtaataggttaaagtgatcccactggccctcccccatccttatttttaactttgaaagttattagaaatacctcaggaaagctttcttgaaaggttatgtgtgaagtctttccctctagactagtggttctcaatacctatgcggtatcagaattacctgggaagcttaaaaacaaacaaaactccagatgcttgggcctcaccctcaaagactgattcaactgatgtggggtggggctgagccattcgtgttttattcaaa

SEQ ID NO: 675440 - DNA, 625 bp, Homo sapiens
catgtagtaattaactcatttacttcaaattgaagtcccggaaaaagcaaaatttttttaaactttttattccaattaccttcaagcattcaacttgcaatactttattatattctttcattatcatttcattgaaacagtaagtgacactatgatgtcaaaacaagatgtgtcaagttaatggatgttattaccacatagctttctatttgcaagtgttaggggttttttggtttggtttggtttggkttgggtttttctgtttttgtttgttttttgagacagggtctcagtctgttgcccattctgaagtgcagtggtacggtcaccactggctgcagcctcgacctcctgggctcaagagatctcctcagcttcccagtagctgggactatagggaaatcccaccactcctggctaatttttttttttttttctagaggcagggtctcactatgttgcctaggctggtctcgaactcctgggctcaagcaatcctcgtgcctgagcctcccagaatactgggattacatgtgtgaaccaaatgttctgaatttatctaggtaaatatttttctgggacgtcaaatttctctttgtattaatgccacaaaatattgatacat

SEQ ID NO: 675441 - DNA, 574 bp, Homo sapiens
cccacctcggcctcccaaagtgctgggattacaggcatgagccaccgtgcctggccgcgggttggacatttgtatctaactaatatgcagctgtatgaaataggataaggtcctttgtctgtttactaactgaaattggaagagactggattagaagatctgmattttttaagctttaaaattgtctgctttaaattgtcttcccattcagatatatcaaaacaatatataattatttacaatcttgctttcagatttgcttagaaaaagtattaagcaccaaaactgtaaaatgggggttgtttgtgtgttttggtagagatagtttccctatgttgctcatgctggtttcaaactcctggtcaaaactatcctctggtctcagcctcttaaagcgctgggattataggcatgagccacctcacctggccaaaaaatttgtgtatttttgatgtgtacattaactagagttaataattatgatattctttgcttattgatgtttagcactcagttttgtttttgtgttaatattttccttctgaagtatcacctctgtcgttatgtttaatta

SEQ ID NO: 675442 - DNA, 605 bp, Homo sapiens
atttctctcttgtaataaaaattccattacctctgtgaaagttatcctgagagaaagaaataaaaacaatttatataagatgattgtacgtgaattttcattcacttaagtttctctgcagttgaatttccttcctacttttggagaatcactgaactgtaaagcagagactgcttcatattattttaaactgtgaaaactactgatatttatmttttaggccctttaatacacagtaaaatccttgatataggcttcaccaatcaaacacacctaccatagacttgaattaaaatttaatcatgtgagaagtcaaggatgacaaggcgacagtggcagctgcagccagttcctgtagctgcagttgtagcagtttgagtgacagtatgaatgtcctgtttgtgaagtcatcagtgatgtaatctgtagtgtttgttactagtaaatacaaggagaagaaaaataatttaagcccaagagaaccccaaaatgtagctcaccctggcaatgtctggcccattttccctagacctttcatattctctgggtgattttcaacagtatctacatccctgaagctgaaaactcctttcccttggattttg

SEQ ID NO: 675443 - DNA, 597 bp, Homo sapiens
gaaatgtagatctgtctcttctctcttgaattcctgatctggcctaaattcgcacatacattctttgcattgcttgtttgcaaaaacttaaactgtgcctttatccccaatatctttccccacatgctccttgtgatttggcctagcttacctccccactcagcatgtattataaaacaaattaaacttttgtgccatgaccacagttcacaatcaggtgttttttgttgttgttgttgttgttgttttttgtgagtactactacctcgaacttactttacatatcctgaaacctgcattacctgagtgctstaactatttgtcattctgcatgtcaagattgatgagacttgcttggctttatctgctatagttcacggctctagaactaaatcactgtagagtttgacccacttcttacagttgaatagacctgtcatctcttcctggaaaaacacctcaccctcaataagttatggcccctgcctggctagctttctcttatttccatttattctttggcatgttaactctttgatttgaaacttcatgagttactactgtatggaatacggctatgtttttataacaacactg

SEQ ID NO: 675444 - DNA, 1500 bp, Homo sapiens
tctgagattcaccttggaggtatattggctggtgatggttgttttaatggcaatatattctcacataaagcttatcatattccccacaggctattttttctctgtgtttttgactttcagagaatatgaacaaaatttatgagagttttttaccttattgtgagaaaataattctttatttatagaaaaaaaggcactttagatattggcaatacagtgatgtactgagaaagcaattcaagtggctccatgaaacctgtttcatatcctagtcrttctttttgttcccccagaacaagatgatgtaaagaatgaatgaaggaggtatgacaatatttatagtgtctgctgtgaggcaagcattttagctgatgttcagagtagatcatctcattgtaagcctcactcatcgaatcaatcaaatgagtggatataattcaacttttattaataaatggggggtttggggttcaaagaggcataaataatgacggcatgaccatgtggcttagtttattaaatgcgatatttcacaacatagagagtcctgttttttaagtttctggcaccaacatttcaatttctctactttttaacagctatctcataaagtgtataatgtgttatcatttaactgtaggcacctacttggcaaaccaaacaccaaactttcaggtaactcaccttcaaatgccttttggtgtttgttaacagttttattatagtatattagtaacattgtatatttatattgtgcttagagtttatattccactttcacaaaactcttttctttcatatttctgctaattattatagtaagttactgccattttatagtgagaaaactaaggttcatgtaagacactgtaatttatgctgaactcagttattaacctttacctttctgccaagatggaagtaagttaatttctcacagatactagcatgctattttaaatatatacaattataacacattagcaatagcattccaacaaaaatacatttattgagcacattttatgtgccagaccatatgcagtacttctattatgcctttaatcttcacagtaattctgtaagttaaatcccactgttatattctctatatgtttcttaatattatactcattgatgagggtaaagtgaactctctcaagatccagtaagtagcagaactcagagtcaagaatagcctttgagtctagaacttccaaattcagaaatatcacactattttgtttcaagttttatcatttggccagtagaccaacaactatttaaatgaaaaacatagtttttaatacttatgttttcagtgcctagcctattccttgggttttaataggttgtattaaatgttttcaaagaaaatagtctgttattatatattttttaagccttgcaatacattgaaattgaattggtaattaagaatataaagtgcatgacatcttattgacctgtttagtatatcctacatgttcagaacagtgc

SEQ ID NO: 675445 - DNA, 641 bp, Homo sapiens
cagaaattcgatagtgtcatacaaagcatgatggtgtaggcaggctaacaatccctatatgagtacagccttttacagttaaaaaaacaaaaaaagggcaaggcacggtggctcacacctgtaatcctagcactttgggaggctgaggcgagcagactgcctgagctcaggagttcaagaccagcctgggcaacacagtgaaaccccatctctactaaaayacaaaaaaaaaattcgctgggcatggtgatgcatgcctgtaatcctagctacttgggaggctgaggcaggagaatcacttgaacccaggaggcagaggttgcagtgagccaagatcgtgccactgtactccagcttgggcaacagagtgaggctctggctctaaaataaaaaaaaagaagaactttttatgtttaccatcttaaaacagttactatccttcttttatagataaaaatcatagggcccagaaaaattgagtcactagatcttcatcactgtggagcatatcagaataagataatcccagagactaagcctcctgattccaagtttattccccaacattgtttctactatccccctactgactctggaatcatatccagcacaacctttaaaaatctggtgggtgggctgag

SEQ ID NO: 675446 - DNA, 656 bp, Homo sapiens
atgccatgtgggatcctggcaaaatttgaatcaattctattaacttagttaatacagttgttccaaggttaactcagttttagcagttgttctgtggttaggaaagggatcatcactaggggaacctagatgaaggatttgcagaaactgtacttttttttttttttttttttttttgagactgagtctcgctctgtcacccaggctggagtgcaatggtgtgatctcggctcactgcaaccttcgcctcccgggttcaagcaattctcttgcctcagcctcctgagtagctgggattacaggcgcatgccagcatgcctggctaatttttgtatttttagtagagacagggtttcaccatgttggtcaggctggtctcgaactactgacctcgtgatccacctrcctcggcctcccaaagtgctgggattacaggtgtgaaccaccatgcctggccaaactgtactatttttgcaactcttgtgtatgtctaaacttatctccaaataaaaaattaaattttaaaaaaggagaacctagcatatagaaagtgctgtataggtatttattaaatagacaaaatggtaattggttaaaagtatgtattgatgtgcttaattaagtaaaaaaatcagggtgtaaccatgcatgttaaa

SEQ ID NO: 675447 - DNA, 601 bp, Homo sapiens
ccgcgtctgttccccagctcatctttgctccctgttttctccccacgctggcctccgtgcctggaacaagtcagacttgtgttatttcccagctgtgtgaccttgagcaagtggcttaatgtttctgagccttagtttcttcctctgtaaaataaggataataatacgtacttcacagactagtggtaaggattaaatgagacaatgagagaatgcaaagcacttagcctagttcaagaacatagttatccatcactttaggatacagcaggggcctcttgttcacccctgttattcccaggggtacccgcctggctcatagtaggtgcgyagcaagatttttttcaatggaaactagagtgggatgcgcctatctagaaaatcctctgttggagcctagtcttggtccttaaaagtcctgggcctgccttccccctgcctttaagaagctgagccagcaatagtagcatgtggccacctgcagggctctgtggaggaaagagctttgagctgggaaattatgttcttagatgagtcatgttctgcctcaccatttctttagtggttctcaatcctagttgcacattagaatcacccaggg

SEQ ID NO: 675448 - DNA, 787 bp, Homo sapiens
cgtgatcttggctcactgcaacctccgcctcccaggttcaagtgattctcctgccgcagcctccccagtacctgggattataggcacgtgccactatgccctgctaattttctgtatttttagtagagacagggtttcaccatgttggccaggctggtctcgagctcctgacctcaggtgatccacctacttcagcctcccaaagtgctgggattgcaggcatgagccaccacgcccggcctctctctcaatttgcttcaacagattgccgctggaataatttttttctrttttctaatgaacagtttcttttgccagatttgcaaccatttcttcttttgaaaacagcacttagattttcctttaagtaccacccccctcctgctgtaaatgagttaatgaggcttggatggtgccaaccctactctctgtctccaaggataggcaatgtatttccctggccatggtgttcatatttgtactgggtgaccaaagttatcacatgagactcagtccaggatcttgatggaactattggggaagaagcaatctcttctcccaagagaggctaagctattaggattaagccttaagctgatttgatttgccatctttgccacatctttggaaagaactcccttgagaaagaaatcaagaagaggaaagtagagccaagagatgacatcattttattccttggcatcagttgagcctgaagccagatgcatctttgaacttcccagttaaatgaaccaatacattctttgttgcttaagccaatttgaat

SEQ ID NO: 675449 - DNA, 787 bp, Homo sapiens
cgtgatcttggctcactgcaacctccgcctcccaggttcaagtgattctcctgccgcagcctccccagtacctgggattataggcacgtgccactatgccctgctaattttctgtatttttagtagagacagggtttcaccatgttggccaggctggtctcgagctcctgacctcaggtgatccacctacttcagcctcccaaagtgctgggattgcaggcatgagccaccacgcccggcctctctctcaatttgcttcaacagattgccgctggaataatttttttctgttttytaatgaacagtttcttttgccagatttgcaaccatttcttcttttgaaaacagcacttagattttcctttaagtaccacccccctcctgctgtaaatgagttaatgaggcttggatggtgccaaccctactctctgtctccaaggataggcaatgtatttccctggccatggtgttcatatttgtactgggtgaccaaagttatcacatgagactcagtccaggatcttgatggaactattggggaagaagcaatctcttctcccaagagaggctaagctattaggattaagccttaagctgatttgatttgccatctttgccacatctttggaaagaactcccttgagaaagaaatcaagaagaggaaagtagagccaagagatgacatcattttattccttggcatcagttgagcctgaagccagatgcatctttgaacttcccagttaaatgaaccaatacattctttgttgcttaagccaatttgaat

SEQ ID NO: 675450 - DNA, 642 bp, Homo sapiens
attatttgaaattataaaaataattctaaataatgaaataccagaaaaagaagtgaagtatgaaatcagaaaagtgggcctggtgcggtggctcacacctgtaatcctagcactttgggaggccaaggtgggtggatcacttgaggttaggagttcaagaccagcctggccaacatgatgaaaccccgtctctactaaaaatacaaaaaaattagctgggtgtggtggcatgtgtctgtaatcccagttactcaggaggctgaggcaagagaattgcttgaacctgggaggtagaggttgcagtgagctgagatcactccactgcactccaaagtaggcaacagagtgagactctgtctctaaataaataaataaataaataaataaaataaaatcagaaaagtgaaggaaaacttattatttacaaatgacctaattgtctttaaaaaatcaaatattactgtaastagtttttaataaactaggtttttataaaaattaataaatagaatgctgtaaataggatccacaagttggaaagtaaaatgcaaaaacagatgctaaaatcaatggtaacaacaataacatgattcctaggatgaacacataaaacatgtagaacctatgcttttataattttta

SEQ ID NO: 675451 - DNA, 598 bp, Homo sapiens
taactacttaattacatttccagattcctagttagtgcagtatcaatgatctgtgcccatctttcttgtttttcaaaaatattgaacattcttgtccttactgttaataaatagcctgctcaaggttttcaagaaaatttacaacaattgaacaattcatattgtatataagtaaaagtgcatacctatatatttttaatttttttcaattttaggttttagggtagaagctattccagatcctgcttctgtctgattggagacatgatgaaatctgaatagacagttaaataattaatttttaatatctccctcttaccattgaacattagaagtgacctaggttaagaactgtccctgcagttgctttctacctggttgtcagaccacccaggctgagcagccacagggcccgatttctctatcaaggcratattttccttcaggagtcgcattgtatagaattggcattaaatgagggcctccgacaaggctttcctgggacgtagttatgtgttcttcctgcctcattgccagggtgattattctcagggaaaagctatttccagagggattataagagacttgctggctgcca

SEQ ID NO: 675452 - DNA, 614 bp, Homo sapiens
agacccaactacaattctctaccactcttagagttgtagttaaaagatcaggctccaaaagataaatgtttgaggtgacagatatcccaattaccctgttttgatcattacgtattgcatatatgtaccaaaatagcacatgtaycccaaaaatgtgtgtaactgatgtaacaatacattttttaaaaaggaccaggctccagtcagaatgcctaaatgccactgtgtgagcctctggggcaatctacttcatctctttgcctttctgttcccttattcctaaaactaggttaaataatggtatctacacatcattaatcgtgaagattaaatgagttaatatatgtaaagcatttgaacagtaactggcatacagtaagcatgcagtaatgttagaattagcttaataagttaaatgaacaagtaatttcatcttactgtcttcatcctaaaactgattaatatttaccctatgtgtccatctcttaatgctcttacaagtgtgaagaacatgagaggatattatgatttacatatgcttcccataactctgtcacactagaaatggaaaatacaattataatttttatttttaatatttattatttgtgtga

SEQ ID NO: 675453 - DNA, 854 bp, Homo sapiens
tgtgtgactttaaacaagttacctaagctctgtgagcctcagtttcctcacctgcaatatggggctagaaacatacctacctcatgagcatgatgggcttcaattcaatcatctaggtcaagctcttagcacagtgcacagaaatgggacacccttgaggcatatttcttctctttgtctctgccggccaggagccaattccgtatcttattacacaataattaaccaatggggaggcagggagcgccccctctacctcccaatctcagagggtcctgcagacccactgcaactccagaagtaccatgtatgggaagcagagataattttgctctcagacgaggcctgaggaggcctttccctttckggcctgggcccaggaaacacggctggccttatggagaggagtctggggaaggagaccctcccctggggggatcacattacctgagtgagagaagctggggaaaaagctgggggcgggggtgggagggtgttgggggtggtgccaggcccgcatgcctgtgtgccttgggtgtgtggcccagcagaatttgttggatgctttgggattttatttttcttttttctctaatttcctttgaaaacatatgtttggcctccattacagaagtcctgcctatcgcagggaagcccacggcagacaacgcaaaccccagaaaagcgctggctgccgtcggctgcaggttcctgcatcttttttccaatgtgcacttcgttttaataaaaaatgggaccattttgtatacactgtttttgtatcttccttttctcactgcgtaaccttttcccatttgggaaaattctattctgttgacaatgaccagctgcat

SEQ ID NO: 675454 - DNA, 621 bp, Homo sapiens
tttcatgaaacgagagttcttctctaacttaaagagtaaatgttacagtccgacatttcatctttgttgtgggtatgaaagaattgggatctacttttaacatgctttgaacatgatcattagtagaattaaaattttacaggtgctacttgaggatttctctttaaattagcatcgctatagtagcttcgatgtttgctgctttatgttttactagatttagttttgtagagtagttttaggtgcacagccaaattaaggggaaggttaaaaaaaatttatataccccctgtccccacacatacaggatctcctttattatcaacatccccccataagaatggtacatttattacaatcaatgaacctactttgacatatttcgattaaccaaagcccatagtttacattggagckcactcttgctgttgtcaattttatgggtttggacaaaagttcaataacatgtatccatccttatagtatcatacagataattttcattgtttaattatctgtgctctgcttattaatccttctctccctcaactcctggcaatcactgacctgttcactgtttccctaattttgctgtttcgaaaatattacacagttggaatc

SEQ ID NO: 675455 - DNA, 1511 bp, Homo sapiens
  misc_feature 412, 413: n = A,T,C or G
acagcccgtgcacagccaccttgcctcaggctacagctggccccagctcgtcctcctccctccttgatacaaacttaaccagagcttcatgaaaggaaccgaggctaataatttaagaagtaatttgttattagtgtggcactgatgcactgagctgaccgaagtgcctttcagcagattattattaaatattaagtctrttgattcgaggcagagcggcactctggtcggtccctagcagctggggacatgcatttgtttcggtgatttatggaaatcaagccactccagggagcctcacaaatgtcgctgtccactgtaacccaggtatcctcccagcagtcccgggggtgggttatagatgagggagggtctgagaagttaaggaagctgcccgaggtgcacagcatannggtgaaaaaaccaggattcaaacttggatctatctgagtcaagtctctgccactttgaagctgcatatggagcacacagtagggactcatcacatgtgcattattattattatcatctttccctcccaaacgtcagctccatagccatagatcagaatgtggatttttttttttaatttactaaagtatgtccagcactgtgagctcttgtttttttttttttttttttttgagactgagtcttgctcttgtcgcccaggctagagtgcaatgtgcaatctcagctcactgcaacctctgcttcccgggttcaagcaattctcctgcctcagcctcccccaagtagctgggattataggcatctgccaccatgcccggctaatttttgtatttttagaagagacgggtttcaccatgttggccaggctggtctcaaactcctgacctcaggtgatctgtctgcctcggcctcccaaaatgctgagattacaggcatgagccaccgcgcctggccagtaacctcttaatatgctcaataaatgttaagatgaagggatggaagcatggatgggagggagggagggagggaaggagggaaggtgggaatagtaaagtcccggtgagagcaaagagtgacctaagagtcacttttcctgccttgttgtcactgtgcctccaccgaagtctcagagtctgtgatgttcttacctctccatgcctcacgctcttcacctgtaaaatgggctgagtcatcacagtgccacctcacagactcgctgggggttccatgagcaaatgcatgcagacctgctgagtgctttgccaggcaaggtgggcctcagtgtcaaccaccatccttactcgaaaaacctgcagaggggactcctgagcacctcgttccccagactccgggagaggaaccccaagtccaggaaggagatctccaggaaggagatcaattctggcccactacgggtctcagaccagaagcaggcctgagagaagtgtgcccggatcccctaggctgggggacccagaggagaggagcctccctctcgccaggtccactcccagcccctccctctacctctttgttcc

SEQ ID NO: 675456 - DNA, 1132 bp, Homo sapiens
cagctgagccattttgcatttcaccaacagtgtacaagggttccagtttctccacgtccttgtcaatacttgtcttttgctttttgatcacagtcatcgtaatgggagtgaggttatatacatcattgtggttttgggtcacatttttctggagtagtgacattgagcaaatattcatatacatgctgagtatttacatttcttcttttgagaaatgtttattcaaatctttagcccatttttaattgggttattgcatatgtacttttttgctattgaattgtaaaagtttcttaaatattttggaaattaaccccaagtctatgtggtttacaaatactttttttttttccattcagtacgttgtcttttctttctgctgattttttttctttgctgttcagaagtgttttagtttgatgaagaaatgaaagaagacacaaaagaatgggaaaatattccacattcattgattgaaagacttaatattgttgaaatgcccatactaccccgtgtgattcacacatttaataaagtaatccctaccaaatccaactggcatatatattttaatggcagatgttgcttctcattagagaggagaagtcatctgaataatagtaacattgccaaaaattgattccttactaagtggcaggcaaaatttccattaattttttaatrttttactttgtgggggcagaaatgagatgtttgttagagggtacaaagtttcagttgtgcaagatgaataagttctggaaatctattataaaacatgtgactatattatatacttgaaatttgctaacaggatggatctcaagtgttcttaccacaaaaacagaaagacaaaaatggtaactggggtgataaatatgctaattttcttgattatgattattttataatgtatatcaaataattaaccataccacttaaatattcatatttttagttggcaaatatacctaatgatattgtttacagaaatagataaaacaattctgaaattcatatagaataacaccaaatgctaccaaggacatggaaaaacaggaactctcattcattgttcatggaaatatacatggttcagttactttggaagacattttggtagtttcttaca

SEQ ID NO: 675457 - DNA, 1784 bp, Homo sapiens
taagtattagaaaatacttcttccaacactcaccaaaaactaagctcccaataaagaacacttcacctgccctccgcaaccctctacctctcttccccgccaagatcttcacccaaggtctcaagagggcggttcccaacctcacgtgacacagcggtcacgtgacatggccccggggagccgaggtgagcgttccagcttccggagccggagggggcccggcgtacccagcccccagcccgacgtgaccatgctgtcccgcctcctaaaagaacaccaggccaagcagaatgaacgcaaggagctgcagggtgagccaaatatcctgtcggccgttttctcttcggccgcggcctagcttcagcccggagcctggatctcgagtaactaaccatatccagggaaagacgccagctagcgggcaacgggcatgggggagagggaatttcagagaggctttttttgaaactcctttcccttgccaactggctccggtcccttgggcaatactccggtcccctcggcaacgcccccaatccccgacctgccgcaccttagccccgcccctgccccggagcgccctgcctattggccctgggagcctctcgtcctggcggcgggaaggagcgactctggagggaggagggtgtggggaaccccccagagatgggcttcttggaggcctgaaaccaccggaacggaggtggggcacttgtttcctgagtccgggctggaaatctcggagttaccgattctgcggccgagtagtggagaaagagtgcctgggagtcaggagtcctgggcgctgccgctgacttcctggcgtccctgagtgagtccatttccctcccagggtaccagtttcctcatctctaaaatgaaagaggttgcgctatgttttgcaaggtccttttcagctccggcattcagagattagttaagaaatttcggcaactagcagaatagtaatggatgggtagggaacctttaacactacccctcaaaaaaccaagtctcccctccaattccttttccccctctccccagaaaagaggaggcgagaggctatcactgcagcgacctgcctgacagaagctttggtggatcacctcaatgtggggtatggacctcttatcaacatcagtttcctccttccccaccccgcccaagtttaggcactggccagtctggccctcaaatagctgttgaaggggtgggatgttccactaattcccctatcctaccccgcccctcccagctctttgtagagcaacttgagtcaactctgagtcctagcactgggcaagggaggaacagctgccgtggttagagaagcagccagatttccccttccccacgttaacttccctggcatttacaacttgatgccatctgcccacctcccttcacccttccaagtccagctgtcacttcagcaggagggagagcaccctccttcattacagcttaccaccctctcctctgcctcccaccctctggcaagcctggggagcagctggcaggaaagagatggcagagctggtggtggtgagagtagaacctgttccgggagctatggcagagccaggctgtctcttaccttcctattgggtctctagggaccacaccctgccccagccctaaatgagaatgcmagtaacagccaaagacttgggaaaaagcaaagaacattgtctcttgaccctaagtgacccagaagcgtgcagagatgatgatttgctagtctgcctattggaagaaaggcagtatggtaccttccaccc

SEQ ID NO: 675458 - DNA, 3783 bp, Homo sapiens
catcgtctcgcttgcagctggtcgtcccatgatttcggaaacgtaatggtagatcagctatgtgggatctgctcagaggtagaagagggtgttggaaaccaagtcttttcattagcctaaaccatatcacaaagaggcaatacggatgctcctagtcgaatggctgggcggctgactggtttagtaatagacagcttaagttaaatgatagcattcacaaagttccttccatccaactatgaaacaggcccctacctgggcccaatctcctctactctgtacttcagaggccagacgagattgggagcgttcacggtggtatggctgtagattgttcacgatgtttctggtagcttttgcccttttaatgcttgctctctttctgtcctctgtcaaacgttgtaaaacataaataagatcaagtgcgccacagaagaccctacctaaggccctgagcagtacaaggttggtgtactttctggagttcaatgatcgcattcacgaagttccttccatccaataccctcttctacctccaggaagattccagatacctgacctagcattacatttccgaaataatgggatgatttatccagagtactcccgaataaatagcgtgaatgttcccggtcctgcttgcaagcataagctaccagtgagcttgtttcaggctgtgagaatgaagaaggacagccggaagcaatggtgttcttctcagctggatcccgatgtggtcagtgtgcagcctgacactcgaaactcattcatcttcctttctaagtcctttcacatggagtccaacccttgggcagaaccccagattttcttcagtacttcacatgttctctcgttggcctgttccagatccctcttcatgttgcagcacaccaaggtgttggattcctccagcactattcgattagatgagacaagcttcttgatctgagccaccaatttcctgagtgaaggtccaggatccaaacagctgggagagaaggccgttgccaaatgcctcctgtgtgatcagtttcaacccactgagcatcgtctcgcttgcagctggtcgtcccatgatttcggaaacgtaatggtagatcagctatctggaatctgcccagaggtagaagagggtgttggaaaccaagtcttttcattagcctaaaccatatcacaaagaggcaatacggatgctcctggtcgaatggctgggccattgagtgcttcaacaatacgcagcttaaggggaacaaagcattcaggaagttccttctatccaacaatgaaacaggccccaacctgggcccaatcgcatctactctgtacttcagagaccagacaagattgggagcgttcacggtggtatgactgtagattgttcacgacgtttccagtagcttctgccgttttaatgcttgctctctctctgcactctgtcaaatgtcgtaaaaaataaataaggccaagtgcaccacggaagaccgtacgaatggcgctgagcagtcgaaggttgctgtactttctggagtcagtactcccgaataaatagcgtgaatgttcccagtcctgcttgcaagcataagctaccagtgagcttgtttcaggctgtgagaatggataaggayagatggaagcaatggtgttcttctcagccggaacccgacgtggtcagtgtgcagcctgacaatcgaaactcattcatcttcctttctaagtcctttcacatggagtccaacccttgggcagaaccccagattttcttcagtacttcacatgttctctcgttggcctgttccagatccctcttcatgttgcagcacaccaaggctttggattcctccagcactattcgattacatgagacaagcttcctgttctgagccaccaatttcctgagtgaaggtccaggacccaaacagctgggagagaaggccgttgccaactgcctcctgagtgatcagtttcaacccactgagcatcgtctcgcttgcagctggtcgtcccatgatttcggaaacgtaatggtagatcagctatgtgggatctgctcagaggtagaagagggtgttggaaaccaagtcttttcattagcctaaaccatatcacaaagaggcaatacggatgctcctagtcgaatggctgggcggctgactggtttagtaatagacagcttaagttaaatgatagcattcacaaagttccttccatccaactatgaaacaggcccctacctgggcccaatctcctctactctgtacttcagaggccagacgagattgggagcgttcacggtggtatggctgtagattgttcacgatgtttctggtagcttttgcccttgtaatgcttgctctctttctgtcctctgtcaaacgttgtaaaacataaataaggtcaagtgcgccacagaagaccctacctaaggccctgagcagtacaaggttggtgtactttctggagttcaatgatcgcattcacgaagttccttccatccaataccctcttctacctccaggaagattccagatacctgacctagcattacatttccgaaataatgggatgatttatccagagtactcccgaataaatagcgtgaatgttcccggtcctgcttgcaagcataagctaccagtgagcttgtttcaggctgtgagaatgaagaaggacagccggaagcaatggtgttcttctcagctggatcccgatgtggtcagtgtgcagcctgacactcgaaactcattcatcttcctttctaagtcctttcacatggagtccaacccttgggcagaaccccagattttcttcagtacttcacatgttctctcgttggcctgttccagatccctcttcatgttgcagcacaccaaggctttggattcctccagcactattcgattacatgagacaagcttcttgatctgagccaccaatttcctgattgaaggtccaggatccaaacagctgggagagaaggctgttgccaaatgcctcctgtgtgatcagtttcaacccagtgagcatcgtctcgcttgcagctggtcgtcccatgatttcggaaacgtaatggtagatcagctatctggaatctgcccagaggtagaagagggtgttggaaaccaagtcttttcattagcctaaaccatatcacaaagaggcaatacggatgctcctagtcgaatggctgggccattgagtgcttcaacaatacgcagcttaagcggaacaaagcattcaggaagttccttctatccaacaatgaaacaggccccaacctgggcccaatcgcatctactctgtacttcagagaccagacaagattgggagcgttcacggtggtatgactgtagattgctcacgacgtttccagtagcttctgccgttttaatgcttgctctctctctgtcctctgtcaaatgtcgtaaaaaataaataaggccaagtgcaccacggaagaccctaccaatggcgctgagcagtccaaggttgctgtactttctggagtcagtactcccgaataaatagcgtgaatgttcccagtcctgcttgcaagcataagctaccagtgagcttgtttcaggctgtgagaatggataaggacagatggaagcaatggtgttcttctcagctggaacccgatgtggtccgtgtgcagcctgacactcgaaactcattcatcttcctttctaagtcctttcacatggagtccaacccttgggcagaaccccagattttcttcagtacttcacatgttctctcgttggcctgttccagatccctctt

SEQ ID NO: 675459 - DNA, 1331 bp, Homo sapiens
gagatggtgacattggagatggggatttcaaagcacaagtgacatgtcctcagcttccagcagagaagccaaaaggccagcgatattccagaggggaaatggttacaagagtcatttaagggtgggtgtggtggctcatgcctgtaatcccagcactttgagaggaagaggcaggcggatcacttcaggtcaggagttcgagaccagcctggctaacatgatgaaaccccatctctactaaaaatacaaaaattagccaggacttgtggtgaacacctgcaatttcaactacttgggaggctgaggcaggagaatcacttgaacccgggaggcggaggttgcagtgagccaacatcgcactactgtactccagtctgggtgacaagagcgaacctctgtcaaaaaaaaaaaaaaaaawattagctgagtgtggtggtgtgcacctgtgattctagccactctagaggttgaggcaggagaatcgcttgaacccaggaggcggaggttgcagtgagccgagatcacgccactgcactccagcctgggcaacagtgagactctatctcaagaaaaaaaaaaaaagagtgatttaagcaagcagaacaactggtgacctcaaggaagatctcagaaccccatgtagaacttggactcattcaagctcatcccggtcctcagggtcatgatgatgagaagaaggacagtgcctgtcaggataaatgactcttgtactgtaaggtatctgcctcagaactgtacaggattctaaaatagaagcacagattctgaggaagggatagacctctctcccaaccccacctaaagtctctaaaaaaataagattgggcctgcccagaattataactttttcttgactttctgtttcttataatgataaggaaaattgctgaaaataccagagatatttagaggatatatttaattgaattgaattaaacaatggagtaatttagagatctaattacttcattctcatataacaatgccctgtggctataaatgtatctgtttttcaggcattatgtattttctggatcctcgtgtgaatcaaactcttatctaattgaaagtacactggaattggatatagtaaagaaaagtaatttttcgtaattcctttctgtcatgaatttagcaagtaaagtttgttttgcattttaaggaataaaattgcagcagctgacactcattgcagtacattctaaagcctaatttatggtttgcctataaatttccatgctaatgtatttccattgttatatttttgcttacaaggattttagtgtcacattatttaattgaagtcaaat

SEQ ID NO: 675460 - DNA, 643 bp, Homo sapiens
ataaagagatacgttttcttcatcaatgatagactggataaagaaaaatgtggcacatatacatcatggaatactatgcagccatraaaaaggatgagttcacttcctttgcaaggacatggatgaagctagaaatcattctcagcaaactaacacaggaacagaaaaccaaacaccgcatgttctcattcgtaagtggaagctgaacaatgagaacacatgggcacagagaggaaaacatcacacactggggcctattggggggtggaggactaggggagggacagcattaggagaaataccgaacgtagatggcgtgttgacgggtgcagcaaaacaccacagcacgtgtatacctatgtaacaaaactgcacctgctgcacatgtatcccagaacttaagtgtaataataaaaaaaaattgaatataacttatagtagaataaaaaaatagaatgaaatgtctatagtccattacagaaattcaacaataacagaataatataattcatatagaaaagttaaaaaatttaattgaaaatcaaattcttaaaacgttatacaagtatataaaagaatgaagctcatatatagcaatcagctggtagtgtaatcccagcactttgggaggctgagcaggccg

SEQ ID NO: 675461 - DNA, 1537 bp, Homo sapiens
gtacatatgaacatgaatttctagtgttaaagaaaagtcatctaaccaaaaaggagtttgtgctaggtgctgttttattttgctattggaaagatgagttttggtgatgtacttaatgtacagcatgatcaaactgttgtcttttgatgagttattactataatgtatcatcaaagcctcatggctttgatagagtatactaacatgttttttgaacaaaagaagtttgatgatttattaaaataatgctattctactgtttaaaagctgcttaaaaaggtaaacaaaacatgcttaaagactaagagagaaaataaataaaactcactaaactttaaactcactaaaaatataagaagagatacttattttttattattaaacaatgtcaaagcgaaattcttgaaaccyttagtgaatcaggataacctcttatcttcttgtaaggagtttgtgttttgttctggtcttcttaaaaaaacagaatgcacattgtaatcatataatatttgacaatgcataaaatgtatatgctgattttgccttcattcagaaatttagatcttttattctcctaaaaatatatagaaattttacattgtaatcttggttgttgggtgagcatggaaagaaatgtaatcatgtcatattcaatgaatgattttgtggctatgtttcatttatcatctccactgaagcatcgtatgaatatgcataatctcgctttctttactgagcctttacagtgtaatttcacaagtaaatgataaatgctgtatttagatggttggctggattcccagctttgttttgcattattcttttgttttctgaaattcaagggcaatacagattgattgattttttttagatatgctttgccttttatataattaatttacaatgtgtgatttctaatgtctttagtgaatgaaataataatctcaattattttgcttttgattttactgacaatctagaatatacttcatatattaacttattcataaaattattttttgtgtgtggttaatagtaaaatatttgttgaggtgttttgtgctatgtgcaatgacaactacttaacttgaattcaccataatcctataccacagtgacatttcttttccttctgtttggattttagaaaactgaagcctacccagagggtaaatattgagtcaggatctaaacacagttggactttacagctctcaggatcgtaacacctaacttcttccaaaaagtgaaatgactttacttctaatttcctccattcatccaataccatttgaaaatagtgtctgagtgtatactatttttcaagcactgttcctgggaatccaggtacacagtaaactttagagacaaagttcctgatcttagtccactgttccagtaggaaaagacatcaacatcgggccaaatagataataaagaaataaaagttaagaaagtcttaagcgtaccaaaaaacataaagcaatgtcctgggatagaggatgactggtgcgtgttatgtttgatataataatca

SEQ ID NO: 675462 - DNA, 962 bp, Homo sapiens
tacgatcattatttgacaatttattttttgaaaggcagaaagccttttgtaggttagcttaataagtttaaatttgtgctaagtgcaataagtaatgaacgaggtataagggaagcaattttcagatttggattttaagacaactcactctgattgcaatgtgaagaataagctggagaggaacaaacggaagagagaaaacacttaggagcctgttatatgtgacacagacaatgacaatttgaaagatgatgcaacactgtgaaatgtgaaagatggtgtcacagatgtgaaatgtgaaagatgatgatgtaaaatggtgatttgggacatttttggaagactatttggttaagtgatgtggagcatggaagcacaggaaggaatcaggcataattcccaagtttccttaactaatctcagaaatccctttttataaatgtgcttcaacatttcactatgctgttgcaaatgctcaatatatatgagggatacacttatagaagaaaaaacaaactcatgcaataaatccctttcagaaatctatatcaaagtaacactttcttaccttttgaaccagtatattccattttattacctaataagagcaagtcaratgcaagtcatgtatcccttgttgcactggaagtcaaaaggctccaggacaagttttgctttcaattctattaacgtttttttttttttggcttagttttcttgtataactaacttctcccatcccttaggctttgtcatgtacctataattttttgattttgtttttgtgatatgtaaatgttaaatgggtgttataaatgaactaatactaatgcatttttgacaatctaattaggacagagaagattaatgtacttagaatactgtactaataaaattaatgcaaagtgtgtataaaattaaagaagaattagaaattagaaaatcactcaaacaaggtaggg

SEQ ID NO: 675463 - DNA, 1295 bp, Homo sapiens
ctagggagttagccaggtctggagaagctattaatcatgttaatatcattttgggacaatttcaccatggaaaaagatatacctcagccctaaagaaagattaatgtaacataagaaatttaatattagcataacaaatatgtattcaaattctctttgtcctgcattattgagcctcgtatctgtgttactgctctaaatgacacagcagtcaacstgctattccctctagcacccaaacctctctgtcatatgctctggtgggatttttctgatataatacaattgtaatactgaaagtaaaaaattacctttgctttctccctccctctccttgaccttagccaaaagaattcctaaatagttctgttctgcacaaatccaaccctatgattacttcttatctggctaacaaatacagttataagccatggagatggtgtcaataaataattgcaaaggaaagcagaattacctcctctcataatcacattcatgaaattttatactttgtcctactaagccataaaccaaataactaagaggttgtcacattaattgttctatatgaaactattaaaattccaaacttaatattcttactttatatgagaaaaaacaaaaaatgtgcaaagaagtagaaagagtgagaaataaaatgctcaattgaatagtacatcaaaatcattcatagaacactacatccatacaggtagcagaaggcagtgaaacaatttttaaatgaagagtatataaagctcatttgtctaatataaaaagagttcatggtttctcaaataagtttataaatgtctgtcacagaagtgactggatgttgtttcccaaatgaatttgctaccactgctgtgattacacagtgattttttttgaagtaggctgcagttcttattatgccaattcattatgaatgaaaggataagaaaaccattaccatcgtgagtttaccaaataacaaagcagcaggtaaaaataatctctccacctgtcatttccatatcggtcctaacagcattgtctagcttttcaagctgcttgacaaacaaacaatattgcaacttctcattgaggcagacaagacagtatttagaatgaatgcattttctaaccctcacagcaatacactcagaaaatcattagattccaaagtcgtattgtattttgtaatgatttcaaggttatcgaaattttgtaagacctggagaaatgttttcaaccaattatacgcttgcaaataatgttaaataatagtttcacattaaaatttttgagtttat

SEQ ID NO: 675464 - DNA, 1295 bp, Homo sapiens
ctagggagttagccaggtctggagaagctattaatcatgttaatatcattttgggacaatttcaccatggaaaaagatatacctcagccctaaagaaagattaatgtaacataagaaatttaatattagcataacaaatatgtattcaaattctctttgtcctgcattattgagcctcgtatctgtgttactgctctaaatgacacagcagtcaacctgctattccctctagcacccaaacctctctgtcatatgctctggtgggatttttctgatataatacaattgtaatactgaaagtaaaaaattacctttgctttctccctccctctccttgaccttagccaaaagaattcctaaatagttctgttctgcacaaatccaaccctatgattacttcttatctggctaacaaatacagttataagccatggagatggtgtcaataaataattgcaaaggaaagcagaattacctcctctcataatcacattcatgaaattttatactttgtcctactaagccataaaccaaataactaagaggttgtcacattaattgttctatatgaaactattaaaattccaaacttaatattcttactttatatgagaaaaaacaaaaaatgtgcaaagaagtagaaagagtgagaaataaaatgctcaattgaatagtacatcaaaatcattcatagaacactacatccatacaggtagcagaaggcagtgaaacaatttttaaatgaagagtatataaagctcatttgtctaatataaaaagagttcatggtttctcaaataagtttataaatgtctgtcacagaagtgactggatgttgtttcccaaatgaatttgctaccactgctgtgattacacagtgattttttttgaagtaggctgcagttcttattatgccaattcattatgaatgaaaggataagaaaaccattaccatcgtgagtttaccaaataacaaagcagcaggtaaaaataatctctccacctgtcatttccatatcgktcctaacagcattgtctagcttttcaagctgcttgacaaacaaacaatattgcaacttctcattgaggcagacaagacagtatttagaatgaatgcattttctaaccctcacagcaatacactcagaaaatcattagattccaaagtcgtattgtattttgtaatgatttcaaggttatcgaaattttgtaagacctggagaaatgttttcaaccaattatacgcttgcaaataatgttaaataatagtttcacattaaaatttttgagtttat

SEQ ID NO: 675465 - DNA, 1445 bp, Homo sapiens
ataccaggttgttttaaaagtttgacttaatatacttgacttatagggacagtaacttttagaaactgaatacaatatctacatcatcgaaaatccttaaccttataaatctctaaaagtgcctttagctataagtgatttaactgagatctagataaatcccaagtaacagaaaggaaaatgtcttttaagagaaaatctagaatatcagataaggagcaaaaacacaagacatgtatcggtataaaaatattttctcttagcaacaatttttcatacagatggaagaatgttcttcctgaagcaggactcagtgctggggtacagaaaattgttcctgatgctataaatttttactgccaagagttttaagagctatagatagtcagattctgtaaactaaagtcatcttccaaagtgcgaggtttctagttgcatctttactgtatttactcaggttgccgccatatataaaggagtgcaagagtccataaaacttactccctctgctcttgaaggtgaacagcacactttagtagcaaaagaaaattggtagtgaaagcaaaacaaggaaagaaatctctctgggccctgcttctgtttctcaaaaggtaagtcaatttagttttagtggtaataaatagataaatgatttaaataaagaccagctcaattctgaaaaagaagaaagtaacttcaaaaaaatgattaatgtttaacatgctctctttagaaataccatatagacttaaatagtctggactagtttttcttggaaatgatcatcataacttctggaactattttaacaggcgtggaaatgtgctttaggttttttgtgtgatcaaaaattggaatgactagctcagcatctgtctcagtcagtttggctgctgtaacagaaataccataagttggctgggttaagcaacaagtatttatttctcacagttctggaggctgggaagtccaagagcaaggtgtcagcagattcattgtctggtaggggtccactttctgtttcatagaggccgtcttcttgctgtgtactcagcatgcaagcaaagaggcaagagagctctctggggtttcttttataaggttgttaattccacttatgaggctctgccttcatgacctaatcatcttccaaaggccccacctcctaatatcattacaatgagggttaagatttcaacatatgattttagggggacacagatattcagtccttaacagcatccacacactcaggttgcagcaaagttctaaacaggacatacatttgaatgatctgtctcgaagaatatttgcaaagtgtatcatctttactccacaaatatatcattccctgaaaagcacattttacatgccttaaatgtgagccagtgggaaaacaagctcatatattgaatattaagcsagcttgtcaggtttttttcatt

SEQ ID NO: 675466 - DNA, 1357 bp, Homo sapiens
  misc_feature 461, 462, 463, 464, 465, 466, 467, 468, 469, 470, 471, 472,473, 474, 475, 476, 477, 478, 479, 480, 481, 482, 483, 484,485, 486, 487, 488, 489, 490, 491, 492, 493, 494, 495, 496,497, 498, 499, 500, 501, 502, 503, 504, 505, 506, 507: n = A,T,C or G
  misc_feature 508, 509, 510, 511, 512, 513, 514, 515, 516, 517, 518, 519,520, 521, 522, 523, 524, 525, 526, 527, 528, 529, 530, 531,532, 533, 534, 535, 536, 537, 538, 539, 540, 541, 542, 543,544, 545, 546, 547, 548, 549, 550, 551, 552, 553, 554: n = A,T,C or G
  misc_feature 555, 556, 557, 558, 559, 560: n = A,T,C or G
acactcccccgttcctttaataaaacaaaatattcacatccttcctgttctttctctcatgtttttccctgcattcatttccccctctcctctcttcttccattttcctctccttcccatctcctcttytctctcctattttcctcctcctcacacatatgcattggtattagacaatcatctatatgtatctattttttaataaccattgtggaggtggccttctaaatgtatctctttcaactttccactggagacaggtaaatgatgctttctcccctgctacctcgtgcagaattgggctctagagaaatgaacagacttcattgacaccacagaactaaaaagtatacagtgaggactgacacctattcttcccatcaagtggtgtcttacagagagttttaccaagtatctattagcaagacagtgtgaaagccactaaccaaacacaggttttnnnnnnnnnnnnnnnnnnnnnnnnnnnnnnnnnnnnnnnnnnnnnnnnnnnnnnnnnnnnnnnnnnnnnnnnnnnnnnnnnnnnnnnnnnnnnnnnnnnnagcatcccttttgaaaccggcacatgacaaggatgccctctctcaccactcctattcaacatagtattgaagtttctgccagggcaatcaggcaagagaaagaagtaaaggtattcacataggaagagaggaagtcaaattgtctctgtttgtggatgacatgattgtatatttagaaaaccccaccgtctcagcccaaaatctccttaagctggtaagcaacttcagcaaagtctcagcattcaaaatcaatgtgcaaaagtcacaagcattcctacacaccaataacagacagagagccaaatcatgagtgaactcccattcacaattgctacaaagagaataaaatacctaggaatacaacttacaaggaatgtgaaggacctcttcaaggagaactacaaaacactgctcaagtaaataagagaggacacaaacaaatggagaaacattccatgctcatggataggaagaaccaatatcgtgaaaatggccatactgcccaaagtaatttagagattcaatgctatcctcatcaagctatcattgactttcttcacagaattagaaaaaactactttaaatttcatatggaaccaaaaaagagcccatatagcaaagacaatcctaagcaaaaagaacaaagctagaggcttcatactacctgacttcaaactatactacaagcctacagtaaccaaaacagcatggtactgcttattttcacagtagtgtcctaatccttcctgcatgtatatttcttgatgtcacctttacaatcatgttttctaagtgca

SEQ ID NO: 675467 - DNA, 662 bp, Homo sapiens
gtgacagagataaaacataatattagcttggtgcaaaattaattactttttttgacattacttttcattaaaaagtaatgaaaagtaatggcaaaaaccacatttacttttgcaaccaacctaatagcaagcacaggtaaatatctataatttgactcccgagacgggggctttcgctcaggattactctggaaaatctggaaagttactatcagtgtattctctctcagtactactggctcagggaacctaactgtcatgtttccagggctttgggctctcttctcatatgtgttttcrtaagaaatctcatttactcatgtgattcttattactacatataaactcatgggttgcaacctttccctgtctctgaactccagactatgcctttttattggtgtctcacagtacttcaaaatgaatatgcctaaaactgaattccttgtcttcatgtcttcatctcattaaacaccccgccacttgttcagcattcagctttcggcgtcttttatactacttaactctgagggtagcagagccatgtatacagtcacttaagtacaaaaaataaattaatgaagaaaaaagttcaagactgtagaatttttaaaaagtgattgttttggtgtgtgataaagatatattgtatttatataaaa

SEQ ID NO: 675468 - DNA, 237 bp, Homo sapiens
aacatgaaacaaaaaccacttactactccatcccctccactcctgcttcctgcctcattggtctcatctgtcagtaacctagtatatattcttcctcacctctttctaaatgcattaatttttaaaatcttttgagagtctgggtctcactgkgacacttaggctggaatagaatggttggctaatttttttcatttgtttgtagagatgggatcttgctatgttgcccaggctggt

SEQ ID NO: 675469 - DNA, 646 bp, Homo sapiens
aaattctggagccggtgacctgcgtttgaatcctgaccctgccatgtaacccagcaagttagttcacctctctgagcctcagagctgccataaatataaaatggaaataatagtartatctatattgtaaggtattttgaggattaaatgagataatatatgtaaagcatttaagacagtgctggctgggcatggtcgtcacgcctgtaatcccaacactttgggaggccgaggcaggtggatcacttgacgtcgtgagttcgagaccagcctggccaacatgatgaaaccccgtctccactaaaaatgcaaaaattagcccgacgtggtggcgcatgcctgtaatcccagctactcaggaggctgaggcaggagaatcccttgaacccaggaggcaaagcaccactgcactccagcctggccaacagagtgagactgtctcaacaataacaacaacaacaacaaaacagcgcctaacacatatgtgatctgaaagcattagcaattattatcactatcaccgtcattattattgttttaaagtttctaaacttttaaatgttgtatcctttcactttcaatgcacgtcagaatggctctgcctgtggaggaatttctggcttctcctgggtcgtccaagagacaa

SEQ ID NO: 675470 - DNA, 646 bp, Homo sapiens
aaattctggagccggtgacctgcgtttgaatcctgaccctgccatgtaacccagcaagttagttcacctctctgagcctcagagctgccataaatataaaatggaaataatagtaatatctatattgtaaggtattttgaggattaaatgagataatatatgtaaagcatttaagacagtgctggctgggcatggtcgtcacgcctgtaatcccaacactttgggaggccgaggcaggtggatcacttgacgtcgtgagttcgagaccagcctggccaacatgatgaaaccccgtctccactaaaaatgcaaaaattagcccgacgtggtggcgcatgcctgtaatcccagctactcaggaggctgaggcaggagaatcccttgaacccaggaggcaaagcaccactgcactccagcctggccaacagagtgagactgtctcaacaataacaacaacaacaamaaaacagcgcctaacacatatgtgatctgaaagcattagcaattattatcactatcaccgtcattattattgttttaaagtttctaaacttttaaatgttgtatcctttcactttcaatgcacgtcagaatggctctgcctgtggaggaatttctggcttctcctgggtcgtccaagagacaa

SEQ ID NO: 675471 - DNA, 646 bp, Homo sapiens
aaattctggagccggtgacctgcgtttgaatcctgaccctgccatgtaacccagcaagttagttcacctctctgagcctcagagctgccataaatataaaatggaaataatagtaatatctatattgtaaggtattttgaggattaaatgagataatatatgtaaagcatttaagacagtgctggctgggcatggtcgtcacgcctgtaatcccaacactttgggaggccgaggcaggtggatcacttgacgtcgtgagttcgagaccagcctggccaacatgatgaaaccccgtctccactaaaaatgcaaaaattagcccgacgtggtggcgcatgcctgtaatcccagctactcaggaggctgaggcaggagaatcccttgaacccaggaggcaaagcaccactgcactccagcctggccaacagagtgagactgtctcaacaataacaacaacaacaacaaaacagcgcctaacacatatgtgatctgaaagcattagcaattattatcactatcaccgtcattattattgttttaaagtttctaaactttyaaatgttgtatcctttcactttcaatgcacgtcagaatggctctgcctgtggaggaatttctggcttctcctgggtcgtccaagagacaa

SEQ ID NO: 675472 - DNA, 2310 bp, Homo sapiens
tgcaggttctgaatggcggctctgttccctggggcttttcctcatccctgatgtttcccagccacctcccctgtccccaaaatagccaaaataaaaacttccttcctcttggatacaaacgtgtagagggagtttcttcatctgtgaaatgaaaatcatggtaactgtttcctcaggtggttttaaggataaatgagacgatgtgtgggaagtggtgggagcacgttgcctggctctgctaatgtttattaagggctcactgtcatctttattagtaggtattgtcattggaagttgagctagaagtgctggagaaataggtggcagagggtgttctgtatacaaacagtgcattcctaagatcagatcttgacaaatcagttcctgtttgaactacctgtaggcaataacggcgggaccctgggagggccagcttgtctgtacagggcctgcccagggccttggctgagactggtgtgggcacgagcttccagatttctctccagaccgccttcctctgcagagcgtgcagaaaccccggcgccatttccagtgggcaccctggtgaatcacagtgccctgccagctgccaagatccacaactgaaaacttggcatctcttgcccagtctcagagtggagtctttcctgagggcacacaaggtttctggggaatccgagagttcctggctttcctgatggataggactttgctgcctggccatacaaacatttccgtctcctttttgggatggggctactgagaggcaagggtctttgagaacaccttttaagaaaaaggaagtacattcgcccttggtctgtggtgaaatgtaatcccgttggggtgcaggagggcatccgtataagaaaataagaaacagggcgcctgccaggctgtgtgccgtgtggcaggtgagatcctggctctgagctcatctcgaagggccgtgggcctgtatgtattttgagcattgtgcagtaaggggtggggcatgggaggccaggactctggaagccgaaggaggagcattacttagctaatctgggatggagatgaagcccatgctgctattctgaagtagggaagcgtgcctggaatcggtcctctgcggggcctgatgagagggatgctctcgtttactgaacgcccgtggtgtggccagctctctgctgggcacgccgtggggtgctgcctgcaagattgctcgtgcttcagcagccctgcaaggtgtggagtcttatgcctagttacacataaggaaacgcaggctggcacacgatgagctggcgctgaggccaggcctgtctgactactgtcagcatttattttattttattttattttatttattttattttattttattttattttattttattttattttattttattttattttatttttaccaccacaagaaactctctagaattcccattcctgggtggcaggcacccctttgagcgtatttctcttcctttgtrtaatagcaaccattgagcaccttttccattctgcgctctgtgccaagtattgactatgtgtcatttctaatcctcacaaagactcctcccaggccagattcattgtctccattttatttcatttttcattttttgagagacagggtcttgttctgttgcccaggctggagggcagtggcgcgatcatagctcattgcagtctcaacctcctgggctcaagtgatcctctcacctcagcttcccaagtagctgggactgtaggcatatgccaccatgcctggctaatttttagtagagttggggtctcactgtgttgcccaggctggtctcaaactcgagatcaagcaaccctcctgcttcggcctcccaaagccctgggattgtaggtgtgagccactgtggccagacatgctgccattttgtagataaagaatggaatctcagcactttgggagcagaggcaggaggattgcttgagcccaggagttcgagaccagtgtaggcaacacagggagaccccatctcttatttaaaaaaaaaaagcctcagggataactagccccaggtcgaacacttagcaaagtacctgaaacggacttcagcccaggtctcgccaccccaaagtcattctctttctaccccttgtctttgcccagacaggcatgtcacaagagggtcctgtggcgatttcagagctgggcagttagcctgtgacactttattctttcaccgttgttaactggggcttgtggagagatgggaaagcagagctgggctcaggccccgccctgcaggaactcatactctgcttggtcaggcaa

SEQ ID NO: 675473 - DNA, 621 bp, Homo sapiens
gagacggggtttcacatattggccaggctggtcttgaactcctgacctcaagtgatccactcccgctcggcctcccaaagtgctgggattataggtgtcagccaccgcacccagccaatatgttcaacttttttaaccccaggacatcttttcaggtgaaatatctctaaatttgaagtaattaatccatttgttaatgtgaaaaaaagcttacttcagattaaatatatatatttttcctatatttccagaatttttggacactttttagtgtatttattatactttttaaagattaaaatcggattcattgctttattttattttattttwtttttaagacagggttttgctctgtcacccaggttggagtgcagtggcatgatcactgctcactgcagcctcagcttccagggctcatgtgattctccctgctcagcctcccaagtagctgggaccacaggtgtggctgccatacctggctaattgtttgtatttttatctttttggtagagacaagattttgctatgttgcctggggtggtctccaactcctgggctcaagcagttggccttccttggcctcccaaagtgctgggattacaggtgtgagccaccgtg

SEQ ID NO: 675474 - DNA, 621 bp, Homo sapiens
gagacggggtttcacatattggccaggctggtcttgaactcctgacctcaagtgatccactcccgctcggcctcccaaagtgctgggattataggtgtcagccaccgcacccagccaatatgttcaacttttttaaccccaggacatcttttcaggtgaaatatctctaaatttgaagtaattaatccatttgttaatgtgaaaaaaagcttacttcagattaaatatatatatttttcctatatttccagaatttttggacactttttagtgtatttattatactttttaaagattaaaatcggattcattgctttattttattttattttatttttragacagggttttgctctgtcacccaggttggagtgcagtggcatgatcactgctcactgcagcctcagcttccagggctcatgtgattctccctgctcagcctcccaagtagctgggaccacaggtgtggctgccatacctggctaattgtttgtatttttatctttttggtagagacaagattttgctatgttgcctggggtggtctccaactcctgggctcaagcagttggccttccttggcctcccaaagtgctgggattacaggtgtgagccaccgtg

SEQ ID NO: 675475 - DNA, 621 bp, Homo sapiens
gagacggggtttcacatattggccaggctggtcttgaactcctgacctcaagtgatccactcccgctcggcctcccaaagtgctgggattataggtgtcagccaccgcacccagccaatatgttcaacttttttaaccccaggacatcttttcaggtgaaatatctctaaatttgaagtaattaatccatttgttaatgtgaaaaaaagcttacttcagattaaatatatatatttttcctatatttccagaatttttggacactttttagtgtatttattatactttttaaagattaaaatcggattcattgctttattttattttattttatttttaagacagggttttgctctgtcacccaggttggagtgcagtggcatgatcactgctcactgcagcctcagcytccagggctcatgtgattctccctgctcagcctcccaagtagctgggaccacaggtgtggctgccatacctggctaattgtttgtatttttatctttttggtagagacaagattttgctatgttgcctggggtggtctccaactcctgggctcaagcagttggccttccttggcctcccaaagtgctgggattacaggtgtgagccaccgtg

SEQ ID NO: 675476 - DNA, 658 bp, Homo sapiens
ccgttcacagaaactgaaagatgcagtattaaatcatagctgcagaaaattaactatatgttctgtacgactgcagctatktcatagccacctcctgttgctattgggtgagctcaagtgttgtgagtatctgtgaggtgctcatcatctccgtgtgagcagttcacctctccagtatattgcgcaccacagtaaaaagtcatctttcaaggttctcacatattttttatcgtgtttagtgcaatactgtaaactttgaataacaccataggacccatatgaactgccactggtgatgctggaagtgctcccaagaagcagagaaaagtcatgacatgacaagaaaaagctgacttgcttgatatgtaccatagattgaggtctccggttgtggttgtcatttcagacggttcatcttgcaaacagatgatgtaaacttacagtattgataaatacaatacagttctataaacatatttctcttatgactttcttaataacaatttcttttctcaagcttactttattgtaagaacacaggatgtaatccatataacatataaaatatgtgttaatcgactgtttatgttatccgtaaggcttctgatcaacagtaggtcattagcagttaagtttttggacagtcaaaagttatatg

SEQ ID NO: 675477 - DNA, 700 bp, Homo sapiens
catcgtatgcttataataaatagtttgcacaaaattattcattccacatatgggcagagcgatgcctttcatgtgcacattgtttgtggagagcccgtaactggagttgttactgggcagaatgtggaagtcgttttctactattaagtaagggaaacaaggttcgcattttaaaattaattcaatgaaaactattaagcagttggccgtgaatgccttgctattttttccaaactgatactaataagggctcctactgccagccctgcctaaacaaaaacacaagagtaaccacaaaatttccaagaacattttcccagtgttcttctgaaacacaaaccagtgcagatcccacaaaacttgagacccaaatccctgtgacagtaccttcaggtgggtctggggggggcgactgyctcttgggtgccaaggggctggtgagtggatcactgtcatccttttgttcaataatcagctgaggccaggcacagtggcctcacatctgtaattccagcactctgggaggtgaaggcaggaggactgtttgaggccaagagtttgagaccagcctgggcaacatagtgacaccctgtctctacaaaaaataaaaattagctgggcatggtggcacacacctgtagtcctagctactcagggggctgaggtggaaggatcgcttgagcccaggagcttgaggctg

SEQ ID NO: 675478 - DNA, 1368 bp, Homo sapiens
tgggatcagtaacacatcaaggagtcttgtttcttcatcagagctttggaactcgagaccagttggcgatgacccctgagtatcgccactgctgtaaacaccctataacctcaggccttggcattgagtcctctcttatgggtgacaccatgaaatcttgtttcagccagttctgcaggtcctgactctgcagagggaagaggcagaaagagagaaactgtcagagtataatttcacctgagtttaatattacagaaacaaagggatgcaccaaatggtatttctggaaattttcatgtctttaaataccccttggtaagttgcctctgaagccagtgggggctcctcagatagagatgttcccctttcaaatcccagtgccgctctgttctctttccttcccctcccactccccctcttcttcctctgtagagatgcaagaaattgctgtcccataaaaatcataattgcagtagctaaagctggggtcacttcgtaaattcatcagagactcaaagatcttttattggctctgggctgtgctcagtgtctttggcctcagagaacaacttgaatgacttcctggtttcctggcataaattattcctggtgagacatgtggcttaactcacagatttcccatcagctttctccctaaaactatgtgcatctgcctctctctgcctgagaacatacagccgagaatactgctgaagctgagactgactactgtgcattaggaaagacctggagtcaggactttggtgggatttggagctccgaggcagtaataactgaacaagcagccctgtcccctaggctgcagaagcttgaatgcatcctctcccagaacctgccacaggaaactgggggctttgtcaggtcagcccaactgcatgcaraagaccaccatcctcagaagccaagttgtcttttatgaagaggcaaggaaaggggaaacccacatgtgaccctgattttggtatggcttgatagagttccctgaaaactccttttatgtgtgctaaaaccagggaagcatgtgactgccaagcaggcaacccctgatgatttgtaaagccaggtggcagggcctggggagccccagcacaatgatattgtgtggtcttccctcctgtggaatcgaggggaaattattcttcccaataccttgatttgattttcagtttcacaagcttcttcctctgaatcttattgagggagtatggtaccaagcaggtaggactgttcacctggtggaacagttcttgctctgccttctaggcttcatcccacaaatccagcctctttctggagaccgcaaagctggggggagatgggcttcctctgggcctctttcttactttg

SEQ ID NO: 675479 - DNA, 1368 bp, Homo sapiens
tgggatcagtaacacatcaaggagtcttgtttcttcatcagagctttggaactcgagaccagttggcgatgacccctgagtatcgccactgctgtaaacaccctataacctcaggccttggcattgagtcctctcttatgggtgacaccatgaaatcttgtttcagccagttctgcaggtcctgactctgcagagggaagaggcagaaagagagaaactgtcagagtataatttcacctgagtttaatattacagaaacaaagggatgcaccaaatggtatttctggaaattttcatgtctttaaataccccttggtaagttgcctctgaagccagtgggggctcctcagatagagatgttcccctttcaaatcccagtgccgctctgttctctttccttcccctcccactccccctcttcttcctctgtagagatgcaagaaattgctgtcccataaaaatcataattgcagtagctaaagctggggtcacttcgtaaattcatcagagactcaaagatcttttattggctctgggctgtgctcagtgtctttggcctcagagaacaacttgaatgacttcctggtttcctggcataaattattcctggtgagacatgtggcttaactcacagatttcccatcagctttctccctaaaactatgtgcatctgcctctctctgcctgagaacatacagccgagaatactgctgaagctgagactgactactgtgcattaggaaagacctggagtcaggactttggtgggatttggagctccgaggcagtaataactgaacaagcagccctgtcccctaggctgcagaagcttgaatgcatcctctcccagaacctgccacaggaaactgggggctttgtcaggtcagcccaactgcatgcagaagaccaccatcctcagaagccaagttgtcttttatgaagaggcaaggaaaggggaaacccacatgtgaccctgattttggtatggcttgatagagttccctgaaaactccttktatgtgtgctaaaaccagggaagcatgtgactgccaagcaggcaacccctgatgatttgtaaagccaggtggcagggcctggggagccccagcacaatgatattgtgtggtcttccctcctgtggaatcgaggggaaattattcttcccaataccttgatttgattttcagtttcacaagcttcttcctctgaatcttattgagggagtatggtaccaagcaggtaggactgttcacctggtggaacagttcttgctctgccttctaggcttcatcccacaaatccagcctctttctggagaccgcaaagctggggggagatgggcttcctctgggcctctttcttactttg

SEQ ID NO: 675480 - DNA, 1023 bp, Homo sapiens
gcaggactaagaggtaagcactgaaaccacatcatttaataagatggatcatttcaagaagggcagtacgtgtacactatcgcatttttgtaaaagcttcatttagtttttcttttcttttttttaacttcctttcctctctggactctctgattttctgtcttttttacccctagtatatattctttattatctattagtaaataacaaggggaaaaaatcattgcccctttttcctggcaaactcaattaggttacgggagaagggagaagagtgcatgtgtttgtgtatttttgaatataaattccttgaagtcaggatacctcctaaacattatccagaattgtgtagraacttgaatctgacttagctggggaaaataatctttcagggaatgaagtatcatacagaaagcagcactctctttcacactagggatcaactttagagcattataggcaaaggcatcatattttcaagaaatgccttccacttcaacctgagaagtctcttaccatttagtcacttccctaaagcaacagactcgcacgactgagaatcactgtgtcattttcatctgtagcgtttctttaaccaggggtgggtacctgacgactgattgaaaaacacgttgactaaaatggtcttaataagcataccgcatgaccttcctcccccgtggtctcatcagcaggcaataaactaggctcatcatgctccattctcacgtaaaaacctatctgtcagggaagtaattacctagccagatagacgcccctctgaggcaagcccagaaatcattataatactctataattagtgtttattattttatctgttcatgtcagtagaagcacaaaaaaagcacccctcagctggacaatcctatcctaacaagatgtagaaaacattaatgtaaaagctgctcattctctgcattttctttgccatggcaacttaaaatcagcttgcttccacgcaatttgtagctcaaccatgctccctaacactcacacagcaga

SEQ ID NO: 675481 - DNA, 1023 bp, Homo sapiens
gcaggactaagaggtaagcactgaaaccacatcatttaataagatggatcatttcaagaagggcagtacgtgtacactatcgcatttttgtaaaagcttcatttagtttttcttttcttttttttaacttcctttcctctctggactctctgattttctgtcttttttacccctagtatatattctttattatctattagtaaataacaaggggaaaaaatcattgcccctttttcctggcaaactcaattaggttacgggagaagggagaagagtgcatgtgtttgtgtatttttgaatataaattccttgaagtcaggatacctcctaaacattatccagaattgtgtagaaacttgaatctgacttagctggggaaaatartctttcagggaatgaagtatcatacagaaagcagcactctctttcacactagggatcaactttagagcattataggcaaaggcatcatattttcaagaaatgccttccacttcaacctgagaagtctcttaccatttagtcacttccctaaagcaacagactcgcacgactgagaatcactgtgtcattttcatctgtagcgtttctttaaccaggggtgggtacctgacgactgattgaaaaacacgttgactaaaatggtcttaataagcataccgcatgaccttcctcccccgtggtctcatcagcaggcaataaactaggctcatcatgctccattctcacgtaaaaacctatctgtcagggaagtaattacctagccagatagacgcccctctgaggcaagcccagaaatcattataatactctataattagtgtttattattttatctgttcatgtcagtagaagcacaaaaaaagcacccctcagctggacaatcctatcctaacaagatgtagaaaacattaatgtaaaagctgctcattctctgcattttctttgccatggcaacttaaaatcagcttgcttccacgcaatttgtagctcaaccatgctccctaacactcacacagcaga

SEQ ID NO: 675482 - DNA, 2870 bp, Homo sapiens
  misc_feature 2010, 2101, 2221, 2222, 2223, 2224, 2225, 2226, 2227, 2228,2229, 2230, 2231, 2232, 2233, 2234, 2235, 2236, 2237, 2238,2239, 2240, 2241, 2242, 2243, 2244, 2245, 2246, 2247, 2248,2249, 2250, 2251, 2252, 2253, 2254, 2255, 2256, 2257: n = A,T,C or G
  misc_feature 2258, 2259, 2260, 2261, 2262, 2263, 2264, 2265, 2266, 2267,2268, 2269, 2270, 2271, 2272, 2273, 2274, 2275, 2276, 2277,2278, 2279, 2280, 2281, 2282, 2283, 2284, 2285, 2286, 2287,2288, 2289, 2290, 2291, 2292, 2293, 2294, 2295, 2296: n = A,T,C or G
  misc_feature 2297, 2298, 2299, 2300, 2301, 2302, 2303, 2304, 2305, 2306,2307, 2308, 2309, 2310, 2311, 2312, 2313, 2314, 2315, 2316,2317, 2318, 2319, 2320, 2533: n = A,T,C or G
caaaaaacaaaaaaaaatcccccaccaaagttcttagcatcattattgatgtgatatacaacttttgacaagccccttaatctctatgcttctcagtttctaatctagcattgtccgatagaaatatattgagagccacaaatgcctgctacatatgtaattttaaaacttttcttgtggccactaaatgtggccactaaaaagttttttacagtgtgaaattaatatcaataacatattttatttaacccaatgaggtaggcaaaataatgaaagatgtccaagatccctgaaatgtgaatatattccttacatggcaaagggactttgcagatgtgattaaggctaaggggcttgagaagaatagagtgtcaagaatcatacaggtgggtccaatctatggtcagggagatgcgaggatggagaagggcgagagaagagatactgttggctttgaagatggagcaaggagccactagccaaggagtgtgggaaacctctagaagctgaaaaaggcaagggaacgaattctcacctaaggcctccaaaaggaatgcaaccctcccaaaaccttgattttgcccaatgagacctgagtcagacttttgaactacagaaatgtaagataataaatgtgttgttttaagccactaagtttctaataatttgtatggtgactctaggaagctaatagactccatatactccccaaattatcatttctaggtgaaatctatataaagattattaatgagatattttacttttttgtacttagtcttcagagtctagtgtatatcctatgtatacagcacctctgaacttgaactagctccatttcaaatgctccattagcaccacgtggctagtggcgatcgtatttgacaatatagttccaattagttcattgagaatggggcaaagaagtttagttcaagaatgacatgtgtgatggttgattttatgtgtcaacttggctaggccacatgcccagatatttggttaaacactattctggatgtttctgtgaaggtggttttggatgaggttaacatttaaatcagtggactttgagtaaagcatgttatcttccataatgtgggtgggcctcatacaattcattgaaggcctgattagtactacaacagacttccccaagaaagaaggaattctgtcagctggtggcctttggactcaaactgcaactcttctctgtcgccagcctgccagcttagcccataagattttggacttactaagcctctacagtggcttgagccaatttgttaaaatacatttctccctctctctccatcaatacgtatacacattctgttggttctgtttttctagagaaccaatacaacatgcatgagacaaaggaaagacacacaccatatctagaaccccctactccacctccctgcctcatttytagagtccagagttttgcagaatagtgatcaatctaggaagagaagtatgtgcattgggaatgggtaagtgaggcaggaaaggtgctatattgtccagggggtaagaggaagggagcgtgagaagtgtggaggaagggagcgtgagaagtgtgaaggaaagggtctatgctgactttgcaagagagagtatattctgtttcaagaggcccagagagatctgatctacagtcctagcaaagccagtttcgcttgggttgaagcatttttaattctgtcaagggccaaatagatgggtcctgaatttgtctgccaaagccaccataacaaaataccacagactgggtgacttaaacagagaaattaattttcttgaagttctggaggctagtaatcagagaccagtgtgctggcaggtttggtttctccgagacctctgtccttggcttgcagatggctacctgcttgctgcctccaaacagtcatccctctgtgcccaggtgcctctggtggctcactgggtcctaatcacctcttgtaataaggacatctgttgggttgacttagggcccacccntaatgcccacattttaacttaattacctctttaaaggccctattcccaaatacagtcacctgctgaggtactgggcattaggacttcaacnatatggatttgcagggaacataaaattcagtctataacaggctccaagtgaccccacctaggtctgccttagactcccaaccaaataatagcaattagtctatgactaccttctacgtgnnnnnnnnnnnnnnnnnnnnnnnnnnnnnnnnnnnnnnnnnnnnnnnnnnnnnnnnnnnnnnnnnnnnnnnnnnnnnnnnnnnnnnnnnnnnnnnnnnnnggaagaatttagttcatcatcagatagtagaaatttctcccgtaaaaagtttccataatgctacacgcaaacctctagggacagtagctcctctcttgcctggaagtgcaggctactttctgaagctgccatgtcccacgtggccagtaagtgctgccatgtaaacttgtgcaatttcccagtctcaatacaaaatcaaagcttcaagctttngggagataaaatctgggtttcaagtttgataaaatatttttcacagtagttatctaggattgatcaattctgaaggctctaatttctgttcttcaagctaatttaacacaaggcagcctgaacaataccactcttggatgggcagcctaagaaacagattttcgcaggtgtttcctctgtgctgcaaacctaaatagccccctacattcaatcacatcgatgccagaggcaggaaaaaaactgcaacaaaagaagaaaagagagcaagctcagtaaagctgaggactgctcaagagccgttttgatgtagagatctctgtgaaagctcattaaatcc

SEQ ID NO: 675483 - DNA, 603 bp, Homo sapiens
tttattcacccaaaatatatgtcttttggaaaaaattttttccagtctgtgggttgtcttctcattctcttgatatatgtcttttcaaaraggctgagctttactttagacagtggtcatcaaagtgtgtatatttgtgtttttataatttatatgcatatattcctgtgaaaagatactgtatgcattgttcaacatgtacaaatataagaaagatatagtaaagaaatatatatttctaaatttataaatgtatttattggtgttccacgttgcaaactaaataatctacgttggctaatttaaggaattaaactatagtagaaggttctcatttattgggatgattagaaccagcctttttgcaggctattagcgaatcatagcactagggcttcactgctacctccactgacacctctgacacttgaaacttgaggccagatatctgcccatgctgatagaaaacaactgaataatttaatttgctagataatagaaaagaatcaaatgactctgccacattgcttgccagaagattgtttttctcatttgtgacctcttgcctataaatgatagatagtccctgtgctgcatgctata

SEQ ID NO: 675484 - DNA, 1221 bp, Homo sapiens
ataagctgatatggttatttccacaatttatctgatatatttattgagttcctacagtatgctagctactggtgataaaaagatggattggatattattctacatttaactgtttcgtgttctatgagtgaaatagacatgtaaacatgtaattacttatgtgactgcataacagaaaaatcaacggcatgctgcaggagcagagagaagatatgctttgaaaataatctgaaaaattgctatgaaagactttttggcctttaaaatgtgatttgctatgttgtatgtacatagtttttagtagaataaaatttccccagttgacattttctgcaattgtcttctaattcctactatgtcaaatttaaggtgccaggattaaaaggttaagacaaatagacaggaaacatgtttttacatgatctcaattacagtaattttttttttagtaaacatgaacaaaaaagtagtatcttatatctgttcttgcctatcctacttgaaatggataacagaatttagaaaaatttttgaaacaatttttcatagaaggaagtattttaaattaactgaaagagtcatacaactacaacatttaagaccatgtattttaaaatgatatacatcccgagtcacttcctgaatataagattttaaaagaccttcagacttatctgtaatttttttaaaaaccttctatctctgctaataggaggatttatactatgacctttttgcaatttaatttatgcaagcagctcaagttaaaattattcttttaaaaatgacttatataattctcaaaaactgcatctaccaagctgaaccaatttatttcaggtataacaagtcattatttgatctaatttaaaaattagtgccatcagtgtattctaacatatcaatattctcattatcttgacagaacacagctaatagggtaaataagaactatgaaatgtcatttttaatgttgaaatatttatgctaggcgttacatgtrtttataggcctggcatctatttgttcaacttaatatagtgatgcttgaacttaagaatcaccttgagggctagttaaagctcagattaccaggccttaccttgagatattctaattcagtaagtcttggatgaagctgagaatctgtctttctatgaagtttcaatggctgctgctgctgctgctgctggtccaggtaccacactttaagaggcactg

SEQ ID NO: 675485 - DNA, 646 bp, Homo sapiens
tttcataaatgcaaatttcctcattatataacagaacccataaacattaatattcttgagagaaacagacaccaaagaaaacaacctacctgtattaaatacaagctgcagacttttttttttttgtaaactggattttcatttatgaagcatatttaaagacaggaagaatattccatttccaagaatatttcattttatattgggatactatcattcccatagtaataaattaaatgtaaatctatagtatatcaaacggagttctactttctttccaatggatggggtatttttcaaccacttatttttactcgagtactaatatagaatactcacatggaattttatgcaactcattcataaacttctccttcagcttagaaaagcatcttcctttccttctccaggactggctggctctgtggcrttgcttggcagaacagtcgcgacagtggtgacaggcggggctgccagggcctcatggtgactctcgctcaccattttaggttcaggtgaagctgtgaggggagggaagcaaagacagaacaattcaaaatggcttaactgctcccacatcaaaggtatcccagagatgaaacaacatcagaggtggcacctgctcactgggtaaatagtccatcat

SEQ ID NO: 675486 - DNA, 1959 bp, Homo sapiens
tcaaatgaagtaactgaggtttagcaaggttaaacagcttgctgaagtttgtatagcatgtaaattgtgaaactggactcaacttgggtgactaaattattttatgaaagacaaggatcaaaccttaccataggatacaaaataaaaattgagagatggtgcaggtttttgagaattgctgggtgagcaccacttatgtgtctggaggcagtagatggaggggaatgaggccatgtgaaatctgttttgctacaatgctgagaacattcctgttggacctttctgcaaaactttctggttctctaatttgattttcaatctaagaatgagatcagcatttaggaaaagtatatactgtgaaggatcagtttgataatttatacactttggagtgtaagaaatgtaaaaattcagggagctattaaggcttttaattttgttttcaattctgccttgcatgaggtttgattctttcttatgctggaccataagcccaatgagagcagaacactggtgaaaataaacctttattgacrtactgactttgacatctttctggtttatgacaccacctatcacatggctgatgttcaaaaagagatttgttaggttaataaaataatgacctaggcaaaggtgaagtgacaatggatgagataatatatgactaaatgactaaagagataaatggatggaaggaagtgaggaaaatgaaaatctgcttagtttctgcttcgtgacagacattgtgattagcactttatcaatattcgtccccgtaaaacccacaagaggttttttattttacatgtgtaaaaacagaggcccagagaggttagagaattttctcaaaagtacacagctgtccaagaatatgtcaaggggagagagagagagagagagagagagagagagagagagagagagagagagagagagagagagagaggctggcaatggatgggtggatggatggtagctggtacatattaagccactctcaggtgacaagctaagggattttgtagttttttttaaattgaccttgaaatggtcactgctgatttaaaagcctgaataggatccaaatctcaagcatcattagatttctagctatttgtttaatggtatttgcttttagtggtaatgattcactcgttcttattatcgataagcttatttctaattctaaagtgatgctacatagtggggaaaaaaatcttgtgttaggatatgttttagaatttgtaaagtactattttattataaggattgatggaaaaagtgaagttccaaattgaaatttcttaccctgaataatctgttgaattgctctaatattctaatttgtccagtcatggtgtacagaattccctggctcagtgatggttcccagaccaatatttcatggactcagaaatttttcatcttaccacacacttacttacctttgtgaaacactgcagaatcccaggacgttcaacaatgttaatgatgccaggaagaagaagaagctttctaaattgcctttgtttaatgtgtttggaaaccaattgcctgtttggaacaaatgtaattgttattcaactgcagagttgtaagtttctgtgaatattttatcattccacaattcatagagctttgttcgcttcagtaatatccacaaagcaaaaaagctcatctgaaacttgattgtcaaaatttatttaattctgtaattaatagtaaaatgataagcaaagcaccccaaatattttgaaggtcacaaaacactcttaatttgcatcgcacaaatataggtgtcagaagaactgggttgtaaaggtaatcctgactattccattaacttgcaggagccatgtgtgtatcttatttatccttatatttgtagtatttagaacagtgcctggcatgtggggattatttggcaaatatatagtgaatgaatgaaaagtattt

SEQ ID NO: 675487 - DNA, 609 bp, Homo sapiens
agtctattgtttcagagagctgctaaggtagcatatgggttggcagcaggggcagtgatgggtagcaaggcagaattacataaaacaaatgaaaacactatggctaaaggaaaacaaccttggatttggctacagccaaatatgactgagaatgaatacagcagaaacgtattatgtttttgagagtactaagaaatgtatttccaaaggaaccaaagcctggtctgcaaaayacctgtgactgaggtttaaaacaaacatggtatcaccaaatttgcacaagcaagaagcaggctgcaaaagtgacacagtccctaaagagggacactttggatattttccaggaagataatagagaggaaattcctttgagaaagcagaaccagggttaaatcaagtaaattcaactgccagattagggcatttaagcaattcctacacagcaggacccatcactacataaaccattgactgttgtttgttcatttgtttgtttccagttgagagtttttaatatggttatcctgtctctagtccatgattgtatatagggtttgtttgttgcattgtgagtttgcaaacaccttgtcttttagtttttgtatccta

SEQ ID NO: 675488 - DNA, 628 bp, Homo sapiens
tctcaaaaaaaagaaaaagaaaatgcatagtgcctattggaaaaaattgaattgccccttgcatagcaactacttttaagtacatgacctttgatttatgcctatatattattttcwtaagttttgaatgaccaaaatagtacaagattcaaaagcagatgcagtgaaaagccactcttcctccggaccattcttaagccttgaagctcccctccctgagcctgcaaggttacttctgtagcttttgggaagaaccctttctataaatacagaagcaattctatacatatgcccagtgttgggtaccatacacaatgtccataccttgccatttttatttaatactaattttggaaatcatttcagaccagtacaaaaagaattccccattccttttttaaaaaatagcctcataggccgggcgcggtggctcacgcctataatcccagcactttgggaggccgagatgggcggttcacaaggtcaggagatcgagaccatcctggctaacacggtgaaacctcgtctctaccaaaaatacaaaaaaattagccgggcgtggtggcgagtgcctgtagtcccagctacttgggaggctgagacaggagaatggcgtgagcccgggagg

SEQ ID NO: 675489 - DNA, 1046 bp, Homo sapiens
gtcttcgatagttgatcctcctcatgttccaagatggctgcatgagctccagcccccacactgcactccatcagcctggaacagggaggccaccatccttatctgactctactctcttctccagtcacctgacacttgcgcgcagcttcacacaaagcatagcagccgtcacctgcatcctgggacaagccctgggaaagcctaagtaattctgccgtggagccaggcaggaggatctgtgtgccctgtgtcccccaccccacatggaaagagcctgaccaacatccgtctacaggacccaccagggaggaaagagaaaaagtcacttcatttaggaaacatctctcaaaacccaggagatctgcaggactgggagtagaacagagggaaggcgctgtttgcaatctcactgacaatcacagcatgttaacctaatagaagcagaggagtctccagcatatccaattatgtyagcaggctgggcaggagtcaggccattatctcactcatctggacggactccattatgccattgctctttcttgattaaatcttctctaacgatgtctgtccagggagggagagaatcattgcatctgctggaggagatgtgacggtggcaggtggtgtccccaaggaccagcaccacctagcccctctcccagccctggggccttgagctggtttcacccctaacctctgcccttgaccacagtgaggagcattgttcctactaatggtcactccaacctgtggctcatctttgattctgtcttcttcattctctcggaaacactttagacagctgactagttcttccaccttgtaaatgaactattgattgttctctctggcactgcattctcaatcttcctcctgcctctgtgactttttatctgtctccactattgtcttgtctctgcctcatgacacctaaacgtagatattccccaaggctcgattatcagccacgctctctttggaaactctcacttgggactccatctcccccatatgaaacatttccttctctgcatctccagttc

SEQ ID NO: 675490 - DNA, 1046 bp, Homo sapiens
gtcttcgatagttgatcctcctcatgttccaagatggctgcatgagctccagcccccacactgcactccatcagcctggaacagggaggccaccatccttatctgactctactctcttctccagtcacctgacacttgcgcgcagcttcacacaaagcatagcagccgtcacctgcatcctgggacaagccctgggaaagcctaagtaattctgccgtggagccaggcaggaggatctgtgtgccctgtgtcccccaccccacatggaaagagcctgaccaacatccgtctacaggacccaccagggaggaaagagaaaaagtcacttcatttaggaaacatctctcaaaacccaggagatctgcaggactgggagtagaacagagggaaggcgctgtttgcaatctcactgacaatcacagcatgttaacctaatagaagcagaggagtctccagcatatccaattatgttagcaggctgggcaggagtcaggccattatctcactcatctggacggactccattatgccattgctctttcttgattaaatcttctctaacgatgtctgtccagggagggagagaatcattgcatctgctggaggagatgtgacggtggcaggtggtgtccccaaggaccagcaccacctagcccctctcccagccctggggccttgagctggtttcacccctaacctctgcccttgaccacagtgaggagcattgttcctactaatggtcactccarcctgtggctcatctttgattctgtcttcttcattctctcggaaacactttagacagctgactagttcttccaccttgtaaatgaactattgattgttctctctggcactgcattctcaatcttcctcctgcctctgtgactttttatctgtctccactattgtcttgtctctgcctcatgacacctaaacgtagatattccccaaggctcgattatcagccacgctctctttggaaactctcacttgggactccatctcccccatatgaaacatttccttctctgcatctccagttc

SEQ ID NO: 675491 - DNA, 1167 bp, Homo sapiens
tgagctcagactgatattaccatcaatagtaattaaacctataactgttttacacaaactggtttataaaactgaatacacgggaagaaaatagtatcttctcccagtgaaaaacactgagagggtgtgtcaaagataaatcaagccagtataagggcaaagtgtttcattcaaactgacttatactttggcaaacattcaaacatgatttagcaagtgattagatagggaagtctattatttatgaaagataggatgttaaatatgagatattgacaatttggactttattgtataactaagttatcaagtctctacaggcacaaattgcctaaaattttgttttcatttaatgactcttacaagacacataaaggtctatgtagacagaagtgttacctaatagctttagatcatcttatcatagtttaaaccaaacagaccaacatagtttaagtatattgatctctcacaagattctagattttagaacccaaaaccaaagtcaataaaaaaatacatagtatacactcttttggctagtttcttttccaaagaagggcctataatcataaattaagcaagatgaagataattcaataattggaaactgcattcaagttcaaggttcaaatacctcacttttcatagaaattaccataaatactatatttaaccattttcagtgctatgtagcaccaaagtttccaaagcttatagaagccaaggacttcagtaacaaagaacattaaatatgatttaatatgatctgagtgctatataaagttcttctgttatttttctcttcagaaagaactcttcagcaatattttgaaaaataccaaaattactccaggtctcttaataatttttaagacttctcctaggcaagtttactttctttttgtgacaaatttccttatagcaaacttatattttccagatcaaggtgtagcctttttcaatcctattcaaggtaaaaataatcttctcaaaattggctatgcaatgtatataaatttcacttamgttttccaagtaattgtgggcctataaatttctaactggttacatttgggttttatctaaaccattaacttaaatttattgaactagaaaattagaaagtaaaagtagcaaacaaaataaaatgtaaacctaaccaaa

SEQ ID NO: 675492 - DNA, 645 bp, Homo sapiens
tgcccaaggtgatgcactatgcccagtacgtcctcctggcgctgggctgcgtcctgctgctggtccctgtcatctgccaaatccggagccaagtaggtgctggccagagggcagcccgggctgacagccattcgcttgcctgctgggggaaaggggcctcagatcggaccctctggccaaccgcagcctggagcccacctccagcagcagtcctgcgtctctgccggagtgggagcggtcactgctgggggctgcgcagcacgcttgcgtcttttgcatgccgcgttgccactactctgcctgttctggaaggcctgggaccctcccttggagggggcacaggtgggctttgagtaatgagacctggtacttgcatcatccattcatcaagtcagcacccggggatgccaggttctgttaggggcgaggggacgtacagcagtagaggagacagctgagatccctgctcrgggggattgaggggggctggcatcccagccggggagacagatgaaaaccaagtaaatcagcagaaaagataatttcactcatgataggagctgtgaggggttagagccaaatagaaatacagcgtgagccacgtgtgaggttttcagtttaaattttctaatagccacttaacag

SEQ ID NO: 675493 - DNA, 1218 bp, Homo sapiens
cacccccctagtctcctcaattagtatcattagtatcatcaaattgtcactcatttgattaagggacagtacaacactcaggcaggggcatgactgatctgacctcccagtccctttcagtccgtccatccatacgaagtaggggaagcaaaattggcagcagtcctaacccacgcaacgcttgcccaaggggagcccctgagcaccaggcagactccagcrtgggcacagcaggcattttcccagagtgggccgagtgccaaagcctggcatggcgactggtgtgggaggcctggagacagggaggtgagccagggcccacactcttcccccctccgcagattcagtttctccagcctgagcctctaccctagtgctcccaattccaaagttcctcagcccctatctattcccttccatagtgcccactctatgccagatgcctctcaccaatcatctagacctgtgcttctcaaactttcaagaacatgcagatcactcagggagcgtgttaaaaatgcagattccaattcattaggtctgggttagggcctaagattctgtatttctaacaagatcccaagtgatgcccatgatacttggcccatggaccatacttcgaaaagcagggatctcaatgactatagcaatttctacaagtatctcccaggaagcgtccagctatccaattccatctgtctacttatcctccagatagtaatgagaaccgtatctcaggccttcctgattcagaaacctccctccatggcataatacacaatacaaacctggtttataaatttcaattcaaatgtgaaaaaagtgcaaccttcacaagagtctcattcatgactccaaagatccatgtagcctaggattactgtcacatttcttttcaaatctgcctatccctcttttatttccaaaatttctccatagacatcctttttcaggaagcatctcttcataaatatctctttctcagtttctactcataccttccctttccaaagtaatgaggtttcagtccctgtctccttactattctcttttattttattttagccccagtctttttcaccattttgggtgtgaattcttaccacaaagaatcttagatactctcacaaagtttttgcacccagctcaaaaaaaaaaaaaaaaaaacacacctaaatgagttggcaaggatatggggaacccctgcctctagaagat

SEQ ID NO: 675494 - DNA, 1218 bp, Homo sapiens
cacccccctagtctcctcaattagtatcattagtatcatcaaattgtcactcatttgattaagggacagtacaacactcaggcaggggcatgactgatctgacctcccagtccctttcagtccgtccatccatacgaagtaggggaagcaaaattggcagcagtcctaacccacgcaacgcttgcccaaggggagcccctgagcaccaggcagactccagcatgggcacagcaggcattttcccagagtgggccgagtgccaaagcctggcatggcgactggtgtgggaggcctggagacagggaggtgagccagggcccacactcttcccccctccgcagattcagtttctccagcctgagcctctaccctagtgctcccaattccaaagttcctcagcccctatctattcccttccatagtgcccactctatgccagatgcctctcaccaatcatctagacctgtgcttctcaaactttcaagaacatgcagatcactcagggagcgtgttaaaaatgcagattccaattcattaggtctgggttagggcctaagattctgtatttctaacaagatcccaagtgatgcccatgatacttggcccatggaccatacttcgaaaagcagggatctcaatgactatagcaatttctacaagtatctcccaggaagcgtccagctatccaattccatctgtctacttatcctccagatagtaatgagaaccgtatctcaggccttcctgattcagaaacctccctccatggcataatacacaatacaaacctggtttataaatttcaattcaaatgtgaaaaaagtgcaaccttcacaagagtctcattcatgactccaaagatccatgtagcctaggattactgtcacatttcttttcaaatctgcctatccctcttttatttccaaaatttctccatagacatcctttttcaggaagcatctcttcataaatatctctttctcagtttctactcataccttccctttccaaagtaatgaggtttcagtccctgtctccttactattctcttttattttattttagccccagtctttttcaccrttttgggtgtgaattcttaccacaaagaatcttagatactctcacaaagtttttgcacccagctcaaaaaaaaaaaaaaaaaaacacacctaaatgagttggcaaggatatggggaacccctgcctctagaagat

SEQ ID NO: 675495 - DNA, 644 bp, Homo sapiens
caaacttgataaaaagcatgcaagaaatcttagttcagatctacatttaaataccttgaatggatttttaaacttttaaaatatcaatttccaatttgtagtaaaagatgtaatacttgattttatatttatgtggtcaaagtgaattatgaacttcattttgcatttcatctactcttccaaattagttggtttcaagtattacacaattgtactttttagctaagaagggaaaattgaaaagctgttaagaagtagtcccaataatgtgagaatttgggagacagaatagaagccaattgtaaagaaagcaacatggctctctacttttgttcctgggaggaagatgtgaatcttccatctgccaaggacatggaagggaaaatggtacataaatacrtaataaaggacactgtaagaattttcatgctccagagataaacagataatcactaccatatgcaagttaaaaatagtatggaaatagtttttcatgggagattaacaactgaagccccaactgtttgtggttgctcatatggaaattgctttgttagatgaatgtactgactgggcaagaagtagtcaataatttgtgtgagctgttattttcaaagtacagaattctgcataaggtggctctg

SEQ ID NO: 675496 - DNA, 669 bp, Homo sapiens
gacatagctaaacttttattcccaatatggaaaaggggtacccaaaagaacagaaacaccctgagtgtgagacctggtagggatccataaaaaagcagcgcaaaagatgacgatgtcagcagcaaggccacacacctcaatyaattgttactaaataaaaataactcctgaccattttcaaccacaaaataaatatgttcagtgtcgtctatctgcccattttaaaacatgagctatcttctcacctgggcttccaggaactgcgcaccttgaccgcagtagagcgcgcagtgcaacgcagccatcttctcacagtctaagcaagtgttctgcagaagctgtaataaagacgactggctgagcagtgctctatagagctttccagaacaacaatccaataccagggaccctgacaatgactgtaaagggcaatgaggtagcatatcaatcatttcattatttcctggcaaaaaaaaaaaaacagtagatcagcaaatagaagaaactcctttcacccaaacatagatattaaagtcaaaacaaactcaaatgggccacctctacaagagaaaaacatatagccgtacctgtcagaaagagattgtggcagatcaggtctggatgttgaacattaagtaggtggaagaaatgaccaggtaagtaaacagc

SEQ ID NO: 675497 - DNA, 669 bp, Homo sapiens
gacatagctaaacttttattcccaatatggaaaaggggtacccaaaagaacagaaacaccctgagtgtgagacctggtagggatccataaaaaagcagcgcaaaagatgacgatgtcagcagcaaggccacacacctcaattaattgttactaaataaaaataamtcctgaccattttcaaccacaaaataaatatgttcagtgtcgtctatctgcccattttaaaacatgagctatcttctcacctgggcttccaggaactgcgcaccttgaccgcagtagagcgcgcagtgcaacgcagccatcttctcacagtctaagcaagtgttctgcagaagctgtaataaagacgactggctgagcagtgctctatagagctttccagaacaacaatccaataccagggaccctgacaatgactgtaaagggcaatgaggtagcatatcaatcatttcattatttcctggcaaaaaaaaaaaaacagtagatcagcaaatagaagaaactcctttcacccaaacatagatattaaagtcaaaacaaactcaaatgggccacctctacaagagaaaaacatatagccgtacctgtcagaaagagattgtggcagatcaggtctggatgttgaacattaagtaggtggaagaaatgaccaggtaagtaaacagc

SEQ ID NO: 675498 - DNA, 669 bp, Homo sapiens
gacatagctaaacttttattcccaatatggaaaaggggtacccaaaagaacagaaacaccctgagtgtgagacctggtagggatccataaaaaagcagcgcaaaagatgacgatgtcagcagcaaggccacacacctcaattaattgttactaaataaaaataactcctgaccattttcaaccacaaaataaatatgttcagtgtcgtctatctgcccattttaaaacatgagctatcttctcacctgggcttccaggaactgcgcaccttgaccgcagtagagcgcrcagtgcaacgcagccatcttctcacagtctaagcaagtgttctgcagaagctgtaataaagacgactggctgagcagtgctctatagagctttccagaacaacaatccaataccagggaccctgacaatgactgtaaagggcaatgaggtagcatatcaatcatttcattatttcctggcaaaaaaaaaaaaacagtagatcagcaaatagaagaaactcctttcacccaaacatagatattaaagtcaaaacaaactcaaatgggccacctctacaagagaaaaacatatagccgtacctgtcagaaagagattgtggcagatcaggtctggatgttgaacattaagtaggtggaagaaatgaccaggtaagtaaacagc

SEQ ID NO: 675499 - DNA, 622 bp, Homo sapiens
gcagtgcaggcagagagatgggtctaggagaccagtgtcctcctccggagatgttggtggcttgggctggggatagaggagcttgagaggggtggatcattcaaacaatggagagcttttccttgttgatggttctgtgggataaaggaaatgatgaaggacagtttccagactttggcttaggttcttggatgaacagttggtggtgtcacttagaaagatatagarcctgggagaacagcagggttggggtgaggagtactttttcttctcatcctggttttctatgataaagggacttctatatatctttctaccccttttattattttattattattttttttttttgagaagtactgtgttttagagtctgcttgcaaaaatggagggtttttctcctggattacctcatcttccagttaccattgttacaggctttccagtggagctcagatttatttctaaacgatctctttgagcaatgatcaagcattttctatatgaggtatttcatccatctaaacaaaactgtgatgagagttggcctaaactctagacttctatcatggaatgtgttgaccactgaggcagggctggtctggctttaacacactaaaac

SEQ ID NO: 675500 - DNA, 622 bp, Homo sapiens
gcagtgcaggcagagagatgggtctaggagaccagtgtcctcctccggagatgttggtggcttgggctggggatagaggagcttgagaggggtggatcattcaaacaatggagagcttttccttgttgatggttctgtgggataaaggaaatgatgaaggacagtttccagactttggcttaggttcttggatgaacagttggtggtgtcacttagaaagatatagaacctgggagaacagcagggttggggtgaggagtactttttcttctcatcctggttttctatgataaagggacttctatatatctttctaccccttttattattttattattattttttttttttgaraagtactgtgttttagagtctgcttgcaaaaatggagggtttttctcctggattacctcatcttccagttaccattgttacaggctttccagtggagctcagatttatttctaaacgatctctttgagcaatgatcaagcattttctatatgaggtatttcatccatctaaacaaaactgtgatgagagttggcctaaactctagacttctatcatggaatgtgttgaccactgaggcagggctggtctggctttaacacactaaaac

SEQ ID NO: 675501 - DNA, 596 bp, Homo sapiens
cagagagtgactgaaggtgaacaggattccactgaatttaagttgtaattgaaactaaaaagccaaggttgaaaagccttgaggttttctgaagccgttgtaatttgcacatagcccacatgccaaaggaagtactatacttactggctttcttaatcacagagctctcagtggacaatgtcactcttctatttactcttttctttcttcctttctttctttctctttctttctttctttcttccttttctttccttccttccttccttctttctttctttcttyccttcctttctctttttctttctttttcttttcttttcttttcttttaaaatttgagacagggtctcactctgtcacccatgctggactgcagtggtgtaatctaggcttattgcagcctcaacctccaggagtcaagccatcctccctccccagcctcccaaagtgctgggattataagcatgagccaccgcactcagcccacattccacccttctaaaataaaatatttggtatggctttccacaatgggataataaaatgtctgtagcccctcttctcaatagacaataaaggcatctaaccaagtat

SEQ ID NO: 675502 - DNA, 803 bp, Homo sapiens
agcgttctatgatgtgggcttccttgcccactccggaattcccacgggcataactgcactcctcaccagtgctgtgccacagctccccagcactaccttaggtgcactggtgaccttcaygaacctgggacaggctgggtcatttgtgcagaaatgggaagaaggctcactttctcccccaggtgtcatagtctgttgcctagcccctaaacaaccccgagtgtaccccattttttacagaccttttaattcctaaacctttgttagatgttaacccacagagatccaagtgcatatagggaaagggatgcacaaaagaaaaggtggaggacagagtgttaagtagcctgaatgttaaaccttttatgtggacatttttccttttttaaacaccgtattttctccgagttccctggtcatgagtattgatggctcctgtcctttagtgaaccagtacactcaaggcaggatgagataatctggtatattttagaacaataaggaattagaactaaaagaggttctatttccagaatgaatactttttcactaactgggagaatacaggtatttgcttcatgagcatatgggaagaaaaggagccagctcttaagctcagttaaaaacaacagaaacaacatgacactatttttgagttttactatgtgctaagtactgcacatgaattatcccgtttttttcctatattacagataagaattaagaaatatgtccagggtaacacagtaagttacagaggcaatatttgaaacccagttagcctggccctggcactaatcttc

SEQ ID NO: 675503 - DNA, 659 bp, Homo sapiens
gtttgcttgtttgtttgagacagggtttcactctgtcacctacgctggagtgcagtggcaccatcacagctcactgcagccttgacgtcccaggctcaagtgatcctcccacctcagcctctcaagtagctaggacttcaggtgcacaccaccacatccagctaatttttgtggaaatgaggttccactagttgcccaagctggtctcaaaccactgtgctcaagcaatccttccactttggcctcccaaagtgttgggattacaagcatgagccaccgcacccagctgaggaaaatctttttytttttcttttttaacggcttgtccagccgacgtttcctaagaccccgttaatcaagaatgaaatgttgtccaagtcatctatattcttaatacttttctattcttcatctatcaatctctgattatgggtgtgttcaaatttttagcttaacagattcttcagtattttttgtccaattatgtaggttgttgatttagttgtttgtattaattatgtgtttttgaatttgggattgcagctgatttggatgggagagtgtttttgtttgcttatgccattgctttctttctttctctcttgccctctttcctacctgtctaatagtttgcccagcttcctgacccctaatcaaaa

SEQ ID NO: 675504 - DNA, 1189 bp, Homo sapiens
caataaattaattcagtattgacctggagaagtatgaactctcacatactgttagtagaaatataaattgatgcacattttttggaggcatactgtataacatgaatcaaaatcttgccttttgctagaacagttgtaatttaacctgcagatacatttatatatttgtacaaagacacatatacaaagatgttaatttatagttacgtaacaaagcaagattttaaacaactttaaggcctaaaattgaaattaattctataaatcatggtagcttataaatttagcaatcagcagtcatgaaaacaaaagaagttgatttatttgttcagagttgaaaagaacttcatgatrtattaattgcaaatggtaaggcatgaaagattaaatattatctctttttatctagttggaacaaagaaaggaggagtcaaaggaggaagaaaggaaaggcaggtagaagggaaaatactatcccaataagtatatacaaaatggaaattcctagaaagatcagtagaatttgtttctactaaataattcaggggaagggaactgtgtgtcttggttcaaaggaagattctttaacttttatttcatctagacatacaggtaaaaacaaaattgaaaactaaacattttataagaggacacaataggtggattctctaatagagtgttggtgtaattccatttctagagacctacgtgaatctttatctgtaaatagaaacacagtacacatatgtgtaatatagggtacaaatgaattgacattgtttaaataaatcataatacttttatattaaacaatattattaaaaatgacttcagagaatatttaatgacatgaagaaatgctgatggtatatatttaatttaaaatgcataacaaaaattatgtataatataatttcaattatttacatataaaaagagaaggcaaaataatttataataaagtttattattaatttgttagagtgtgtttaatttttccttctttgcactttttatactttccatatttgccataatgagaatacattacattaaaataagaaaacaccactttttaaacaaactactaaagcaatctaatgtaatcctcaaatttaactacttctttcttagcattctacttcatttttcataactttctcatagagatgagcatataaaatccaca

SEQ ID NO: 675505 - DNA, 594 bp, Homo sapiens
ggtgggcccttgattctaccactaatttgacaaaggtgcttttggcttagatctctgattctctttgtgacctgtctttttcaactatcaactggccaattctggagtaattttatgttgaaaatccagaggagcagttggctttgctctttactgtgacacctgttgggcagagcttttggcacttggccattttattaaatgctatccagccagtgaattggctgccctttgataaaatactcaactyttgtcaagtcagtagcatacttgtttcaaaaacatctttctttcagtggggtttactagtggatcactttgccttagaaagggttggacgagtttggcaggcaccatgtttgacatatttaacaaccttctctgtgtcctcaaagctccacctgtatgagctttgtcatcagagaactcactgttttgtatctggcctttatgtgttagtctctaacagcagactgctacttctcttgaggatacagagtaagttttatttgaatgtctttagctcataacactgtgtgttaacaataggctttctgtaaatgcttattgaatgaaagtataaattaatatttg

SEQ ID NO: 675506 - DNA, 647 bp, Homo sapiens
cggtgcatccatgaaccaccctaactcaatcctagtggcagaatcccccttttactgcagaatgagcttcttcctacagtgatacttgaaccccttagatatatcctgtactaattatattaaaacacgaccaatgcttttgctttgttgtcccccaaattaaacatattaatcatgagaacccagagaattggatttagtgtaactgattccaaactgtcagtaagaacataattaggttatatttttctccagttcagataaaagaaaattgacaataaaatgctgatcaatatgtgtagctcaggaggtagagcctgctttgagatgcagaagtgtttggttttttttagatctatattcttgagtaaagaaaaaatccatctctctttcctagaggggaagatttycagagctgggcttggcaacggcctgactatcagaggctgaattaaaccaataggtacctccctggagtgaatggtgcatttctcctgttcggggcaccgtgtttttatggtggagtttgctttctgtcttggtctccggatgtgtgtatctgtgggtggatgtctgcatgtaaatggcagtgtatacctgtgtgggtgtgtacaaaattcccatgtgaatctcagctttgtggggat

SEQ ID NO: 675507 - DNA, 647 bp, Homo sapiens
cggtgcatccatgaaccaccctaactcaatcctagtggcagaatcccccttttactgcagaatgagcttcttcctacagtgatacttgaaccccttagatatatcctgtactaattatattaaaacacgaccaatgcttttgctttgttgtcccccaaattaaacatattaatcatgagaacccagagaattggatttagtgtaactgattccaaactgtcagtaagaacataattaggttatatttttctccagttcagataaaagaaaattgacaataaaatgctgatcaatatgtgtagctcaggaggtagagcctgctttgagatgcagaagtgtttggttttttttagatctatattcttgagtaaagaaaaaatccatctctctttcctagaggggaagattttcagagctgggcttggcaacggcctgactatcagaggctgaattaaaccaataggtacctccctggagtgaatggtgcatttctcctgttcggggcaccgtgtttttatggtggartttgctttctgtcttggtctccggatgtgtgtatctgtgggtggatgtctgcatgtaaatggcagtgtatacctgtgtgggtgtgtacaaaattcccatgtgaatctcagctttgtggggat

SEQ ID NO: 675508 - DNA, 585 bp, Homo sapiens
tctgagcttatcattttagcctacccccacttaccagtgactggytcaaaacaagtctgtgattccattctgactgttctactgagggaattcccccttcttctcatgcagagttgatgagggtaagttgtattaataggacatatgcttaggttttctgaaaaatacttttatctagaaatgcataggaatatgctggtgcctgaatgtaccatctgggggcctggagattgactcacctgcctccagagctagtgctcacacttactactgagagacctgaggaaacgcctgcctacccaccaccagaacctgcatacgtcacctggagaactagagatcagactgccacacacaccacccaggagcccagaggtgcacctgcccacttggcccagtgctgccactgccagcaagcaaagaagccacctgggagcccagggattggcccacgcaaacaggctatcatcagtgtccacaaacactgcccatggtccctagtattgacacacctggtccaccagcactaccactgatgctgaaggacaagacttcctggcatccccatcctcagcaaagcctcac

SEQ ID NO: 675509 - DNA, 585 bp, Homo sapiens
tctgagcttatcattttagcctacccccacttaccagtgactggttcaaaacaagtctgtgattccattctgactgttctactgagggaattcccccttcttctcatgcagagttgatgagggtaagttgtattaataggacatatgcttaggttttctgaaaaatacttttatctagaaatgcataggaatatgctggtgcctgaatgtaccatctgggggcctggagattgactcacctgcctccagagctagtgctcacacttactactgagagrcctgaggaaacgcctgcctacccaccaccagaacctgcatacgtcacctggagaactagagatcagactgccacacacaccacccaggagcccagaggtgcacctgcccacttggcccagtgctgccactgccagcaagcaaagaagccacctgggagcccagggattggcccacgcaaacaggctatcatcagtgtccacaaacactgcccatggtccctagtattgacacacctggtccaccagcactaccactgatgctgaaggacaagacttcctggcatccccatcctcagcaaagcctcac

SEQ ID NO: 675510 - DNA, 1038 bp, Homo sapiens
ttgctggccactctactcagtaggagcctctaaagaaagagaggggctcataacatgccaatcatgcttccacttcattgtgattggtcaagcctacaggggtatagagtcacccaaataacataatacatcaagagaaatgtctaggccaggcacggtggctcacacctgtaatcccagcactttgggagactgaggagggtggattgcttgaggttaggagttcaagactagcctggccaacagagtgaagccccgtctctactaaaaatacaaaaattaacaggtcatggtagcacacacctgtgatcccagctgctcaggaggctgaggcacaagaatcamttgaacccagcaggcagaggttgcagtgggcggagatcgtgccactgccctccagcctgggcaacagagtgatattctgtctcaaaaaaaaaaaaaaaggagagagagagagatgtctgtaagcaggaattcttctcaaaggtttttcccattaccaatcaggagcaaaagaattatcttgaggttgatttcctttgaggactctcaaaagctcacttctgaatttaaggaagtaaaaaaacacaattctcaactatcatggctcaaagagcggaaaggaaaagtgcggacaaacaaaaaagttgccgctaacacaaactcccttcctccctttatatcatttcagagatagaagggggtctctcctgaccccttcacttcacaggtgtatgtatagaaggcccaaagaaaattagggagtggctttcaagaccagagtctcttatataataccatccagagagagacctccctccaagggcccaggcaataacagcagctttaagcatgttcaaagggccagaccaggggtaagtctgctgtggacatgatctcacttattcctttaaacagccccataagggggggtcctttgcagataaggagactggggcgcattgccccgaggaagggaaaggaccctgatctgactctgtaggcaactggggcctgggctcttaatgcgccgttcca

SEQ ID NO: 675511 - DNA, 2001 bp, Homo sapiens
  misc_feature 633, 943, 944, 945, 946, 947, 948, 949, 950, 951, 952, 953,954, 955, 956, 957, 958, 959, 960, 961, 962, 963, 964, 965,966, 967, 968, 969, 970, 971, 972, 973, 974, 975, 976, 977,978, 979, 980, 981, 982, 983, 984, 985, 986, 987, 988: n = A,T,C or G
  misc_feature 989, 990, 991, 992, 993, 994, 995, 996, 997, 998, 999, 1000,1001, 1002, 1003, 1004, 1005, 1006, 1007, 1008, 1009, 1010,1011, 1012, 1013, 1014, 1015, 1016, 1017, 1018, 1019, 1020,1021, 1022, 1023, 1024, 1025, 1026, 1027, 1028, 1029: n = A,T,C or G
  misc_feature 1030, 1031, 1032, 1033, 1034, 1035, 1036, 1037, 1038, 1039,1040, 1041, 1042: n = A,T,C or G
tcagaaacattatattgagcccccaaattatctgagaaaaaaaagtctttataattgtaataaccaatgggtatgatttcccttctcctgctcaggaggtagaggagatgggcctgagaagttataccccgacagtgaagatattaataatgatgatgttggtcatgataaaaatagtaggaaaattaattgtaataacagtaataattgtaatgcctctttatatttatcagtcacataacaccttaaaaatacctttgaatccactatctcattgcattatcataaaatcctatgagaaaggcaaggcaagaaccattactttcctaacaacatcaacaatattagttgcatcatttcagttacattatggtataasgggcaattgtgggataaccatcatgtatttatagctctgtggcttaaagatatgtgactcaggcagcaactagattcttcagtaattaggatatctctttgagctgcatatcagggctgaacaagagactctggacaggggcacagcaggaagacatgcaccaccctatcacccctgtccctgcacatgccaagtaatttgctttgtttgaagcagttagtgtctcgaaacatacaagaaattcgagatgttcngttactttaaaggattttataagcaaatcaggaaatgtagatgcacagtatgcactatcatgatcaagcgtagaatgagatcgtgagtcgtgatgcagtcttggctttaaatctttgaaggtcaatatctacacgtggatgcaactagcttatgatgcttacttacgtagctactttacttatctgcaagctgtgtctgtctgatatctgttgactgtgcttcactgaggcagggtttactatatctgatattatatcgtcaagtttacgatacgtatctatgctctaggttacgtacgtggtatccgtnnnnnnnnnnnnnnnnnnnnnnnnnnnnnnnnnnnnnnnnnnnnnnnnnnnnnnnnnnnnnnnnnnnnnnnnnnnnnnnnnnnnnnnnnnnnnnnnnnnncatggtatgttcatcaacttcaaaaaatagtctgtgggttaaggatgtagttcctttttaagggccggcaggctcatgagaaggatggagcagcatatttattgcctggtaatccttctttctttgaggctaaaatttgctctccctctgtccccctctccttgtaaagagagagcacattgtcttggaaacgtcgtccaagaaacttaggacccaggcttctcttcgctcagcttgtggatggacctttggatgatataaaaggaagcggttttaggtattagaaaagattttggacatttggatgatataaaaggaagcggttttaggtattagaaaagatttattagaaaattctcacactgaactggtataccttgtggtacagtactaccattcactaaaactgtctggagggggaaaaaagaaagtgtgtaggatagattgatggaatggaaggtaggaagtagagaaatctcaaaggctagtcttctataaagagaaaaatcaggctccaaaatggccttagccccttcccctcaacaaccccacagaaaaacaaaaacaaatatatagtgctgagattatcactagcaatatacagaactcaaatatgaggaggagatagttcccgagaccacagaaaagtgaaacaactttgagcagagagtaagaaaatcagacttccatatccagcacatgcttcctccttcctggcaccaaaagtgtggaaaacttcccttactcatggtttctacacgggaaaagtgagataaaggtgggcaacaagcttctctatcatcttgggttccctagctggaaacctgtccctgcctcaaaccacaggaagcataccaggtgctgtaggtagaaatatccctgagggctgccagacacaaggaagggaagtggaactaccatccccagccctggacactctgctctgtaacttggcaaaa

SEQ ID NO: 675512 - DNA, 354 bp, Homo sapiens
ttaatcattgttaaggctttgaatacagccacctcggtcattatgcaaggaacagaataagtaagctatgtgaggaaaatataacgttttsttgtagactaagacacagaaatagcagctgcaacattagacaaaaatgaccacctaggtagtcatgactaccacactagaattgaacgatacctaaataatggagtacatggagatgattttactagcagctgaccagcattcctctcccaaaacagatactggaaagaaatataatgtattcgtccattttcacactgctataaagatactacacaagattgggtaatttataaaggaaagaggtttaattgactcacagtt

SEQ ID NO: 675513 - DNA, 2328 bp, Homo sapiens
  misc_feature 1396, 1411, 1412, 1413, 1414, 1415, 1416, 1417, 1418, 1419,1420, 1421, 1422, 1423, 1424, 1425, 1426, 1427, 1428, 1429,1430, 1431, 1432, 1433, 1434, 1435, 1436, 1437, 1438, 1439,1440, 1441, 1442, 1443, 1444, 1445, 1446, 1447, 1448: n = A,T,C or G
  misc_feature 1449, 1450, 1451, 1452, 1453, 1454, 1455, 1456, 1457, 1458,1459, 1460, 1461, 1462, 1463, 1464, 1465, 1466, 1467, 1468,1469, 1470, 1471, 1472, 1473, 1474, 1475, 1476, 1477, 1478,1479, 1480, 1481, 1482, 1483, 1484, 1485, 1486, 1487: n = A,T,C or G
  misc_feature 1488, 1489, 1490, 1491, 1492, 1493, 1494, 1495, 1496, 1497,1498, 1499, 1500, 1501, 1502, 1503, 1504, 1505, 1506, 1507,1508, 1509, 1510: n = A,T,C or G
acttgttttcccagcactactgttatcatgctcctgtcttgtacattcctatgagtgcatcttgcaaaacggccttgtatttcaagctatgttttttttttttttaaatctgaacatacttatgttgggaataaagtttaaggggaaaatagcatttaaaaaacattttttactgcaatgtgaacaaaatccaggataagaaaaaagagcaaaatatgattttcttgcaggtccattctgcttaatctcagtgttggaattaagagatacaacttatagagaacacacactgctgcaccggcctgtagagagttagagcagacttgacgtactggtgggttgaaaaatctgtctctgccatgtgggcagaaccagtttcttctctagatgtctccttggcattttgtgccccatcaaccctggctgcgtctattccatttctaggcaaaaaagattaaatatagcttaagtatcttatgctatattctccaaagaataacctgagaaaacaatatatatcctatatattcgtaacctgttattgagatatacacagaataattagttgcttattaaattttgctaagactgaaataatgcattgtaaccatgtaaacatgaaatatttgtcaaagtgcacaaatgaagtggaaaatgattaccatctatagtcatttaaaaaggaagtctagtcattaacaaactttcttgataattcacaactcaatcaggcacagaaaataataaagtagtaagataatgtgattcatgatttagcggagatttaaaaaatgagaatggtttattatagaatttagtagtaaaactcagtgtctaatttcaaataattttgacaactagttgtagttccaaacaactagttgtagggataataataactttctcaaaaatttttagtaaaatttaagttaaataacacaagtgatgcatgtggttcaatacttatcacattgtagtgcttgatataatattctaagatgaaatcataaaatcaaaataaaaatagtgtttatgtttgaatgtttggattataattttcttgggtttttaataattttctataaaataaatttgtgctaatgtttgtctagttygcaacggcccaatactttggagttgtaatagtaaccatgtaattgcagaaaaggtgaaaatattggttgtggcctcttgtataattctcaatggttgtttcataatttgtatctatcttgagaccaatgaaaagtggaaattaaaagtatataaaatgtacaattttattacctagaaagttttctgctttctgtacgtatatcctttcatagccctgagtgatcacactagggagagggtcatgatctggctgacagaatgaattatttttataagtgtncctagtcattcctannnnnnnnnnnnnnnnnnnnnnnnnnnnnnnnnnnnnnnnnnnnnnnnnnnnnnnnnnnnnnnnnnnnnnnnnnnnnnnnnnnnnnnnnnnnnnnnnnnnctaacgaagttagttcatcattgcttcttgaaaaaaattactatgatgcagggcatttctgctctaagcacccctatgttttaaatgtattactttaaaaataaagtctgctaaattaccccgaaagtgagtaatttacttgcttgtgttggagtatagaagagttatccatgagcagtgctatttacttattctaaatattctttctctatatttctataccagtcaagtatcgttgcctaacctacaaccagggaatttaagtggtgacgatggatgatgattcttcacatctgtgggtctgctggatgatgagtggctgatctaaggagagatcctctgagtgactttacaacatcttgcacgtctggctgagcttgactccttactcaagtgtattccaagcaaagaggcaactatttttctgggaaagatctttgcatttaattgcagaggaaccagtggtcatgtgcaaacccccttaagtcctagatttggccactgtcactttaccacattccactggccaaagtgagtctcacggtgtagctaaaggtcaagaggtagaaagtatactcttcttgattttagaagaattgcagagtttcatggcaataaacaaggattcaggacaggctaaaaaattaggcccaataactcaatctactacccccatctctagtttgtttaataggagattcgaagcaataaaaaaaaaatcagaccctaattttatcattagttttaatattaattctaaataattgagaggatgagttttatagcttttgtttttaaataaattaatgattataata

SEQ ID NO: 675514 - DNA, 2328 bp, Homo sapiens
  misc_feature 1396, 1411, 1412, 1413, 1414, 1415, 1416, 1417, 1418, 1419,1420, 1421, 1422, 1423, 1424, 1425, 1426, 1427, 1428, 1429,1430, 1431, 1432, 1433, 1434, 1435, 1436, 1437, 1438, 1439,1440, 1441, 1442, 1443, 1444, 1445, 1446, 1447, 1448: n = A,T,C or G
  misc_feature 1449, 1450, 1451, 1452, 1453, 1454, 1455, 1456, 1457, 1458,1459, 1460, 1461, 1462, 1463, 1464, 1465, 1466, 1467, 1468,1469, 1470, 1471, 1472, 1473, 1474, 1475, 1476, 1477, 1478,1479, 1480, 1481, 1482, 1483, 1484, 1485, 1486, 1487: n = A,T,C or G
  misc_feature 1488, 1489, 1490, 1491, 1492, 1493, 1494, 1495, 1496, 1497,1498, 1499, 1500, 1501, 1502, 1503, 1504, 1505, 1506, 1507,1508, 1509, 1510: n = A,T,C or G
acttgttttcccagcactactgttatcatgctcctgtcttgtacattcctatgagtgcatcttgcaaaacggccttgtatttcaagctatgttttttttttttttaaatctgaacatacttatgttgggaataaagtttaaggggaaaatagcatttaaaaaacattttttactgcaatgtgaacaaaatccaggataagaaaaaagagcaaaatatgattttcttgcaggtccattctgcttaatctcagtgttggaattaagagatacaacttatagagaacacacactgctgcaccggcctgtagagagttagagcagacttgacgtactggtgggttgaaaaatctgtctctgccatgtgggcagaaccagtttcttctctagatgtctccttggcattttgtgccccatcaaccctggctgcgtctattccatttctaggcaaaaaagattaaatatagcttaagtatcttatgctatattctccaaagaataacctgagaaaacaatatatatcctatatattcgtaacctgttattgagatatacacagaataattagttgcttattaaattttgctaagactgaaataatgcattgtaaccatgtaaacatgaaatatttgtcaaagtgcacaaatgaagtggaaaatgattaccatctatagtcatttaaaaaggaagtctagtcattaacaaactttcttgataattcacaactcaatcaggcacagaaaataataaagtagtaagataatgtgattcatgatttagcggagatttaaaaaatgagaatggtttattatagaatttagtagtaaaactcagtgtctaatttcaaataattttgacaactagttgtagttccaaacaactagttgtagggataataataactttctcaaaaatttttagtaaaatttaagttaaataacacaagtgatgcatgtggttcaatacttatcacattgtagtgcttgatataatattctaagatgaaatcataaaatcaaaataaaaatagtgtttatgtttgaatgtttggattataattttcttgggtttttaataattttctataaaataaatttgtgctaatgtttgtctagttcgcaacggcccaatactttggagttgtaatagtaaccatgtaattgcagaaaaggtgaaaatattggttgtggcctcttgtataattctcaatggttgtttcataatttgtatctatcttgagaccaatgaaaagtggaaattaaaagtatataaaatgtacaattttattacctagaaagttttctgctttctgtacgtatatcctttcatagccctgagtgatcacactagggagagggtcatgatctggctgacagaatgaattatttttataagtgtncctagtcattcctannnnnnnnnnnnnnnnnnnnnnnnnnnnnnnnnnnnnnnnnnnnnnnnnnnnnnnnnnnnnnnnnnnnnnnnnnnnnnnnnnnnnnnnnnnnnnnnnnnnctaacgaagttagttcatcattgcttcttgaaaaaaattactatgatgcagggcatttctgctctaagcacccctatgttttaaatgtattactttaaaaataaagtctgctaaattaccccgaaagtgagtaatttacttgcttgtgttggagtatagaagagttatccatgagcagtgctatttacttattctaaatattctttctctatatttctataccagtcaagtatcgttgcctaacctacaaccagggaatttaagtggtgacgatggatgatgattcttcacatctgtgggtctgctggatgatgagtggctgatctaaggagagatcctctgagtgactttacaacatcttgcacgtctggctgagcttgactccttactcaagtgtattccaagcaaagaggcaactatttttctgggaaagatctttgcatttaattgcagaggaaccagtggtcatgtgcaaacccccttaagtcctagatttggccactgtcactttaccacattccactggccaaagtgagtctcacggtgtagctaaaggtcaagaggtagaaagtatactcttcttgattttagaagaattgcagagtttcatggcaataaacaaggattcaggacaggctaaaaaattaggcccaataactcaatctactacccccatctctagtttgtttaataggagattcgaagcaataaaaaaaaaatcagaccctaattttatcattagttttaatattaattctaaataattgagaggatgagttttatagcttttgtttttaaataaattaaygattataata

SEQ ID NO: 675515 - DNA, 972 bp, Homo sapiens
ccatctaacttccttgatcatagatcctcaggattctcacactctcaggtcacactcatcctgtccttttcccaaagcccctctgtgccttgcccttggtgaccctttgcttaggacagtcagtcccatgcttatggtcacctactcttaaccctcataaaagtagcttcccttctcattactctgtatcctgttgaccttgctaaattttcttcatggctcctgtaactacttattattctatttaactttacctatttatttctttattctctgttctccaaatagaatgtaaaggtaagagagtagagatttgtgtttcttgcccacaactttcttcttgtcacctccaagagacactctaggaacttcatgaatatatattgaataatgatcaatcaacctagtaatcattttagtattggcatatagattcatatgtgaaatcgtgtgtgatagtttcttgcttgtttggtttttttgtttttgtgctgtgtgtgcacacaagtagatgtctatgtctctgcatgtgtgatggrttgtaaatggattgggggcaattaaaaaccaacccagcataatatgcatctgagaaatatgcaaataataatgtatcattcaaaaggaggaataaaatgacattaaaagcagattcttaaaataccattggctcctgctcgtaaattcagctggcaaaccccaccctcaatatttttcttctttaaaaaaaaaaactcagacataatcaaacccaaaaccttatctctggtgcatagccccctctagccttttcaccgacttgttatttttttctttaggaaaagattctggaaataatttttataacagcttctcatcctcagtgtcatttattttcttacactaattaagtgattcttcagctttctaaagcaatacctttgaaattattttgccaagatcacccaggatatctttgctatttgccatatc

SEQ ID NO: 675516 - DNA, 972 bp, Homo sapiens
ccatctaacttccttgatcatagatcctcaggattctcacactctcaggtcacactcatcctgtccttttcccaaagcccctctgtgccttgcccttggtgaccctttgcttaggacagtcagtcccatgcttatggtcacctactcttaaccctcataaaagtagcttcccttctcattactctgtatcctgttgaccttgctaaattttcttcatggctcctgtaactacttattattctatttaactttacctatttatttctttattctctgttctccaaatagaatgtaaaggtaagagagtagagatttgtgtttcttgcccacaactttcttcttgtcacctccaagagacactctaggaacttcatgaatatatattgaataatgatcaatcaacctagtaatcattttagtattggcatatagattcatatgtgaaatcgtgtgtgatagtttcttgcttgtttggtttttttgtttttgtgctgtgtgtgcacacaagtagatgtctatgtctctgcatgtgtgatgggttgtaaatggattgggggcaattaaaaaccaacycagcataatatgcatctgagaaatatgcaaataataatgtatcattcaaaaggaggaataaaatgacattaaaagcagattcttaaaataccattggctcctgctcgtaaattcagctggcaaaccccaccctcaatatttttcttctttaaaaaaaaaaactcagacataatcaaacccaaaaccttatctctggtgcatagccccctctagccttttcaccgacttgttatttttttctttaggaaaagattctggaaataatttttataacagcttctcatcctcagtgtcatttattttcttacactaattaagtgattcttcagctttctaaagcaatacctttgaaattattttgccaagatcacccaggatatctttgctatttgccatatc

SEQ ID NO: 675517 - DNA, 972 bp, Homo sapiens
ccatctaacttccttgatcatagatcctcaggattctcacactctcaggtcacactcatcctgtccttttcccaaagcccctctgtgccttgcccttggtgaccctttgcttaggacagtcagtcccatgcttatggtcacctactcttaaccctcataaaagtagcttcccttctcattactctgtatcctgttgaccttgctaaattttcttcatggctcctgtaactacttattattctatttaactttacctatttatttctttattctctgttctccaaatagaatgtaaaggtaagagagtagagatttgtgtttcttgcccacaactttcttcttgtcacctccaagagacactctaggaacttcatgaatatatattgaataatgatcaatcaacctagtaatcattttagtattggcatatagattcatatgtgaaatcgtgtgtgatagtttcttgcttgtttggtttttttgtttttgtgctgtgtgtgcacacaagtagatgtctatgtctctgcatgtgtgatgggttgtaaatggattgggggcaattaaaaaccaacccagcataatatgcatctgagaaatatgcaaataataatgtatcattcaaaaggaggaataaaatgacattaaaagcagattcttaaaataccattggctcctgctcrtaaattcagctggcaaaccccaccctcaatatttttcttctttaaaaaaaaaaactcagacataatcaaacccaaaaccttatctctggtgcatagccccctctagccttttcaccgacttgttatttttttctttaggaaaagattctggaaataatttttataacagcttctcatcctcagtgtcatttattttcttacactaattaagtgattcttcagctttctaaagcaatacctttgaaattattttgccaagatcacccaggatatctttgctatttgccatatc

SEQ ID NO: 675518 - DNA, 1461 bp, Homo sapiens
  misc_feature 182: n = A,T,C or G
aaataaacagagccttagagaaacgtgagactgtactaggcacgccaacatacacataacaggaggacgagaaagagaagagagaagtaaagagactgtactagtttcctattgctcttgtaacaaattaccataaacttaggggctttaaacaacatacatttgtaattttacagttctgngagttagaagtctaaaatccatcttttggaactaaattcaaggtgacatcagggctggaggctctacaagagagtctgttttttttttttttttttttttttttttgcgtttcccaaattttaaaggttgctgcggggtttggttaaggggtttttattcactttcccaactaggcttttgtctcatttgttcacttccctgaaacaaatggggtttttaaatgacaaaaactcttttaaatgctggagtcctgggataggttaactatgtcattgattttttgcccttctttccaaaataatgcctagttttacaaaaaaaaaattgtcatgctgcatatcacaattttttaaaataaacaaatgaacaagtaattgggctacatatggttaaaatacaaacttaatatagtgttatatagaaatcagagtggtagttcaaagaggggaattatgaactctaaatcaatcaagtgtggaacaaaaaaataggaaaaagaataatccagggaaaaggataaaatttcttaggaccttgaatgataagtaggacttttcaaaagctaaaacctggacaaagtaatttttagaaaggagaatgttattcacaaatttaaaacaaattgttatttgttttattaattaattaatttattgtttactaatattaataaacaataaaaatatttattaatattaaattataatgagaaagtatgttagatagataaatgtgctaatatttaagagttttaatgctaagttatgcagttaaatttaatacaattatacttcatttctaagagcaaatgagggtcaattctcagacatattctacacaygtcttcataatcttcgttattaacattacattaatgcacattttgtggctttttttcttcctctactttactttctcttatttttcacttctgttcagtgggttccccatcaaaatgtattacctgcatttaaatccttaccttaggtaggcttttgagataaccaaaattaagagagatcatactggaagtggtctttcagataagagctttagggtggtattcaagtgtaaaaacgtttacttgttggattgcatcaaagacaccattgccaatggtatgtggagagatggtaactcccggtaagctgtagcatcattaatattaaataattcttttgtgtgtcagaaggctcaaagagatggtcatttagagtgaatgctttacatgaaaccaaagtacccattacatgtctaagttcccagatgacagtctct

SEQ ID NO: 675519 - DNA, 613 bp, Homo sapiens
atttcaaatatatcatttctgctatgcttattatttggcactctagtgtagggaagggctttatttatttattcatttatttacttctatgagtatgggtttatgatttattactttattgagttatttcaatccaatcctttcaatatttactttgaatatgacaagagggagccctgtcaaactgacttgtgcattttgacatatttccctaattctttgagctcatcttcctcaatgcaacaagatgctccaggcttatattgctcttttytagccctgaaaatggtaaccatttctccattaagccatggatccttttagtgggaaatggtatttaaatatgaatgctgggtgtgcttattcttttttttctctcctgcctttcctcttcttctttctcccttctctctctccctctctttctgtctctctttctctctctctgtcacacacacacacacacacacacacacacacaaatatatatgatgtaaataaatattgatattttcaatccaacatcacatagtatatattagttttcccctttccaatactgaaactctctcagcagtgagaaacatggatttcattattttcaatatattaa

SEQ ID NO: 675520 - DNA, 1453 bp, Homo sapiens
tggggatttgggcctggctcacccatcacccagcagcaggtagcgataatgctttcctggtcagtagttggcacatcaggtagcacctccattgctaaagtttycactggtggtgacctgtagccatgacctgctggtaatgggaatgccagagcaggtgtgatacttataggcatttgcaatatatcaagggatcagcgcccacaaagacatcagagttggtggttattgctaagttgaatttacatcttacattaggataatgaacaaatgaggctatcagcaagcgtgacaatctcagggctttcttctagcattcaaggaagattttatctcctacttggcagggcagacataactgaaagtaggctgaagacctaattactatagtcacagagatgtttggatgctcagcttattcaggtctgctatgcaaagaccaggggattctgaaaaatgggatgtggatatctttatagatgtcctgagaatttgaccttatgaccccctttctgctagctctgacttttatgtatttaacattttttaaaaattttctaaaacattttaatagacatactttccaagaatgttatgtactgcagttgttcactgaagattcattaagcatccatttattgagtgtcccctattgctgagaactctgctggaaggtgctacgtaggcccttgggacacaatagtgagaaagggagccttagtataaattcatggagcttacagccaaaagggagagacaaaatttaaataagcaagcccagaaatgaacaatattaactattgtgacaagagtgtccaaggaaaaagaataaagataaatgaaagggtcacatggaggaaactactttagatagtggagttagagaagccctctctatagaaatgacatgaagttgagaataaaatcataagtgacacttggtccagtgaaaaccggggaaagacccttccaagtagaggacaacagtctgcctgtgtgtggagaggtaacaaaaagccaggtgccctggggcaaagacagagggctcatgtgttggaactgcccagctatccagggcacttgtacccaactccctttcctctctccttccctcagggtcagcctgatataattctcttaatgcttctagttctctactaatgttcctttataggtgtttctccttataaaatccttgcatgcttaccgccatcctggtatctgctttttggaggatccatatgaacacaagcagtagaggaaggcctcggtgaaaaggtgatgttaaattccattgagcctaaagctgtcttcttatatattttaaatttagtctaaagatttctctatgcacagggaactgtatcctaactggatgtgtaaacagactgtaacctactcttgtgtcaacacagaatattggccaatcacaggtggccaactgttcaaatca

SEQ ID NO: 675521 - DNA, 1453 bp, Homo sapiens
tggggatttgggcctggctcacccatcacccagcagcaggtagcgataatgctttcctggtcagtagttggcacatcaggtagcacctccattgctaaagttttcactggtggtgacctgtagccatgacctgctggtaatgggaatgccagagcaggtgtgatacttataggcatttgcaawatatcaagggatcagcgcccacaaagacatcagagttggtggttattgctaagttgaatttacatcttacattaggataatgaacaaatgaggctatcagcaagcgtgacaatctcagggctttcttctagcattcaaggaagattttatctcctacttggcagggcagacataactgaaagtaggctgaagacctaattactatagtcacagagatgtttggatgctcagcttattcaggtctgctatgcaaagaccaggggattctgaaaaatgggatgtggatatctttatagatgtcctgagaatttgaccttatgaccccctttctgctagctctgacttttatgtatttaacattttttaaaaattttctaaaacattttaatagacatactttccaagaatgttatgtactgcagttgttcactgaagattcattaagcatccatttattgagtgtcccctattgctgagaactctgctggaaggtgctacgtaggcccttgggacacaatagtgagaaagggagccttagtataaattcatggagcttacagccaaaagggagagacaaaatttaaataagcaagcccagaaatgaacaatattaactattgtgacaagagtgtccaaggaaaaagaataaagataaatgaaagggtcacatggaggaaactactttagatagtggagttagagaagccctctctatagaaatgacatgaagttgagaataaaatcataagtgacacttggtccagtgaaaaccggggaaagacccttccaagtagaggacaacagtctgcctgtgtgtggagaggtaacaaaaagccaggtgccctggggcaaagacagagggctcatgtgttggaactgcccagctatccagggcacttgtacccaactccctttcctctctccttccctcagggtcagcctgatataattctcttaatgcttctagttctctactaatgttcctttataggtgtttctccttataaaatccttgcatgcttaccgccatcctggtatctgctttttggaggatccatatgaacacaagcagtagaggaaggcctcggtgaaaaggtgatgttaaattccattgagcctaaagctgtcttcttatatattttaaatttagtctaaagatttctctatgcacagggaactgtatcctaactggatgtgtaaacagactgtaacctactcttgtgtcaacacagaatattggccaatcacaggtggccaactgttcaaatca

SEQ ID NO: 675522 - DNA, 1453 bp, Homo sapiens
tggggatttgggcctggctcacccatcacccagcagcaggtagcgataatgctttcctggtcagtagttggcacatcaggtagcacctccattgctaaagttttcactggtggtgacctgtagccatgacctgctggtaatgggaatgccagagcaggtgtgatacttataggcatttgcaatatatcaagggatcagcgcccacaaagacatcagagttggtggttattgctaagttgaatttacatcttacattaggataatgaacaaatgaggctatcagcaagcgtgacaatctcagggctttcttctagcattcaaggaagattttatctcctacttggcagggcagacataactgaaagtaggctgaagacctaattactatagtcacagagatgtttggatgctcagcttattcaggtctgctatgcaaagaccaggggattctgaaaaatgggatgtggatatctttatagatgtcctgagaatttgaccttatgaccccctttctgctagctctgacttttatgtatttaacattttttaaaaattttctaaaacattttaatagacatactttccaagaatgttatgtactgcagttgttcactgaagattcattaagcatccatttattgagtgtcccctattgctgagaactctgctggaaggtgctacgtaggcccttgggacacaatagtgagaaagggagccttagtataaattcatggagcttacagccaaaagggagagacaaaatttaaataagcaagcccagaaatgaacaatattaactattgtgacaagagtgtccaaggaaaaagaataaagataaatgaaagggtcacatggaggaaactactttagatagtggagttagagaagccctctctatagaaatgacatgaagttgagaataaaatcataagtgacacttggtccagtgaaaacyggggaaagacccttccaagtagaggacaacagtctgcctgtgtgtggagaggtaacaaaaagccaggtgccctggggcaaagacagagggctcatgtgttggaactgcccagctatccagggcacttgtacccaactccctttcctctctccttccctcagggtcagcctgatataattctcttaatgcttctagttctctactaatgttcctttataggtgtttctccttataaaatccttgcatgcttaccgccatcctggtatctgctttttggaggatccatatgaacacaagcagtagaggaaggcctcggtgaaaaggtgatgttaaattccattgagcctaaagctgtcttcttatatattttaaatttagtctaaagatttctctatgcacagggaactgtatcctaactggatgtgtaaacagactgtaacctactcttgtgtcaacacagaatattggccaatcacaggtggccaactgttcaaatca

SEQ ID NO: 675523 - DNA, 571 bp, Homo sapiens
gacagatgtggctcacattttatttctattggaaagcaatgttctgaagaattctttatttttctcctctcacttttcacgctatcctttagcaagaccatcagcttacattgctgtactcttgtctctgtgttgtttactctcgtctacatttctttttctttctttctttttttttttgagatggagtcttgctctgctgcccaggctggagtgcagtggcgcaatctcggctcactgcaagccccgcctcyggggtttatggcagtctcctgcctcagcctcctgagtagctgggactacaggcacctgccaccacgcccagctaatttttttgtattttcagtagagatggggtttcaccatgttagccaggatggtctcgatctcctgacctcatgatccacccgccttggcctcccaaagtgttgggattacaggcgtgagccaccgcacccagccttatgtccacatttctaaccctcgcctctctctgaacctccagggcagaatttctaagtgcctctacataaatgctctgccaaattcagtgcatcctactcttcccgat

SEQ ID NO: 675524 - DNA, 1298 bp, Homo sapiens
ggcaacagacttgtattttatctgcaaggactgctgaaagacagttttctggttcccttataaggttgcacatttccaaaacgtaagaaacatgttgggcaagtatacctgacaaatttgtaccacaytccacattcattaatcacgtcctgttttcccaaattccttgtatttgtcctttcctttgcacttctctccccatagcctggtccagccttttgctgggattacttcaaaagcttcctaaatggtttttttttttaatttacattttattttatatttattcacttttttcattatccatacgtcaccttgctagccaatcttcacgttgcaattaacatgtatagtgaaacatgggttagagcatgcctctaatctcacgaaaataattctacaactcctgattgcctacacacacaaaaattaaatgttttaacatgctattcaaaacactcaaggatatggacttcagtatattttcagtctccttttaaactagattcctcactcaccttcatgtcttttgctagtcagtcctttaatacatttagaattcattactagactactagtattgctaagaatttatactagactacatagcacagttttgagtaagactctcattagtgttgctccccaactgagtgagtttggacactctgcttagcctctctcagattcaatttcctcacagcaaagtgaagtcaccacaaccttgcaagcttcctgtgtcgatgattgtcaaatgtgcataacatggggcatgaacctggcacttagcaagtgccccataaaaggatgccattgatagtgctcttaggattgtgtggctgtgctcctgataatttttccacttccaggaatgccttcaccacatctctccctgccctggaatccagcctatccttcacagcactcctccaattttaacctctttatgaacactccagtcaggaaacacaaggttccttcctgtctaatgccacagcagggtatctattcatgtagttatttagcacacactttttttttctttttttttttttgagatggagtcttgctctgtcacccaggctggagtgcagtggcgcgatctcggcttactgcaacctccgcctcctgggtttgagagattctcctgcctcagcctcctgagtagctgggattacaggcacgtgtcaccatgcccggctaattttcgtatttttagtagagacagggtttctccatgttgctcaggctggtctcgaacttctgaccttgtgatctgcctacctcggcctcccaaa

SEQ ID NO: 675525 - DNA, 1553 bp, Homo sapiens
tccccaaatatcaaaacatacattttcttggaaccagggtaaaaatgaaaactgcttatgtatattctgtttgtccatttaggtcttttagtcctgcacattcccgttaatattttactgatttgttggagagagcagacagtttgtcctgaagcacgtctcagtctcaccttttttatctggtttctcccttatgttgttattgaacattttaatcttatctcctgaatattctttaaacagggtaattttaaagcttgtataggttcaagctaaatgtgtttgactagaatacattgcacgtgacgttacgtatcacamattgtagcatttcaggagtaggtcttccagataaaatccaggactttctaatattgtgtagaacataactatactaaaattacgttgtttagctgaaattcacatttagttgagtgctccatgtttctacttgctaaatctgaccaccttattcagaagacatacaaaaccttctcaaattaactactaatttgatggcagactcatccctgtattttatagttatgcttttccccctcgtagtcatgtgtgaggttattttgataccatatgaatttccacttcccatcagccatttaacttactaagcaaatgattgttcatatctttgtctagtcaatatatcattagacttcatgaaatatttcttttctaactctaccattgcttttatgctaaaattcttctgaaaaggagaactttcttttgtcaattggggctattaagtcatgtgctcaaactgaagttcctaatagaaaggcaggataaatgcctcaacagcaataacaactatttattacgtgcctacgaagcactgaataaatcaaagatcattgcccatgtgaattttacatcgtaatgggcacaattaacaacaattagcagaataaaccaataaattatgttataaggctatagatgctatggaataaagaaaacaatgatgggatagtgggagccaggaatatagaaaagtgggaagagacaggttgcagtaaataggttggtcagtataggtctcatgacagagatgagattagagcaaagattataaggaagtgaagagatcaggcaagtcaatttctggggaggagcaagtagaggaagtaaccagagccaatgccactggcaggggtgaacctaggtgctttgtgaacagcaaagggcccagtgtggctgcagcaggtgaacaagggagtgagatgaggtctgaaatggagattgaggggagatacagtgcagatgagctagagatggatagatagagatagatgagaggagatgagatagagacagagatagagatagagatagaaatagaggtagatagatggagatagagatagagagagagagatggagatggtagagatagaagctgggtcatttaaattctgtgtagacttgtgaaaggaaaataaatcttcaagcccccaaaatcactaagctaaagggaaaagtcaaactgggaactgcttaagcaaacctgcctcccattctattccaagtca

SEQ ID NO: 675526 - DNA, 1553 bp, Homo sapiens
tccccaaatatcaaaacatacattttcttggaaccagggtaaaaatgaaaactgcttatgtatattctgtttgtccatttaggtcttttagtcctgcacattcccgttaatattttactgatttgttggagagagcagacagtttgtcctgaagcacgtctcagtctcaccttttttatctggtttctcccttatgttgttattgaacattttaatcttatctcctgaatattctttaaacagggtaattttaaagcttgtataggttcaagctaaatgtgtttgactagaatacattgcacgtgacgttacgtatcacacattgtagcatttcaggagtaggtcttccagataaaatccaggactttctaatattgtgtagaacataactatactaaaattacgttgtttagctgaaattcacatttagttgagtgctccatgtttctacttgctaaatctgaccaccttattcagaagacatacaaaaccttctcaaattaactactaatttgatggcagactcatccctgtattttatagttatgcttttccccctcgtagtcatgtgtgaggttattttgataccatatgaatttccacttcccatcagccatttaacttactaagcaaatgattgttcatatctttgtctagtcaatatatcattagacttcatgaaatatttcttttctaactctaccattgcttttatgctaaaattcttctgaaaaggagaactttcttttgtcaattggggctattaagtcatgtgctcaaactgaagttcctaatagaaaggcaggataaatgcctcaacagcaataacaactatttattacgtgcctacgaagcactgaataaatcaaagatcattgcccatgtgaattttacatcgtaatgggcacaattaacaacaattagcagaataaaccaataaattatgttataaggctatagatgctatggaataaagaaaacaatgatgggatagtgggagccaggaatatagaaaagtgggaagagacaggttgcagtaaataggttggtcagtataggtctcatgacagagatgagattagagcaaagattataaggaagtgaagagatcaggcaagtcaatttctggggaggagcaagtagaggaagtaaccagagccaatgccactggcaggggtgaacctaggtgctttgtgaacagcaaagggcccagtgtggctgcagcaggtgaacaagggagtgagatgaggtctgaaatggagattgaggggagatacagtgcagatgagctagagatggatagatagagatagatgagaggagatgagatagagacagagatagagatagagatagaaatagaggtagatagatggagatagaratagagagagagagatggagatggtagagatagaagctgggtcatttaaattctgtgtagacttgtgaaaggaaaataaatcttcaagcccccaaaatcactaagctaaagggaaaagtcaaactgggaactgcttaagcaaacctgcctcccattctattccaagtca

SEQ ID NO: 675527 - DNA, 1553 bp, Homo sapiens
tccccaaatatcaaaacatacattttcttggaaccagggtaaaaatgaaaactgcttatgtatattctgtttgtccatttaggtcttttagtcctgcacattcccgttaatattttactgatttgttggagagagcagacagtttgtcctgaagcacgtctcagtctcaccttttttatctggtttctcccttatgttgttattgaacattttaatcttatctcctgaatattctttaaacagggtaattttaaagcttgtataggttcaagctaaatgtgtttgactagaatacattgcacgtgacgttacgtatcacacattgtagcatttcaggagtaggtcttccagataaaatccaggactttctaatattgtgtagaacataactatactaaaattacgttgtttagctgaaattcacatttagttgagtgctccatgtttctacttgctaaatctgaccaccttattcagaagacatacaaaaccttctcaaattaactactaatttgatggcagactcatccctgtattttatagttatgcttttccccctcgtagtcatgtgtgaggttattttgataccatatgaatttccacttcccatcagccatttaacttactaagcaaatgattgttcatatctttgtctagtcaatatatcattagacttcatgaaatatttcttttctaactctaccattgcttttatgctaaaattcttctgaaaaggagaactttcttttgtcaattggggctattaagtcatgtgctcaaactgaagttcctaatagaaaggcaggataaatgcctcaacagcaataacaactatttattacgtgcctacgaagcactgaataaatcaaagatcattgcccatgtgaattttacatcgtaatgggcacaattaacaacaattagcagaataaaccaataaattatgttataaggctatagatgctatggaataaagaaaacaatgatgggatagtgggagccaggaatatagaaaagtgggaagagacaggttgcagtaaataggttggtcagtataggtctcatgacagagatgagattagagcaaagattataaggaagtgaagagatcaggcaagtcaatttctggggaggagcaagtagaggaagtaaccagagccaatgccactggcaggggtgaacctaggtgctttgtgaacagcaaagggcccagtgtggctgcagcaggtgaacaagggagtgagatgaggtctgaaatggagattgaggggagatacagtgcagatgagctagagatggatagatagagatagatgagaggagatgagatagagacagagatagagatagagatagaaatagaggtagatagatggagatagagatagagrgagagagatggagatggtagagatagaagctgggtcatttaaattctgtgtagacttgtgaaaggaaaataaatcttcaagcccccaaaatcactaagctaaagggaaaagtcaaactgggaactgcttaagcaaacctgcctcccattctattccaagtca

SEQ ID NO: 675528 - DNA, 1553 bp, Homo sapiens
tccccaaatatcaaaacatacattttcttggaaccagggtaaaaatgaaaactgcttatgtatattctgtttgtccatttaggtcttttagtcctgcacattcccgttaatattttactgatttgttggagagagcagacagtttgtcctgaagcacgtctcagtctcaccttttttatctggtttctcccttatgttgttattgaacattttaatcttatctcctgaatattctttaaacagggtaattttaaagcttgtataggttcaagctaaatgtgtttgactagaatacattgcacgtgacgttacgtatcacacattgtagcatttcaggagtaggtcttccagataaaatccaggactttctaatattgtgtagaacataactatactaaaattacgttgtttagctgaaattcacatttagttgagtgctccatgtttctacttgctaaatctgaccaccttattcagaagacatacaaaaccttctcaaattaactactaatttgatggcagactcatccctgtattttatagttatgcttttccccctcgtagtcatgtgtgaggttattttgataccatatgaatttccacttcccatcagccatttaacttactaagcaaatgattgttcatatctttgtctagtcaatatatcattagacttcatgaaatatttcttttctaactctaccattgcttttatgctaaaattcttctgaaaaggagaactttcttttgtcaattggggctattaagtcatgtgctcaaactgaagttcctaatagaaaggcaggataaatgcctcaacagcaataacaactatttattacgtgcctacgaagcactgaataaatcaaagatcattgcccatgtgaattttacatcgtaatgggcacaattaacaacaattagcagaataaaccaataaattatgttataaggctatagatgctatggaataaagaaaacaatgatgggatagtgggagccaggaatatagaaaagtgggaagagacaggttgcagtaaataggttggtcagtataggtctcatgacagagatgagattagagcaaagattataaggaagtgaagagatcaggcaagtcaatttctggggaggagcaagtagaggaagtaaccagagccaatgccactggcaggggtgaacctaggtgctttgtgaacagcaaagggcccagtgtggctgcagcaggtgaacaagggagtgagatgaggtctgaaatggagattgaggggagatacagtgcagatgagctagagatggatagatagagatagatgagaggagatgagatagagacagagatagagatagagatagaaatagaggtagatagatggagatagagatagagakagagagatggagatggtagagatagaagctgggtcatttaaattctgtgtagacttgtgaaaggaaaataaatcttcaagcccccaaaatcactaagctaaagggaaaagtcaaactgggaactgcttaagcaaacctgcctcccattctattccaagtca

SEQ ID NO: 675529 - DNA, 1553 bp, Homo sapiens
tccccaaatatcaaaacatacattttcttggaaccagggtaaaaatgaaaactgcttatgtatattctgtttgtccatttaggtcttttagtcctgcacattcccgttaatattttactgatttgttggagagagcagacagtttgtcctgaagcacgtctcagtctcaccttttttatctggtttctcccttatgttgttattgaacattttaatcttatctcctgaatattctttaaacagggtaattttaaagcttgtataggttcaagctaaatgtgtttgactagaatacattgcacgtgacgttacgtatcacacattgtagcatttcaggagtaggtcttccagataaaatccaggactttctaatattgtgtagaacataactatactaaaattacgttgtttagctgaaattcacatttagttgagtgctccatgtttctacttgctaaatctgaccaccttattcagaagacatacaaaaccttctcaaattaactactaatttgatggcagactcatccctgtattttatagttatgcttttccccctcgtagtcatgtgtgaggttattttgataccatatgaatttccacttcccatcagccatttaacttactaagcaaatgattgttcatatctttgtctagtcaatatatcattagacttcatgaaatatttcttttctaactctaccattgcttttatgctaaaattcttctgaaaaggagaactttcttttgtcaattggggctattaagtcatgtgctcaaactgaagttcctaatagaaaggcaggataaatgcctcaacagcaataacaactatttattacgtgcctacgaagcactgaataaatcaaagatcattgcccatgtgaattttacatcgtaatgggcacaattaacaacaattagcagaataaaccaataaattatgttataaggctatagatgctatggaataaagaaaacaatgatgggatagtgggagccaggaatatagaaaagtgggaagagacaggttgcagtaaataggttggtcagtataggtctcatgacagagatgagattagagcaaagattataaggaagtgaagagatcaggcaagtcaatttctggggaggagcaagtagaggaagtaaccagagccaatgccactggcaggggtgaacctaggtgctttgtgaacagcaaagggcccagtgtggctgcagcaggtgaacaagggagtgagatgaggtctgaaatggagattgaggggagatacagtgcagatgagctagagatggatagatagagatagatgagaggagatgagatagagacagagatagagatagagatagaaatagaggtagatagatggagatagagatagagagagakagatggagatggtagagatagaagctgggtcatttaaattctgtgtagacttgtgaaaggaaaataaatcttcaagcccccaaaatcactaagctaaagggaaaagtcaaactgggaactgcttaagcaaacctgcctcccattctattccaagtca

SEQ ID NO: 675530 - DNA, 602 bp, Homo sapiens
ctctagaataacrtcccaattcctggcctcacttctgagactcttacacaataccagcttgggtttttattagctttagatcccatatttgtgtacttgttacagaccgtttgttgttcatccttgcctcttgtgcctttctcccagctgggaacattctctgcccagaattcccagtgggtaaactgcccatggcttcgctaaaatttcactgcgcttttgaaaagtgcttgcatccttaggcttcatggtttctcctctgtgttcagctgaacctccattctctgaagtagtattttggtgcatggatcttgtctctggttttatacatgtctgtctcccatgagattatgaatgccctgagagtagaggtggtgctttgtttttttacttgaatctcaataaggccaaataccgggccttgtaaagaggagacaccttgtacttgccaagataatactgttgttttccacactgaaatttggggttgtaaaatgtgcagcttataggtactctggcttgggcttcttttttgagacggagtttcgctcttgttgcccaggctggagtacgatggcgcgatctcggctcactgtaacttc

SEQ ID NO: 675531 - DNA, 1019 bp, Homo sapiens
ggcgacagagtgagactctgtctcaaaaaaataaataagtaaataaataaattccagacatcctaccactcagttgatccttttctttttttttctttcttccttttaccttttttttttttttttttttttgagacaggatctcactctgtcacccaggctggtgcagtgggggtgatcatagcttgctgcagcctcgacctcccagactcaagtgatcctcccacctcagactcccaagtagctgggaccacaggcacttgccaccatgcccagctaattttttgattttttgtagagacagagtctctcccagggtactgggattacagacttgagctgccatgcccagcatgaatgctttttttytaagtctgaattttcattgtcgtcttctttttttttttttctgagacagagtctctctctgtagcccaggctagagtgcagtggcaccatctcggctcactgcaacctctgcctcaaacaattttcctgcctcagccgccagactgggactacaggtgcatgccaccatgcctggctaatttttgtattttttatttttttaaattttattttataaattatatatatatatatatatatatatattttttttttttttttttttttttttgagacggagtctagctctgttgcccaggcgggagtgcagtggcgtggcgtgatctcagctcactgcaacctccgttgtccaggtttaagcaattctcctgccttagcctcccgagtagctgggattacaggtgcccaccaccacgcccagctaatttttgtattgttagtacagatggggtttcaccatgttgaccaggctggtctcgaactcatgacctcaggcgatctgcccgccttggcctcccaaagtgctgggattacaggcatgagccactgtgcccagccccagatcatgattttaatccatactgattgcttgacaaatagaagaaatacactgctccctaaacctgagtctgtccatgtgtctgtttccc

SEQ ID NO: 675532 - DNA, 315 bp, Homo sapiens
aatgggaaaacatggctcctatcatcctcaataaatttatttttccaatcttttttgggccttgccctactcaggcaccctctttgtacaagcctyaactcctactggaccatcctttctctgatgacctcctctcctctgcccaacacatataatgctgccttcctgcaagagaaagaagagaaaagagatgagagaagagactttaaataagagggccaggcatggtggcacacacctgtaattccagcactttaggaggccgaggcgggcagatcacttgagctcaggagctcgagaccagcctaagcaaca

SEQ ID NO: 675533 - DNA, 1405 bp, Homo sapiens
tctaattaagatagcaatgagaatatttcataggaatttatctcctgtaaaattcttctacagtaatatacatccacataagctcaatacagtgaaagaccacattgttctaaatggaaggtcaatatttttttttaacgaaagcttgtcgtatttagatttatatcaaatccctgctcscaaaacaaatagaacaacaaaaagcctgaacacttactgtaattaagtagatattagactaaacacaggacctactggaagagctacactttacacaggagtgtaagtttcatctaagctttatttgctagttgttattaccaacagaaaatgatgatgctgttcaagtcaccaagaagggcttcatccctttaagattcaaaaaagtttcatgtctttagattttagaaaaaaatgatatagcaaaagtaatctgtatactaatttgtatattaactgcagtggtggttacaagaatctatgcatgtaataacatggtgtagaactacacacacacacacacacacacacacacacacacacacacacacacaattgtaccaatgtcagtttcctggtcttgctactgtgctgtagcaaatgttgtaaaatgtgaccactgggggaacctgggtgacaggtacataggatctctccagacaatttttgcaacttcctataaatctataattatttctaaattaaaataaaaacatcccaatcctacataatctattcactgtatagttcatcccaaaaaagttagcttagtatcatttaaccaatatttgccaaggttaaacataactttattgcctttagtcatttctagaatgaggcaggattataaacaaataaactactttatgagtcactgaatgcttaggaattttgtgattaaatgaataaagtaaacttataaagtgaaagtaaccaaacagtcaattttcagcaagtaaaagaaagagagaatcccaactctaaaaaattaggcctgctaattaagcggttaaagccttctttttgttttttccatattacatgaacatgtattgccccataggtcattccataatcaaataatggaaaaagcaaggttctcagaatcttctattcatttagtttcaggaagatactcctcaggaaagactcagagttgcatgtgattctctgttgttcactgtcatgatagtcaatgctatccagctaacctgttgagcatactcagctggtagattgggaaatccccacaattctaaatttaaacatatgaacccggataatttggtgttgtgtacataaagtgattttatatatatatgaaaccgacccaatagtcccctagacagttttttttggataaacatagaaattgcccatctggttttaaaatttgaaacttaca

SEQ ID NO: 675534 - DNA, 1439 bp, Homo sapiens
ttcccagcaccagttgttgcctagattattctttcctccactgaatggatttgacatctttatcaaaaatcaattggctatatatgtaaggatttacttctggactcctcattctattggtgttatatatctattctaatgccagtgccacacttttgtttaatgtggctttctagttaagttttgaaattgggagttgtgagtcctctgtttttgctatttagagctccttagttgtccatttttgtaaatgaataatttcttaaagcctgctttttagattttattttttggagtttcatccgtgttgatacatagacttgtagcttatttgttgtgacatctttattatcatctgagtaaatttcagtgtatttgacttttctattgaagtacaattatttccatttttttttttttttttgctttaacaatcaacattcttctgcatgatacttgttcacatgttttaaagtttctttaggatggtagggtgatttttgccttgccaggaaacctttggcagtgtttcgagacattttagattatcaagacggggagaggggtgttactgccatctggtggtcagagacaagagatgctgctaaacatcctgcaatgcagactctcactgacccctccccacccctaccccccctacacacacaaaatagtgccaaggtgtgaaaaaccctgcctgccctgaagcatatagaagtggaattgataaaacttgaaatgttttcatcttaataagtggatttctgtaaatcatggaaaaaatattttctccataggtttggaatgtttggaattaaagttgctctggcaatgctgccattccagcaattacaagcaatttatatatctcaagccagatcaggtagcagcattatccagagttagccagttcattcactttaacttcatgaactaaaatactttggcactttgtctgcttaaaagattaattttagagtgagtctgtttcaaaacagtggcacttgtgcagatggggatagttggaatattaggctgaatgtacttaataagagcaaaattagaacatgaaaaagtttttcttgacacagatggttgttaaacattgaagacttaaaggtttaagaagtttttctctagtatattttaaattaaaattgtaattgaagacataggaatgaatttagactcacttgaagatgtgttacatgtcaccgtggaatactgtgctgccataaataggatgaaagcatgtcctttgcagcaacatagatgccatgatcctaggcaaattaacacaggaacagaaaaataaaattttaagtgggagctaaacattgagcacacatggatgtaaactgggaacagctgacagcatggactactggagggwggtatgggttgaaaagctacatgttgggtattgtgcttactccctg

SEQ ID NO: 675535 - DNA, 645 bp, Homo sapiens
tatctttttaggtgtatgcaacagcgttattgcaacaggctaacgaaaacagacaaaattcaactggaaaagcatgttttggcaccttcctcccagaagaaaaacttaatgactttcgtgatgaacaaattggacagttgcaggagctgatgcaagaagccacaaaacccaataggcaatttagtatttctgagtctatgaaaccaaaattttagtctatacaacaaagcttaataagacatgcaaaaatttagaacccctactttaactgtcattggtttttgaaatatatttaagctttgaaaacacctgttattaatgaaatactcttttattttggatattatgattgcagtatatggatcaagatcactagtgacaattgaaaaaaactattggaataatagcacttgtatraaattcagttttggaactaaacagcaaatttctagaattttgctgaaaatgttttaaaatgctattctcatccagccatattagtcttctggcttttctttagcttcatcaaataagcatgttgtgataatgatagatgtacaattccaacaaggttattattttttaaatacattgtcattctgaacattttatcacttctagtttaataatacatacatgattttt

SEQ ID NO: 675536 - DNA, 1337 bp, Homo sapiens
ggatcctttgcaaacataagtatatatttgaatcatcatgggttcctagcctgggccactgacaaaacagtcttcatagggcagagaacaatagagttgcatgttgtattcttgtctcaagtaccattgtagcattttgcatctactgaaataaaatatccaaaggactaagccaatactttactattaaatttcacagtgccctagacatatatttagttacggatcagaccaacttagcaaagtgtaattggttatccacaagtctggttctgatgtgaggcactggcactccacattcttgaaatacaacatagarttgcctgttgaacttttcaaagatcatgggtgattagaaaaaccgtcctctactgacatgtggagaaagtgacaatgcaggaaagcatcagctcttgattagaaaggcatgatcctccctttccttctcattttcatactttcacaccatcttcccatgtaacacagcttcaaaacggtcactcagggactggcttctagatttttctgtattgaatttgacagttgaggcttaatgataagtaacctgcctgcagcagaaataactttatcttgtgcaatatggtaagccctggtggtagaaggagtgagagagacagtattcattaaataactttatgtaaatatattgcagcatgggtaccacaataacacaccacacttacaatgctgcagcatctaacactcactccagctagtcccactttttttttaatccataagaaatgctacctaacaaactagaaagagaagataaaatgtttttaaaaatctgaatgcattcgtgtcaatttaccatcctctaaaagctgaccctgagacaaggattcaggtgcaagtgaattgggaggtgatcccaggaagcagagtgaaagaataaagaagtgagaaagaaaggaaagagggccataaagagggtgtgttaatgggtaggttatcactgtaggcaacaggacttcaatcctcctgggaatcttcagagacacaatggaagcacacctcctaggtagaagattgctgggatacttagccacctcccttctccctttggctgatggtggctcttgtacactttaaaaacgagacactttgggcctgccctgtactccaagtgaacatgagctcaggcagaaagagacactgttgcttaaggtaggaagacattgatgtatgcaataactgtgcatcaaagctgcaggcaaaccctgggctgaagtaatctgacggaaactgacagtatctactacaacacacctccttcaagcatggctgagatgcagcagccagaaatgaaaaaa

SEQ ID NO: 675537 - DNA, 653 bp, Homo sapiens
tggtattaagcagtggggctttggggatgtgattagttcacgagggctccaaaagagccttcagaaaggtgcttggcccttttttgccycaccatcccttacaccatgtgaggacacagccttggcccctccggaggacacagcaacaaggcaccaccttggaagcagagaccaggtcctcaccagacactgacctgctggcaccttgaccttggacttcccagcttccagaactatgagaaatgaatttcttttatttataagatactcagtctatgatattttgttctaacatcagggacagattaaaatgcctatcctttatttatgtcagtacatcagttctacaaacatattgtggatgatgtcgcagccataaatgtctcttctctttgtctgtctaaaaaatgtctactcatcagttaagtctcacctcagataatgccttcctctctatcatatttccaccacttctcagatagaatgacctgtttcctcctttctcatcctcttgcatttggtttaaattccatgtgtgaactttatactgttgcaaaacaaattatcaccaatttaacatcttaaagcaacacaaatttgttatctcgcagtttccatggattaggagtccttatgttcaggctggggggtct

SEQ ID NO: 675538 - DNA, 611 bp, Homo sapiens
  misc_feature 581: n = A,T,C or G
gtaatatttttgccaaatttatttcacacattattactagagaaacacaacattaatctaaactgaatccacttgtttattcttctctaaatccattttccctgctcctgtctcccctctccagaggtccccaaaattatgaagttatcagatttttcttctctagtacattcatatgtgtttaaataaactataatattgttctccatgattttgaactactataaatggtctcagtctggttagattcttcagttacttgccttgtttatgtaacttcatgtttctgagatttgatttattcctcttamatagacagatagaccacccattcattttaatccaatttatgactattaccactgtttagctctccattattgcaagacctgtgggctgtctccacctgtaaaaacaatgctgcaataaacatgcatgtatgcagcttgtgcacatgtgagcgggaattactcagggtaggataaaagcaccttcaacatttctaaatattgccaaactgcttaataaaatggttttgccagtttaaaatctcactagactgcatgcgaataggcaatttntctgggtatataatgatatcttattgttgt

SEQ ID NO: 675539 - DNA, 636 bp, Homo sapiens
ccttttaaaatgcccttaccaaaggacattcacttcctctttcaagcaccttagcaccttttgtttatatcttgctatgtagacccctttttttcttgcacatttttgtgtttgtatcccgtgtcatcctcatgctacagaagggaggtaaaccattcctgatgcagtattgtaaatgaggaaagcccagctagatgaccttttcaattaatggtggcacgggaaccaggccgccttgcacaaaccygtgctcttcccgtaacacgttctgacgtcctgtcctgaacctttctctcaatctccttgatcagaatgtgagctgggcccatctttcctgaggcagcatccatgaccccagccctgtgccacccacacagacctggttacctctgacctctcaaggaattttctcctcatattaccctcccctcaagaattcattctgatagagggtatttcagggagacatgccttgtataatttttttaggtgcagtataataaaaaaaattaaaatcctaaaaaaactaattctgagcattacaatgcataggtaagagagagtctctttccctgaaatacacctgaagttttccatctttcaactgacaataaaagactcctaaattagagaatc

SEQ ID NO: 675540 - DNA, 599 bp, Homo sapiens
caactctgaccctcacactttctaataaaaagccgttaatgatacccttatttttgccaggtaagttaagtccagcttatttattgaggcaggggtgagggggttggggtacggccacactcataagtgtgacgtctgctgtttcctgtgcctactctggtctatctcaagccctcaccttcttaatcttcacgcgcacccagctttcatgccataaagggcaagagtagtttcctgaacatccacactcagtgagacctctggatttgatcctgccatcccctctgcctggatcagcgttccttttcccatcccatccacctcaccacctccttgcttacccgacacagtctttatcatctttcaaaactcacagcaagggttatagcctctgcaacatcttctctcagccaacctgacagcatcagccattcccttccttgtacccccaggccgcmtactatgtctctattgctgtggtttgcatgtgtttcctgcaaaattcatgtgtcgaagcttaatccccactgtgctggtgtcaggaaaggggaccttttgggaagtgattaagtcatgaaagctctaccctcatgagtagg

SEQ ID NO: 675541 - DNA, 1581 bp, Homo sapiens
cttatttatacatcaaagtggctatacattaaagtaactatacatgtattatrcatgtataaatctggcgaggcgggcggatcgcttgaggtcaggagtttgagaccagcttggccaatatggtggaaccctgtttctactaaaaatacaaaaattagccataaattgcttgaacctgggaggcagaagttgcagtgagctgagaccgtgcaactgcactccagcctgggcaacagagtgagtctctgtctcaaaaacaaacaaacaaacaaacaaaacccatagaagtatttcttttttctgttcccccaactcttattattttgtggtaaaattaggccgacaatttccagtttggttttttgccttctgaatgtgaggcagtcttacatggagcttttcatgaagctccacgtcacaattttgtttttgaagtttcaactttcaaggttatattgattctctatccccgaactgctccagaaatctaggtgtgctgtcattaggtggggctagtgagctttggatgttctaaactgcaggtcccaccctcgtttgcctgagcttcctgatgaaaacatgacttttaggtaatataatttataagaaaatagaactctgttaaagtaactaaatataagctatcactgactgttaaagcagatgatattttaagctgcatttaaaatcaacagatgtcattattaatcaggaatcttttgtcagacagtcagaatttttctctgagatgctctgtatggatcctaattacaatactcttcctaattacaatactctccttcctaagtgttaggaagagcttcctaaagcttgtactccacagcacaccccatcctgggttcagtcttagccgatattgaagtgctttgaggcagttcattttctactcaaacttttagttcacatgcttaaaactaatgtagttggctgcgttctttcaaagtcttctttagaagtaattgtctgatgcattttagcatcaccccagtccaagaccctaaactgatatgatgtaaaagaagaaagagtcactactgatttattgcagagaacccaaactcttggtgttagagatcttgaaattctgtgtccttaaagaggaatgaagcctaccccttctttcttatgtgagtggattaatttgcttacatggtctctgtaggcagaacaaatacaaaggtcttgctgagttgcctaaacatattccttagaacagaactgctataaaaagcaaattttacagaaaataagctttaaaaaaaattttgtcagaggccacaatttcatcatggagtctcactggttcttacagatggggtttagtctcattttttgtattcccagccctggcattgatttgctcaaattagaagattatcttattgggcagtctcccattgataagccctgctctggaaatataccaggctacatttattgggcccatgtttttttttttttttttagtgctttggggtcagtcactcatttgatcatgcatagaaaaatcccagaattgttttctgaggaagattttgcccagaaatgatccctccacca

SEQ ID NO: 675542 - DNA, 877 bp, Homo sapiens
atgatcagtgtcaatgccccagcaaagagtggcttttctggcatgctggtccttggacacaagggtacaaagttccatgctgtatctgtagtttataatttagaacactctgtcctcaggtggaaagtgccccctctggggctaatccttgatgtttgacctttatacggtgctgtgttttacaaaaaaaaagaacacatgggtttgggtactgcagtgtggaagcaggaagatcacagatgatcctctagggggaccctgtgcttcccataaccacagctctgaggttgagagagttaatattgctctgggagcaaaactagttatatcattgtcattttgtgtacattgtttttcttcggcttcttyttttttttttttttgaggcagagtctcactctgtcgcccaggcgggagtgtggtggcacgatctcggctcactgcaagctccgcctcccaggttcacgccattctcctgcctcagcctcccgagtagctgggactacaggcacctgccaccatgcccagctaattttttgtatttttagtacagatggggtttcaccatgttagccaggatggtctcgatctcctgacctcgtgatctgcctgcctcagcctcccaaagtgctgggattacaggcatgagccactgtgcccggccgtgtatgttgttcatttcattgcccacatcatttcacttgatatgaatgcaaacatttatgcttttttctgaatcgggatattaaaatgcatttactggatcagtggccatataccatgtatctgaggctgtattaatctcttctagtggaaatatcacatctggcctaatggctgtgatcaggactactacttagttgagcttgaagttgaa

SEQ ID NO: 675543 - DNA, 877 bp, Homo sapiens
atgatcagtgtcaatgccccagcaaagagtggcttttctggcatgctggtccttggacacaagggtacaaagttccatgctgtatctgtagtttataatttagaacactctgtcctcaggtggaaagtgccccctctggggctaatccttgatgtttgacctttatacggtgctgtgttttacaaaaaaaaagaacacatgggtttgggtactgcagtgtggaagcaggaagatcacagatgatcctctagggggaccctgtgcttcccataaccacagctctgaggttgagagagttaatattgctctgggagcaaaactagttatatcattgtcattttgtgtacattgtttttcttcggcttctttttttttttttttttgaggcagagtctcactctgtcgcccaggckggagtgtggtggcacgatctcggctcactgcaagctccgcctcccaggttcacgccattctcctgcctcagcctcccgagtagctgggactacaggcacctgccaccatgcccagctaattttttgtatttttagtacagatggggtttcaccatgttagccaggatggtctcgatctcctgacctcgtgatctgcctgcctcagcctcccaaagtgctgggattacaggcatgagccactgtgcccggccgtgtatgttgttcatttcattgcccacatcatttcacttgatatgaatgcaaacatttatgcttttttctgaatcgggatattaaaatgcatttactggatcagtggccatataccatgtatctgaggctgtattaatctcttctagtggaaatatcacatctggcctaatggctgtgatcaggactactacttagttgagcttgaagttgaa

SEQ ID NO: 675544 - DNA, 877 bp, Homo sapiens
atgatcagtgtcaatgccccagcaaagagtggcttttctggcatgctggtccttggacacaagggtacaaagttccatgctgtatctgtagtttataatttagaacactctgtcctcaggtggaaagtgccccctctggggctaatccttgatgtttgacctttatacggtgctgtgttttacaaaaaaaaagaacacatgggtttgggtactgcagtgtggaagcaggaagatcacagatgatcctctagggggaccctgtgcttcccataaccacagctctgaggttgagagagttaatattgctctgggagcaaaactagttatatcattgtcattttgtgtacattgtttttcttcggcttctttttttttttttttttgaggcagagtctcactctgtcgcccaggcgggagtgtggtggcacgatctcggctcactgcaagctccgcctcccaggttcacgccattctcctgcctcagcctcccgagtagctgggactacaggcacctgccaccatgcccagctaattttttgtatttttagtacaratggggtttcaccatgttagccaggatggtctcgatctcctgacctcgtgatctgcctgcctcagcctcccaaagtgctgggattacaggcatgagccactgtgcccggccgtgtatgttgttcatttcattgcccacatcatttcacttgatatgaatgcaaacatttatgcttttttctgaatcgggatattaaaatgcatttactggatcagtggccatataccatgtatctgaggctgtattaatctcttctagtggaaatatcacatctggcctaatggctgtgatcaggactactacttagttgagcttgaagttgaa

SEQ ID NO: 675545 - DNA, 1115 bp, Homo sapiens
gaactccatttatttgtgagaatggtgtcatataaaacatcttagccaggtatgggtggctcatgcttgtaatcacaacacttctggagagcaaggtaggaagatcgcttgagggcaggagttcaagaacagccttggcaactcagcaagaccctcatctcttatgttttttattatgctttcccttggacatttctgtattatatttcgtcccctttttacaaaaccattgacatatctgtttatgtgtcatgccaaattcaaatgagagtaatagactctcttgtattgtggggcatctgcttaatttaaactttgcccaaagagtttccatgagggatttgctgactagtcttttcttgggatattttgtttttcattttcttttttgctttctttttcctgttcatcttccagctcctttaatgtttcctcttgtttttctccttctctctttctgcctgcttctcctcctcctctccatttctgctttcccttttattcatcttcactgtaatttccatttgattgttctgaattttgatcccaaggcatagccggttgtttctgtataacaggatcccaacttttcaattctgtgaagttatcactaccttccagcctttgctgacttacatccatgattgtttggctctgagtcttctctcttagagtctctgtttgatttttagaaataaaaaaaattctcagcaccgcatgttttacctcagaaaagtcttgaagtatcaggagctctctccaccttgaaaacatttcttctcccacttcctggatgccatcctttcccggatttccttcaaagtcaatggctgctctttcaaagctttctttcttgcttctctttcccctagtgctctctgtaaaccataatcttgagaatctactttattcatccctataaacctggtaaatagcaacatcacagctataaaacctaacaaattgtaagtaatatggaaataataaataactttgctgaatgaagaatgtctatacagaaacaagaccaaagatatcaaagaatttagagaaaacttaaataagtaaaacaggayagtggaagacaaagagaagacccaattcaaaaggcagga

SEQ ID NO: 675546 - DNA, 1547 bp, Homo sapiens
tgtatcacaggtatatcttttcctgtgctgtatgctttgtttcttcaaatggcaagtgagtttcttcttggaccagggcatgttacataggtccacagtgctttctctggaatggttggggctgtatgtgtttcagagttcagaatttttcagattttaggaagatagtactttgtataagaggtgtattatgtaatccccaggtggggtctaggactgcaccctgtaatcaggcacattcacacagctctccagtgaaatgtgagtattcacagtaagggggaggagttaagattataaatagccatgactcagtttaggtcagattttgccgctcattgaattttgacatcgagcttaaggaaaacccagttttcataatgttgtggatttcagcattctggataaggaattacgaatgtatactgcatttcacattctgtaaccccaggctgtttcttagacttagcrgttagccggtgggaagacctttgtgaacgtgagacatgaactgtaacttttaggttggttttttttttttttttttttttgagagagagcctcacgctgtcacccaggctggagtgcagtgttgtgataaccacttattgtggccttgaactcctggatccaagggatcctcccacctcagcctctcgagtagctgggaccacagaagcacaccaccatacctggctaattttattttttgtagagacgaggttttcactatgttgcccaagctgaaaattctagttttgatgattatattttacattatttagaacaagtttcatgtttttaaaaaagcaaagcaaaactcagagaatctccttattgagctattttgaatagatttttaagttttattttattttttgtagagatagggtcttgctgtgttgcccaggctagtctcaaactcctagcctcaagcaatccttccaccttggtctcccaaagcactgggattatacatgtaaaccaccatgtgtgctctcaaatagatttttaattgattgagaattacctcccaaaaaatagtgtaagtaaacaaattttgcaatttactaactttaaaacttttttcattaaatgacatctcaacaactttattgagaagtaaatctcttaatatgtgaatgatatttggagcatacaattaattcagtggtttttggtgtatttccacacacaatcaatttaaaacacttttatcaacccaaaaagaaacttcacacccaccaccagtcattccccatttcctctcctagcccaagacaactgcattctactttttactcctgtacattttcccattttggatgtttcatataaatggaattatacactatgtgttctgtgactgacttctttcctgtaacacagtttttccaaggtttcaccatggggtgggcagggtgtggtggctcacatgtatactaatcccagcgtgttggttgggaagccaaggtggaaggatcgcttgaggccaggagttcaagaccagcttgacaacatagcaaaaccccatctctgtaaaaaaa

SEQ ID NO: 675547 - DNA, 1547 bp, Homo sapiens
tgtatcacaggtatatcttttcctgtgctgtatgctttgtttcttcaaatggcaagtgagtttcttcttggaccagggcatgttacataggtccacagtgctttctctggaatggttggggctgtatgtgtttcagagttcagaatttttcagattttaggaagatagtactttgtataagaggtgtattatgtaatccccaggtggggtctaggactgcaccctgtaatcaggcacattcacacagctctccagtgaaatgtgagtattcacagtaagggggaggagttaagattataaatagccatgactcagtttaggtcagattttgccgctcattgaattttgacatcgagcttaaggaaaacccagttttcataatgttgtggatttcagcattctggataaggaattacgaatgtatactgcatttcacattctgtaaccccaggctgtttcttagacttagcagttagccggtgggaagacctttgtgaacgtgagacatgaactgtaacttttaggttggttttttttttttttttttttttgagagagagcctcacgctgtcacccaggctggagtgcagtgttgtgataaccacttattgtggccttgaactcctggatccaagggatcctcccacctcagcctctcgagtagctgggaccacagaagcacaccaccatacctggctaattttattttttgtagagacgaggttttcactatgttgcccaagctgaaaattctagttttgatgattatattttacattatttagaacaagtttcatgtttttaaaaaagcaaagcaaaactcagagaatctccttattgagctattttgaatagatttttaagttttattttattttttgtagagatagggtcttgctgtgttgcccaggctagtctcaaactcctagcctcaagcaatccttccaccttggtctcccaaagcactgggattatacatgtaaaccaccatgtgtgctctcaaatagatttttaattgattgagaattacctcccaaaaaatagtgtaagtaaacaaattttgcaatttactaactttaaaacttttttcattaaatgacatctcaacaactttattgagaagtaaatctcttaatatgtgaatgatatttggagcatacaattaattcagtggtttttggtgtatttccacacacaatcaatttaaaacacttttatcaacccaaaaagaaacttcacacccaccaccagtcattccccatttcctctcctagcccaagrcaactgcattctactttttactcctgtacattttcccattttggatgtttcatataaatggaattatacactatgtgttctgtgactgacttctttcctgtaacacagtttttccaaggtttcaccatggggtgggcagggtgtggtggctcacatgtatactaatcccagcgtgttggttgggaagccaaggtggaaggatcgcttgaggccaggagttcaagaccagcttgacaacatagcaaaaccccatctctgtaaaaaaa

SEQ ID NO: 675548 - DNA, 647 bp, Homo sapiens
  misc_feature 264, 265, 285: n = A,T,C or G
atgggcataaacaatcctcccacctcagcctcccagaggagttttctatttattaagaattgcattaactcttcggttcactcagaagggcctttccacacctgctttcacyccctatctgtgttaagagaaaaatgggaaaccccgtgtaacaggcacaagcttgcatctgtgtcatagagtgtatccccactggggtgatctttcagacattctcctagttattactgtaatatatgcttcttatagattttctgtttgtgnntccttttagcggggattgtntttcccatagtctccctgcccttacactgtttgatatacgcctttccttctgtggatactgttttatggagccaagctcgtgccatgtgtttgagtttatgtactcatacatatgtacgggcatacacagaagatctttgtatctcccttttctcttaattctagcacatttttttgcatatttcagtaagaattctccatgaacaaagtttaggttgcctatggttgcctaaaaggctgacctatgaacactccataatttaatcaactgaaccagacccttcctgttaacagttcaactgttaaagctgcttccagcatttcagcatcacatataacactgcaattaacctgaatttggt

SEQ ID NO: 675549 - DNA, 3680 bp, Homo sapiens
ctgactcctctcccttgcgtacccagcatcctttccatcagcagacccacctgctccacctcagagcctctcctgagctcatctttcccacctcagccattgccaccaccctgggcggttcagcatctggacagtggcagctgcctcctgatcaggaagataaaccatgtgaagcaagagggacccctgacccatcctcctggtgatcctccagccctcctccagcccaggctcttctgcccaggttcaacacacacacagcaaagtgtgtaaagagtgctaatcttcagtgagaagcttgccacgccgtgctgccccctctcaagtctacagtggcctcacctcagcctcacagcggccagtctagcaacagtggcccagccaccccgcagtctcatgctacccacctccagtgggctctcgatgctctgcctcctggctcttcctaaggactcaagcacatggctgccttgtggccgctcactctgcacttgcactcactcccactccctggaattcttttccccaggttgtctcccaacttttccttaacctcgctttggtctctgctcacatctcctcttcagaggggtgctgccattccctgaccacccctcttattgcctgtcttgcttatgccctaatcatggcctttactgtcactacttagcactgtttcaacgtttgtgtgaatctgtcccctgagcatgcattaactcccaccctctagaatgatgctctctgcagatgtgctgcggccgtgctccactcagttattcccaacacctggaaccactctggcacacaacaggtgttcctcaatgtcagttgaataaatattcaacaaactaatgaatttacttgaacgtgtaaaaccacaaaatgtagttctgaacttcgtgagcaataaggccatgcacaaagcccctgttccaagcaattaaggaatctcactgggcaatcatcgtaaacagctcccctccaggccctggaaaaagtcctatgcttagatctgacagccctggttccgcttccaggaggaagcccttttctacggcccactcagactccagggttgacctctggggatcccttggtgttatttatctttatcacctcaaggtgagggggcccagtgacaatgacctggtccagcactgcccagattttgtagccagaacatggagatgcagattgaggcaacaggtagctttagaggcagctgacattgcacttgtgggggtcaggcttattgttttcttgtcagcctcaggcctcaaacctagttggtttctagtttatttgcttctagtcagtttcctgtgctaggaacgcaattgaagaactacccagacagaatttttaaacctggaaacacttatcttgagcttattatctctgggagtgagtcatccctctccttcagtttagtggctgtcccctcaggcaatctgaagcaccaggctcaaagggaaggcagcacaacagcctgatctttgtctctgatctctggatcagagccttggcctgagacaggactggggccctggggctttcgcagaccactcccaccaagggctctggaccagaactacattttgtggatttacttgttcaagtcaattcattaattcgttgattttctgtgttagttttgccgtccatattgaccctaagtctgtatttctgtgcctcaactgaaaaatctttcctcctgtttcaaacacatagaaatgatagaaaaaatataagcatgtaacgttaacatggaatttgggtgggcgaaaccagagaataaaggcggggctatcccttaacttcatactttatgttgcttacgcatgctaaaaattaagggggccactaaaagaacagaatcaggaagaaaattccaaacaaacagaagggggaaaatgaataaaataagtgtgattaatccaatggtgtcaggagggaggaataaagaaataaggaaagagactaccaaaaataatatggtaaactaagtccaaaaatatgagtactcacaacagtgtaaatgcattaagcttgcctattagaaagcagagaccatctaactgaattaaacaaataaaattcagtgctttctatgtccctgtcatctcagcactggcttctgttggtcattttttgctgtgtgtgtcgagattgttctggctctttgtatgagagtcatattgaatcgtaaactatatgttttgaattctatcttatgtaactctacgttttatttaaattctatggagaacgttaattttttgttttagcaggcaatctacttagttaggcttgggcatcagttacaactgttctgttggctgcaggcctgggggacgttcagtctcaaagccccagcagcgccatttatctgttccgcgtctgttccactggcccagtggtttgtcttagatgtggacaccagtctgatagtgcagttgtcacaatttgggtacrctgactaggatcagatccatgcacgtgcagcatagggatgggctcagaagttcataggcaacatgatgggtcactccctgagcttctccctcgctgccatcttgccagcacttttcagttccctgaggtcctcattcctgctgtcagaaatctgtggtcttcgttgcgctgctctgctgggtaccttcatgactgtgccctcatctgagcccaagcaacaggaggggaaagaggaaaaaacaatggggtccttctcatcctcctcagaccacatcatcactgttttgagagaaagagtcctttccctcaaaactacaaccatgatgctcttttttctttctttttttttttttttttttttttggcaggagtagatgtaagggttattgacataggcaaagggcaaatgagatgtcacatttccaagaacagatggtacatggcacaatggatggagatgatgggtagagcaaagtggtaggcacacgttagtctgatacagcagacaagggtggtgagaacactaggacaccatggtgtttggtgaaaaacctggtgtgtcaacatcacaaccaaagatgcatttttaaaaatatgtaataggtatgaacatttttaacttgccactccctatgcatggaggaggcagatgcaccatgagtagattttttttaagtgttgtatatcttcaagtgcagagatttcggtgtatgagggtctcacccagggcaccccatgtgcccgtttccactgctctaaaatggaataaggtggtgtctaactctcaagattgctgtgaagattaaatgagtgaactctggcagagcacccagaacagggccaagcacatctcaggtactcaggaggcatcaccttaaacatctcaacacaggtggagaaaatcaatctatttatacgtttggatgtcctgtcatgaaactgttctgcacactattcctgaagatgctcttcttgaatacagcagagtcaatgtgaagaagatcctgaccagtgattttccctgaggcatcagacaaggcggcttgtcatgaaaattctctgactctattgttgaggggcaagaaaacgcagaaaggagcctaggattaaagaaaacagaaaacctatagagaaacaaaagcagatgataacaattttaaaaaaaaagaaagaaatacaggattttttttaagataataaactgc

SEQ ID NO: 675550 - DNA, 3680 bp, Homo sapiens
ctgactcctctcccttgcgtacccagcatcctttccatcagcagacccacctgctccacctcagagcctctcctgagctcatctttcccacctcagccattgccaccaccctgggcggttcagcatctggacagtggcagctgcctcctgatcaggaagataaaccatgtgaagcaagagggacccctgacccatcctcctggtgatcctccagccctcctccagcccaggctcttctgcccaggttcaacacacacacagcaaagtgtgtaaagagtgctaatcttcagtgagaagcttgccacgccgtgctgccccctctcaagtctacagtggcctcacctcagcctcacagcggccagtctagcaacagtggcccagccaccccgcagtctcatgctacccacctccagtgggctctcgatgctctgcctcctggctcttcctaaggactcaagcacatggctgccttgtggccgctcactctgcacttgcactcactcccactccctggaattcttttccccaggttgtctcccaacttttccttaacctcgctttggtctctgctcacatctcctcttcagaggggtgctgccattccctgaccacccctcttattgcctgtcttgcttatgccctaatcatggcctttactgtcactacttagcactgtttcaacgtttgtgtgaatctgtcccctgagcatgcattaactcccaccctctagaatgatgctctctgcagatgtgctgcggccgtgctccactcagttattcccaacacctggaaccactctggcacacaacaggtgttcctcaatgtcagttgaataaatattcaacaaactaatgaatttacttgaacgtgtaaaaccacaaaatgtagttctgaacttcgtgagcaataaggccatgcacaaagcccctgttccaagcaattaaggaatctcactgggcaatcatcgtaaacagctcccctccaggccctggaaaaagtcctatgcttagatctgacagccctggttccgcttccaggaggaagcccttttctacggcccactcagactccagggttgacctctggggatcccttggtgttatttatctttatcacctcaaggtgagggggcccagtgacaatgacctggtccagcactgcccagattttgtagccagaacatggagatgcagattgaggcaacaggtagctttagaggcagctgacattgcacttgtgggggtcaggcttattgttttcttgtcagcctcaggcctcaaacctagttggtttctagtttatttgcttctagtcagtttcctgtgctaggaacgcaattgaagaactacccagacagaatttttaaacctggaaacacttatcttgagcttattatctctgggagtgagtcatccctctccttcagtttagtggctgtcccctcaggcaatctgaagcaccaggctcaaagggaaggcagcacaacagcctgatctttgtctctgatctctggatcagagccttggcctgagacaggactggggccctggggctttcgcagaccactcccaccaagggctctggaccagaactacattttgtggatttacttgttcaagtcaattcattaattcgttgattttctgtgttagttttgccgtccatattgaccctaagtctgtatttctgtgcctcaactgaaaaatctttcctcctgtttcaaacacatagaaatgatagaaaaaatataagcatgtaacgttaacatggaatttgggtgggcgaaaccagagaataaaggcggggctatcccttaacttcatactttatgttgcttacgcatgctaaaaattaagggggccactaaaagaacagaatcaggaagaaaattccaaacaaacagaagggggaaaatgaataaaataagtgtgattaatccaatggtgtcaggagggaggaataaagaaataaggaaagagactaccaaaaataatatggtaaactaagtccaaaaatatgagtactcacaacagtgtaaatgcattaagcttgcctattagaaagcagagaccatctaactgaattaaacaaataaaattcagtgctttctatgtccctgtcatctcagcactggcttctgttggtcattttttgctgtgtgtgtcgagattgttctggctctttgtatgagagtcatattgaatcgtaaactatatgttttgaattctatcttatgtaactctacgttttatttaaattctatggagaacgttaattttttgttttagcaggcaatctacttagttaggcttgggcatcagttacaactgttctgttggctgcaggcctgggggacgttcagtctcaaagccccagcagcgccatttatctgttccgcgtctgttccactggcccagtggtttgtcttagatgtggacaccagtctgatagtgcagttgtcacaatttgggtacgctgactaggatcagatccatgcacgtgcagcatagggatgggctcagaagttcataggcaacatgatgggtcactccctgagcttctccctcgctgccatcttgccagcacttttcagttccctgaggtcctcattcctgctgtcagaaatctgtggtcttcgttgcrctgctctgctgggtaccttcatgactgtgccctcatctgagcccaagcaacaggaggggaaagaggaaaaaacaatggggtccttctcatcctcctcagaccacatcatcactgttttgagagaaagagtcctttccctcaaaactacaaccatgatgctcttttttctttctttttttttttttttttttttttggcaggagtagatgtaagggttattgacataggcaaagggcaaatgagatgtcacatttccaagaacagatggtacatggcacaatggatggagatgatgggtagagcaaagtggtaggcacacgttagtctgatacagcagacaagggtggtgagaacactaggacaccatggtgtttggtgaaaaacctggtgtgtcaacatcacaaccaaagatgcatttttaaaaatatgtaataggtatgaacatttttaacttgccactccctatgcatggaggaggcagatgcaccatgagtagattttttttaagtgttgtatatcttcaagtgcagagatttcggtgtatgagggtctcacccagggcaccccatgtgcccgtttccactgctctaaaatggaataaggtggtgtctaactctcaagattgctgtgaagattaaatgagtgaactctggcagagcacccagaacagggccaagcacatctcaggtactcaggaggcatcaccttaaacatctcaacacaggtggagaaaatcaatctatttatacgtttggatgtcctgtcatgaaactgttctgcacactattcctgaagatgctcttcttgaatacagcagagtcaatgtgaagaagatcctgaccagtgattttccctgaggcatcagacaaggcggcttgtcatgaaaattctctgactctattgttgaggggcaagaaaacgcagaaaggagcctaggattaaagaaaacagaaaacctatagagaaacaaaagcagatgataacaattttaaaaaaaaagaaagaaatacaggattttttttaagataataaactgc

SEQ ID NO: 675551 - DNA, 3680 bp, Homo sapiens
ctgactcctctcccttgcgtacccagcatcctttccatcagcagacccacctgctccacctcagagcctctcctgagctcatctttcccacctcagccattgccaccaccctgggcggttcagcatctggacagtggcagctgcctcctgatcaggaagataaaccatgtgaagcaagagggacccctgacccatcctcctggtgatcctccagccctcctccagcccaggctcttctgcccaggttcaacacacacacagcaaagtgtgtaaagagtgctaatcttcagtgagaagcttgccacgccgtgctgccccctctcaagtctacagtggcctcacctcagcctcacagcggccagtctagcaacagtggcccagccaccccgcagtctcatgctacccacctccagtgggctctcgatgctctgcctcctggctcttcctaaggactcaagcacatggctgccttgtggccgctcactctgcacttgcactcactcccactccctggaattcttttccccaggttgtctcccaacttttccttaacctcgctttggtctctgctcacatctcctcttcagaggggtgctgccattccctgaccacccctcttattgcctgtcttgcttatgccctaatcatggcctttactgtcactacttagcactgtttcaacgtttgtgtgaatctgtcccctgagcatgcattaactcccaccctctagaatgatgctctctgcagatgtgctgcggccgtgctccactcagttattcccaacacctggaaccactctggcacacaacaggtgttcctcaatgtcagttgaataaatattcaacaaactaatgaatttacttgaacgtgtaaaaccacaaaatgtagttctgaacttcgtgagcaataaggccatgcacaaagcccctgttccaagcaattaaggaatctcactgggcaatcatcgtaaacagctcccctccaggccctggaaaaagtcctatgcttagatctgacagccctggttccgcttccaggaggaagcccttttctacggcccactcagactccagggttgacctctggggatcccttggtgttatttatctttatcacctcaaggtgagggggcccagtgacaatgacctggtccagcactgcccagattttgtagccagaacatggagatgcagattgaggcaacaggtagctttagaggcagctgacattgcacttgtgggggtcaggcttattgttttcttgtcagcctcaggcctcaaacctagttggtttctagtttatttgcttctagtcagtttcctgtgctaggaacgcaattgaagaactacccagacagaatttttaaacctggaaacacttatcttgagcttattatctctgggagtgagtcatccctctccttcagtttagtggctgtcccctcaggcaatctgaagcaccaggctcaaagggaaggcagcacaacagcctgatctttgtctctgatctctggatcagagccttggcctgagacaggactggggccctggggctttcgcagaccactcccaccaagggctctggaccagaactacattttgtggatttacttgttcaagtcaattcattaattcgttgattttctgtgttagttttgccgtccatattgaccctaagtctgtatttctgtgcctcaactgaaaaatctttcctcctgtttcaaacacatagaaatgatagaaaaaatataagcatgtaacgttaacatggaatttgggtgggcgaaaccagagaataaaggcggggctatcccttaacttcatactttatgttgcttacgcatgctaaaaattaagggggccactaaaagaacagaatcaggaagaaaattccaaacaaacagaagggggaaaatgaataaaataagtgtgattaatccaatggtgtcaggagggaggaataaagaaataaggaaagagactaccaaaaataatatggtaaactaagtccaaaaatatgagtactcacaacagtgtaaatgcattaagcttgcctattagaaagcagagaccatctaactgaattaaacaaataaaattcagtgctttctatgtccctgtcatctcagcactggcttctgttggtcattttttgctgtgtgtgtcgagattgttctggctctttgtatgagagtcatattgaatcgtaaactatatgttttgaattctatcttatgtaactctacgttttatttaaattctatggagaacgttaattttttgttttagcaggcaatctacttagttaggcttgggcatcagttacaactgttctgttggctgcaggcctgggggacgttcagtctcaaagccccagcagcgccatttatctgttccgcgtctgttccactggcccagtggtttgtcttagatgtggacaccagtctgatagtgcagttgtcacaatttgggtacgctgactaggatcagatccatgcacgtgcagcatagggatgggctcagaagttcataggcaacatgatgggtcactccctgagcttctccctcgctgccatcttgccagcacttttcagttccctgaggtcctcattcctgctgtcagaaatctgtggtcttcgttgcgctgctctgctgggtaccttcatgactgtgccctcatctgagcccaagcaacaggaggggaaagaggaaaaaacaatggggtccttctcatcctcctcagaccacatcrtcactgttttgagagaaagagtcctttccctcaaaactacaaccatgatgctcttttttctttctttttttttttttttttttttttggcaggagtagatgtaagggttattgacataggcaaagggcaaatgagatgtcacatttccaagaacagatggtacatggcacaatggatggagatgatgggtagagcaaagtggtaggcacacgttagtctgatacagcagacaagggtggtgagaacactaggacaccatggtgtttggtgaaaaacctggtgtgtcaacatcacaaccaaagatgcatttttaaaaatatgtaataggtatgaacatttttaacttgccactccctatgcatggaggaggcagatgcaccatgagtagattttttttaagtgttgtatatcttcaagtgcagagatttcggtgtatgagggtctcacccagggcaccccatgtgcccgtttccactgctctaaaatggaataaggtggtgtctaactctcaagattgctgtgaagattaaatgagtgaactctggcagagcacccagaacagggccaagcacatctcaggtactcaggaggcatcaccttaaacatctcaacacaggtggagaaaatcaatctatttatacgtttggatgtcctgtcatgaaactgttctgcacactattcctgaagatgctcttcttgaatacagcagagtcaatgtgaagaagatcctgaccagtgattttccctgaggcatcagacaaggcggcttgtcatgaaaattctctgactctattgttgaggggcaagaaaacgcagaaaggagcctaggattaaagaaaacagaaaacctatagagaaacaaaagcagatgataacaattttaaaaaaaaagaaagaaatacaggattttttttaagataataaactgc

SEQ ID NO: 675552 - DNA, 3680 bp, Homo sapiens
ctgactcctctcccttgcgtacccagcatcctttccatcagcagacccacctgctccacctcagagcctctcctgagctcatctttcccacctcagccattgccaccaccctgggcggttcagcatctggacagtggcagctgcctcctgatcaggaagataaaccatgtgaagcaagagggacccctgacccatcctcctggtgatcctccagccctcctccagcccaggctcttctgcccaggttcaacacacacacagcaaagtgtgtaaagagtgctaatcttcagtgagaagcttgccacgccgtgctgccccctctcaagtctacagtggcctcacctcagcctcacagcggccagtctagcaacagtggcccagccaccccgcagtctcatgctacccacctccagtgggctctcgatgctctgcctcctggctcttcctaaggactcaagcacatggctgccttgtggccgctcactctgcacttgcactcactcccactccctggaattcttttccccaggttgtctcccaacttttccttaacctcgctttggtctctgctcacatctcctcttcagaggggtgctgccattccctgaccacccctcttattgcctgtcttgcttatgccctaatcatggcctttactgtcactacttagcactgtttcaacgtttgtgtgaatctgtcccctgagcatgcattaactcccaccctctagaatgatgctctctgcagatgtgctgcggccgtgctccactcagttattcccaacacctggaaccactctggcacacaacaggtgttcctcaatgtcagttgaataaatattcaacaaactaatgaatttacttgaacgtgtaaaaccacaaaatgtagttctgaacttcgtgagcaataaggccatgcacaaagcccctgttccaagcaattaaggaatctcactgggcaatcatcgtaaacagctcccctccaggccctggaaaaagtcctatgcttagatctgacagccctggttccgcttccaggaggaagcccttttctacggcccactcagactccagggttgacctctggggatcccttggtgttatttatctttatcacctcaaggtgagggggcccagtgacaatgacctggtccagcactgcccagattttgtagccagaacatggagatgcagattgaggcaacaggtagctttagaggcagctgacattgcacttgtgggggtcaggcttattgttttcttgtcagcctcaggcctcaaacctagttggtttctagtttatttgcttctagtcagtttcctgtgctaggaacgcaattgaagaactacccagacagaatttttaaacctggaaacacttatcttgagcttattatctctgggagtgagtcatccctctccttcagtttagtggctgtcccctcaggcaatctgaagcaccaggctcaaagggaaggcagcacaacagcctgatctttgtctctgatctctggatcagagccttggcctgagacaggactggggccctggggctttcgcagaccactcccaccaagggctctggaccagaactacattttgtggatttacttgttcaagtcaattcattaattcgttgattttctgtgttagttttgccgtccatattgaccctaagtctgtatttctgtgcctcaactgaaaaatctttcctcctgtttcaaacacatagaaatgatagaaaaaatataagcatgtaacgttaacatggaatttgggtgggcgaaaccagagaataaaggcggggctatcccttaacttcatactttatgttgcttacgcatgctaaaaattaagggggccactaaaagaacagaatcaggaagaaaattccaaacaaacagaagggggaaaatgaataaaataagtgtgattaatccaatggtgtcaggagggaggaataaagaaataaggaaagagactaccaaaaataatatggtaaactaagtccaaaaatatgagtactcacaacagtgtaaatgcattaagcttgcctattagaaagcagagaccatctaactgaattaaacaaataaaattcagtgctttctatgtccctgtcatctcagcactggcttctgttggtcattttttgctgtgtgtgtcgagattgttctggctctttgtatgagagtcatattgaatcgtaaactatatgttttgaattctatcttatgtaactctacgttttatttaaattctatggagaacgttaattttttgttttagcaggcaatctacttagttaggcttgggcatcagttacaactgttctgttggctgcaggcctgggggacgttcagtctcaaagccccagcagcgccatttatctgttccgcgtctgttccactggcccagtggtttgtcttagatgtggacaccagtctgatagtgcagttgtcacaatttgggtacgctgactaggatcagatccatgcacgtgcagcatagggatgggctcagaagttcataggcaacatgatgggtcactccctgagcttctccctcgctgccatcttgccagcacttttcagttccctgaggtcctcattcctgctgtcagaaatctgtggtcttcgttgcgctgctctgctgggtaccttcatgactgtgccctcatctgagcccaagcaacaggaggggaaagaggaaaaaacaatggggtccttctcatcctcctcagaccacatcatcactgttttgagagaaagagtcctttccctcaaaactacaaccatgatgctcttttttctttctttttttttttttttttttttttggcaggagtagatgtaagggttattgacataggcaaagggcaaatgagatgtcacatttccaaraacagatggtacatggcacaatggatggagatgatgggtagagcaaagtggtaggcacacgttagtctgatacagcagacaagggtggtgagaacactaggacaccatggtgtttggtgaaaaacctggtgtgtcaacatcacaaccaaagatgcatttttaaaaatatgtaataggtatgaacatttttaacttgccactccctatgcatggaggaggcagatgcaccatgagtagattttttttaagtgttgtatatcttcaagtgcagagatttcggtgtatgagggtctcacccagggcaccccatgtgcccgtttccactgctctaaaatggaataaggtggtgtctaactctcaagattgctgtgaagattaaatgagtgaactctggcagagcacccagaacagggccaagcacatctcaggtactcaggaggcatcaccttaaacatctcaacacaggtggagaaaatcaatctatttatacgtttggatgtcctgtcatgaaactgttctgcacactattcctgaagatgctcttcttgaatacagcagagtcaatgtgaagaagatcctgaccagtgattttccctgaggcatcagacaaggcggcttgtcatgaaaattctctgactctattgttgaggggcaagaaaacgcagaaaggagcctaggattaaagaaaacagaaaacctatagagaaacaaaagcagatgataacaattttaaaaaaaaagaaagaaatacaggattttttttaagataataaactgc

SEQ ID NO: 675553 - DNA, 1284 bp, Homo sapiens
tgtctggttttcatctctatagagacagagaaaagccagctagcatcctcctcaaaataaaccatcctgttcttgaagaaagttattaaatcagtccttggcctataattttcaaggtgaaggtagttcaacttctttcacctttcctcctaggtcttatccttcatcatctgaatggtttctgtcatttctctctggatcttttccaacttctctgccactctctagaaattcagaaaccacaacttgactcaacattaataagcggctgaccaaagttaaatatagaaaaaattataggttctcagctttgtgtgtcgtgctctgtcagtacatgtcatggtaggagaatgccattaatctagacattactaaagcatcatttgtgatatcctaaaacaaggttgaataaggatttaccactttaaaaataatcttctccataaatacaataaacagaagcacaggaagatatttaaaatgcttacaacaatatactatttcaggaatttgtaagtgaaaaataaccaatatcacacattataagctgttttcaacttttcactagaccagtttgcctaaggaattcttttaacgattggtttagtaaatcagattgtatttctgtgggtatttgaaaatgatactgcattttgacactgaaatcattttgttcattagagcttttattaattcaattgccttccaagtttctcaaatttagtatttttctgtattttaaaaataataatgacatatttttaaaatcgctgttttttttaattttaacttttttagagacagaaacagtcttgctctgtcattcaggctgaaatgtagagatataatcatagatcactgcagcctcaaactcctgggctcaagtgatcctcctgccccagtctgttgggtagctaggactacaggtgcatgccaccacatgcagctaatttttaaattttttgtagacatgggtctcactatgttgcctgggctgctcttgaactactggcctcaagtgatcctcccacttcagcctcccaaagtgctgggattgcaggcatgagccaccacacccagccaataactgtattttctttttttttwttttattattattatactttaagttttagggtacatgctgcaatgtgcaggttagttacatatgtatacatgtgccatgctggtgcgctcacactaactcgtcatctagcattaggtatatcttccaatgctatccctccccgctgcccccaccccacaacagtccccagagtgtga

SEQ ID NO: 675554 - DNA, 661 bp, Homo sapiens
tggacttaactaaggagtacacaaggcctgggctcagtggacatttctgccccatctctaagatttaaccaggttacctgttttgtatactaataattttaaaagttgagttgttaatattttaaaagtacattgacatatgcatgtacatttagaaacatacagtttggagatacttttgttttatataaatgtcacatattttcagcagcttgtttataattttataatattcatatgtgattgctttatttttgaatagcatccctccttgcactaggctctcagtgagcagaatctgtgtttgactcactgttgtatgcagagtccctagaacatagcaggtaatcaaatatttgatgaatgaataaactagagatggcctgatgataaaataaatttatactgactaagcacttcatacactgtccagtatttagtcagcattgaaaacatatttattctttgtactgttatttattcagcatacaccttctctacaataaatccctcctgtgccagttttacacctaatctatctacgaagctcatctgcagcrtctgtttttggggagccttccctgaatgccccttttggactgggggtcccactcaggtactctcatagcatgttgtgtttctctctatcacaagatttgcc

SEQ ID NO: 675555 - DNA, 598 bp, Homo sapiens
attccgcctcccctcaaaaaactcaaaagtaagttatacaggtataaagaaatctaggtcctgaagttggcagttctttcttgatttttaaccatagctgcttttttttcttgaaacttctccatagtgcaaatgacagtttccatgwcttaagtctgcccacaaagtggtttccttattaaatctatcaaaaaatgattgacagcaacaagtttaggtttgatttcttgaaatggaccaaatttgcaagtttttcactggcatccctttccagacactaataaacgaacatactatttaagtctgcctcaaagagtggaatgccatctacaagtatgtgtttatcagtgtgggaagggaccttgcttattctgacagtttggaaacttcactagaatgctaccataacacctgctcatatctcgcattttcccaatcaccctgtggctttctgtctaaagcatactacactttcttctttcagactttgaaagttcaattcagaatcatttcactggctctgtgaataagtttaatagagctgtattcagcctcttgttatcttccctattaattatgttcctcagaacacaacagg

SEQ ID NO: 675556 - DNA, 811 bp, Homo sapiens
ggttgggtaggaggctgggggttcttttctaagccagtagttttttaatttgagcgagcaacaaaatcacctaaagagcttgtgaaaacagattgcagggctccacccagtttttgggtcagtaggtcttgagtgtggcctaagagcatgcatttctatcaagttgctaagtgatactgatgctgagtgtccagggactacacttggagaacgactgtttgaagcaatgttgattgctaattgtgaagttctaggattcttccttagggacattcaggccttgattaaaaagcagttttactttcatgaatctatattcttgtaaaacacactcattccacccaaaagccttttttataagatgaacatgggcctactgataaatggaattaattattgttgtcctagatcattcttatttgtttcagttttgtttcttctgttttccaaaactgaattttatttgacatgtcagagaaaaatttcwtggtacatccagtcatttgcagcaggattaaaagactgaaatgccactgcagttgacgaaaaaccctttgtcagactgaaatacaatagaccaattgaaggctgtaatacttgggctcagattttagaaatgaaaccttgtcaagggtggagtcttatctactttaagtggattaaaaaatccactcctcctattttgatgctggaaaaagaaaaagaggttataactgcaaactgcatacaaacccggtaatcacacattctttttcttatcaagtctcaaagaaggaacattatatcaaagagaaacaatccctcttcagaa

SEQ ID NO: 675557 - DNA, 613 bp, Homo sapiens
taattaaactaaagaacttctgcacagcaaaagaaactaccatcagagtgaacaggcaacctacagaatgggagaaaatttttgcaatctactcattcgacaaagggctaatatccagaatctacaatgaactcaaacaaatttacaagaaaaaaacaaacaaccccatcaaaaagtgggcaaaggatatgaacagacacttcgcaaaagaagacatttatgcagccaaaagacacatgaaaaaatgctcatcmtcactggccatcagagaaatgcaaatcaaaaccacaatgagataccatctcatgccagttagaatggcgatcattaagatgtcaggaaacaacaggtgctggagaggatgtggagaaataggaacacttttatactgttggtgggactgtaaactagttcagccattgtggaagagagtgtggtgattcctcaaggatctagaactagaaataccatttgacccagccatcccattaatgggtatatacccaaaggattatgaaggcacctttttgaacaacctgagcattcaactgagaacctaggaagcccatgcctcaggggttaggaccacagcctaagagtaaagaccacatgc

SEQ ID NO: 675558 - DNA, 864 bp, Homo sapiens
ccactatttaagatctctaatatcacaaatgtcttttaaattgacctatatctaaccctgcctgtcatctcaactcagcctgttctattaacatcacattttttttctaaatccattgcatggaatttagaaatggaatagtgttcaaataatatgatgaaaagggaaaacaaagagccttctaaattgggtttcccaagtgttttttttttttctcattgtgctgtctttctcacatttgtagacccagtaacacaatgacatgatcatagttcattggtcataaagactaactcatactaaccaaatttaagtaaactgatttttatttcatcagttcacaataagggattttcatttccagccattaagatatccttcttctacccaagtaaattcctacccagttatagagtctggggttgttgaattggctattaggatgttcattgataggcacagaatcagagaaagagaaacagaaagtttgagataggttttactcgtccatggtgaggctcttcacatcttccctgctgcacaactggttccacttctctagtgagtaagaaatgtgtttgtaagatttcatgtctgttttctttagcaagtgttgaagaactactgccaaactcattctctgcttttcatttttctatgactcataaagattgtttccacttttyttaacacatttcttctttatgaagatttttgtcacccagatttggaagtcacatggtgtaacttccacagtactcagtgagtagaggcagtcacaaagccctacccatgttcactagaaggggacatagatgccaccacaaaatcacaggagactcaagatcacattgtaagatcaca

SEQ ID NO: 675559 - DNA, 880 bp, Homo sapiens
aacaaggcacacgtctgcctttcatcagcatatgctgattaaaaaacgctgtgtgaaataataaaaaaagtttaaatacagaacgaagttcaaagcattttgtaaatctctgagaacagtatgattagaaaatttattttcttgtatttatgatcagttctatttattccacaggtgctacaattgaactcattttacaaaactgtggttaacaaggtcctgattctgcttgagctccagcttttctgtgttcatattgattaactttaggccaaatatgtaattacctttccctgataactaataatttcacttgtcacagagcagaactaaataatttcaattatattaactgaaaattctctgtagttctaagccattttgcagcaaataaatttgactgagctactgcaatttctttccaatatttttaattgcaaaaccagctagaaatcagatgtcctcaatcaagaagcacttgagtgtctccgtgtgcaaaacatttatacgtgttccctgcccttttatttcaratgatttgatcctgcatcttcaacgtctgtagtttaactcaataatcaataactaaatcacacattatattcctttgaaattgagttgcaaacacttattgtattgaaatgcacacaaacatattttccaatgcagtcttctttgactgcacagaaataatgaaactgattactgaaacttacagtatttagaatctgaaaaactatctattaattatgaggatgaagacaatactttttaaaagaaatgctgaagtggctttgaaatcaaaaagaaaacattggtatatgtgtgcttctctgcatctttgatttttcatagtaaaaagcaagttgatctgccagaa

SEQ ID NO: 675560 - DNA, 1043 bp, Homo sapiens
attgcagaattgttaaaagaatttatttttaaagtcctcactccaaacaaatgatgttggaagggaataaatatgctaattatcttgattgaatctttctacaatgtatacataaatcaaaacaacacattgtaacccataaatatgcacaattattatttgtcaatyaaaaataaattaataaaaaataagaaagaaaaactgccaggcattttgttcttgctgagttcaaggagtgcttttcaatctctctcttactaacctccctgcagcacaggatcccatcctaatactctttttctcttggctttcagtactccactttctgccagtcttctttcatctcttctcaagctcattgcaaccccttgcctcttttaatcccttaaatatcagtgttccttaggatcttattcatgttctttttactttctcttactaccttttgttgaattatcaccaatgctaatggcaaccaaattcatatttcaagctagacctcttgagctccagagctatacttccagttgaccactggccatgcccctctccatgaaccacaatttcctaaatatgttttttaaaaaagtgctcattatgtttcctcaaacacttatttttaaataacccaattttttaaatgggcaaagaatcagaatagatagttcccaaaagaagacatacaaatggccaacaagtgtatgaaaaaaattttcaatatcactaatcattacaaaaatacaaattaaaactgtagtgagagatcgcctcacccctgttagaatggctattttcaaaaaaagatgaaagataacaagtgttggtgaagatgcgtagaaaagggaactcttgtgtgtagtcagtcaatgggaaggaaaattagtacagccaatatggaaaacagtatggaagtttctcaaaaaattaaaaatacaactacgatatgggccagcaatctctttatcttttggataaatcctggatatttacccaaaagaaatgaaatcagtatattaaagagatgtctatacccccacattcat

SEQ ID NO: 675561 - DNA, 1043 bp, Homo sapiens
attgcagaattgttaaaagaatttatttttaaagtcctcactccaaacaaatgatgttggaagggaataaatatgctaattatcttgattgaatctttctacaatgtatacataaatcaaaacaacacattgtaacccataaatatgcacaattattatttgtcaattaaaaataaattaataaaaaatragaaagaaaaactgccaggcattttgttcttgctgagttcaaggagtgcttttcaatctctctcttactaacctccctgcagcacaggatcccatcctaatactctttttctcttggctttcagtactccactttctgccagtcttctttcatctcttctcaagctcattgcaaccccttgcctcttttaatcccttaaatatcagtgttccttaggatcttattcatgttctttttactttctcttactaccttttgttgaattatcaccaatgctaatggcaaccaaattcatatttcaagctagacctcttgagctccagagctatacttccagttgaccactggccatgcccctctccatgaaccacaatttcctaaatatgttttttaaaaaagtgctcattatgtttcctcaaacacttatttttaaataacccaattttttaaatgggcaaagaatcagaatagatagttcccaaaagaagacatacaaatggccaacaagtgtatgaaaaaaattttcaatatcactaatcattacaaaaatacaaattaaaactgtagtgagagatcgcctcacccctgttagaatggctattttcaaaaaaagatgaaagataacaagtgttggtgaagatgcgtagaaaagggaactcttgtgtgtagtcagtcaatgggaaggaaaattagtacagccaatatggaaaacagtatggaagtttctcaaaaaattaaaaatacaactacgatatgggccagcaatctctttatcttttggataaatcctggatatttacccaaaagaaatgaaatcagtatattaaagagatgtctatacccccacattcat

SEQ ID NO: 675562 - DNA, 660 bp, Homo sapiens
tttctattataaaatgattttaaaagaattatatgtcttagctcctcactgaggtatacatcttttatttggtttaactcttgtttgtttgtttgtttttgagacagtgtctcactttgtcccccagactggagtgtagtggcatgatcgtggctcactgcagccttgacctcccaggctcaggtgattctctcacctcagcctcccaagtatgccaccatrcccagctaatttttaaaattttttgtaaagagggggtctcgttatgttgcccaagctgatctctcactcctggcctcaagtgatcttcttgcctcggcctcccaaagaactaggattataggcgtgagccattgtactaagccttaattcatttttttccaaagatgaaacacaactttaaacttgctggggaattcaaaggaagcattctttttacagtttttttttttttttttttttttttttttgttttttttgttttttagacagagtcttgctctgtctccaggctggagtgcggtggcacgatctcggctcactgcaacctcggtctcctgggttcaagcgattcccctgcctcaggctccctggtagctcggactacaagcgcctgccgccacaccgggttaattttttgtagttttagtagagaagggg

SEQ ID NO: 675563 - DNA, 1476 bp, Homo sapiens
tcttgtggtcccctcacccaggaactgattcagctcaagaacacaatttcgactccctgtaatttcatcttggacaaatcagcagccctggctcactggcttccccctacccaccaaattacccttaaaaaccctgctccctgaatgctcagggagactgatttaaataataataaaactctagtctcccacacggccagctctgcgtgagttactctttatctattgcaattcccctgtcttgatgaatcagctctgtttaggcagcaggcaaggtccttggccagttacaaatttaggggctcatccaggattgtctttgtagctacctgcctgtggttcagtgcccccttttaacgatggatccagaggccagcccaagtggctgactagttttcttggactgagggctgactctggtactctctctactggtggggtgctgcttacccaaagctcatggatttaattgcaatggagaaataatcatgaggagatatcccttaattgtagccctatcacagggtgtctatctgtagcccccatggttgggtgtctatctgtagccccacggtagcccagtgggatgtctggatttgtgagtatcctaggggctgctaacacctcctttcttttcccagctggttatgtacccctatggtgtggtgtctgtaatcttattgcagagtgtctgtttgtagctccaacatggggtgcctgtgtctgtagccccactgcagtgtgtctgttcagctcctgtgggttttggttggcgttttccaactaataggaagagtcttggtttgggagacttctcaatcaggaggatttcaaggaggtttctcagatgacaaataggaggatagtttggaagggatactcttggagttyttggttagggatctgattcggaaggccttctgtctgcctcgtcttcaggtgtgtttgtatatttggaaaggatctcagaaggggttgctgatggaagtccagcaggcctaactcagaaaaccctccttatttgtctgatcacattcagtgacccttaaagaaggttcaacaggcctgactctcagggtgatactctcctcttcaccttgctcagagacctcattatgaattactgttcgaaggttgtccctcccaagatggagtggaccaaagactacagggaacaatgggaaagtttcagctttgctgggttgatactgggtactgaacaatgtaactaatgtttcttttgttatgtgtattttcctgggatggaaaatgtttattcagttccccatgcagcctgttgggcagaatcttgcaaactaatcatcttgtgtgtggttccctaaaacaggaaaaggtgattttctcttgtaaagtgacttgagtcccacagctttggcccagtaggcagggtcttcagaaacctctccattcttctggaagctgcagagaaagggagcccaaaaacctggtatgctg

SEQ ID NO: 675564 - DNA, 1760 bp, Homo sapiens
tttttctagatatggactttcctaagttttagtttgcctgaaatttgactttcacttttaaactggactagttcttatcaatattcatgattcaaaagtgtccgtctcccttgagcaaagaaagttcatgttgatcatatgactttgcacagaagcaatctcatgcgtgtgttgaatgtgtgtgtgacagatatttttgagtattgcttgaaacagttcttttcacttatcaatatggagttttattcttaaaatattttattatcttaattcatttctacctatggcaaggaataatgttgactaataaataactacagtttttccaactatcgctcctcatataagtgtacggttttagaattcagtgtaccagcacaataaaattttaaaaatatattttatagttattttgaaagaactagtgacttgttaaaaatgtcatttttaaattttaaatatagcattatatgcaagaggacttgagctgaggaaaaaaaatacatgcttctcttctgaaaaaagtggtacttctataaggtatttctgtggataactaatatgttcaagttatttaagaaaaacttcattaaaaaagttacaagatactgaaagcaaatacgaactcgtatttgacagcaaaacgtgtaagatccttgatgttgccgtccgattacctaggtatgaattgtagcctcgctactcattagctgtgtcttctttggcaccttccatcacctctatgttactcaatttcttctgcaaaatgagaacaataattgtacycatctcattgggcttttgtaggattaaatcagtatagtctctagcacatattaagcacacacacaagttgtatcttattaataaaggtaagttttattttttcctgtggataaaagatttcacatttctaccagacactctaaggctccttttgctaaagagagaatagccattttacagataatatttgtagcatgctgatgttggtgttcctaaaatgcatgaaccctgtgattagcctatgagactcctgtaggtctagaacagggctggtcagccctgcatcctcctcaaccttcgtgcaatgctctgctcataacgtgcctgcatttaatgtctattcaaggaaggatgtgctccacacctagtccccttcccctagaatcagaaaatatctaataaatgtgacatctactgacataaaatatgattttttaaaaagtctatcattgaaattaaaaaatggggcttccctttacatagtgctcgttgtgaacaaattatctgattttgtatggtcctaattgtgggtgtgtacataaaagaaacaaattgaaggttaccttaatactaccttattatagacacaaattaatggcaaaatggaaagcaatattttagatataaattttggtttttaaatgtttaattgtttgttccttctttttttaaactggtaaatatggggcactaaaaatgacttctgcctttcttcatagattaatctgcacagtaataaaaattttagcattttgaaattttaaggagaaaatatttaataagaattttaatgtattttggccatgatggctttattatcaaaattcaccatttttcaagtttgatactcattttggaagagattttgacttgcgtaattgcaatgaagcaatgactatattgctgtttgaactttcccagacataaatggagagtcccttttcttcatgagaaaattgggtctttaaatggga

SEQ ID NO: 675565 - DNA, 776 bp, Homo sapiens
aaacaggctgcatccaaattggaagtgaagaagtagaactatctctgttcacaaatgacatattatatatagaaaaccggccaggcatgggggctcacgcctgtaatcccagcattttgggaggcccaggtgggcggatcacttgaggtcagaattttgagaccagcctgaccaacatggtgaaaccctgtctctactaaaaatacaaaaattagccgggcatggtggcgggcacctgtaatcccagctacctgggaggctgaggcaggagaattgctggaacccgggaggyggaggctgcagtgagccaagattgcgccactgcactccagcttgggtgacagagcgagacgccatcttaaaaaaaaaaaaagaagaagaaaagaaataaaaagaacttgtgtatcaaaggatgctatcaagagtaaatggcatatttgcacataatttacaaaataaaattttttaaatatgaaaagacaacctgcaggatgggagaacatttgcaagtcatctgatattggattaatactcagaatatataaagtactacaactcaacaacagaaacagacaacctgccaggtgcggtggctcacgcctgtaatcccagcactttgggaggctgagcgggatggatcacgaggttaggagtttgagaccacgctggctaacatggtgaaccccgtctctactaaaaatacaaaaaattagccgggcgtggtggtgggcgcctgtagtcccagctactcgggaggcggaggcaggagaatggcg

SEQ ID NO: 675566 - DNA, 776 bp, Homo sapiens
aaacaggctgcatccaaattggaagtgaagaagtagaactatctctgttcacaaatgacatattatatatagaaaaccggccaggcatgggggctcacgcctgtaatcccagcattttgggaggcccaggtgggcggatcacttgaggtcagaattttgagaccagcctgaccaacatggtgaaaccctgtctctactaaaaatacaaaaattagccgggcatggtggcgggcacctgtaatcccagctacctgggaggctgaggcaggagaattgctggaacccgggaggcggaggctgcagtgagccaagattgcgccactgcactccagcttgggtgacagagcgagacgccatcttaaaaaaaaaaaaagaagaagaaaagaaataaaaagaacttgtgtatcaaaggatgctatcaagagtaaatggcatatttgcacataatttacaaaataaaattttttaaatatgaaaagacaacctgcaggatgggagaacatttgcaagtcatctgatattggattaatactcagaatatataaagtactacaactcaacaacagaaacagacaacctgccaggtgcggtggctcacgcctgtaatcccagcactttgggaggctgagcgggatggatcacgaggttaggagtttgagaccacgctggctaacatggtgaaccccgtctctactaaaaatacaaaaaattagccgggcgtggtggtgggsgcctgtagtcccagctactcgggaggcggaggcaggagaatggcg

SEQ ID NO: 675567 - DNA, 627 bp, Homo sapiens
ttttacacatttggtgttcatctaacagctctacctaacccagaccttgccagactttttctgtaaaaggtcagatagtaaatatttcagccttgctgtccctgttgcagctctgccattgtagcaatgaaagcagtcatagacaatatgtaaatgaatgataatagctgttccaataaaactttatgaacactgcagtttgaatttcacataatttacaaattatcaattatattgtttcgattattagaaaaacaggtagtggattggccatggtttgctgattcctggcctgacaaacccaagttcacaaagattttcctctttgattttgttgtggtcgttgttccacaccttcttttttcactgtttccttarggtagagtgtacatatttataagggtacatgtaatattttgatagattgatacagtgtgtaatgatcaaatcaggttaattagggtatccatcatctcagatgtttatccttttttttgtattgggaagataacaaatgttctagctattttaaaatatacactaagttattgttgactctagtcaccctactgtgcaaataaaaactgaaacgtattccttctatcttgctgagtttttatgcccatg

SEQ ID NO: 675568 - DNA, 627 bp, Homo sapiens
ttttacacatttggtgttcatctaacagctctacctaacccagaccttgccagactttttctgtaaaaggtcagatagtaaatatttcagccttgctgtccctgttgcagctctgccattgtagcaatgaaagcagtcatagacaatatgtaaatgaatgataatagctgttccaataaaactttatgaacactgcagtttgaatttcacataatttacaaattatcaattatattgtttcgattattagaaaaacaggtagtggattggccatggtttgctgattcctggcctgacaaacccaagttcacaaagattttcctctttgattttgttgtggtcgttgttccacaccttcttttttcactgtttccttaaggtaragtgtacatatttataagggtacatgtaatattttgatagattgatacagtgtgtaatgatcaaatcaggttaattagggtatccatcatctcagatgtttatccttttttttgtattgggaagataacaaatgttctagctattttaaaatatacactaagttattgttgactctagtcaccctactgtgcaaataaaaactgaaacgtattccttctatcttgctgagtttttatgcccatg

SEQ ID NO: 675569 - DNA, 450 bp, Homo sapiens
ggataaatgtakgtatattaggtccattcaggtcctacaggatagaagtgctatcagacgtgaggccctacatttctgaggttaacatcttaacagataacaatgtttcacctgaaaacatcacttggtgccaatttagacagaacaattggttggacagaccccggacagacagactcaaggaggctggttggtatagacttccttccattcttttacctcagtatgtatgtgtgtgtaatatatacatacatattatactagaacatatatacattccttatctttatacacttagaatgctccttatatagctctgcaccctgaatttttcatttatcatttactcaacatcctaagacattaaaaattctttttttttttttagacagagacttgctctgtcaccaggctggagtgcagtggcaccatctcagctcactgcaacct

SEQ ID NO: 675570 - DNA, 450 bp, Homo sapiens
ggataaatgtatgtatattaggtccattcaggtcctacaggatagaagtgctatcagacgtgaggccctamatttctgaggttaacatcttaacagataacaatgtttcacctgaaaacatcacttggtgccaatttagacagaacaattggttggacagaccccggacagacagactcaaggaggctggttggtatagacttccttccattcttttacctcagtatgtatgtgtgtgtaatatatacatacatattatactagaacatatatacattccttatctttatacacttagaatgctccttatatagctctgcaccctgaatttttcatttatcatttactcaacatcctaagacattaaaaattctttttttttttttagacagagacttgctctgtcaccaggctggagtgcagtggcaccatctcagctcactgcaacct

SEQ ID NO: 675571 - DNA, 698 bp, Homo sapiens
gagggaaacagaggtagatcagagtctgaaggaaggtgatttgatgtgagaccactagccaagaaatgagaatggactctaaaacctagaaaagactttatgaaacattcttcccattgcctccagaaggaacagattcctgacaacactttgattttagctcaccaagaccgagtttgaacrtccaaatttcagaacggtaagaaaatacatttttcttgtgtaagccactaagttgcggcaatgtgtttccgtggcgatagaaaacaaatacaagccatttgatggatcttctgagttgacagacgtctacttgaagatgaacaatccattcctgtgtaaggcagacactctagtttcttatggttatataagtgagccaaagatggcctctatgtattggctactgggttgtttacttctttgcagaaggctgagacccctgagctcaaaattccacttgcttcaaagtcaaatatttttgcatatccaattatttaaaatataacccaaacaagccaactgtagcctgcttgttttgcatactccgggaaacctcaccaggtaattgttacccattgataagatagggccttgtaattacaaattcagaagaagcagctgctacctttgggagctttctgacgcggccttgctgtttagcaatatcacctgggcactcaaaccactggatggtc

SEQ ID NO: 675572 - DNA, 598 bp, Homo sapiens
taagtgctgaatactgttttatgtgaaacagctgctaaaactatgttgagctgatgaaagagatggagttggtggaggtctatgtttaggataagaagggacatggtatttcatctccctctgtagcatatcaatagataatatcaaaggccataaagcaaatcatggccagtctgttctcctgcaacatgtgtctctggaataagaattgctttgtatgtgtttttcactcatatatgcagagattctgttggtccatgggagagtttttttcagtagttatttggaatttatcaaaggtaaactttcttaaaatttaagaggaaagcgttagcaatatgcaaagatcttaagaaaraaaaagatgaaaacttttattgaagtgccttccttcaggaaaaattgtgacattttagtgcctttaataattactacaatttccattaactgaaggtgtagggggaagctgaggagatgttgatgaagaacgtacaaggtcatttctctctgtattaggaaaagattgatgatgaagtctaccccttgagaaagatttttaattttgatgaaactggtctctattagaagcagatgcccc

SEQ ID NO: 675573 - DNA, 1318 bp, Homo sapiens
tgcctcttgccatctgcatgaccttaacagtcaacttcacatcccagagcctcccatgtcatatcagcaggacaaggacaggaaatctgtccttgcccggctactgagcagattaaatgagatgctctgagtggagttggagttgattatatatcagtctctttctcttattcttctcatttcattatccaggcatttgtctttctcccccactttttttttctgatatgcccattctgattgggaactccctttaacttttttgggaaccttttgctggctccagtatctctactgccaaccagagacccacacatcccccatttctctccattgatcatttccttgcaaaaataccagggtccctacactcagagggcttagttataagtttaaacaactcaaggttaatgctgagggtgaatcaaaagtatgcatattatgaggctataaaaatacgtttttcaaaaggacgctgtaataatattagctggtaattcctctttggagtcagctaaaatctctgcctagaatttgagtggctgctggcagctggagcccctcccaatgcatccacgcttgctagcccwtcaacatggaagacatcgagaaggttgtgggaaaacacttagcatttcttgggaaaatgagggaacatactgataacctttagccaacatgcatagggcagtgtggccactctccattcttcaatcgacttcactgtctggctggtctctcaacattgtaccactaaggacaacgaggagttgaaacctagagaaatgagccccataggagcttcacttgctcctttctgtttctttgttttgttttggaaatatgacacaccaagaagcagtgtgtgtgcttaaggagcagtggcttgctgaacatcctgtacagtgacgcttcacagttcagaacctctttttcagaaatgcatcttaagtccaattcaatgcaaaaaccctaaaagtgtaatctcatctgctcaccagggttgcctctaaagtaaaatgccttatccatggtgagagatgctcccagagagatattttaggatgaggagaaaaccagaggagcagcaagaaggaacacatgaagacagacggggatggacgaggagcacaaagactatgttccaatcctggttcagttaatagtaaaatgcttttctagttggtctctgtttcactcttgcttctccattgttcacatacatttactcttataaaatggaaatttgatcctgcagtttccctgcttaaaaccctcaaatgatttccccttatattgtgtcaaaccccaactcttt

SEQ ID NO: 675574 - DNA, 2394 bp, Homo sapiens
  misc_feature 3, 4, 5, 6, 7, 8, 9, 10, 11, 12, 13, 14, 15, 16, 17, 18,19, 20, 21, 22, 23, 24, 25, 26, 27, 28, 29, 30, 31, 32,33, 34, 35, 36, 37, 38, 39, 40, 41, 42, 43, 44, 45, 46,47, 48, 49, 50, 51, 52, 53, 54, 55, 56, 57, 58, 59, 60,61, 62: n = A,T,C or G
  misc_feature 63, 64, 65, 66, 67, 68, 69, 70, 71, 72, 73, 74, 75, 76, 77,78, 79, 80, 81, 82, 83, 84, 85, 86, 87, 88, 89, 90, 91,92, 93, 94, 95, 96, 97, 98, 99, 100, 101, 102: n = A,T,C or G
ttnnnnnnnnnnnnnnnnnnnnnnnnnnnnnnnnnnnnnnnnnnnnnnnnnnnnnnnnnnnnnnnnnnnnnnnnnnnnnnnnnnnnnnnnnnnnnnnnnnnnttctctgacctccctacataacacaatgcagcccccacccattctctgttacatctttctgttgtattttgygccaggtagcgtttgacagaaatgatctcgtttattcattctttccttcttttcattctgtctttcttttcattgtgcctcccatgaaatagttaataaatatctatgaatggccgaattagtcgtgtggcttcatataaactacttaatctctctagttctcagtgtctacatttataaattcaagacattctaaaaggaagtccttcaatatatgaactctctaccctttgggcttgaatttaagatttgagattgtgatagataaaattcttcaacaatgagacaagggattagcccttgagtggctaaaaatctggtgacattaacccaactaagaaaaaattagttaaaatattgataactctaattaagtccatagttacatgctgccagtgtattcacatgataaagaaggcaaatgtcattctaaacaagtggatgtctagcaaacttcatggaacagaacatactggaactgagccttggaggatgagccagatatggacaaacattccacattattaatgtacttttagatcccattcttctctggacttggggtgctagcacatggtgttatggcaaagcatggagtccagctgaattgccagttttgtgacctttagttagtggtttatctacttgaacctgtgtcttcttctcagaatgggattaatggtatcaactacaaagtgttggagaacttgattaaattgtattacacaacacatttcatgatgcctgtgagcatgtgaaacagtgactcatcctattaggctctcctcaaatattaaatatttttaaaagaagggggaaaatgtgggagtaaatgtttcaagtttctagtcaccataagttttgggcaatacacttcctgtataattttacgagtcacttcacattctttcacatttatccatgccaggtttggtgttggagactaggtgacccttagaagctcatagtcatgaaaggaatttacacatacctcctttctataaacttcaatatattgaggtaagtgcaaacacagaggttcttctaatgtcggaaattctcaaggataagccctaagaccttcagaaatgtctcaagtttgggaatattactaggaaaaataccatttctcccataaatgattggtaagataaccaaaatgttttttgtctcagaagtgtcctctaaaaaggactaaacctggtacatgctgtattctaagaaagaactcaaactgtttcaaacatcttttttactttatcttcaccaccagcaatagaggatgcccttcttttctagtcatttttcaagaagaaaagtctaaatcacttgtgacagggctagcagggctggaagtaggatgagtcaagtgaggccaggtcatgcaagtgtagtctggtcttgcctgcctttaaaatatgacattttgtttagcttgggttttttggcattaattttgctttttagataccatattaaatatatcaaaataaaatataaatatattatgtatcttattactgagatttttggaactccttaaattttgctcttaaggcagatctcttgctcatagtcttccccatagtccgattcctgcggggtagatatatgactgtgagtagagaaagcagatctgggctcagtagagacagcaatcagtcagttggactcagatgataatgaactgagtagatgctgcaccaggaaagttttatcctgtattagtgtgttttcacattgtttataaagatatacccaagactggggaatttacaaaaggcagtggtttaattggactcacagttccacgtggctagggaggcctcacgatcatggtggaaggcaaggaggagcaagtcacactttacgtggatgggggcaggcaaaggcagagctagtgcagggaatcccacttttaaaactatcagatctggtaagactcattcactatcacgagaacagcacaggaaagacccaccaccataattcaatcatctcccaccatgtctctctcataatatgtgggaattatgggagctacaacataagatctggatggggacacagagccaaacaatatcattctgccccaggcccttccgaatttcatatcttcacatttcaaaacctatcatgcctttccaacagtcccatgaagtctcaacacatttcagcactaaatcaaaagtccatagtccaaagtctcatccaagacaa

SEQ ID NO: 675575 - DNA, 1538 bp, Homo sapiens
ctgaagtgagttcactcaggtttcctcagcagtaaccccaaaattatataaatgacttcctcttttcccaccttcctgcctcacaatccgtcttcattcggaaaataattgctacatcaggggtctcctcagttctccttctacagtgtctacggcttattatgaacagttttctgtctgtttttagcactatcatgtgacatctgtaaaatctgtacttcctctctttctccttacacccttaatgaaaagatgctccagaaataaagcaaaattatgctgtgcccaagagccccttatgtcttcaactgctctccatatttcttcctcccaattgcaatgtggggatgtgtataatcttacagtgaagatcatgttccagaccagcagcatcagcataacccaagaacttattagaaatgaagaatctcaggcctactgaatcagaatgtgcagtttcgaccagccccccactgatttattcggggaagagaacttcttatctggactgaacatgacattaaatgtgttttgcaaagttacctgtcctagatgtttctccatcctttctttctctggttatatttgaaaaagaatctttctcatcacttgtagcctgaatggaatttgaaacaaaataataaataaggtatgtttcataggctttacatttactagctcacaatataaatgagagttttattaccttcaaggctgcttttttccgagaagacactgaaaagcaaaagggatacataatcactcacatgtaaatatgataaagttatccatacattcacacggtgttagcatcaacctctgtcctcctgcctgtattagtggaggctttcatggcttctactttgtctcaggggacagaaggtgacagaaatacactgaaaaaagggaacacaggctccatgaaatatacccttacaatttcaaacatggtatgatttgtcatgtgtcgaaacccaaaataaaaccgtgtcaatatcaatgtggatatgatgagcgatgaggacaaatgtgatctgaaaacagaggagcaactcatacacgtgagaatcaatgtcaaaacaggtgctacatgatcccacatgtctttcatgcaacaaatcaaaaggattacaccattatactamaaacattcatcatgctctttaacttgcccaataactgagaaggcacacaattacgatgacactccagctgaacgtacacttaacatatcttcagtggaagtgtcctgaattgatcaccttggatatctgtttgctgatacctagtagataatattcattatctctcacacccatgtagtgtaataatttgcctaagtttcatgtatccactagtttaggcttccgaaagtttcttcatccactcttggcaccaaaggataatatattagcctcaataaaaatatcatcaattatcaactttgacatgcttctacaaagtgaaatggctacaagcattagatattaatcagtttttcattcagaaatcactgcaatattcattgaaaatgacca

SEQ ID NO: 675576 - DNA, 1538 bp, Homo sapiens
ctgaagtgagttcactcaggtttcctcagcagtaaccccaaaattatataaatgacttcctcttttcccaccttcctgcctcacaatccgtcttcattcggaaaataattgctacatcaggggtctcctcagttctccttctacagtgtctacggcttattatgaacagttttctgtctgtttttagcactatcatgtgacatctgtaaaatctgtacttcctctctttctccttacacccttaatgaaaagatgctccagaaataaagcaaaattatgctgtgcccaagagccccttatgtcttcaactgctctccatatttcttcctcccaattgcaatgtggggatgtgtataatcttacagtgaagatcatgttccagaccagcagcatcagcataacccaagaacttattagaaatgaagaatctcaggcctactgaatcagaatgtgcagtttcgaccagccccccactgatttattcggggaagagaacttcttatctggactgaacatgacattaaatgtgttttgcaaagttacctgtcctagatgtttctccatcctttctttctctggttatatttgaaaaagaatctttctcatcacttgtagcctgaatggaatttgaaacaaaataataaataaggtatgtttcataggctttacatttactagctcacaatataaatgagagttttattaccttcaaggctgcttttttccgagaagacactgaaaagcaaaagggatacataatcactcacatgtaaatatgataaagttatccatacattcacacggtgttagcatcaacctctgtcctcctgcctgtattagtggaggctttcatggcttctactttgtctcaggggacagaaggtgacagaaatacactgaaaaaagggaacacaggctccatgaaatatacccttacaatttcaaacatggtatgatttgtcatgtgtcgaaacccaaaataaaaccgtgtcaatatcaatgtggatatgatgagcgatgaggacaaatgtgatctgaaaacagaggagcaactcatacacgtgagaatcaatgtcaaaacaggtgctacatgatcccacatgtctttcatgcaacaaatcaaaaggattacaccattatactaaaaacattcatcatgctctttaacttgcccaataactgagaaggcacacaattacgatgacactccagctgaacgtacacttaacatatcttcagtggaagtgtcctgaattgatcaccttggatatctgtttgctgatacctagtagataatattcattatctctcacacccatgtagtgtaataatttgcctaagtttcatgtatccactagtttaggcttccgaaagtttcttcatccactcttggcaccaaaggataatatattagcctcaataaaaatatcatcaattrtcaactttgacatgcttctacaaagtgaaatggctacaagcattagatattaatcagtttttcattcagaaatcactgcaatattcattgaaaatgacca

SEQ ID NO: 675577 - DNA, 1538 bp, Homo sapiens
ctgaagtgagttcactcaggtttcctcagcagtaaccccaaaattatataaatgacttcctcttttcccaccttcctgcctcacaatccgtcttcattcggaaaataattgctacatcaggggtctcctcagttctccttctacagtgtctacggcttattatgaacagttttctgtctgtttttagcactatcatgtgacatctgtaaaatctgtacttcctctctttctccttacacccttaatgaaaagatgctccagaaataaagcaaaattatgctgtgcccaagagccccttatgtcttcaactgctctccatatttcttcctcccaattgcaatgtggggatgtgtataatcttacagtgaagatcatgttccagaccagcagcatcagcataacccaagaacttattagaaatgaagaatctcaggcctactgaatcagaatgtgcagtttcgaccagccccccactgatttattcggggaagagaacttcttatctggactgaacatgacattaaatgtgttttgcaaagttacctgtcctagatgtttctccatcctttctttctctggttatatttgaaaaagaatctttctcatcacttgtagcctgaatggaatttgaaacaaaataataaataaggtatgtttcataggctttacatttactagctcacaatataaatgagagttttattaccttcaaggctgcttttttccgagaagacactgaaaagcaaaagggatacataatcactcacatgtaaatatgataaagttatccatacattcacacggtgttagcatcaacctctgtcctcctgcctgtattagtggaggctttcatggcttctactttgtctcaggggacagaaggtgacagaaatacactgaaaaaagggaacacaggctccatgaaatatacccttacaatttcaaacatggtatgatttgtcatgtgtcgaaacccaaaataaaaccgtgtcaatatcaatgtggatatgatgagcgatgaggacaaatgtgatctgaaaacagaggagcaactcatacacgtgagaatcaatgtcaaaacaggtgctacatgatcccacatgtctttcatgcaacaaatcaaaaggattacaccattatactaaaaacattcatcatgctctttaacttgcccaataactgagaaggcacacaattacgatgacactccagctgaacgtacacttaacatatcttcagtggaagtgtcctgaattgatcaccttggatatctgtttgctgatacctagtagataatattcattatctctcacacccatgtagtgtaataatttgcctaagtttcatgtatccactagtttaggcttccgaaagtttcttcatccactcttggcaccaaaggataatatattagcctcaataaaaatatcatcaattatcaactttgacatrcttctacaaagtgaaatggctacaagcattagatattaatcagtttttcattcagaaatcactgcaatattcattgaaaatgacca

SEQ ID NO: 675578 - DNA, 1538 bp, Homo sapiens
ctgaagtgagttcactcaggtttcctcagcagtaaccccaaaattatataaatgacttcctcttttcccaccttcctgcctcacaatccgtcttcattcggaaaataattgctacatcaggggtctcctcagttctccttctacagtgtctacggcttattatgaacagttttctgtctgtttttagcactatcatgtgacatctgtaaaatctgtacttcctctctttctccttacacccttaatgaaaagatgctccagaaataaagcaaaattatgctgtgcccaagagccccttatgtcttcaactgctctccatatttcttcctcccaattgcaatgtggggatgtgtataatcttacagtgaagatcatgttccagaccagcagcatcagcataacccaagaacttattagaaatgaagaatctcaggcctactgaatcagaatgtgcagtttcgaccagccccccactgatttattcggggaagagaacttcttatctggactgaacatgacattaaatgtgttttgcaaagttacctgtcctagatgtttctccatcctttctttctctggttatatttgaaaaagaatctttctcatcacttgtagcctgaatggaatttgaaacaaaataataaataaggtatgtttcataggctttacatttactagctcacaatataaatgagagttttattaccttcaaggctgcttttttccgagaagacactgaaaagcaaaagggatacataatcactcacatgtaaatatgataaagttatccatacattcacacggtgttagcatcaacctctgtcctcctgcctgtattagtggaggctttcatggcttctactttgtctcaggggacagaaggtgacagaaatacactgaaaaaagggaacacaggctccatgaaatatacccttacaatttcaaacatggtatgatttgtcatgtgtcgaaacccaaaataaaaccgtgtcaatatcaatgtggatatgatgagcgatgaggacaaatgtgatctgaaaacagaggagcaactcatacacgtgagaatcaatgtcaaaacaggtgctacatgatcccacatgtctttcatgcaacaaatcaaaaggattacaccattatactaaaaacattcatcatgctctttaacttgcccaataactgagaaggcacacaattacgatgacactccagctgaacgtacacttaacatatcttcagtggaagtgtcctgaattgatcaccttggatatctgtttgctgatacctagtagataatattcattatctctcacacccatgtagtgtaataatttgcctaagtttcatgtatccactagtttaggcttccgaaagtttcttcatccactcttggcaccaaaggataatatattagcctcaataaaaatatcatcaattatcaactttgacatgcttctacaaagtsaaatggctacaagcattagatattaatcagtttttcattcagaaatcactgcaatattcattgaaaatgacca

SEQ ID NO: 675579 - DNA, 1167 bp, Homo sapiens
tatgcctggttattaaaatgtcactttaattgctgctgttctctgtagtgtatgaaccaagattgggattggtggatatggcagagccattactctcattgaatgaattgtttacctgaggttcctgctgtgattggatgcaggaatgactttattccaagataattcttcaccaaggtataaagttaggtataggtaaggtagtaattagatcaactggtgcagacaatcccagtgtctacagctgaaaatacttaagctgtccagcagctcttatattgcaagtggacagtctgaatgccaaactgatgtctcctgaggcttagccttccagagagtaaccaggaatcattcttaaaacacatcatcctttaaacaaatagttgtgtttctgaattacatcaatatgtcactatatgtcttaacccatcctccttagaaaccaaagtacacaatgatgtggaggaggactctggtagaggaagggaggtcagagtaaggaggttgcaaccccactcagatgatgagtgacaggagtggatagtggcacggacaagaaagatgaaaacacaaactgaaaagaaactgccagagagataggaagagaacacaaaaagagtggtattgtagaatgtaggtgtcttagtctattttgtgctgctgtaacagaataccacagactaggttatttagaaagaaaagagatttattttgctcactattgtagaggctgggaagtccragagtatatgctagcacctggtgagggtcatcccaaagaggatggacggaaggcagaagcaagtgcatgaggcagagagaggaaattaggctgaactcattgttttatcagaaagccagtcccaagataactaactcactcctacaataatggcattaatccattcgtgaggttctggaagctgggaagcccaagatcaaggcaccagcagtttcagtgtctaacgagggcctgcttcctcatagacagccaccttctcactccactcttacatggcagaaggagtgaagggtgaagcctaaccatctcttaaaggtcccacctcttaatactgttacttttttatgtgtaagagatctgaatatattagtatgctgaggaaatagacccaaaggaaggaaagagattgaaggtagaaaacaggg

SEQ ID NO: 675580 - DNA, 1771 bp, Homo sapiens
tgagtggggagtagagagtactgttgctgtcccagtcttctggtcagctggtccagacacagctgagactttcagagcctgatcagttagatgaccatctggcaaggtctgtcgatagaaaaagaggaggtcctctmcatgtgagtgggatgtagaggatactgtaggtattcccgtcttctgctccactgggccaggagcagctgaaacttccaaaggctcttcggttaagttactctctggtaactcttgttggtaaaaagtaccaggcttctctctatgtgagtaggaagtagaggttagagttgacatgccagttgtctggtcagctagtccaggagcagctgaaactttcaaagcctcttcagttagatgactgtctggcaagccctgctggtagaaaatgctgggcttccccctatgtgagtgggaactagagagtactgttggtgttgcagtcttctggtcagctggttcaggaatagctgtgactttcagagtctcttcagttagatgagtatctgctaatgtcttttggttgagagtatcagtgtgttgaccagtagtagtttctagagaacttacagccaactgagacaggtcctcaagggacaaggataaatgagatccaatgtctgaatcaacaggagtggtagtgatgcctgacttcaagttggattgagtaactttagctatgcctcctttagaagtgtctcctaaagaaaaagagatttgttaatagtatataaaattttctattttaaaattctatgtgctggaaaaaaagccagctttgagcctttaaaaagcttctagaaatgaatcctaaggaaacagccatcaaaggagataaatatttgcacacaaagatattaattagaaaactaaagtaaaaacattttaaatcttcaacaacagagtaatggttataaacaacagtatatccagtggatgaaatattatatggatcttacaacttggatttttaagagaattttcaatgagatgggataatgctattgggtctaggatttgatttcaccctacttacaatctgttattgtgtcttgcaggctggcagaagacataaggtcttcagtcagagacaaaagacttcatgatccctggtacagcaaaggctcatcagcttattttcacgggttcctcctgcccccaagtcccacaggggcagtacaatatggcctagagggatgctatgcgtgcagtgagtttgaaggactctcccaacaaatgcaccctgtataatatatatatatttaagtacataaaactgaaaaaactctaaaggttactctgaagagttttaacttaattctgtatagcatggcaagttgtttacagttttaaagttttcaagatgagtgagaagggaatgtaaaaatctaggttgcacaatccaacaaacatttctatagaaatgttctatatttgcactaatacaataattctaaatgaaagcagttttaaacagcagtgtaaagtaagtgactgcaacagaaatgacaggatttgacaagctgtcccttcattcattgttcattcaaaatacatgaatgcttactatgttccaggcactgttctacatacagcaataaacagacaataatccctacctcacagagctaatttgtattctagcaggaggaggctgacaataaattggtaaaacatatgatgtgtcagatggtgttaagatgattgatatatagagcaagtattatctattttttacgtatagggaaaccgagtt

SEQ ID NO: 675581 - DNA, 611 bp, Homo sapiens
gggcctgaaacaatgaataccccttcaaaggtgcttattatcttaggatggcatggagacactaacagtcattcatttttgtgtccattctgctttgtggaacaatatgctctggttcagagaagggatgcttccccaccccagaaaaaagacaacagatgagtgtgtgtatataatagaatatatatatatgcatttctttttcaagtgactcatttttatacagaatgcagtttaaacacagaagcaggcaaagagctcaggaatgagacgggggagcggcgtattttgcaatttactaagttataggtcctaacaaggcatttgtatttcctcccccagaattgtatttatttcctctgtagaccatgactccatttctttytttttttttttttttttttgagacagagttcttgctctgtcgcccagactagggtgtagtggtgcgaactcggctcactgcaacctctgcttcccaggttcaagcgattctcctgcctcagcctcccgaatagctgggattacacgtcaccacacctggctaatttttgtatttttagtagagacagagtttcacagtgttagctaggatggtctcgagctcctga

SEQ ID NO: 675582 - DNA, 611 bp, Homo sapiens
gggcctgaaacaatgaataccccttcaaaggtgcttattatcttaggatggcatggagacactaacagtcattcatttttgtgtccattctgctttgtggaacaatatgctctggttcagagaagggatgcttccccaccccagaaaaaagacaacagatgagtgtgtgtatataatagaatatatatatatgcatttctttttcaagtgactcatttttatacagaatgcagtttaaacacagaagcaggcaaagagctcaggaatgagacgggggagcggcgtattttgcaatttactaagttataggtcctaacaaggcatttgtatttcctcccccagaattgtatttatttcctctgtagaccatgactccatttctttttttytttttttttttttttgagacagagttcttgctctgtcgcccagactagggtgtagtggtgcgaactcggctcactgcaacctctgcttcccaggttcaagcgattctcctgcctcagcctcccgaatagctgggattacacgtcaccacacctggctaatttttgtatttttagtagagacagagtttcacagtgttagctaggatggtctcgagctcctga

SEQ ID NO: 675583 - DNA, 1916 bp, Homo sapiens
cctgcatttccattttgtcctgattcctttgctcagagacactaactaaatcaagctagcttttttcagccttgtctgtaaagtagagaaaacattagctgttgggaagacgaaaaagaatgtgtcctatgtgtgcatctatttaaatctaactgtgctgaggtgcatataaatgcctttaggtggtagggtcttccggttgtaactgcaacagaaatagcaggacttaagttcctttgtgcgtaattccagctgactttattagcggcaactcagcactagcattacccctgacatactctgagtaagatctaattcttccctcactggttcgtgatgtctaccgcagcagaaggccagctcttgactctgagttcagttggacaaaatgctgttgataaaacctcctgtcaggcctctgagcccaagctaagccatcatatcccttgtgacctgcacatatatatccagatggcctgaagtaactgaagaatcacaaaagaagtgaaaatggcctgttcctgccttaactgatgacattaccttgtgaaattccttctcctggctcatcctggctcaaaagctcccccagtgagcaccttgtgacccccatccctgccagccagagaacaaccccctttgactgtaattttccactacttacccaaatcctataaaacggccccacccctatctcccttcactgactttcttttcggactcagcccacctgcacccaggtgattaaaaagctttattgctcacacaaagcctgtttggttgtctcttcacaaggacgcgagtgaaacctccttcatcaggagcatttggggtttgatgtttaagttttgggcctctggtgtatttcatatttctgttttgctagaacttagtgcttgtgcaaggttaaattctagaatcaggaaacgttgtttttaggggccttcagcaagcacttcggaggtccctggacgtttacagctgtgagtcgtggatctacccagacatcagaacatagtcatccttggctcattcctcctccgtaggaggggtacacagttggtagagtgtgccctccaagatttcgtgaaacattatgcttgtctgtatttgtgtgtgcatgtctgcgtgaattttgagttcaggaataacaggtgatttgatcacagctatttgacagtggtgatagtcattgtatgccaagatgtttatgaggggaataggtagattgagtgaggttcatgtatattttgcctagttgtactcacctacaagagctgtaattaaatgtttctctctttccccttcctctcttttattcattcttttttttttttttttgacaaagtctcgctctctcacccaggctagagtgtagtggtgtgatcttggcttactgcaaccttcgtctcctgggttcaagcgattctcctgcctccgcctcctgagtagctgggattacaggtgtgcaccaccatgcctggctaattttcatatttctagtagaaacagggttttgccattttggccaggctggtctcgaactcctgacctcaagtgatctgcccactttggcctcccaatggaatgaaccattgtgtctggcctcattcattctttctttcataaaagtttggatactgccaaacaraattaaagacatgaagacatttgataaattgttattacaaatgtgacagttatttaactactggtgtttatttttattagagtcatagcacctactggcctctgcttcagggattcacaatggtgttgggcaggttggatatcatggggcttacccttagcaaggcattctattccacctatgcccaggcggtgtaaaacatataagcatctggtacgctgtggtaccgacccagtgactggtataacacaatggttaaggttgc

SEQ ID NO: 675584 - DNA, 664 bp, Homo sapiens
tggaatataggtgcgcaccaccgcacctagttaatttttgcattttttgtagagatggagtttcatcatgtttcccaggcttgtcttgaactcctgggctcaagctatccatctgcctcggctgcccaaagtgccgagatgacaggcgtgggccactgtgcctggccagacagaagttttcaagtaaagaataaatttagctgaagagcagtgtcaaattatttctatccccaccctcctgaattaaatcttcrtagtctctgattctctttgtcatattcttaaccatttggattcttttcagtgcgtctgtgtttgttccttttccccagtatgacccctttctatttttttttttttttttttttttgagacagagtcttgctgtgtcgcccaggctggagtgcagtggcacgttcttggctcactgcaacctccgcctcccaggttcaaaagattctcccacctcagcctcctgagtagctgggattacagatgcctgccaccttgcccagataatttttgtatttttagtagagatggggtttcaacatgttagccaggctggtctcaaacttttgacctcaagtgatctgcccgcctcggcttcccaaagtgctgggattacaggcgtgagccaccttgtccagacccttttctctat

SEQ ID NO: 675585 - DNA, 622 bp, Homo sapiens
tagggtgaattcatctgcttaaacctcacaggctcggagatgagtgattaaaaagccatctcgaacttggatggaatccacattggtagtaatgccgcatccgcactggctttcttcaggccccgtgtcattgggaaccaggcccagggaacatttgactggagatgatacatggattatataggtcaattatacacttaatctgccttctggaggattaagtatttgcagattgactctgcatttggcttctccgtggcagttatcagatcaggaaagggcctcttaccaaaccrcctcgtaagaacttaatcaagcagtgtggtcagcttcggaaggggctgctactcagtattctttgcctcgcacggattttaatttgctgttccattttcaaatcgtgtatttgtccagtttgtgtggcagaacaataattgagtgtgactagttcccttgaaaagggtaatttgaaacatgaaacctttgcctgttaaaatatatttgctatatttatatatgaaaccacagatacccttattttaacaaccttattaaattactaaagcaccatacatgtgagcatatatcaatcaaagtaggaatcatcctgctggaggatgaa

SEQ ID NO: 675586 - DNA, 731 bp, Homo sapiens
ttttaatctcatttaaacagaaacaacaaaaattgagcaaattaattattctgctgtgggtttttactaagttgcatgcatttattattatcatcgttattattttctgggcttttgaaaagctgagcacaagtaaacaatttgaaaattcaaactgttatggcaaaaagaaaaaacaaacaccctaggaatcaagagattgggaatttattcttagctctgctactaactagctgggtgggactctgaataaaccaccttgctttattggatcttttattgttttccttcctaaaatgaagaaaatgtaccacacgatttccagggactcttgcagctctaaaagcactaaaatgtcattcttatgcatgtgctacagatactttattgacacaatgacatctcattttctaaaatgttgcccagcaggatatgtcacacctcccagatattaaatcaatcaggtagtaaaaacaactattttattcagagtagggaatagaactgtcaaaacaattgcactttcttaatgtactaagatagacatttcraaatttatgacaatttaataactgccagaatcttgattttcctatttttcccttatgaaaaagagaacttagactgctcatacacaattaaaagcaagcgtttcttttcaaactcttcaaaatttatttaaaaaatttaatcatcagcaggatgtggctatcaagtgaaacactgaatta

SEQ ID NO: 675587 - DNA, 1213 bp, Homo sapiens
atttgggaacaaatgacactgtgatggtttggaaaaataagggtatctttagctcatgataaatttagctcccacagtgtgtgagatgagcaaaaagtcacacccgttagtatatgaagacttttctgaacaaagtgatcagagaggagggtkggggtgggggtgggggtggggtgggcagggagggatatgatgtttgagtcactaagctcatgctccactgtgcaccatatggggtcaggatcctggctcctgcaataccagtgaccaacaacgtttattcatgccactccatcctccagctctggagatacatctccttgtaactgcatgaagtagtgagagagggggttagagattttggtgttaatagataaataaatttgcagaaaaaatcattatttttaactttccactttgttaaattctctctgtagttattattgataagtaaaattgccacaaaatattttcagcttacaaaacagcacaaaatagaaaacaaacactgtttaaaatcaaactagaataaaattggttaggaaaagcagaaacatagctgtgaacagatatcagattagcactttaggaagcttagatgaattaaattctcagcatataataatgtccttcttagcgcctgccttcccccatcacccagtgcccaataattcacctcccaggcagcaccccaccatgagaacttctttaattttaaaaaaatctaactcaaaacttacttgtagcatgcaatatagcattgtctttaaaacgtaacattcaagactatagttttgtattgttatggtacatatgatcatacacatatgcatatttatataagcacgtacactatcaaatgtaaaaaagaaaatgtgtatgtgtatataaatatggacattcacacaaaccaacaccaaaaaaaaggaaaagtactataagaaaatttaatacaccacatattaataatgatttgctttgggtaatggtgggtaggttttatatcatttttgaatatttttgtatattctatagtaggtatttactgggaagaggtagtgcagtatagcagtacagagcagtcgtcctcaaactttcatgtgtattaccatcacctagacagcttgttaaaactgattgttggactcagggcccaccgcaagtctctggttcagtaagtctggagtctgaatgagaatgtgcatttttaaca

SEQ ID NO: 675588 - DNA, 1940 bp, Homo sapiens
gaccaaactattttaacatctccattttcatttgtctgtatagacaaaaatgtttggcctacaaagacacagccgtgaatattgaatgacccagttcagtatccattacctgaatgttgttgtgtccccactgtatgcaggggagatgtggtaggcatcgggatggatgatgacgatgatgataattaaatgagtgaacagacaaacaaacggcaggcatatttcctatcctcttagtgtttacagttttgctgcagaggaatgattttatgaaataacataagtaatttagctgagattatttaagcatgagtttttggaacattttcccccagaatcaaaaaagtagggtcagtgccaaagcagccagttccaaagcgatgctctaaaaccttagaagtttccttggagtaacaaaaaatttccaggaagtgaagcagtttataaatagtttcagatctttgtggaaatacacagagaaactggcagaaaatgaatccatggagattttgacaagacccctctaagcaagatctaaagacaacatcagatggagttgtctgtggattatgtacgtattgtcagagacattcatgcaaaataatgggtttggtggtgacagggttacagccacaacaagaaagtgagatacagttagtggaattctcaagtgctctcttaggatgaataaaccttaagaaagaacaccctgcttttrtaacagatgaagaaaggctatggaagagacagattctggtaagacagagcattctctaacactaaagatgacatttctgatctatgggcacgggctttcacatgggttaaatgggtgcagcaaatagtgtttcagctgtttttggattaaatgagttgttcaggatttgtagtgtaacgggcatccatggaaaacatttcagtattttagagagccgtaccttctatgtgtctcaacagtgttatttgagggctctctaggaaggcttcccttatctaattctctctcaaacttttgaataaaagtcctattattagcaattcctgtgtggtgaccatcatcatttccctttgtctctttttgaagatgaataattgcagagaatggaagtaccctttctccatcacaccttggatcagtgcttattagatcactttcctgattgatgacaaagatgggaaaacttgagaacacttctcagtatagaaggaggaggggtgaagagaggctgcagaaatggtgttagagtcctggatgacaacagtgctggcttatcaatgttttcagggcactgccgaatgaaacatgagatttgtatacaagaacttgagagctaagaatgtttactttgcctaggaaatacccactgggatattgttaggatggaagtaatgaggaaataataatgatgataatatactttttaaattctctcagcattgttgaaaaatatgattataacattgcagtggtggacaacttatcaataccaacctccatggaaatctaggtcaaagaaaacgtaaccacagggccgaaaaaataaatccatgagatggcctttagcaaggtcacagaagaaaataatttccagccctgagaaccccgtgatttccttcttgtttcttttcatctttatccattctgtattccagtattttgtatctagtgttcttctcctaaccctatgcctttctcagtatggatattttcggtctaagacctgaggatattgccactgttttggtgattgcttttgcacttgtgtagcagcttttaaattcccatcttttttagcagctgcagccagacaaacatatgagtcagtgggaggggtttagaggaactggctcagttctcaagggagcagtaaccttttggcagtccaacaaaaagaacatttaaagtccagtgactgcaaaagctctctctgtacatgtga

SEQ ID NO: 675589 - DNA, 585 bp, Homo sapiens
aaaagggcagtattttctggagaagtcttctacttattcattttacctattatcaccatgtatagcctggctagatctcaaaaaaaaaagtagtttcaacaaatcatttggaggccaaacgtaaaaagagctaactaaattaggagaacccgctccaaccaggaaaaagacaagcaaagggaaggatgaacatgtgctatgatggctggctgcttaaagagaagagccacacgagtctgaatagaaatattagcagacaagaaagctctattttctgatattattccaaataaacaatggaagtttttttttcctttgaagaatccaagaatggcttagaaaattgtcacatttcatcwtattacagtatttgttactaagcaaaatattttctagtgatgaataacactagaagttaccagagaagctctctcctcagaactacaaaatttttctttcttaccattcacaaatgtttcaataattttttttttaactcttggatttactctcctgtagagaacagcacaacgttttctccatgtctcatcaggatggtggaaacagcagccactggaaattctg

SEQ ID NO: 675590 - DNA, 932 bp, Homo sapiens
atggaaagtatgtatatttatgtgtgtatgtacgtgtgtgtgtgtatgtgtgtgtgtgttatttcaaggaattgattattgcaattgtggaagctgttaagtttgaaatttttagggtggacttgtagtctgcaaactcttgggcagaaactaatgcaactaatgctgcagccttaaagagaattttttttcttactccggaaatcctcactttttctcttaaggcctttcagccgattgagtgaggcccatcttctttattgagaataatctcctttacttaaaatcaactgattgtagttattaatcacatacaaaataccttcacagcaatgtttaaattagtgtttgattgaatgattgaatactatactctagccaacttgacacataaaactagctgtcacaggaggatacacatttttttcaggtgaacacagaatatttaccaaggtagaccattaaatgagccgtaaaataaatcacaataaatttaaatttatctaagtaattatttttaaaaggctttctgttattgagaccagcaaatgatctcatggtttcctgtttctttgtcattttttaccttgagaggtttcccttaccgtttttttttgtttgtttgtttgttttttttgcaaattcagccatgcatttgaaacaggmattgttctagttcatccagtacttctaagttttttatttgaagtgggggaggttgtctatcatttctataatagttctggagatggaactttactcctgggccctgcattgaactcttccactgattagaagtggatgtggctggcaaaagactggtacagactgatctgttataataacattgaatgaatcatttattcataactacaaaagaaatgtcaaaatcctgacatacgtgcatttatctagttatggtctcactgctg

SEQ ID NO: 675591 - DNA, 400 bp, Homo sapiens
ccctcaaggtggaaccatgtctctactaaaagcacaaaaattagtcaggcgtggtggtgcacacctgtaatctcagctaygagggaggctgaggctggagaatctcttgaacccaggaggcagagcttgcggtgagctgagattgcaccactgcacttcagcctggaagacagagcaagactctgtctcacaaaaaacaaacaaacaaacaaacaaacaaacaagtaatcaaaaacaatctcccactccatgtgtgtctgacatgaattctttgacacatttctttcccatctctctgtggctatagagtgaacccttggagtggagagaggtgggacatgtggcaaggagctgtcatctctgccgcttgtgctttttattcctggctccaagttctcat

SEQ ID NO: 675592 - DNA, 400 bp, Homo sapiens
ccctcaaggtggaaccatgtctctactaaaagcacaaaaattagtcaggcgtggtggtgcacacctgtaatctcagctatgagggaggctgaggctggagaatctcttgaacccaggaggcagagcttgyggtgagctgagattgcaccactgcacttcagcctggaagacagagcaagactctgtctcacaaaaaacaaacaaacaaacaaacaaacaaacaagtaatcaaaaacaatctcccactccatgtgtgtctgacatgaattctttgacacatttctttcccatctctctgtggctatagagtgaacccttggagtggagagaggtgggacatgtggcaaggagctgtcatctctgccgcttgtgctttttattcctggctccaagttctcat

SEQ ID NO: 675593 - DNA, 2105 bp, Homo sapiens
cttccttttgtgcttatagttttaaaaagaaaccaaagaagaactaccaaaggttaataacaatgattacctataggggagtgaggaaagagtgggagaaacaagcatagaaagaaaacttctctgactgcattttgttgaaactgtatagacattcacataatttaaaaagagcatcctaggctgagggaatagcatgcgtaaatgacctgaggcaggaacatggttggtttttgtaaagaacaaggttggtgatatcgttgcgttgtgtccccttactcttcttttttgtcccccttgtccaggtcactgaatgattgaattcaaaaactttttactcatttattcaaccaacatgtatcagacatagaatatgtgctgggcatacataaaagctgactctccaaagagactagagatttgagtccccacccaaatctcatcttgaaatatagctcccataattcccacatgttgtggaggggacctggtgggagayaattgaaccttaggggcagtttcccccatactgttctcatggtagtgaataggtctcacaagatctgatggtttttataaggggaacccattttgcttggttctcattttccctcttgcctgcctccatgtaagatgtgacttttctcctccttgccccaccatgattgtgggcctccccagccaggtggaactgtgagtcaattaaacctctttcttttaaaaattacccagtctcaggtatgtctttattagcatgagaacagactaatacagttggtgagtaacttctggtttacttgtttgccttccttgcaagattctaagcttttgaagatggggccaatggctttcatctttggagacttaagtttttatgcagtgtctggcacatattctgtgtctgatacatgtttgttgaataaatgagtaaaatgtatttgaatccaatcattcagttgtccccctggacaagggggacaaaaaggaagagtaaggcactcttagaatatcattaccataaaatcaccagtctacaattttccttatgagtcctctctgataaatcagaagattggaaagtctctaaaacaagataacagaggcaaaacaaaaatatcagcttgctattaaatatcttcaatgcatatcaaaacccaaaagccatactgttcttggaaaagaacatttcagagccatctttttttccattaggcatatctacattttacttttacaaacaacaatttagagtcaacaatttagtaagaacacaagaacttgccatataagataaaaataaacattttaaaaataaaattaaaattataaataaattaaaactaatgattttaaatagcaaatcattacaaatgatttgtaaaaagttaaaaataaataataatttaaatagataaataaatatatctatttctgaggtgaggatagaataaagatcttagtcctctgctctttctcccctctccatccacatgtgcaaacattgtgcatcatccctgcatgtctttctatagtaaactatttcattcacaagcaataagtgactcattaagaaaaacagagaagaggtgaaagaggtggggttcaagattactgtttttctttcattttatctttgcctgagttgaggcacccaacttaatggatctggtcaattgcttcccagtagcatcccttaaccttttctctagctccagtgtttccaataaaataagcctgaaggctgggttgaattcactggtttttgtttgtgataaaaataccttgtcagtgattctatatacttcctattgcatcgtaaggtacataatgtctggtatgcttccttttgtgcttatagttttaaaaagaaaccaaagaagaattaccaaaggttaataataatgattacctatagaggagtgaggaaagagagggagaaacaagcgtagaaacaaaacttctctgattgtattttgttgaaactgaatagacattcacataatttaaaaagagcatcccaggctgagggaatagcacgcataaatgacagaacatgtgcagaataaagggaaatgtattgttggcctctgatgggttgaagatgc

SEQ ID NO: 675594 - DNA, 1481 bp, Homo sapiens
taaagagtgcrtcattgtgttatttgctttatttttctcttcattgtgaaagtcctgactctgccagattttcaaatgtttaatggatttgcatgtgatttaaatggtcctctgacatcccttttatcaatttcgggaagtccatcttttgtgagaattgcaatttcaattagttttgggtttgcattgcactggctagtatttatataatcaacattcactgaaagactgaccaaagggattaccataatgggcagagatagctgctgatattgaagagagagagagctatttgggcaagtactaattttatggaagtccgttcatcagtaaatatttcttattatgatgacttttgcaactcagtgggtggggataattggatagttgggtagtaaagaccccatctgctgaatgtttgctatagaaggccacgtctttcagtatatttcctgctctctttccaggcttatgctttcagcaaatacctgttgagtcctgcctgactcctatgttgagtcatagggtactgagtaaaaattatttatgcagtatcttgaaatacctagctgaatgggtttttttagtcattgttttttgttttgtattcccagtctggtcaatcagaatgactcacagggtacttctgttctaagagtttattgttttaatggacaaatgtttcattattttcagatctttagcacaaactggaaaaaacacccagacattttctttaaaccacttaaaacaacaatacagtctggaccgcagacatactggcttcatctccaacctcaaattcagccctcaatatttgcctatataagcaatgtttacagcctcagaagccaaacaatctcttcttttagtttttatcttgattccaggccccatactttattcttatctgagagtccttggaatattttcatttcctgaagttctgaaaaatggattgtctctgctgtgtagctcctctctcctttctctcattctttatagcttatttgtgatttttttactctgtctctgtagtgcctttagcattaaaaagatagtgatctgccatcttggtgggtgtgtatttctccttctttgtgtgtgtgtgtgtgtgtgtgtgtgtgtgtgtgtgtgtggtttgtatctaaagccatggtgacttctgtatggctctatatgtatattgatgtagatgtgggaaaagagtgtaattctcatgtgggttctttagttgcatcatagtataattaaagtggcattgggccaatcttcatttttccttttatcctatgggtctctaacattcaaaacttctggagtagacaagtagatctgctggtttgtgggccagaaataaataaatggtctaccttgtttgatcatgtcattttttatacattgaattctatttttcacttttaagcactttccttagtaacttaagttctgaagattcttctatttttatgtaattttct

SEQ ID NO: 675595 - DNA, 1481 bp, Homo sapiens
taaagagtgcatcattgtgttatttgctttatttttctcttcattgtgaaagtcctgactctgccagattttcaratgtttaatggatttgcatgtgatttaaatggtcctctgacatcccttttatcaatttcgggaagtccatcttttgtgagaattgcaatttcaattagttttgggtttgcattgcactggctagtatttatataatcaacattcactgaaagactgaccaaagggattaccataatgggcagagatagctgctgatattgaagagagagagagctatttgggcaagtactaattttatggaagtccgttcatcagtaaatatttcttattatgatgacttttgcaactcagtgggtggggataattggatagttgggtagtaaagaccccatctgctgaatgtttgctatagaaggccacgtctttcagtatatttcctgctctctttccaggcttatgctttcagcaaatacctgttgagtcctgcctgactcctatgttgagtcatagggtactgagtaaaaattatttatgcagtatcttgaaatacctagctgaatgggtttttttagtcattgttttttgttttgtattcccagtctggtcaatcagaatgactcacagggtacttctgttctaagagtttattgttttaatggacaaatgtttcattattttcagatctttagcacaaactggaaaaaacacccagacattttctttaaaccacttaaaacaacaatacagtctggaccgcagacatactggcttcatctccaacctcaaattcagccctcaatatttgcctatataagcaatgtttacagcctcagaagccaaacaatctcttcttttagtttttatcttgattccaggccccatactttattcttatctgagagtccttggaatattttcatttcctgaagttctgaaaaatggattgtctctgctgtgtagctcctctctcctttctctcattctttatagcttatttgtgatttttttactctgtctctgtagtgcctttagcattaaaaagatagtgatctgccatcttggtgggtgtgtatttctccttctttgtgtgtgtgtgtgtgtgtgtgtgtgtgtgtgtgtgtgtggtttgtatctaaagccatggtgacttctgtatggctctatatgtatattgatgtagatgtgggaaaagagtgtaattctcatgtgggttctttagttgcatcatagtataattaaagtggcattgggccaatcttcatttttccttttatcctatgggtctctaacattcaaaacttctggagtagacaagtagatctgctggtttgtgggccagaaataaataaatggtctaccttgtttgatcatgtcattttttatacattgaattctatttttcacttttaagcactttccttagtaacttaagttctgaagattcttctatttttatgtaattttct

SEQ ID NO: 675596 - DNA, 1481 bp, Homo sapiens
taaagagtgcatcattgtgttatttgctttatttttctcttcattgtgaaagtcctgactctgccagattttcaaatgtttaatggatttgcatgtgatttaaatggtcctctgacatcccttttatcaatttcgggaagtccatcttttgtgagaattgcaatttcaattagttttgggtttgcattgcactggctagtatttatataatcaacattcactgaaagactgaccaaagggattaccataatgggcagagatagctgctgatattgaagagagagagagctatttgggcaagtactaattttatggaagtccgttcatcagtaaatatttcttattatgatgacttttgcaactcagtgggtggggataattggatagttgggtagtaaagaccccatctgctgaatgtttgctatagaaggccacgtctttcagtatatttcctgctctctttccaggcttatgctttcagcaaatacctgttgagtcctgcctgactcctatgttgagtcatagggtactgagtaaaaattatttatgcagtatcttgaaatacctagctgaatgggtttttttagtcattgttttttgttttgtattcccagtctggtcaatcagaatgactcacagggtacttctgttctaagagtttattgttttaatggacaaatgtttcattattttcagatctttagcacaaactggaaaaaacacccagacattttctttaaaccacttaaaacaacaatacagtctggaccgcagacatactggcttcatctccaacctcaaattcagccctcaatatttgcctatataagcaatgtttacagcctcagaagccaaacaatctcttcttttagtttttatcttgattccaggccccatactttattcttatctgagagtccttggaatattttcatttcctgaagttctgaaaaatggattgtctctgctgtgtagctcctctctcctttctctcattctttatagcttatttgtgatttttttactctgtctctgtagtgcctttagcattaaaaagatagtgatctgccatcytggtgggtgtgtatttctccttctttgtgtgtgtgtgtgtgtgtgtgtgtgtgtgtgtgtgtgtggtttgtatctaaagccatggtgacttctgtatggctctatatgtatattgatgtagatgtgggaaaagagtgtaattctcatgtgggttctttagttgcatcatagtataattaaagtggcattgggccaatcttcatttttccttttatcctatgggtctctaacattcaaaacttctggagtagacaagtagatctgctggtttgtgggccagaaataaataaatggtctaccttgtttgatcatgtcattttttatacattgaattctatttttcacttttaagcactttccttagtaacttaagttctgaagattcttctatttttatgtaattttct

SEQ ID NO: 675597 - DNA, 1801 bp, Homo sapiens
ttggtggattctcgctctgttgcccaggctggagtgcaacggtgagatcttggctcactgcaacttccacttcctgggttcaagtgattctcttgcctcagcctcccaagtagctgggactayagacgcccaccaccatgccggccattttttgtatttctagtagaaacggggtttcaccatgttggccaggctggtctcaaactcctgacctcaagtaatctgcccaccttggcctcccaaagtgctgggattacaggcgtgagccaccacacctagccagtgggccttgattttaacctattctaaaggaggaggccatatggcataggtagaaggtttaaaggtcactagcatcagccattagtctccaaggtgtctccagggcaaaattactgtcaattcctctgccctggaaaataccagcaagcttttcttccagttacttttcagcttagcaaagtgtacttctgcgggtatcaccttttgtggaatttcctctttgctgtttaaaataaaaaggaaactcttacttcatttgggtcaaatgaaattgttagcacaactatagaatatttctgtttggtagactgtgggaaacaggtgaactttcagctatgaaatattttctctagttaaatatagtaagttctgccctcttagcttttatcattctctatgaatcacacatcgtttttcacatcatattgtcccctgtccagctattctttagggatttctctaaaaaggttaatcatctcggcctctttctaaccattaaggatcaggattaaatttgtcttctttctcagaagtgttcccagtagcgtatattcttctttatcctatttagccaacatggagatctgtttattccttcatgtgcttttctgttatgaatgttaacttttcttcgttgatagattgataactgtgtctggcatttttgttctcttgtattttggatgtgtgaaagttgtataagatgagaatgtctaagggtttgtttgcttaggactgaacattatcctcagtcatgccctataagcttgctgggcacttgatctttattgactctgccatctcagaaaataggtaaaaacaaaaagaataattggaaaaagctcctgtggagcaaaattttcacataacagaatgattcagcagtttcaggggaactttattgattgaatatttttttaaagtctttttattttgtggtcttttaacaagcatttagttaaagtacagatagtttaaatatgatgatactgaaaatactttattttgatgatggaatgttgtaggaaaaatgtaattttcataggaagtctacatttaattttataagtaaaattatatctaaatttaaaaaaatatactgtcaaattatatgccaaaataagtttcagagatataaaggataaaatgtgtaaaaaaaaacagaaaatctgtaataaaataggagcgaatatttatctgatcaagatgggggctttgtaagcatatgaagaaattgtgtttttgtgtcttgtggtcataaaatagattgacaacattaaaaaaaaattcagaacttccaaggccggctatctaaattgtggggcccaattccaaatgaaagtatagactccttattcaaaacataggaaaatggaccagaaaggcactaaagtataaagcttttccttctgtggtctttctcatcttgtcaaagtggtttttattttctatttagtgccatcagtgtaaagaaatctaaattttgatttattggcatgaattttaccatttgtcttca

SEQ ID NO: 675598 - DNA, 1801 bp, Homo sapiens
ttggtggattctcgctctgttgcccaggctggagtgcaacggtgagatcttggctcactgcaacttccacttcctgggttcaagtgattctcttgcctcagcctcccaagtagctgggactatagacgcccaccaccatgccggccattttttgtatttctagtagaaacggggtttcaccatgttggccaggctggtctcraactcctgacctcaagtaatctgcccaccttggcctcccaaagtgctgggattacaggcgtgagccaccacacctagccagtgggccttgattttaacctattctaaaggaggaggccatatggcataggtagaaggtttaaaggtcactagcatcagccattagtctccaaggtgtctccagggcaaaattactgtcaattcctctgccctggaaaataccagcaagcttttcttccagttacttttcagcttagcaaagtgtacttctgcgggtatcaccttttgtggaatttcctctttgctgtttaaaataaaaaggaaactcttacttcatttgggtcaaatgaaattgttagcacaactatagaatatttctgtttggtagactgtgggaaacaggtgaactttcagctatgaaatattttctctagttaaatatagtaagttctgccctcttagcttttatcattctctatgaatcacacatcgtttttcacatcatattgtcccctgtccagctattctttagggatttctctaaaaaggttaatcatctcggcctctttctaaccattaaggatcaggattaaatttgtcttctttctcagaagtgttcccagtagcgtatattcttctttatcctatttagccaacatggagatctgtttattccttcatgtgcttttctgttatgaatgttaacttttcttcgttgatagattgataactgtgtctggcatttttgttctcttgtattttggatgtgtgaaagttgtataagatgagaatgtctaagggtttgtttgcttaggactgaacattatcctcagtcatgccctataagcttgctgggcacttgatctttattgactctgccatctcagaaaataggtaaaaacaaaaagaataattggaaaaagctcctgtggagcaaaattttcacataacagaatgattcagcagtttcaggggaactttattgattgaatatttttttaaagtctttttattttgtggtcttttaacaagcatttagttaaagtacagatagtttaaatatgatgatactgaaaatactttattttgatgatggaatgttgtaggaaaaatgtaattttcataggaagtctacatttaattttataagtaaaattatatctaaatttaaaaaaatatactgtcaaattatatgccaaaataagtttcagagatataaaggataaaatgtgtaaaaaaaaacagaaaatctgtaataaaataggagcgaatatttatctgatcaagatgggggctttgtaagcatatgaagaaattgtgtttttgtgtcttgtggtcataaaatagattgacaacattaaaaaaaaattcagaacttccaaggccggctatctaaattgtggggcccaattccaaatgaaagtatagactccttattcaaaacataggaaaatggaccagaaaggcactaaagtataaagcttttccttctgtggtctttctcatcttgtcaaagtggtttttattttctatttagtgccatcagtgtaaagaaatctaaattttgatttattggcatgaattttaccatttgtcttca

SEQ ID NO: 675599 - DNA, 1801 bp, Homo sapiens
ttggtggattctcgctctgttgcccaggctggagtgcaacggtgagatcttggctcactgcaacttccacttcctgggttcaagtgattctcttgcctcagcctcccaagtagctgggactatagacgcccaccaccatgccggccattttttgtatttctagtagaaacggggtttcaccatgttggccaggctggtctcaaactcctgacctcaagtaatctgcccaccttggcctcccaaagtgctgggattacaggcgtgagccaccacacctagccagtgggccttgattttaacctattctaaaggaggaggccatatggcataggtagaaggtttaaaggtcactagcatcagccattagtctccaaggtgtctccagggcaaaattactgtcaattcctctgccctggaaaataccagcaagcttttcttccagttacttttcagcttagcaaagtgtacttctgcgggtatcaccttttgtggaatttcctctttgctgtttaaaataaaaaggaaactcttacttcatttgggtcaaatgaaattgttagcacaactatagaatatttctgtttggtagactgtgggaaacaggtgaactttcagctatgaaatattttctctagttaaatatagtaagttctgccctcttagcttttatcattctctatgaatcacacatcgtttttcacatcatattgtcccctgtccagctattctttagggatttctctaaaaaggttaatcatctcggcctctttctaaccattaaggatcaggattaaatttgtcttctttctcagaastgttcccagtagcgtatattcttctttatcctatttagccaacatggagatctgtttattccttcatgtgcttttctgttatgaatgttaacttttcttcgttgatagattgataactgtgtctggcatttttgttctcttgtattttggatgtgtgaaagttgtataagatgagaatgtctaagggtttgtttgcttaggactgaacattatcctcagtcatgccctataagcttgctgggcacttgatctttattgactctgccatctcagaaaataggtaaaaacaaaaagaataattggaaaaagctcctgtggagcaaaattttcacataacagaatgattcagcagtttcaggggaactttattgattgaatatttttttaaagtctttttattttgtggtcttttaacaagcatttagttaaagtacagatagtttaaatatgatgatactgaaaatactttattttgatgatggaatgttgtaggaaaaatgtaattttcataggaagtctacatttaattttataagtaaaattatatctaaatttaaaaaaatatactgtcaaattatatgccaaaataagtttcagagatataaaggataaaatgtgtaaaaaaaaacagaaaatctgtaataaaataggagcgaatatttatctgatcaagatgggggctttgtaagcatatgaagaaattgtgtttttgtgtcttgtggtcataaaatagattgacaacattaaaaaaaaattcagaacttccaaggccggctatctaaattgtggggcccaattccaaatgaaagtatagactccttattcaaaacataggaaaatggaccagaaaggcactaaagtataaagcttttccttctgtggtctttctcatcttgtcaaagtggtttttattttctatttagtgccatcagtgtaaagaaatctaaattttgatttattggcatgaattttaccatttgtcttca

SEQ ID NO: 675600 - DNA, 1801 bp, Homo sapiens
ttggtggattctcgctctgttgcccaggctggagtgcaacggtgagatcttggctcactgcaacttccacttcctgggttcaagtgattctcttgcctcagcctcccaagtagctgggactatagacgcccaccaccatgccggccattttttgtatttctagtagaaacggggtttcaccatgttggccaggctggtctcaaactcctgacctcaagtaatctgcccaccttggcctcccaaagtgctgggattacaggcgtgagccaccacacctagccagtgggccttgattttaacctattctaaaggaggaggccatatggcataggtagaaggtttaaaggtcactagcatcagccattagtctccaaggtgtctccagggcaaaattactgtcaattcctctgccctggaaaataccagcaagcttttcttccagttacttttcagcttagcaaagtgtacttctgcgggtatcaccttttgtggaatttcctctttgctgtttaaaataaaaaggaaactcttacttcatttgggtcaaatgaaattgttagcacaactatagaatatttctgtttggtagactgtgggaaacaggtgaactttcagctatgaaatattttctctagttaaatatagtaagttctgccctcttagcttttatcattctctatgaatcacacatcgtttttcacatcatattgtcccctgtccagctattctttagggatttctctaaaaaggttaatcatctcggcctctttctaaccattaaggatcaggattaaatttgtcttctttctcagaagtgttcccagtagcgtatattcttctttatcctatttagccaacatggagatctgtttattccttcatgtgcttttctgttatgaatgttaacttttcttcgttgatagattgataactgtgtctggcatttttgttctcttgtattttggatgtgtgaaagttgtataagatgagaatgtctaagggtttgtttgcttaggactgaacattatcctcagtcatgccctataagcttgctgggcacttgatctttattgactctgccatctcagaaaataggtaaaaacaaaaagaataattggaaaaagctcctgtggagcaaaattttcacataacagaatgattcagcagtttcaggggaactttattgattgaatatttttttaaagtctttttattttgtggtcttttaacaagcatttagttaaagtacagatagtttaaatatgatgatactraaaatactttattttgatgatggaatgttgtaggaaaaatgtaattttcataggaagtctacatttaattttataagtaaaattatatctaaatttaaaaaaatatactgtcaaattatatgccaaaataagtttcagagatataaaggataaaatgtgtaaaaaaaaacagaaaatctgtaataaaataggagcgaatatttatctgatcaagatgggggctttgtaagcatatgaagaaattgtgtttttgtgtcttgtggtcataaaatagattgacaacattaaaaaaaaattcagaacttccaaggccggctatctaaattgtggggcccaattccaaatgaaagtatagactccttattcaaaacataggaaaatggaccagaaaggcactaaagtataaagcttttccttctgtggtctttctcatcttgtcaaagtggtttttattttctatttagtgccatcagtgtaaagaaatctaaattttgatttattggcatgaattttaccatttgtcttca

SEQ ID NO: 675601 - DNA, 1801 bp, Homo sapiens
ttggtggattctcgctctgttgcccaggctggagtgcaacggtgagatcttggctcactgcaacttccacttcctgggttcaagtgattctcttgcctcagcctcccaagtagctgggactatagacgcccaccaccatgccggccattttttgtatttctagtagaaacggggtttcaccatgttggccaggctggtctcaaactcctgacctcaagtaatctgcccaccttggcctcccaaagtgctgggattacaggcgtgagccaccacacctagccagtgggccttgattttaacctattctaaaggaggaggccatatggcataggtagaaggtttaaaggtcactagcatcagccattagtctccaaggtgtctccagggcaaaattactgtcaattcctctgccctggaaaataccagcaagcttttcttccagttacttttcagcttagcaaagtgtacttctgcgggtatcaccttttgtggaatttcctctttgctgtttaaaataaaaaggaaactcttacttcatttgggtcaaatgaaattgttagcacaactatagaatatttctgtttggtagactgtgggaaacaggtgaactttcagctatgaaatattttctctagttaaatatagtaagttctgccctcttagcttttatcattctctatgaatcacacatcgtttttcacatcatattgtcccctgtccagctattctttagggatttctctaaaaaggttaatcatctcggcctctttctaaccattaaggatcaggattaaatttgtcttctttctcagaagtgttcccagtagcgtatattcttctttatcctatttagccaacatggagatctgtttattccttcatgtgcttttctgttatgaatgttaacttttcttcgttgatagattgataactgtgtctggcatttttgttctcttgtattttggatgtgtgaaagttgtataagatgagaatgtctaagggtttgtttgcttaggactgaacattatcctcagtcatgccctataagcttgctgggcacttgatctttattgactctgccatctcagaaaataggtaaaaacaaaaagaataattggaaaaagctcctgtggagcaaaattttcacataacagaatgattcagcagtttcaggggaactttattgattgaatatttttttaaagtctttttattttgtggtcttttaacaagcatttagttaaagtacagatagtttaaatatgatgatactgaaaatactttattttgatgatggaatgttgtaggaaaaatgtaattttcataggaagtctacatttaattttataagtaaaattatatctaaatttaaaaaaatatactgtcaaattatatgccaaaataagtttcagagatataaaggataaaatgtgtaaaaaaaaacagaaaatctgtaataaaataggagcgaatatttatctgatcaagatgggggctttgtaagcatatgaagaaattgtgtttttgtgtcttgtrgtcataaaatagattgacaacattaaaaaaaaattcagaacttccaaggccggctatctaaattgtggggcccaattccaaatgaaagtatagactccttattcaaaacataggaaaatggaccagaaaggcactaaagtataaagcttttccttctgtggtctttctcatcttgtcaaagtggtttttattttctatttagtgccatcagtgtaaagaaatctaaattttgatttattggcatgaattttaccatttgtcttca

SEQ ID NO: 675602 - DNA, 1801 bp, Homo sapiens
ttggtggattctcgctctgttgcccaggctggagtgcaacggtgagatcttggctcactgcaacttccacttcctgggttcaagtgattctcttgcctcagcctcccaagtagctgggactatagacgcccaccaccatgccggccattttttgtatttctagtagaaacggggtttcaccatgttggccaggctggtctcaaactcctgacctcaagtaatctgcccaccttggcctcccaaagtgctgggattacaggcgtgagccaccacacctagccagtgggccttgattttaacctattctaaaggaggaggccatatggcataggtagaaggtttaaaggtcactagcatcagccattagtctccaaggtgtctccagggcaaaattactgtcaattcctctgccctggaaaataccagcaagcttttcttccagttacttttcagcttagcaaagtgtacttctgcgggtatcaccttttgtggaatttcctctttgctgtttaaaataaaaaggaaactcttacttcatttgggtcaaatgaaattgttagcacaactatagaatatttctgtttggtagactgtgggaaacaggtgaactttcagctatgaaatattttctctagttaaatatagtaagttctgccctcttagcttttatcattctctatgaatcacacatcgtttttcacatcatattgtcccctgtccagctattctttagggatttctctaaaaaggttaatcatctcggcctctttctaaccattaaggatcaggattaaatttgtcttctttctcagaagtgttcccagtagcgtatattcttctttatcctatttagccaacatggagatctgtttattccttcatgtgcttttctgttatgaatgttaacttttcttcgttgatagattgataactgtgtctggcatttttgttctcttgtattttggatgtgtgaaagttgtataagatgagaatgtctaagggtttgtttgcttaggactgaacattatcctcagtcatgccctataagcttgctgggcacttgatctttattgactctgccatctcagaaaataggtaaaaacaaaaagaataattggaaaaagctcctgtggagcaaaattttcacataacagaatgattcagcagtttcaggggaactttattgattgaatatttttttaaagtctttttattttgtggtcttttaacaagcatttagttaaagtacagatagtttaaatatgatgatactgaaaatactttattttgatgatggaatgttgtaggaaaaatgtaattttcataggaagtctacatttaattttataagtaaaattatatctaaatttaaaaaaatatactgtcaaattatatgccaaaataagtttcagagatataaaggataaaatgtgtaaaaaaaaacagaaaatctgtaataaaataggagcgaatatttatctgatcaagatgggggctttgtaagcatatgaagaaattgtgtttttgtgtcttgtggtcataaaatagattgacaacattaaaaaaaaattcagaacttccaaggccggctatctaaattgtggggcccaattccaaatgaaagtakagactccttattcaaaacataggaaaatggaccagaaaggcactaaagtataaagcttttccttctgtggtctttctcatcttgtcaaagtggtttttattttctatttagtgccatcagtgtaaagaaatctaaattttgatttattggcatgaattttaccatttgtcttca

SEQ ID NO: 675603 - DNA, 1801 bp, Homo sapiens
ttggtggattctcgctctgttgcccaggctggagtgcaacggtgagatcttggctcactgcaacttccacttcctgggttcaagtgattctcttgcctcagcctcccaagtagctgggactatagacgcccaccaccatgccggccattttttgtatttctagtagaaacggggtttcaccatgttggccaggctggtctcaaactcctgacctcaagtaatctgcccaccttggcctcccaaagtgctgggattacaggcgtgagccaccacacctagccagtgggccttgattttaacctattctaaaggaggaggccatatggcataggtagaaggtttaaaggtcactagcatcagccattagtctccaaggtgtctccagggcaaaattactgtcaattcctctgccctggaaaataccagcaagcttttcttccagttacttttcagcttagcaaagtgtacttctgcgggtatcaccttttgtggaatttcctctttgctgtttaaaataaaaaggaaactcttacttcatttgggtcaaatgaaattgttagcacaactatagaatatttctgtttggtagactgtgggaaacaggtgaactttcagctatgaaatattttctctagttaaatatagtaagttctgccctcttagcttttatcattctctatgaatcacacatcgtttttcacatcatattgtcccctgtccagctattctttagggatttctctaaaaaggttaatcatctcggcctctttctaaccattaaggatcaggattaaatttgtcttctttctcagaagtgttcccagtagcgtatattcttctttatcctatttagccaacatggagatctgtttattccttcatgtgcttttctgttatgaatgttaacttttcttcgttgatagattgataactgtgtctggcatttttgttctcttgtattttggatgtgtgaaagttgtataagatgagaatgtctaagggtttgtttgcttaggactgaacattatcctcagtcatgccctataagcttgctgggcacttgatctttattgactctgccatctcagaaaataggtaaaaacaaaaagaataattggaaaaagctcctgtggagcaaaattttcacataacagaatgattcagcagtttcaggggaactttattgattgaatatttttttaaagtctttttattttgtggtcttttaacaagcatttagttaaagtacagatagtttaaatatgatgatactgaaaatactttattttgatgatggaatgttgtaggaaaaatgtaattttcataggaagtctacatttaattttataagtaaaattatatctaaatttaaaaaaatatactgtcaaattatatgccaaaataagtttcagagatataaaggataaaatgtgtaaaaaaaaacagaaaatctgtaataaaataggagcgaatatttatctgatcaagatgggggctttgtaagcatatgaagaaattgtgtttttgtgtcttgtggtcataaaatagattgacaacattaaaaaaaaattcagaacttccaaggccggctatctaaattgtggggcccaattccaaatgaaagtatagactccttattcaaaacataggaaaatggaccagaaaggcactaaagtataaagcttttccttctgtggtctttctcatcttgtcaaagtggtttttattttctrtttagtgccatcagtgtaaagaaatctaaattttgatttattggcatgaattttaccatttgtcttca

SEQ ID NO: 675604 - DNA, 607 bp, Homo sapiens
tgaaataactattctgtgttagagataagtttggaagattagatatgttaatttatatagaaagttctgccctgatagtgatagagtagatgttgtcagaccttttctccaagaaataacaattatgatcttaggagaaaaataaataaataatataggtaaattatctagaggtactggagaatgaccaaaagcaagcagaagctagaggactttctcatgttttttgtttttgtttttgtttttgtttttgtttttagtagctyttaccttaaaagcaggccccagttggtggcatacaaaatgacaaaaacttagaatcttacagcttaatggcatgaagagccataggaaaggagagctattacaactggaaagaattccacaaaaggggggatccttggggggaaacatcctcaaatcctgcacatgagctcttttcaaatctctagccaactgctgaatgatggatgcatgtgacagatttcaaacagcccagctaaggctgaaagagttaaacaaatttctgctgctaaccacttcaggaaagctgtgtttgacttagccaatttaacagtattttattacaaacaaaactcattaaact

SEQ ID NO: 675605 - DNA, 607 bp, Homo sapiens
tgaaataactattctgtgttagagataagtttggaagattagatatgttaatttatatagaaagttctgccctgatagtgatagagtagatgttgtcagaccttttctccaagaaataacaattatgatcttaggagaaaaataaataaataatataggtaaattatctagaggtactggagaatgaccaaaagcaagcagaagctagaggactttctcatgttttttgtttttgtttttgtttttgtttttgtttttagtagcttttaccttaaaagcaggccccagttggtggcatacaaaatgacaaaaacttagaatcttacagcttaatggcatgaagagccataggaaaggagagctattacaactggaaagaattccacaaaaggggggatccttggggggaaacatcctcaaatcctgcacatgagctcttttcaaatctctagccaactgctgaatgatggatgcrtgtgacagatttcaaacagcccagctaaggctgaaagagttaaacaaatttctgctgctaaccacttcaggaaagctgtgtttgacttagccaatttaacagtattttattacaaacaaaactcattaaact

SEQ ID NO: 675606 - DNA, 657 bp, Homo sapiens
ctttataatttccattattaccaagaagttctatggttctatttgtttctcaaagtgatgtactaatagttttaatgagaaaaaaaaaatcacacacacacacacacacacacacacacactcaccccagatctttgggcctaccataatctctgacataattatcactgtatcacattttagatcrcacatatggatgtgtacttagttcacaagtatgcaaactgtatccattgcaatttagctttgttaaaccatccaggaaatctgtggagaataaagatattacgtttaaagactctatatagcaaactcaaaggggacagcttcaagcaaaaacttcagaaagactattcttgttacaaaccacatgtttcttaccaatactcaaagggtctttcagattaaatagatgttttagagccccttattctgtgcttaatttttccatcacttttatgtcttaattgaatagctctgattacagtaaaatctcataataacaaaccttacatagagatctctataactaaatgtctgcctaaaacaaaactagcctctgaaatcaagaaatcacaacgtatttgtcaaagaagcctattgtcaagagaaacctagtctctgtcaagccattctaaacagaaacaagctcaatga

SEQ ID NO: 675607 - DNA, 617 bp, Homo sapiens
aaaaattttatttaaaaattataatcacattcctcctcagtatacacaaagtaaggtttatgaacattaatacatgctaatacaattaatttagtagccttaatgtttgatttgaaacctgcttcattacaatttaatcttaacmacaaaaaggaatataattttggctaatcttagaaaaagatagcaggtaacagtttatgtccatgagacttagaaacttcgagatgaaattcaacttatgtttttatgactgagcttttttattgaaatagaaacaaatgcaattaaagatatgcaagaatataaaacactgttggtaataatacctgggttgtcagtggaatctttgtagaaagttcaataaaagtgttttccagataatatattttggccccaaaaggttaattttctttaggctgtagctgaaaagagtaccttaactctactggtaaaagttaaaatacacagaaagaactttacgcacctcagttcctacaggtgtgacacttttcaacttctttggaagaggcatttccactgtatcatcagagacttggtctgatgcttctatggtgctatcctcttcctcttcacgtgtacgctttggcaaagaa

SEQ ID NO: 675608 - DNA, 957 bp, Homo sapiens
tactccaacctgccaccctggggaggaattgccttcctagatccaagtctccgagtgctgattccttctttccttccttaatcctccctcaccgatctttcctttttcttctgttctacaattccttgttggtactttccttctaaagctaagagttctggaattggctgcttttaggcaaaatatacatttctacaggtatttttctgagattctccttagggttcccccatataatttccatactcccactgtctttggttttagtaggatttggtcaataacctcacataggttggtcagtccgccagactcctagggcgagcccatcaggttgttacagcacggtcagcaacagctgcaaataattagcactcacaacttctataaagaaatcttccgaaggagggaatgggttggygggttgccagtggcaggaagcctggactagccattaggtcactcgattagtctttgattcataggtttgcttcctgtaagaggcttgaaaaaatcagtgttgagcctaactttccttgatgcaataaagcagaaaagagatgtccaggtgaaattctaggagcaaagggagagggagagtggctcaagtcagaagatagaaattgaccttttacttaaaagttgttgtgctttgttgactaatttcccatcagtgagtcactccggccattagatgttattccagtttataacagcgcatcacttataagaatcaccatcaaggaaggaagaactggctataatccatgaacaacaaatagccatcttcatcttttttccccttgtaaacagctttcctatattttaaaactttcacttgctgttagaattgttttctttatattatgcctaaatattgctttattcaatgacaaagcaaaatataagcaaaaaaccaaatgctatctctcctgtccttagatacctcaacccagc

SEQ ID NO: 675609 - DNA, 1184 bp, Homo sapiens
tgctggcaaatcccatgctctcaacatgtgcctcaccgccctcccagagagctacttcaagagctgatgctcaggcctccagtatttgctgtctgcattaggaggtggcaagggcctggcacagaggtctgcgacaagccaagctaggccatggcttccatccacacccctctgcacctaaatgcattgatcctacaatgaagagctggcaaggtcatcctggttttgctccattttctctgtggcattgtcatttgaggtgctgctcatggtaggtggtggggttcaccttcttccatgctgagctaggctggacacattccagccgacagcaggacaaagagggtgatgtgaccacctatgaggggctcagccccatgctctgtgatcacggcctggggactttggcacctgaggtgctggatggtgtcactactgggcacagttttccctgcatcagcagcaataggggaatacgtgcacacaggaaggctcaggttccccaaactcatatagcatctggactaaaaggaaggatttgtacagggctctagaggttaactgtcagttatgtagttgctccactttagaacaatgactttggacactttagggcatagccaaagagcaaagcagttactttgtggctgttctgcctgctcctcactcttggccatcagtaagtctggcttaggatggagaaatccaagggtctcctctggctgagggaggcaggtccagaaagccacayaccagcagtaccagttcactacatcagctccttagtccacaaaaaggtccacaggatggacagggacagaggccaacagccaccccgccaccagagcagggccattcctctgacatctaagagtcacatccatatgactactgcaacctgtggctcaaagtcagctgaaaaatggttatacacattaagttagagccattttgtgaaaactaattcagttttcttcccgttgcttggtacatacacactattcagtgaaatattagcttttattcaaggcatgacataggaattccttcaaaattaatattttatgctatactttgtatcagtttatactgaaatatttatcaacatgtcctgtgactgcctgtgcaggaatttattcaaatttattccattttgctgtttgttgtatactgattttcactga

SEQ ID NO: 675610 - DNA, 578 bp, Homo sapiens
  misc_feature 2, 3, 4, 5, 6, 7, 8, 9, 10, 11, 12, 13, 14, 15, 16, 17, 18,19, 20, 21, 22, 23, 24, 25, 26, 27, 28, 29, 30, 31, 32,33, 34, 35, 36, 37, 38, 39, 40, 41, 42, 43, 44, 45, 46,47, 48, 49, 50, 51, 52, 53, 54, 55, 56, 57, 58, 59, 60,61: n = A,T,C or G
  misc_feature 62, 63, 64, 65, 66, 67, 68, 69, 70, 71, 72, 73, 74, 75, 76,77, 78, 79, 80, 81, 82, 83, 84, 85, 86, 87, 88, 89, 90,91, 92, 93, 94, 95, 96, 97, 98, 99, 100, 101: n = A,T,C or G
annnnnnnnnnnnnnnnnnnnnnnnnnnnnnnnnnnnnnnnnnnnnnnnnnnnnnnnnnnnnnnnnnnnnnnnnnnnnnnnnnnnnnnnnnnnnnnnnnnntaattatagtgaatgtctatcatcaaaaataatgacagaagcagcaagtaagtgcataggcccccagtgtgcctgatgagaacagagggcaagtgtggacagatagaacggagtgagcctaagggagaatagacactcagtgaggtcacttagggactgggtatgagggctaagcttggaacatctcaagactagattttagtaatttgaggagaaatgaggaaacatatgaagaatgaatcttcagaagtacaaaagaaaatcaagcgattgtggaatctcaaatgccatgttaaaaagatattctgagaaagaaaaagtgatcatttgstatcttttcccaaaatagtggatttttgtttttcattaggaatggggactacactttcacattcaagattttagtaaggtacaatgaagaagaaacaatatgagttcttatgatgtttttgcatggcagaaacatctggataatat

SEQ ID NO: 675611 - DNA, 666 bp, Homo sapiens
agattcatagcatctgttgttactattgtattttgtctaagtcttatactataactcaaaacttgctggtttcttttttataaacttttgttatcttcctcgctctgcaaaagggtaactgcttccttcctcttttgtgctactcttttaccttatgtgaatagtatagtaattctaatgtgtctggaattggtgggttcttggtctcactgacttcaagaacgaaaccatggaccctcgtggtgagtgttacagttcttgaaggcggcgtgtccsgagtttttccttctgatgttcagatgtgtttggagtttcttccttctggtgggttcgtggtctcgctggcttaggagcgaagtctgctagaccttggcggtgagtgttaaagttcataaaagcagtgtggacccaaagagtgagcagcagcaagatttattgcaaagagcaaaagaacaaagcttccaaagtgtggaagggggcccgaccgggttgctactgctggctcgggcagcctgcttttattctcttatctggccccacccacgtcctgctgattggtagagccgagtggtctgttttgacagggcactgattggtgcgtttataatccctgagctagacataaaggttctccaaggccccatcagattagtgagatacagagta

SEQ ID NO: 675612 - DNA, 1013 bp, Homo sapiens
  misc_feature 2, 3, 4, 5, 6, 7, 8, 9, 10, 11, 12, 13, 14, 15, 16, 17, 18,19, 20, 21, 22, 23, 24, 25, 26, 27, 28, 29, 30, 31, 32,33, 34, 35, 36, 37, 38, 39, 40, 41, 42, 43, 44, 45, 46,47, 48, 49, 50, 51, 52, 53, 54, 55, 56, 57, 58, 59, 60,61: n = A,T,C or G
  misc_feature 62, 63, 64, 65, 66, 67, 68, 69, 70, 71, 72, 73, 74, 75, 76,77, 78, 79, 80, 81, 82, 83, 84, 85, 86, 87, 88, 89, 90,91, 92, 93, 94, 95, 96, 97, 98, 99, 100, 101: n = A,T,C or G
gnnnnnnnnnnnnnnnnnnnnnnnnnnnnnnnnnnnnnnnnnnnnnnnnnnnnnnnnnnnnnnnnnnnnnnnnnnnnnnnnnnnnnnnnnnnnnnnnnnnnattttgaaactgaagttgcatgtgagacagtgaatttaataaacttttatacataatagaaataatgttacttatgtggccatttttaatggggcagaatgtctccctgaagaaataaagctatttaaaactttacagggaaaatgacaaggcctttttatataaaaagtaggttcagatttcacttggatatttagcagcagaaagaaaggtgatgttactataaactgaattagcagtatacaaagctccttacgttccacagacctgtagtttgcctattagagctactaatgatcttgatggatgttacaactgttaatattcttaccttttatttcctacctccttttgtagcrctgtaataaatccttacaactgaggtaagttaaatggccctttttttttatctgaaagttatggaatttattatatgtatctattgtatataaaaaataaaaagaactagaaactctggtacctagataattatagcattgttagatggtaatgacaattttccattattccagtgtatttattattatatttatcctagtcctaagggattaagttaatttattatttatatctaaaatttctccactttgatctattttcccacagggtttgtaagcactccagtaatgttgacaatgagagggataatattatcaatgtaagcaatgctttccagattaaaagaagaaaattatattttgattaccaaagaaaacatgattttgttttaagaatttttcaattatgctataaataattatattatttctaaaataacaacattgaatctgaaaataagattaattataatttgaaattagtttttaatgagcattcgaaatgatttcaacacaagaaaagcatgtcaaataaaccaatatagtacatttt

SEQ ID NO: 675613 - DNA, 1013 bp, Homo sapiens
  misc_feature 2, 3, 4, 5, 6, 7, 8, 9, 10, 11, 12, 13, 14, 15, 16, 17, 18,19, 20, 21, 22, 23, 24, 25, 26, 27, 28, 29, 30, 31, 32,33, 34, 35, 36, 37, 38, 39, 40, 41, 42, 43, 44, 45, 46,47, 48, 49, 50, 51, 52, 53, 54, 55, 56, 57, 58, 59, 60,61: n = A,T,C or G
  misc_feature 62, 63, 64, 65, 66, 67, 68, 69, 70, 71, 72, 73, 74, 75, 76,77, 78, 79, 80, 81, 82, 83, 84, 85, 86, 87, 88, 89, 90,91, 92, 93, 94, 95, 96, 97, 98, 99, 100, 101: n = A,T,C or G
gnnnnnnnnnnnnnnnnnnnnnnnnnnnnnnnnnnnnnnnnnnnnnnnnnnnnnnnnnnnnnnnnnnnnnnnnnnnnnnnnnnnnnnnnnnnnnnnnnnnnattttgaaactgaagttgcatgtgagacagtgaatttaataaacttttatacataatagaaataatgttacttatgtggccatttttaatggggcagaatgtctccctgaagaaataaagctatttaaaactttacagggaaaatgacaaggcctttttatataaaaagtaggttcagatttcacttggatatttagcagcagaaagaaaggtgatgttactataaactgaattagcagtatacaaagctccttacgttccacagacctgtagtttgcctattagagctactaatgatcttgatggatgttacaactgttaatattcttaccttttatttcctacctccttttgtagcgctgtaataaatccttacaactgaggtaagttaaatggccctttttttttatytgaaagttatggaatttattatatgtatctattgtatataaaaaataaaaagaactagaaactctggtacctagataattatagcattgttagatggtaatgacaattttccattattccagtgtatttattattatatttatcctagtcctaagggattaagttaatttattatttatatctaaaatttctccactttgatctattttcccacagggtttgtaagcactccagtaatgttgacaatgagagggataatattatcaatgtaagcaatgctttccagattaaaagaagaaaattatattttgattaccaaagaaaacatgattttgttttaagaatttttcaattatgctataaataattatattatttctaaaataacaacattgaatctgaaaataagattaattataatttgaaattagtttttaatgagcattcgaaatgatttcaacacaagaaaagcatgtcaaataaaccaatatagtacatttt

SEQ ID NO: 675614 - DNA, 1013 bp, Homo sapiens
  misc_feature 2, 3, 4, 5, 6, 7, 8, 9, 10, 11, 12, 13, 14, 15, 16, 17, 18,19, 20, 21, 22, 23, 24, 25, 26, 27, 28, 29, 30, 31, 32,33, 34, 35, 36, 37, 38, 39, 40, 41, 42, 43, 44, 45, 46,47, 48, 49, 50, 51, 52, 53, 54, 55, 56, 57, 58, 59, 60,61: n = A,T,C or G
  misc_feature 62, 63, 64, 65, 66, 67, 68, 69, 70, 71, 72, 73, 74, 75, 76,77, 78, 79, 80, 81, 82, 83, 84, 85, 86, 87, 88, 89, 90,91, 92, 93, 94, 95, 96, 97, 98, 99, 100, 101: n = A,T,C or G
gnnnnnnnnnnnnnnnnnnnnnnnnnnnnnnnnnnnnnnnnnnnnnnnnnnnnnnnnnnnnnnnnnnnnnnnnnnnnnnnnnnnnnnnnnnnnnnnnnnnnattttgaaactgaagttgcatgtgagacagtgaatttaataaacttttatacataatagaaataatgttacttatgtggccatttttaatggggcagaatgtctccctgaagaaataaagctatttaaaactttacagggaaaatgacaaggcctttttatataaaaagtaggttcagatttcacttggatatttagcagcagaaagaaaggtgatgttactataaactgaattagcagtatacaaagctccttacgttccacagacctgtagtttgcctattagagctactaatgatcttgatggatgttacaactgttaatattcttaccttttatttcctacctccttttgtagcgctgtaataaatccttacaactgaggtaagttaaatggccctttttttttatctgaaagttatggaatttattatatgtatctattgtatataaaaaataaaaagaactagaaactctggtacctagataattatagcattgttagatggtaatgacaattttccattattccagtgtatttattattatatttatcctagtcctaagggattaagttaatttattatttatatctaaaatttctccactttgatctattttcccacagggtttgtaagcactccagtaatgttgayaatgagagggataatattatcaatgtaagcaatgctttccagattaaaagaagaaaattatattttgattaccaaagaaaacatgattttgttttaagaatttttcaattatgctataaataattatattatttctaaaataacaacattgaatctgaaaataagattaattataatttgaaattagtttttaatgagcattcgaaatgatttcaacacaagaaaagcatgtcaaataaaccaatatagtacatttt

SEQ ID NO: 675615 - DNA, 1976 bp, Homo sapiens
aacttttcagaacaaaatacataaagggctcaatgcctaaaatgattgaaattgtcatatatacaaaaataaaacagtctttcagtagtaattggataataaatatgtattgatatttattctaattagagtttattctaatagacttaagaactctctttaattatattttaacaaaaacattacttttatctgattaaaattatctgcctataaaattatagaaacataatgttaaactttactgacctccacatttatgccctcaggggaaataactgttaatttgttaatggttaggtaatatggtactttgtgttgatttgattatgaagtgatatgtataaatacatccccctataatatgtgaatgcatctttttgttaaagatgtaaataaatacaaatgcatatagaataaactaaaatggagtcagtattagacctttttcatataaaygcttacatatttacattgatgacagctcctcaaaagatataacagatgttagtttatccaacagctgctaactatgctaaagtctgcacattttcagaaagagtcaagtttagattactgatgctattgtaatgatttcagaaagggaagttagtctagagaaatttagagacatttaatgagtttatttgaactgaatgcaggttagaatgataatgcttacttataacgcatgaacatccaccataattttctaatataccatatacattagaaccaagtattacacaagagaaccatatttttctgcgttgtggtcaagtcttgcctcatcatcttctgatacaatggctgtatcagtggaataaatcctgttcagttaatctaaattggaatacagattagaacatctggcattttaagaagtgagtctgaatgtgtcacctggttctttccatattgatattccatgcattaggcatcttataaactttggactgcagcttctttacgtaacccttaatgactgtgacctgtttgtctgctgagtctttgaactcatcctgttcctagttcctcttttggagtatttctgggcctgattctggaatctgagctctagccaagtgaacatggataaaacattctctcctgttccccaaggctttttcctctcaactgtagctataacacagaccctttcaagaactagggatattctgtagacactctctgggtgaaactaacatttttatatttattaatatatcagggtttaataataaaagaatttgaattagtcatagtgggacaatcaggacactttaaagatcttatcacgtttaagttttgttactgttacaattttaaattacataaggagagaggtatgtgtggcagtggaagtgggggaaaacagtattttcagtgttttggccccagccttgtaagttcctgactatagctaatgcctttgtccttctcttcttataaaatcccttgagaatagccctgatcagattcaggattacttatccctcttgtatgtgaacactgactctttaggtagataatcgtataatcctgatgagctttttaaatccccctagattgtttgtgcactttctttctctctggcctagacattccaaacagccttgtagccatggctctcctgtcattacattatgacagttattataaaagctgagaatataaaagtggttattaattataaacctgtaaatatatagatgaatcctctgtaggaggcatcatgagaagaatatagcaacataccgtgtaaatcattctatttcagattcttaaggcacatcacaaaagtccaaagaattgtcccttggggcgtgacttctggagttaaggaaacaactctgtaattcttgaagaatcaaagatcaagtgccatcatctaatatttattaggtgagggcaatgaaaaatgaaaataatttaatacatgggttacacaaacaagttgacctgcaaacattata

SEQ ID NO: 675616 - DNA, 1976 bp, Homo sapiens
aacttttcagaacaaaatacataaagggctcaatgcctaaaatgattgaaattgtcatatatacaaaaataaaacagtctttcagtagtaattggataataaatatgtattgatatttattctaattagagtttattctaatagacttaagaactctctttaattatattttaacaaaaacattacttttatctgattaaaattatctgcctataaaattatagaaacataatgttaaactttactgacctccacatttatgccctcaggggaaataactgttaatttgttaatggttaggtaatatggtactttgtgttgatttgattatgaagtgatatgtataaatacatccccctataatatgtgaatgcatctttttgttaaagatgtaaataaatacaaatgcatatagaataaactaaaatggagtcagtattagacctttttcatataaatgsttacatatttacattgatgacagctcctcaaaagatataacagatgttagtttatccaacagctgctaactatgctaaagtctgcacattttcagaaagagtcaagtttagattactgatgctattgtaatgatttcagaaagggaagttagtctagagaaatttagagacatttaatgagtttatttgaactgaatgcaggttagaatgataatgcttacttataacgcatgaacatccaccataattttctaatataccatatacattagaaccaagtattacacaagagaaccatatttttctgcgttgtggtcaagtcttgcctcatcatcttctgatacaatggctgtatcagtggaataaatcctgttcagttaatctaaattggaatacagattagaacatctggcattttaagaagtgagtctgaatgtgtcacctggttctttccatattgatattccatgcattaggcatcttataaactttggactgcagcttctttacgtaacccttaatgactgtgacctgtttgtctgctgagtctttgaactcatcctgttcctagttcctcttttggagtatttctgggcctgattctggaatctgagctctagccaagtgaacatggataaaacattctctcctgttccccaaggctttttcctctcaactgtagctataacacagaccctttcaagaactagggatattctgtagacactctctgggtgaaactaacatttttatatttattaatatatcagggtttaataataaaagaatttgaattagtcatagtgggacaatcaggacactttaaagatcttatcacgtttaagttttgttactgttacaattttaaattacataaggagagaggtatgtgtggcagtggaagtgggggaaaacagtattttcagtgttttggccccagccttgtaagttcctgactatagctaatgcctttgtccttctcttcttataaaatcccttgagaatagccctgatcagattcaggattacttatccctcttgtatgtgaacactgactctttaggtagataatcgtataatcctgatgagctttttaaatccccctagattgtttgtgcactttctttctctctggcctagacattccaaacagccttgtagccatggctctcctgtcattacattatgacagttattataaaagctgagaatataaaagtggttattaattataaacctgtaaatatatagatgaatcctctgtaggaggcatcatgagaagaatatagcaacataccgtgtaaatcattctatttcagattcttaaggcacatcacaaaagtccaaagaattgtcccttggggcgtgacttctggagttaaggaaacaactctgtaattcttgaagaatcaaagatcaagtgccatcatctaatatttattaggtgagggcaatgaaaaatgaaaataatttaatacatgggttacacaaacaagttgacctgcaaacattata

SEQ ID NO: 675617 - DNA, 1976 bp, Homo sapiens
aacttttcagaacaaaatacataaagggctcaatgcctaaaatgattgaaattgtcatatatacaaaaataaaacagtctttcagtagtaattggataataaatatgtattgatatttattctaattagagtttattctaatagacttaagaactctctttaattatattttaacaaaaacattacttttatctgattaaaattatctgcctataaaattatagaaacataatgttaaactttactgacctccacatttatgccctcaggggaaataactgttaatttgttaatggttaggtaatatggtactttgtgttgatttgattatgaagtgatatgtataaatacatccccctataatatgtgaatgcatctttttgttaaagatgtaaataaatacaaatgcatatagaataaactaaaatggagtcagtattagacctttttcatataaatgcttacatatttacattgatgacagctcctcaaaagatataacagatgttagtttatccaacagctgctaactatgctaaagtctgcacattttcagaaagagtcaagtttagattactgatgctattgtaatgatttcagaaagggaagttagtctagagaaatttagagacatttaatgagtttatttgaactgaatgcaggttagaatgataatgcttacttataacgcatgaacatccaccataattttctaatataccatatacattagaaccaagtattayacaagagaaccatatttttctgcgttgtggtcaagtcttgcctcatcatcttctgatacaatggctgtatcagtggaataaatcctgttcagttaatctaaattggaatacagattagaacatctggcattttaagaagtgagtctgaatgtgtcacctggttctttccatattgatattccatgcattaggcatcttataaactttggactgcagcttctttacgtaacccttaatgactgtgacctgtttgtctgctgagtctttgaactcatcctgttcctagttcctcttttggagtatttctgggcctgattctggaatctgagctctagccaagtgaacatggataaaacattctctcctgttccccaaggctttttcctctcaactgtagctataacacagaccctttcaagaactagggatattctgtagacactctctgggtgaaactaacatttttatatttattaatatatcagggtttaataataaaagaatttgaattagtcatagtgggacaatcaggacactttaaagatcttatcacgtttaagttttgttactgttacaattttaaattacataaggagagaggtatgtgtggcagtggaagtgggggaaaacagtattttcagtgttttggccccagccttgtaagttcctgactatagctaatgcctttgtccttctcttcttataaaatcccttgagaatagccctgatcagattcaggattacttatccctcttgtatgtgaacactgactctttaggtagataatcgtataatcctgatgagctttttaaatccccctagattgtttgtgcactttctttctctctggcctagacattccaaacagccttgtagccatggctctcctgtcattacattatgacagttattataaaagctgagaatataaaagtggttattaattataaacctgtaaatatatagatgaatcctctgtaggaggcatcatgagaagaatatagcaacataccgtgtaaatcattctatttcagattcttaaggcacatcacaaaagtccaaagaattgtcccttggggcgtgacttctggagttaaggaaacaactctgtaattcttgaagaatcaaagatcaagtgccatcatctaatatttattaggtgagggcaatgaaaaatgaaaataatttaatacatgggttacacaaacaagttgacctgcaaacattata

SEQ ID NO: 675618 - DNA, 509 bp, Homo sapiens
gttagaataaatgcatgcatgcaggaactatctaaagattagatcccaggttaaagaaatgaaatacatttgtctttttccaaattcattaatttgtttattaagtcattccatacattttattaaatgctagtcactgttgtaggcatttggaatgaagtgatgacccagaaaacgaagacttttctgtgctctcattggagcttctagtctcatggaagagattgccaataattagataatcttataaataatacaaaattcatcactgggtcaagtgactacaaatggtataaaaccagataggmggatctgaaatagctacggagatcaggaaagtcttctctaagaagtgatgcataggttaggtttgaaaaggaatagcacaggcattaactaggtaaagaggagaaatgatattccaggtagaggtaactgcatgtacaaagaccatacggcaagagaaagcaaagagtgtagagattaaaagaaaactaacggaccattgt

SEQ ID NO: 675619 - DNA, 602 bp, Homo sapiens
tttcattttaaaatgtactttttatttatttttatttttgagatggtttctcactctgtcacccagactggagtgcagtggcrcaatctcagctcactgcaacctcttcctcccggcacaagtgatccttccacctcagcctcctgtgtatctgggaccatggcatcgcaccaccatacatggctaattttttgtatttgtggtagagatgggtctcactgtgttgccctggctggtcttgaactactggtctcaagcagtccacttgcctaggcctcccaaaatgttgggattataggcatgagccactgcacctggtctaaaatgtacttttttagaaaaagaaacgtctttttaaaaaactaagcatactgcttaattcctctagattcttgctcttgtcttgaggactttgcatcctctgaactcaacttgtggtcagattctccggatgtttcttatcctcgaaagtttaactcaacctctttctcccagtaagcctctgaggtcccagcagcctctttctcaggtcccgctgcccttctgttctggcatgtgcctaacctgacagttgctgccttgctcctgaaatttgtcattcc

SEQ ID NO: 675620 - DNA, 729 bp, Homo sapiens
ttttaaaataatttcagatgtggaacagtgctataatataaaaatacaaaagagaaggataaaagtaggctatggaagaaaagagcctttaaaaggtgaactctggcaaagaaattaagaaactactttacatcagaggcaaaggaatgccttaagaagggaaaagaaactgtgaggaaaatgcaattttctctgccagaaagaacttactttgaatgaaatcacattggtttcactaagattatgtmatttcagtggatttcacagcattgcttgtagccatgctaacttgctcagtagacaaagaaaatattaaaagtaaaggcaaagtaagaagtaatctgtgtttattgagcttacttaataatttgaagataataactaaaaattagtgaagtctagttgctgcttttcttagaaagcctctgtaatcacttgaactaaatgttcagaacaaccagataaaaataatttatagaagaaagcagaagaaattaagaatctcataactccagcaatgctctcccagatgcacaagaaaatggttcaatttcctcaaccttcactctcagcacaatcctagccccacacctaacttctctctcacaggctaacttctgactacaattccattgtctgcttggcttttcagctaccacagagctagtttataaagtgagggtgttgagaattagctggagaggaaggatgcccctactctagatacca

SEQ ID NO: 675621 - DNA, 729 bp, Homo sapiens
ttttaaaataatttcagatgtggaacagtgctataatataaaaatacaaaagagaaggataaaagtaggctatggaagaaaagagcctttaaaaggtgaactctggcaaagaaattaagaaactactttacatcagaggcaaaggaatgccttaagaagggaaaagaaactgtgaggaaaatgcaattttctctgccagaaagaacttactttgaatgaaatcacattggtttcactaagattatgtcatttcagtggatttcacagcattgcttgtagccatgctaacttgctcagyagacaaagaaaatattaaaagtaaaggcaaagtaagaagtaatctgtgtttattgagcttacttaataatttgaagataataactaaaaattagtgaagtctagttgctgcttttcttagaaagcctctgtaatcacttgaactaaatgttcagaacaaccagataaaaataatttatagaagaaagcagaagaaattaagaatctcataactccagcaatgctctcccagatgcacaagaaaatggttcaatttcctcaaccttcactctcagcacaatcctagccccacacctaacttctctctcacaggctaacttctgactacaattccattgtctgcttggcttttcagctaccacagagctagtttataaagtgagggtgttgagaattagctggagaggaaggatgcccctactctagatacca

SEQ ID NO: 675622 - DNA, 1410 bp, Homo sapiens
gggtccgggaagaagagagacaaagagagacaaggatgcaagttcagctggacactagcttcaggctgagcctgtgagggattctggggcctgaatggtagcccacagacattccagctctaggtgaggcagctggaatttcgttctgcatatcagccattggctgcagttgtgggctgctcctgagtcaggaataaccatccaagaatgtttaagctaagtggttcccactggtgaataagagatctccagagatgagtaccgctcacagccataagtccttaccagtcaacactgtaagcaactggaggatggatataccagtccaggaagggcgaattggggtaggaaaccaggagctctcattacattcagcatgcttagtggggattcagcactatctrcttcatagtgagaccttctttaaagactcccagacaaatagagtacataattaatttacatcatgtggtttaaaaggcacactatccatctcaggaggctggatattccacaacttgtgtttctttgggttaaatattgctctcttcaaataaccctcacacataatggaaattaagaggtaacatgagatcctccagaatgagaattagcttctcagagacagaaaggtcttacagcagtggaagagcattggctgggggggatgaacaagagagaagcacagcatcaaggttgggggtatgggcacccaagatactctcacttcatttttccaatttgctcaaggctggtactgactacatcagctactccaccctcaacactggcagactcagtgggtagcttacaccactacctacccaggctgactacagctgcaatgtgagcagagcccttcataaaattaatcacatcagcgaggctgagaaacaaagaacatgggacaaaagagaagcaacagaatacagctgtttcataccttaagatgcaaaactgcctgtacctggaacaaactcccagaggactcacagggaaaggaaacgattcaaagtcttggctgggggagctggggaagtgggggaaagagagccgaggatattgataatgaaagtaatttcagactatttcaaaataaatgggaagtcagctttgttttggggaaaggatttattcaggaatcacagagtttcttacaaattatgattttaaaaaaacaagctttgagaaaattcacaattaatgaagaaagggagaacattgcactgtcagagtggcaaactactgctctctgaactttgagcttcagctgttagatcagtttgcaagtagcaaaagccagctggttaagaatcctacagtgaaataggtgcagagagggaaagcaaggctataaccttgcacattcatgaatgatttatttggtggaaagccaagtccacttgggaa

SEQ ID NO: 675623 - DNA, 1410 bp, Homo sapiens
gggtccgggaagaagagagacaaagagagacaaggatgcaagttcagctggacactagcttcaggctgagcctgtgagggattctggggcctgaatggtagcccacagacattccagctctaggtgaggcagctggaatttcgttctgcatatcagccattggctgcagttgtgggctgctcctgagtcaggaataaccatccaagaatgtttaagctaagtggttcccactggtgaataagagatctccagagatgagtaccgctcacagccataagtccttaccagtcaacactgtaagcaactggaggatggatataccagtccaggaagggcgaattggggtaggaaaccaggagctctcattacattcagcatgcttagtggggattcagcactatctacttcatagtgagaccttctttaaagactcccagacaaatagagtacataattaatttacatcatgtggtttaaaaggcacactatccatctcaggaggctggatattccacaacttgtgtttctttgggttaaatattgctctcttcaaataaccctcacacataatggaaattaagaggtaacatgagatcctccagaatgagaattagcttctcagagacagaaaggtcttacagcagtggaagagcattggctgggggggatgaacaagagagaagcacagcatcaaggttgggggtatgggcacccaagatactctcacttcatttttccaatttgctcaaggctggtactgactacatcagctactccaccctcaacactggcagactcagtgggtagcttacaccactacctacccaggctgactacagctgcamtgtgagcagagcccttcataaaattaatcacatcagcgaggctgagaaacaaagaacatgggacaaaagagaagcaacagaatacagctgtttcataccttaagatgcaaaactgcctgtacctggaacaaactcccagaggactcacagggaaaggaaacgattcaaagtcttggctgggggagctggggaagtgggggaaagagagccgaggatattgataatgaaagtaatttcagactatttcaaaataaatgggaagtcagctttgttttggggaaaggatttattcaggaatcacagagtttcttacaaattatgattttaaaaaaacaagctttgagaaaattcacaattaatgaagaaagggagaacattgcactgtcagagtggcaaactactgctctctgaactttgagcttcagctgttagatcagtttgcaagtagcaaaagccagctggttaagaatcctacagtgaaataggtgcagagagggaaagcaaggctataaccttgcacattcatgaatgatttatttggtggaaagccaagtccacttgggaa

SEQ ID NO: 675624 - DNA, 1703 bp, Homo sapiens
aagagcttgctggtaccaggtggcatttagagagtaaaatcttttcttagtcatcagaatatataagttcctcctactatggtgtaaaggcgagtttttaaagacaccacagtgcaaaaggactgccagggtgaaaagccgagagtgaaatggtttcttcagatgatttagcaaatctctagagaaggatttgtcttaagaactcattgcttaagttcagcatagcggcactcgtgttctaagagactaaactgcctcaaaagggagagaaaataattgtctagccagattgtatttgtaacctgtttatccagcagatattggatgaagttcagcacctctggtgtgtggcctgtgagtgtggttgtgagtgtgcacatgtgtccagcctagaagacgacggcctgtggattgatgacaagcgtttatatcagcctgaagagaacctccaaatctcattgctgtgtgatatgccacgttttgtcctttggtggcagacttggataacaacatcaattcatcattttatttgtctcctaacacaggtgggctgacctgcagctttatgatgtaaaagtttgtgtttgtatttgaaatattgaaaatgtatttgaatcataggcaaccacaacccaagaacatttttgttggcaaaatgatttaatatatgcataaaatatttaaaaattttatcaattctaaaaaatatatttttctttgggargccaaggcaggtggatcacctgaggttgggagtttgagaccagcctggccaacatggtgaaaccccgtctctcctaaaaatacaaaaaattggctgggcgtagtggcaggtgcctgtaatcccagctactcaggaggctgaggcaggagaattgcttgaacctgggaggtggaggttgtagtgagccaagatcgcaccactgcactctggcctgggtgacagagcaagacaacgtctcaaaaaaagaaaacaaaacaacaacaaaatatatatttttatatatatatatatttatgaaaacataatgaaataagaagacaaagctgcactcttcccctttcacttgctccctccttttgtgctacctattttgaccacatttcactcccacctatttcctatctttcctactacccttcctcccaaagaccttgggtagaagaaatctaatattttgaatcaaaatttcataacagatatcaccatctgttataaataaattaatgtgtcctaatgtcaggtaaagagtgttgaaaaaaaattccataaagataaatcagtatcattgtgacaagtcaatgtggcaaaatgtgtctttcatacagaagaacatgacctggttttcttttctctggggcaatatcggtgaaatcttttattcattttcttagttatttttgttttgtttgtgcacatttcagctccatgaagttatgcttattttaattgttttcattatttgtggaagcccggttgtattttgacaagcatggcttgccatctggcatacgtagaatctaatcttgtcttcaccatttactctctgtgtgacctggaggaaatcactgtggcagtttcctcatctgtaaaatgggcatagtcaagtttatctcctggggcttgaagtaacatatgtaaagtgccattgatttgcctttaacttcagttttgtttgtgtgccttaacttttatacaccta

SEQ ID NO: 675625 - DNA, 1703 bp, Homo sapiens
aagagcttgctggtaccaggtggcatttagagagtaaaatcttttcttagtcatcagaatatataagttcctcctactatggtgtaaaggcgagtttttaaagacaccacagtgcaaaaggactgccagggtgaaaagccgagagtgaaatggtttcttcagatgatttagcaaatctctagagaaggatttgtcttaagaactcattgcttaagttcagcatagcggcactcgtgttctaagagactaaactgcctcaaaagggagagaaaataattgtctagccagattgtatttgtaacctgtttatccagcagatattggatgaagttcagcacctctggtgtgtggcctgtgagtgtggttgtgagtgtgcacatgtgtccagcctagaagacgacggcctgtggattgatgacaagcgtttatatcagcctgaagagaacctccaaatctcattgctgtgtgatatgccacgttttgtcctttggtggcagacttggataacaacatcaattcatcattttatttgtctcctaacacaggtgggctgacctgcagctttatgatgtaaaagtttgtgtttgtatttgaaatattgaaaatgtatttgaatcataggcaaccacaacccaagaacatttttgttggcaaaatgatttaatatatgcataaaatatttaaaaattttatcaattctaaaaaatatatttttctttgggaagccaaggcaggtggatcacctgaggttgggagtttgagaccagcctggccaacatggtgaaaccccgtctctcctaaaaatacaaaaaattggctgggcgtagtggcaggtgcctgtaatcccagctactcaggaggctgaggcaggagaattgcttgaacctgggaggtggaggttgtagtgagccaagatcgcaccactgcactctggcctgggtgacagagcaagacaacgtctcaaaaaaagaaaacaaaacaacaacaaaatatatatttttatatatatatatatttatgaaaacataatgaaataagaagacaaagctgcactcttcccctttcacttgctccctccttttgtgctacctattttgaccacatttcactcccacctatttcctatctttcctactacccttcctcccaaagaccttgggtagaagaaatctaatattttgaatcaaaatttcataacagatrtcaccatctgttataaataaattaatgtgtcctaatgtcaggtaaagagtgttgaaaaaaaattccataaagataaatcagtatcattgtgacaagtcaatgtggcaaaatgtgtctttcatacagaagaacatgacctggttttcttttctctggggcaatatcggtgaaatcttttattcattttcttagttatttttgttttgtttgtgcacatttcagctccatgaagttatgcttattttaattgttttcattatttgtggaagcccggttgtattttgacaagcatggcttgccatctggcatacgtagaatctaatcttgtcttcaccatttactctctgtgtgacctggaggaaatcactgtggcagtttcctcatctgtaaaatgggcatagtcaagtttatctcctggggcttgaagtaacatatgtaaagtgccattgatttgcctttaacttcagttttgtttgtgtgccttaacttttatacaccta

SEQ ID NO: 675626 - DNA, 1703 bp, Homo sapiens
aagagcttgctggtaccaggtggcatttagagagtaaaatcttttcttagtcatcagaatatataagttcctcctactatggtgtaaaggcgagtttttaaagacaccacagtgcaaaaggactgccagggtgaaaagccgagagtgaaatggtttcttcagatgatttagcaaatctctagagaaggatttgtcttaagaactcattgcttaagttcagcatagcggcactcgtgttctaagagactaaactgcctcaaaagggagagaaaataattgtctagccagattgtatttgtaacctgtttatccagcagatattggatgaagttcagcacctctggtgtgtggcctgtgagtgtggttgtgagtgtgcacatgtgtccagcctagaagacgacggcctgtggattgatgacaagcgtttatatcagcctgaagagaacctccaaatctcattgctgtgtgatatgccacgttttgtcctttggtggcagacttggataacaacatcaattcatcattttatttgtctcctaacacaggtgggctgacctgcagctttatgatgtaaaagtttgtgtttgtatttgaaatattgaaaatgtatttgaatcataggcaaccacaacccaagaacatttttgttggcaaaatgatttaatatatgcataaaatatttaaaaattttatcaattctaaaaaatatatttttctttgggaagccaaggcaggtggatcacctgaggttgggagtttgagaccagcctggccaacatggtgaaaccccgtctctcctaaaaatacaaaaaattggctgggcgtagtggcaggtgcctgtaatcccagctactcaggaggctgaggcaggagaattgcttgaacctgggaggtggaggttgtagtgagccaagatcgcaccactgcactctggcctgggtgacagagcaagacaacgtctcaaaaaaagaaaacaaaacaacaacaaaatatatatttttatatatatatatatttatgaaaacataatgaaataagaagacaaagctgcactcttcccctttcacttgctccctccttttgtgctacctattttgaccacatttcactcccacctatttcctatctttcctactacccttcctcccaaagaccttgggtagaagaaatctaatattttgaatcaaaatttcataacagatatcaccatctgttataaataaattaatgtgtcctaatgtcaggtaaagagtgttgaaaaaaaattccataaagataaatcagtatcattgtgacaagtcaatgtggcaaaatgtgtctttcatacagaagaacatgacctggttttcttttctctggggcaatatcggtgaaatcttttattcattttcttagttatttttgttttgtttgtgcacatttcagctccatgaagttatgcttattttaattgttttcattatttgtggaagcccrgttgtattttgacaagcatggcttgccatctggcatacgtagaatctaatcttgtcttcaccatttactctctgtgtgacctggaggaaatcactgtggcagtttcctcatctgtaaaatgggcatagtcaagtttatctcctggggcttgaagtaacatatgtaaagtgccattgatttgcctttaacttcagttttgtttgtgtgccttaacttttatacaccta

SEQ ID NO: 675627 - DNA, 1137 bp, Homo sapiens
taagaccagaaacaaggcatacatgcccactctcatcacttctattcaatttagtgctggaagtcctagctaaagcaattaggcaagaaaaataaataaaagacgctcacgttgaaaacaaagggtaaaattgttgctgtttgcagatgacataatcttatacatagaaaaccctaaagactccatcawaaaactgttagaactaataaattcagtaaagttggaggatacaaaatcaacatacaaaaatcaatggcatttctataccaacgatgaactatcttaaacaaaaattaggaaaacaatgctatttgtaatagcagcaaaaaaaaaaaagaccctggaataaactaagaaagtgaaaggtctgcatactgaagactacagtactttgatctgttactgttccccaatatcataaaaacaaggcttagatactgtttactaaaggattttattatctcctatatttatagctgaaatcactttctctgttctgttccccttatttgtcactaaacaatgtagcatgaatctgttggaatgagcttccttgccttccagaccattcactttaaatatatcaatcctcaccccttaagtatagacatttattactacaccacagtgaacaaaaaacattaaatgtggaaaaggcttttaagtagatatttgttatttttgactccttgtatctcttttccttacaactattttttttcaactactttccccctatcccatgtggtgccatccagtcttcttatcaccatgcttttcatctcctgtttcctttctaggcacaggggtaacatgagaccacactggcaaatcagaatgctcattccgtttggccaccatgattgattttagaaatgaacttgaaactcaagctaagtccataagaattttccttaagatttgaatatggaggctgggagaaagatatttttctttctctaggatgacaacttataatatgcctgtaggctttgggatcacttttttatgacctttgggcttcttggatcagaatgttcattttcttcctcatatttgggaagtgttcagccattatttctttgaatacgttctcagttcttttctctctttatctgtgatgccaataatgagtat

SEQ ID NO: 675628 - DNA, 820 bp, Homo sapiens
atgaatatggcttctgtgacttgatttgatcctgactgcagtcttcattctcgaagctgacattagattaggatatggtgctgctttcattactggatctattatagaagcattcctgaggggctgctggctggcaggcatatcctgggaagatgctcaggcacctggcaagtccaggggttctggaaagatgctggggcaaggggcaggccacatgtggaggctggatcaggaaggaatttaagatttctgctcatctctggactgtcctccaccaattggggggagaaagctcggcctcttcaaggcctaaaaatgagtctttgatcatattgtccattcatctccagtcctctttcttcacccctcacaagatttcagagasgtggcttaaagacaaaagtgtcagagaggtcaaaggtggtttccttatgtgactcaagagccagggtcagaaagagctgcctgtgaacaatattccacttggaagttttctattaatgtaattactttcattttgatgtaaggaaccttttttctgcccttcagtttttttgacattaaagagtcctgcttcatcctacttcacatgcctatcagccaaggtcatgagcaggtgctgtgagttgcatttgctctcctgtctggaaactgcctcctggggatgggggtcgtccagctgcacagtcacagcacataacgtagaactcggctgcgtatcaacacaacattgcccattcatgaacggtccaaaatgtaaaaggtgctctgccgctgggtctcttgtccaagcacacccaaggctgtgcttgctcaggta

SEQ ID NO: 675629 - DNA, 820 bp, Homo sapiens
atgaatatggcttctgtgacttgatttgatcctgactgcagtcttcattctcgaagctgacattagattaggatatggtgctgctttcattactggatctattatagaagcattcctgaggggctgctggctggcaggcatatcctgggaagatgctcaggcacctggcaagtccaggggttctggaaagatgctggggcaaggggcaggccacatgtggaggctggatcaggaaggaatttaagatttctgctcatctctggactgtcctccaccaattggggggagaaagctcggcctcttcaaggcctaaaaatgagtctttgatcatattgtccattcatctccagtcctctttcttcacccctcacaagatttcagagacgtggcttaaagacaaaagtgtcagagaggtcaaaggtggtttccttatgtgactcaagagccagggtcagaaagagctgcctgtgaacaatattccacttggaagttttctattaatgtaattactttcattttgatgtaaggaaccttttttctgcccttcagtttttttgacattaaagagtcctgcttcatcctacttcacatgcctatcagccaaggtcatgagcaggtgctgtgagttgcatttgctctcctgtctggaaactgcctcctggggatgggggtcgtccagctgcacagtcacagcacataaygtagaactcggctgcgtatcaacacaacattgcccattcatgaacggtccaaaatgtaaaaggtgctctgccgctgggtctcttgtccaagcacacccaaggctgtgcttgctcaggta

SEQ ID NO: 675630 - DNA, 820 bp, Homo sapiens
atgaatatggcttctgtgacttgatttgatcctgactgcagtcttcattctcgaagctgacattagattaggatatggtgctgctttcattactggatctattatagaagcattcctgaggggctgctggctggcaggcatatcctgggaagatgctcaggcacctggcaagtccaggggttctggaaagatgctggggcaaggggcaggccacatgtggaggctggatcaggaaggaatttaagatttctgctcatctctggactgtcctccaccaattggggggagaaagctcggcctcttcaaggcctaaaaatgagtctttgatcatattgtccattcatctccagtcctctttcttcacccctcacaagatttcagagacgtggcttaaagacaaaagtgtcagagaggtcaaaggtggtttccttatgtgactcaagagccagggtcagaaagagctgcctgtgaacaatattccacttggaagttttctattaatgtaattactttcattttgatgtaaggaaccttttttctgcccttcagtttttttgacattaaagagtcctgcttcatcctacttcacatgcctatcagccaaggtcatgagcaggtgctgtgagttgcatttgctctcctgtctggaaactgcctcctggggatgggggtcgtccagctgcacagtcacagcacataacgtagaactcggctgcgtatcaacacaacattgcccattcatgaacrgtccaaaatgtaaaaggtgctctgccgctgggtctcttgtccaagcacacccaaggctgtgcttgctcaggta

SEQ ID NO: 675631 - DNA, 665 bp, Homo sapiens
gagtgttcagaaaagatacttgttttcttttgaaagataactaactatattttaacagcaaatgttttggtaatctagctggaaatttagattttattaccaaatggaaaggtgtatgtgttatccctttccayaaaacaaagcaataagggtagctgcctatttctcttattggtaaatttgttcaaggaaactggagacaaccagctgtagagattcgtctgcatcataaatacaaacgaaagtctcaggataagcaaggggttctccttctacttctgccctctcagattaagctagtatgttgtcacgagtgtaatcagtgatgccgtttactacttataacaaaaaaatctgtggccactaatggaaagtgttctttaatttgccatgattaactttagaaaattaatcttaaaataggaagatataactgtgaattaaaataatgttgtttatggatgattacttcttgcaagctaaaaatcttcatatttctcctcaaagcttgtagttcaatgctagtttttatcctgggagaatggaaacaacaggagcaattatataactgtctggatcaatacaaatagtcaacaccatataattcatccaaaaataaacagaatttttaagccaattgctcctcaaatacaatgagattttca

SEQ ID NO: 675632 - DNA, 541 bp, Homo sapiens
tgatataactcccatctctgatgcatagcgtcaatakgtagtgcctaattaggtattctcaatgaaattatttctataaagtgtattttatagaatgcacagtgaaatttttgaagcctccgtggattatttcagattacccttggacttcttgttgcaagccaaatttccaagcaagaatcatgaaatgctgaatgctttagcaaaatgaactttgccccatgaaagatggtgttacgtatgctataattcttacagagataccgcatttgagagcatttcaggagataatgaagaaagtatgccttgggatacaacatttattccttttccagtagtgacctttatagtgtattttaggcatgaccactgccttttgatactgctcagtgttgcatacagatacctttccctgcaccgtattctgaacagggagatgtaaggaatattcaatgttagctcataaacatggactatatggtgtaaaacatggtggaataaattactggtgatcatggtcacttttatttttgaagaggct

SEQ ID NO: 675633 - DNA, 541 bp, Homo sapiens
tgatataactcccatctctgatgcatagcgtcaatatgtagtgcctaattaggtattctcaatgaaattattwctataaagtgtattttatagaatgcacagtgaaatttttgaagcctccgtggattatttcagattacccttggacttcttgttgcaagccaaatttccaagcaagaatcatgaaatgctgaatgctttagcaaaatgaactttgccccatgaaagatggtgttacgtatgctataattcttacagagataccgcatttgagagcatttcaggagataatgaagaaagtatgccttgggatacaacatttattccttttccagtagtgacctttatagtgtattttaggcatgaccactgccttttgatactgctcagtgttgcatacagatacctttccctgcaccgtattctgaacagggagatgtaaggaatattcaatgttagctcataaacatggactatatggtgtaaaacatggtggaataaattactggtgatcatggtcacttttatttttgaagaggct

SEQ ID NO: 675634 - DNA, 1032 bp, Homo sapiens
tgtttaaatagtccctggataggtcaaattatccccatgtcctttgtaaaaaaaaaagaaaaattcactttcagtatcataaaaaaatattctttgaggaaggcctggcattggagggaagtgactggaaaaatgcaacagaatgtatctgtcgagagaaaaaggaaacaaaaagagtagtgggaccaagggagtgcttgctgagcacagctttcaatggcttcattttaaaaccacgagagaaaactgggaatcagatttctaaacacttaagtgacccaacaagattatattgtagatgtaaatatcacattatttttccccttttttacccttcgtttttgtctaagctatttttccacaactgtaattttcaatctaaaattctttgaaatttctgtcatagcactgctttgatataaatgatacaactaagagatacccagtaatttctatcccatcttagtctctgtgattcaaaatgatttgattttcctctaagcagtggatttaaactattttttaaaattaaatgctgcttcaaagaaatgaaaagacaaaatctattttctaatcttttctaaaataagttcagactaatttctgtacaagctcattctatacctgaaaatggcagataggacaactggattcctaactatatgtattcaaaaataacaatgttttmaaaaaaactgtacatatgtaaaattaaataaaaatgtatatattcagaggcagggtatatgaaacctaaagaagcaatttaaatatgcatgtatagtcgtatcttgattttaattttctggtaaattaaggagcccactcatgcatggaagactgtgttatctatcactgcaactatccacagccctggcttgcctcatttagctttgtcttctgctttgtttacattcttatttcttaaagaatcacactcatagctctaatttctcagaaactgtggtaaaactctattccctaattttcttcttcagcactccctccccaaaagcccatgagcactttatt

SEQ ID NO: 675635 - DNA, 1203 bp, Homo sapiens
tgggaagagagaaagagatccagaacaaaggaaaggaatgcctactgcgcatcagaaaagattcaggctctctaagctcagatttcctctactgcaacacaacctactacctgggcaggcatgcacctaggcttttctgtatcccctcatgatatttacggattagagggattcacagaaatatacctttgcctctgttccagcagtctcatgttttctgtcagcatttatataactgaggcaggttaacttgctaacttacaagcaaggtaaatctcagatcattctcatttttctgacactttctagataaataaaccaacatagaggcttctagaaagatgtgcaaagaaagaagtttgtggcaataatttttttgacatctgtatcaaattgtgccttaattcagatatctctgtcttactcagttaaatgagccaccacattttccttaagttttcttaaattatgtttccatcacttgcaaccaaaaaaaatcccaatttatcccaatatttgagaacaatctaaaaatttaacttaattcgatgcagaaatgggactactgaaagattagattagatatggatttctagcatagctgtgaatttaactggaagcgaatgaaaacaataggatttttccattagactacaatattttacacacatttaattgttgagtattaatatggaatttcattccggtgcattgtatgcatgtactcaactagcaaaaaaaatatgtaggtctttaattgtcattagtttttagaagatgaaggacagatattatttacgataagcaaattaaaaccaagtgactttcctgaaacttcactgtggcttgaaagtaaaccatagtttacgtgattgtctttagggtctccacgtattcttttctgacacacttcatttcaaaatatctcatcaagataataaataaaaaagaaaaatacacactgattacataaaatataatttttgctacatacattgtaaataaaatagtagcctataaaattaagggtttcattttttcaagtaaggtacaaaatgtgatattatgaaaggaacattaagcttggaataattttacctgtgtttttgctacagtgctgtataaaacaaaaccactragtcttaaaatttcttgtgtaaatttggataattaatcctatcttcacagagtaactgagggtta

SEQ ID NO: 675636 - DNA, 1440 bp, Homo sapiens
ttttcctgtttgattttacacatcatcatatacacacatgggggtggaagggttgtgtttttctgccaaacactgtagcattaatcctatttcttttggtacgcctgccgagtacttctggtatcttaagtgtgcaaagtaattttgaaaagatcaaagcattttgccaggacaaaatcttttcttgcctcagaggaggatgtatttaaacccagagcaattattgatagaagtgagatggctccaaaagaaccctttgtcaaagtcttcactcttcctttctattggtagacttcagratgagacaaatgactatttccttctagtttgttttctcactgaacattgctagcaaggctgctcaaatgaactgggttgaaagagagagtcttcggatgaacgtgctgtatgtaatgacagagaatctgagtataaaatggaagcaattgcctgcataactcaaggcaaaactcacctttatctctattatctagatacttggagtaggagagaggcagtaaattaccaagataattgcattatttcttcaactcattgagccttcatactcaactacaaagagtttcttactttttttgcaaatatttcagtttctaaactaaattgaaataagtaacaaaaccaatgaaagcattatcattcaaataaagatttgatgacccaaagaaatgtattccttctatagcaaaatgatagtagttaacttttgcattactattatattacaatatcacttaattgatattcaaaaacacgcaaacccatgctactttcccataaactgaagtggaaaatgttgaaatggagaacaacaaccagaatgcgtaaataaagaatgaaaagttttgtcatgttctattagaggttttcatgttagcatcctattatattagtatttgttttcactaatatgatatgaaaattgctggaatgattacatagtcatatcttgttaggcaactcaaattctaaaattatatgattctaatataaaatgaaagaaaattgttaatattataaaaagtttctaatgtgatatgaaggcctatctggaaaaaaaacagtttaagttattttgatgtgatttcttggaaatagtttctttataggaaccaggtggtgacaaagaaagagaaattgggcttgagaacatcactgctgaactgcctatgtaaatggaaaatatttctctcaggtaagtaatacactgcatgaaattttttaaatccattctaaacaattatgaatattaattagcagagttgagatcttttttgtttagtgcaggcctagatagctgtagtcatttagatttttgtataaggagagacacttaataatgtttctttacataaattgctatcatgtgaaagttactattaattaattaaagtttctaaggaatgtgtaaacataact

SEQ ID NO: 675637 - DNA, 1440 bp, Homo sapiens
ttttcctgtttgattttacacatcatcatatacacacatgggggtggaagggttgtgtttttctgccaaacactgtagcattaatcctatttcttttggtacgcctgccgagtacttctggtatcttaagtgtgcaaagtaattttgaaaagatcaaagcattttgccaggacaaaatcttttcttgcctcagaggaggatgtatttaaacccagagcaattattgatagaagtgagatggctccaaaagaaccctttgtcaaagtcttcactcttcctttctattggtagacttcaggatgagacaaatgactatttccttctagtttgttttctcactgaacattgctagcaasgctgctcaaatgaactgggttgaaagagagagtcttcggatgaacgtgctgtatgtaatgacagagaatctgagtataaaatggaagcaattgcctgcataactcaaggcaaaactcacctttatctctattatctagatacttggagtaggagagaggcagtaaattaccaagataattgcattatttcttcaactcattgagccttcatactcaactacaaagagtttcttactttttttgcaaatatttcagtttctaaactaaattgaaataagtaacaaaaccaatgaaagcattatcattcaaataaagatttgatgacccaaagaaatgtattccttctatagcaaaatgatagtagttaacttttgcattactattatattacaatatcacttaattgatattcaaaaacacgcaaacccatgctactttcccataaactgaagtggaaaatgttgaaatggagaacaacaaccagaatgcgtaaataaagaatgaaaagttttgtcatgttctattagaggttttcatgttagcatcctattatattagtatttgttttcactaatatgatatgaaaattgctggaatgattacatagtcatatcttgttaggcaactcaaattctaaaattatatgattctaatataaaatgaaagaaaattgttaatattataaaaagtttctaatgtgatatgaaggcctatctggaaaaaaaacagtttaagttattttgatgtgatttcttggaaatagtttctttataggaaccaggtggtgacaaagaaagagaaattgggcttgagaacatcactgctgaactgcctatgtaaatggaaaatatttctctcaggtaagtaatacactgcatgaaattttttaaatccattctaaacaattatgaatattaattagcagagttgagatcttttttgtttagtgcaggcctagatagctgtagtcatttagatttttgtataaggagagacacttaataatgtttctttacataaattgctatcatgtgaaagttactattaattaattaaagtttctaaggaatgtgtaaacataact

SEQ ID NO: 675638 - DNA, 1440 bp, Homo sapiens
ttttcctgtttgattttacacatcatcatatacacacatgggggtggaagggttgtgtttttctgccaaacactgtagcattaatcctatttcttttggtacgcctgccgagtacttctggtatcttaagtgtgcaaagtaattttgaaaagatcaaagcattttgccaggacaaaatcttttcttgcctcagaggaggatgtatttaaacccagagcaattattgatagaagtgagatggctccaaaagaaccctttgtcaaagtcttcactcttcctttctattggtagacttcaggatgagacaaatgactatttccttctagtttgttttctcactgaacattgctagcaaggctgctcaaatgaactgggytgaaagagagagtcttcggatgaacgtgctgtatgtaatgacagagaatctgagtataaaatggaagcaattgcctgcataactcaaggcaaaactcacctttatctctattatctagatacttggagtaggagagaggcagtaaattaccaagataattgcattatttcttcaactcattgagccttcatactcaactacaaagagtttcttactttttttgcaaatatttcagtttctaaactaaattgaaataagtaacaaaaccaatgaaagcattatcattcaaataaagatttgatgacccaaagaaatgtattccttctatagcaaaatgatagtagttaacttttgcattactattatattacaatatcacttaattgatattcaaaaacacgcaaacccatgctactttcccataaactgaagtggaaaatgttgaaatggagaacaacaaccagaatgcgtaaataaagaatgaaaagttttgtcatgttctattagaggttttcatgttagcatcctattatattagtatttgttttcactaatatgatatgaaaattgctggaatgattacatagtcatatcttgttaggcaactcaaattctaaaattatatgattctaatataaaatgaaagaaaattgttaatattataaaaagtttctaatgtgatatgaaggcctatctggaaaaaaaacagtttaagttattttgatgtgatttcttggaaatagtttctttataggaaccaggtggtgacaaagaaagagaaattgggcttgagaacatcactgctgaactgcctatgtaaatggaaaatatttctctcaggtaagtaatacactgcatgaaattttttaaatccattctaaacaattatgaatattaattagcagagttgagatcttttttgtttagtgcaggcctagatagctgtagtcatttagatttttgtataaggagagacacttaataatgtttctttacataaattgctatcatgtgaaagttactattaattaattaaagtttctaaggaatgtgtaaacataact

SEQ ID NO: 675639 - DNA, 2403 bp, Homo sapiens
tgcatatgaaaataaactttcttctcttaccctagtaggagtgtgctttattaaatttttctctgccctaatatatctgagtgaagcaagtacatactaatcctgatccagaaaattttcagagaaaatctatacgttatcatccattgattgccttaacactgatctttttaggcaaagcaattatggtgaaattgtaactaaatgtaatctgaatagtaaaatcctcaataaaataaaagtaaccttcatacctgttatgtttactctgtaaatcctaaaacatgtgcatctactctagataaatgctgtccatgagattttgaacatccattgtaccatgggtacttmttattcttgttctttctcttctttttttttttaagagatgagggcttactatgttgcccaggttggagtgcagtgtcttttcacaggtgcaatcgtgacacactataaccttgaactcctgggctcaagcaatcctcctgccccagcttcctgagtagcaggggctacaggtgcatgccacatgctcagcatacttccttataatagtcatcatcttgctattacatgtattcagtgtcagtctttcctcttcattaatgggccttaactctgggtgaacattaaaaaattctaagaacttttcaaaagcactcatgcccaagccaataaaactgaatcttcatgtgtctgtgcattgggggtggggatatgggagactcggtgtggttattaatttttttaacttccaagatgattctaatgctaagctagagaaaattttaagctagagacaaaactcactgtcccaggttgttaggtctatgaaagacgggatgattagtgtatattgttgtctggaaaataatagtactcaagagtcacgtcactattgtcatgtgcaacacacgattttgtcaacaaagctcacacaggaatttcagaaacctcccatatatcaaagtaaccttggacattggcctctgagcattatttccaatgaaatagaagatgatgtaactgtgacattaattcaggtctttctaagtttaagttttgaccctgtggaggtcagcagctgctgaatactaccttaaacactcttactacaatctccctacccctggagtacacaggaagggtaaactgatgttccccttcccataccttgcctaccttttctggtccatgagcatggaatcatgcatgaataaaacttgttgcattagcaagaagaatgttaaccttttcattccctcatattaaaaggtggtgagacataaaattgctatttccagctagaatataaagacatacggatatctacagtgagtgatattcttggtgcatctaggttataggtctagctctgatagaaacactaagggagatgttgatgaagagcagtatctgcccaccttaataccaaaatcaggaatccatatctgaatttaacttatctttttaaatcaatttacgtattagttattaccacctattggattattgacctctctaaatgtgtcttcctcttccaggcttcaatgggagttctcttcaatcagcactgtgggattcagaaaatagccttgtactttctcaatagagaccactggtgacattagtgacttcaagcacgtatctgctctgcctccttctttctagatgaaagagtccaggctttccaatctgtcttcagaggatagtacctccagcctcttgagcatctcagttctgttctctagacaactacattgaattggaggtatagaattcagaggcaatttaagtggtttctcccagctttatgctttttccaccatactttttttccttagtaaaactttagttctaattatggaataatttgagtggatcttttttatttctccccaaacccttgatttctccttgaatctcatttgtgtctgtcagttggctgacatttcccaagcatccaagtctgtgctttgtaaattttgccagtttctcggaatcattttacttttcagggctttccctttattttatccttttacagttcctgtctctcctctcttggtaaatatgtcttccaaaccctcctttccctcctactatttcctggaggaattaatgaatatctatatactccctttgttagtcttccagcctcatgcctactcctcacccctgccacagctacatatttcctgaagtaaattggattactcactgcatccaattgtcattgacagacattcaagttcatatcccctcaagcctgttttaatttattagcttgaattttaacttttaggattctatttgacaaagaacatatttaagtccttattgatgataataatcctaataataactcccacttaaagcatgtttcattcatgaagtaca

SEQ ID NO: 675640 - DNA, 605 bp, Homo sapiens
gtattcttgaaattgctaacagagtagattttaagtattcttaccacaaaatagaagtatgtgaattaatgcatatattaattgtcttgctttagccactccatagtgtatgcatattttaaaacaacatgtacatgaaaaacatatgctgtttgtatttctcaagtaagaaataaatacataatgtgggaaacaagcttatagaaaaatktcaccacacctgggagcaacaagaactcaatgaatattcttgcaatgacttcattcattaacttacttgtcaagaagctacatgttatactttaatccagtaatcaagtaactaacatttttaggctttctgtgatttgttaattaatgaattaataaattaattacatctcagtaatgaaagggcaaaacagctttatgcactcaggcgagtatggactttgtaatacgtcagatatggacatatatcctatttctaaccctaatttccatatgaccttgggtaaaggtaacctgcttacctccgtaaacctgtttcctcatcagcaagtgcattcaattaatctcatcttgcatattctcatttcatctagaaaatttcagagatgtgtttg

SEQ ID NO: 675641 - DNA, 482 bp, Homo sapiens
tatcttgataaattatagaatgcttttagcagcattgtgtaactctgaccctaatatttttgtagtgtgtgcattacaaattagaatccaatcaagaaggacattaaattattaaaatatccattgacatctttctaaaaaagtgactgataamgcttatttgtaaaacattgcattgtgcccacatggaggattcttgtatcattctgaagactttcaatatttggaaaatgactgattgaatagatacagataatcatatgaaattggtatctttaaacaccttgcaggtattgtcaaccaggtttgattgtaaatataagaaatagtttaaatttaggtgaatgtaccaatattactatgcatacatgttttcctttgtaaattaattcaaaaccataattcattccttgatgccctatcagttataaataattaatcttactaatcaggaacatataaaataaagtgtttactataca

SEQ ID NO: 675642 - DNA, 672 bp, Homo sapiens
aatggttaccagttgcaactaatcatcagaagatttcctaggttctatgcaatagaaaaaaacctcaaaatacattggatgtgaaggtggtggtattgtttgaatgtggtcccttcaaaattcaggtgttgccaatgtgatgattttaagaagctgggcctttgtaaggtaattaggccatgagggcttactgggattaaagctctttcaaaggaagcttcacacagcctttggctaccttgccctctgtyttatgccatgtgaggatgtagcaagaaggccctaagcagaccaatgccaatgccttagtcttgagcttccagtctccagagttgtaacaaataaatttcttttatttgtaaattactcagtctgtggtattttgttgtagcagcacaaacagactaggtggcaatattactgtaactgtcatccataacctccaattccgaatgtctgtgttcatgaaaatagcctttattattcttattattaaaatttataataaatatgtactataaatttgaatttattgaataaatttatagcaataaaatactctttcttaaaaaatatctttaaaaataatatggtagttttactataatattccatttatatagatgatttctgcaactaacgtactccacaagtgatatagatgtttctggg

SEQ ID NO: 675643 - DNA, 672 bp, Homo sapiens
aatggttaccagttgcaactaatcatcagaagatttcctaggttctatgcaatagaaaaaaacctcaaaatacattggatgtgaaggtggtggtattgtttgaatgtggtcccttcaaaattcaggtgttgccaatgtgatgattttaagaagctgggcctttgtaaggtaattaggccatgagggcttactgggattaaagctctttcaaaggaagcttcacacagcctttggctaccttgccctctgtcttatgccatgtgaggatgtagcaagaaggccctaagcagaccaatgccaatgccttagtcttgagcttccagtctccagagttgtaacaaataaatttcttttatttgtaaattactcagyctgtggtattttgttgtagcagcacaaacagactaggtggcaatattactgtaactgtcatccataacctccaattccgaatgtctgtgttcatgaaaatagcctttattattcttattattaaaatttataataaatatgtactataaatttgaatttattgaataaatttatagcaataaaatactctttcttaaaaaatatctttaaaaataatatggtagttttactataatattccatttatatagatgatttctgcaactaacgtactccacaagtgatatagatgtttctggg

SEQ ID NO: 675644 - DNA, 672 bp, Homo sapiens
aatggttaccagttgcaactaatcatcagaagatttcctaggttctatgcaatagaaaaaaacctcaaaatacattggatgtgaaggtggtggtattgtttgaatgtggtcccttcaaaattcaggtgttgccaatgtgatgattttaagaagctgggcctttgtaaggtaattaggccatgagggcttactgggattaaagctctttcaaaggaagcttcacacagcctttggctaccttgccctctgtcttatgccatgtgaggatgtagcaagaaggccctaagcagaccaatgccaatgccttagtcttgagcttccagtctccagagttgtaacaaataaatttcttttatttgtaaattactcagtctgtggtattttgttgtagcagcacaaacagactaggtggcratattactgtaactgtcatccataacctccaattccgaatgtctgtgttcatgaaaatagcctttattattcttattattaaaatttataataaatatgtactataaatttgaatttattgaataaatttatagcaataaaatactctttcttaaaaaatatctttaaaaataatatggtagttttactataatattccatttatatagatgatttctgcaactaacgtactccacaagtgatatagatgtttctggg

SEQ ID NO: 675645 - DNA, 579 bp, Homo sapiens
acactgaccttttagatagataagtcaggggtgacagctctgagtaggtgacattcaagtgagaactgaaggaagtgcagcagcaagcatcctagatgagaaaggagttgggaggtgasagagggtggagaggatgatgaggatagtggccaggcaaggagtgacatgtcaagggacaggtgtggctagagcacagtttagtgacacgcagagcaggaagagaagaggatggagaggtagcagaggccttacagtacatggccaagagtttgaattttatactgtttgtagagaagccactacagacagtataaaggtgtaaaagagaaggatcactgtgactgttctatgaactcagaccaagaggtgcatgaatggtggcaggaagcgactacaggagtccttgcaaaacttagtagtggcctgggctccgatttaggtgtgggcgcaggggatgttgggtgcttgaatttgagaatacgaggtgtcacagaaaggcaggaatcaaggatgacttcagctttggggcctgagtgactaggtggtatcactgcataggttaaaacaatggaggaagta

SEQ ID NO: 675646 - DNA, 579 bp, Homo sapiens
acactgaccttttagatagataagtcaggggtgacagctctgagtaggtgacattcaagtgagaactgaaggaagtgcagcagcaagcatcctagatgagaaaggagttgggaggtgacagagggtggagaggatgatgaggatagtggccaggcaaggagtgacatgtcaagggacaggtgtggctagagcacagtttagtgacacgcagagcaggaagagaagaggatggagaggtagcagaggccttacagtacatggccaagagtttgaattttatactgtttgtagagragccactacagacagtataaaggtgtaaaagagaaggatcactgtgactgttctatgaactcagaccaagaggtgcatgaatggtggcaggaagcgactacaggagtccttgcaaaacttagtagtggcctgggctccgatttaggtgtgggcgcaggggatgttgggtgcttgaatttgagaatacgaggtgtcacagaaaggcaggaatcaaggatgacttcagctttggggcctgagtgactaggtggtatcactgcataggttaaaacaatggaggaagta

SEQ ID NO: 675647 - DNA, 579 bp, Homo sapiens
acactgaccttttagatagataagtcaggggtgacagctctgagtaggtgacattcaagtgagaactgaaggaagtgcagcagcaagcatcctagatgagaaaggagttgggaggtgacagagggtggagaggatgatgaggatagtggccaggcaaggagtgacatgtcaagggacaggtgtggctagagcacagtttagtgacacgcagagcaggaagagaagaggatggagaggtagcagaggccttacagtacatggccaagagtttgaattttatactgtttgtagagaagccactacagacagtataaaggtgtaaaagagaaggatcactgtgactgttctatgaactcagaccaagmggtgcatgaatggtggcaggaagcgactacaggagtccttgcaaaacttagtagtggcctgggctccgatttaggtgtgggcgcaggggatgttgggtgcttgaatttgagaatacgaggtgtcacagaaaggcaggaatcaaggatgacttcagctttggggcctgagtgactaggtggtatcactgcataggttaaaacaatggaggaagta

SEQ ID NO: 675648 - DNA, 601 bp, Homo sapiens
agctgagttttcaaacacctcgagtctagaagcacctgttttgggggttgaaagcagagactgagagagagactgaaaggctttcctgcagtaaagatccatacatgttaggaaattattttttcagtggttcagaagtaagcaaaagggtatttctcaactacgttagtgttttgtattcacggaaccccaattctgagtgttattaccatggaaaattctcagcaaggcttccaggttgtttcttgagcaaggtagaaataacatacaatctaataagaatggctggggctgggtgcagtggctcacacctgtaatcccagcactttgggaggccgaggcggatagatcacctgaggtcaggagtttgagaccagcctgggcaacatggtgaaactctgtctctagtaaaaatacaaaaattagctgggcatggtggcagrcgcctgtaatcccagctacttgggaggctgaggcaggcgaagcttgaagccaggaggcggaggttgtagtgagctgagatcatgccattgcactccagcctgggcaacagagcaagaatggctggaaaatcaacttggtatagacttccctacaagga

SEQ ID NO: 675649 - DNA, 1077 bp, Homo sapiens
tttttttttttttgagacggagtcttgctgtgtygcccaggctggagtgcagtggcgtggtctcggctcactgcaacctccgcctcccgggttcaagtgattctcctggctcagcatcctgagtagctgggactacaggcacatgccaccacacccatgataatttcttgtaatttttagtagacgatggggttttcacattattgtccagctggtctcgaactcctgacctcatgacccccacccccaagcctcccaaagtgctcggattacaggcatgagccaccatgcccagcccataatttctactttcactgaatctcaatttagacccacaataccactcataaagaacatcaccacaactacaactctctgctcccagtccctaagttctgacacacaaagaggtgcgaatcacaacccttagtttagtggcagagtaatcctggacaagtgacataacctctttgtgcctcagttctctcactttaaaatgataattgaagctaccccatggggctgctgtaaatattatgtaatatattataaatattatgtcaggtaatacatataaagtgatgaacagtgactaacatttaataaatattcagtcattgctatcattatccaactacaataaggactccttgaggacagtaatttttttgttttgctcattgttgaattctcagtgacagaagagtctggaaggcagggcaacggttataagaaaattttaaactctatcagtaagaacctcctcaactaacctctctctttgaatgcgaacttgtcagaaaaaggagagagtacatagcttagcagttgataatagtgtggttcaaaccgctgagttcatggtctgactatgccaagcactgtgtgacttcagtttcaaaatctaaaaatggagataataatatctatctaccttgcaaggctatcttgaggattccatgagataatttatcaaaacaagcactgagttgtagggctgatgcaaggaggaggaaggagaaaaggaggagagagaagaaaagaaaatcttgaaaggatagaggcatgtcagaaaga

SEQ ID NO: 675650 - DNA, 558 bp, Homo sapiens
aatgaattgatgcatctagaaaagcggctggcacacagctaatattagtgataatccctaccttttttcttatcttgcaaacaaagcccacctgctcacaagtaactgtttccctagctccctgtttattcagtacaaatgcagtaacctcaagatttctcagttttgttgagattccagagtcataacaagccttagtttagacactaaaatgyttactttttctttcatttttttttcttttttaagaggaagggtcttgctatgttgccaaggctagagtgcaatggccattcacaggtatgatcatagtgcactacagccttgacttgctacttgcttgatcctagactcaagggatcctcctgcctcaacctcctgagtagctgagactacaagcacatgacatcatactcagctgttgcttcctgtcttttgactaccaagaagactcttaattttttattgtgtgtactcatgttttaaaagatttcatctactagctgcatttattaaataataatctatgtggcctccttactaggaaatacactattt

SEQ ID NO: 675651 - DNA, 591 bp, Homo sapiens
cccacaaaaacatttgctcaattccccacacatcctaaagaaagccagaagacctgtctctcaacatcagttatccctttctaccatgaagttttagctgaatagtgtacatggttgcataaagacaacagtccctagcctcccttgttatgaagtagggccacttaacatttctgggttatgcctctaaaaagaaacatgcaggcacttctaccctttcsctgcttctgctgtctgggatgagaacagaagcattcctggaacccagaaatggaatccaggggttaggatgatagtcacctaccagccctggctcacccatctctagactgtcctgtgatacagaaataaactctattttatttaagccactgtactttgaggtgtcttagagacagcaatttactgaggtgagaaaaaaagagcctgtgaaaaataaatccatggttcagttttagacttattaagctcaaaattcctatgaaatatcaaaatggctatgtcaagtgaatagttagatccagtgtctgaagctcataagagagatctatgttaaagacataaatgcaagaattgccagcatacagattt

SEQ ID NO: 675652 - DNA, 591 bp, Homo sapiens
cccacaaaaacatttgctcaattccccacacatcctaaagaaagccagaagacctgtctctcaacatcagttatccctttctaccatgaagttttagctgaatagtgtacatggttgcataaagacaacagtccctagcctcccttgttatgaagtagggccacttaacatttctgggttatgcctctaaaaagaaacatgcaggcacttctaccctttcgctgcttctgctgtctgggatgagaacagaagcattcctggaacccagaaatggaatccaggggttaggatgatagtcacctaccagccctggctcacccatctctagactgtcctgtgatacagaaataaactctattttatttaagccactgtactttgaggtgtcttagagacagcaatttactgaggtgagaaaaaaagagcctgtgaaaaataaatccatggttcagttttagacttattaagctcaaaattcytatgaaatatcaaaatggctatgtcaagtgaatagttagatccagtgtctgaagctcataagagagatctatgttaaagacataaatgcaagaattgccagcatacagattt

SEQ ID NO: 675653 - DNA, 1631 bp, Homo sapiens
tcattttgcagaaaattgaagagaaatagaagataagaagggggaaraaactacggtaaaacgcaagacaaaaaatgaaaacagaggatgtagtatttggaacaaatcctttctaccaagtattaatgaattcccacaccatgagaaatgtgcttaagcccaattctaacatgtctaatttaggtgctaataaataattatttgctttaatatactcctttcttgcaaaagttttatgtagtaataataataatactaataagttgctaacatgtactgaatgcataccgtgtgcttggcattgctgtttcacatatattaacttattcttcacaaccaccctatgaggtagatactattttattatccccattttatagatgaggaactgagacactgataaatgaagtaattttcctcttgtcccaaaccactaggaaagagtaaatctaagattcttcctttcatcttcataatcccttcaggtagataagagtatccccaccttacaagtgaggctcactgaagccatgtgattagcccaaggcatcaaataacagcagatctagtaagagaagaaggaggattgggactgggtctctccacacatctgacaggttgtctcccagaaagtgggccatggccatccctcattccgtgaagtattccttcagaggagtcttaactgagttcctggaaaactcaatcgcgaacagtgaaaagagatctattctggataattttggtctggaatacatttccagtcactttgatctgataaatatcagacaagactcagaaatactaatatacacttattaagaattcaatcaactaaaaatcccaacctatagaaagttttgtttacatactattgttataaaacccaaatcacaaggaaagatgctgattaaagaaacttgtcttcaaaccaacttttgttcttatatcttctttagtatgtcctatgttacttttgcccttgaccttcacttttagttgtattaaatgaaaagcagacttggaagattcttctaaatcagtgataaccaatacataaccagtggccaccaccctcctcttgtgtctgtggcagatataaattgctcacaagctctttcattctgatccataagaatctatctcagcaccatactcccagcagcccttaccaatcaaaaacaattggtaagcatgttaaaacctacttgtaacctttattctagagatgtttagtatctgtctcctctgtgttcaaatcaatatagatgtcattcaatgttctatacctccattgtctatctctacgctactgtgcaatagagacccattagacaccataagatctaaaaggtcttttacatttgtctcagtctatttgggctgctataacaaaacaggcaatttacaaataacagaaatgtatttctcacagttctggacattgagaagtccaagacctgggggccagcaggttcagtgtctggtaagagctgctctctgcttccaaaatggtgcttccaaaatggcttctgtttctttgagatgactgaggtgttgagaaggattactaaggaaaatcagggcaccagtccccagtgtacaagccatgacagaacctccccattgtc

SEQ ID NO: 675654 - DNA, 639 bp, Homo sapiens
ttttatccctacatcacagaatactatggaggaaaagaaagaataagagctaggttgtactatatatcctatatactttgtccattagctattaaaatttaacctctcctccacacaagaagtttatgtgcamaaatgtacaaaaataaaaatctgctatacaaaaatgttaaaaagaatgcaactcaaaggatacaaaaatggacagcagagaaaactggatcaactggatcaacagtgcaacagctctttttctcatttaaatttagctttaaaatgacttcttaaattagaaatcttactgaagcaaaaattgcacctctgaaataacatttattttaatcaaaataatactaattctatagtatatgtggtaaaaaatgactatgggacaaaattcacaagagacaaaatgttatagttaaaactcagaaatacaatatacaaatcagcaacttctcacaaaatgcttgcctactgccaattttaggagtatatgaaattcaattaaaggcaagatcaagactcaattttttcatcaatgatttgtaaacaacaaaagaaacaagaaaggaggggtgaaaaaatatactaccatcaccttttcttcttggaatagctaaggatttttgtttatat

SEQ ID NO: 675655 - DNA, 631 bp, Homo sapiens
cccctacactaggtcacgtgggtatgaacagctgtgcagatgatctttgcaaagattacacaacttggagaattgaagggactaagactctgcgagcttactgtcataaggcttgatggagtcaaagcacatggagaaaataagcactagcaagcctcagggtctgagagagctccaggtgcaactcccaagggtcctttcttagtcacagaatctactttatctccggattatgaatcgccaggatatyggtgaggagccttggttttgttagagctcaggcagaagtttccagtggttgttttatgtcccactagtcatatagcccaagctggttatccagttaagtcaggtgtaagccatcaacctaaatctctagacaatgcaaacaacttagcagtggtatattttaaattactaacttgcccactaatccttatcttggccaagaagtcagttccaggcttacttggtcagttccagacttccagacatcctcagaaataaatagagctgtataaacccagctgtaaaataactcaatcataaacagcctttaactgctgtggcctgggaaataagttccaagttttaagcctcaagatatttttattcttgcaggcgaccattc

SEQ ID NO: 675656 - DNA, 1802 bp, Homo sapiens
cctacagaggaacccatgaacagttcccattgtttactgattttaccttgctagactagaaaatgcatttgtcaataggaatgttatcatctccaagggggcaaatattggttctcagtggatgaacaaaatcttagatattataatggcttgtggccttcccaatggccacagtaaataagcaaatatacagtgtatctgtggagtttaaatttcatgagtggagtaaaggttggggtggagtacaattaggaaaaaaaaatgtctaaaggtctcctttgggggaagggtgataaggaaaaaaaaaaggttgaggaacagtgttccagagcaattatatttagtttcagcttcaaattattcactcctgcttgtaattcccttttgttctctatcctttcatttaaaaacatataagttatgtgtttgagggggtgtggggaattaggcctcctgcaccttacctcccagctgggagctcccagggaggcctgggatccacgtggagacaggcagtgaaggaagcaagagcccaaggcagagatgaaggctgtgggtggatccacggccacgggggcgattcagaaactgacaggaggccagttccgtctgtgggtcttgaactgtggtgcctggaccagcagcagcrgcggcatcactgggaacttgtcggaaatgcaaattctcaggtcccaccccagacccgctgaatcagaaactctaggggtggggcccagcctccaggtgagtctgatcctccctcaaatttgagagtcattggtttagaagtgaaacaggtgactcaaggaaatgaggaggtacgctttgggagaaaggaacaagaaagcagagtttcagtaaactaaaatttcccactctctagttttttaatcatctttaaaaattttcttttagaccctagcaatataaatattgctcgtttccactagggaggaaaacaactctgctgtcaaatttgctgagcacaaagtgaaaggaagtctgcaatctgttggctaattaagacccatgtaagtaatcaaggcagacaagtcaaggacaatgaatctcaggcttgtcttggctgattctgccaacttcaccgatcacctaaactaaataatcagcaatcactttattttgtgttgtgtaaacacagtagaaatgttcacaaagtattcctaatgtgtagcagaaagattgttacttactcagcttcctatgtagggaagctaacatatctattcaggatcacactgtcactgatggcaagatccaagctcccaggttctgactctaaactttcaaatgaagagttcaacttctttttctttttaattctctccttccttatgaactacagcaatttgatttgtaactttatttttttttctatttatgaagcattagcaattatttgccctgaaaacatttttaataagaagaaaactaaggttgaatgcaaacaatttaataacaacccacctcagtttggtccttctgcgccttaggccactgccaggtgcatgaacttgcaaaaccctagattaaaacccaggttctccacagcgctttttgcagagttaatttctgtcagagacatattaatgacagactttagaagaaacaccaaataacagtgactttccagtaacttcagtactagtcctgcccctaggttaccctatgaagctagactccagtgaaaatacgccaacgattcttttcctgaccaaaaccataactgagtctctagaaaaatttgtttgctgtgatttgtatttttgatataataattatgc

SEQ ID NO: 675657 - DNA, 1802 bp, Homo sapiens
cctacagaggaacccatgaacagttcccattgtttactgattttaccttgctagactagaaaatgcatttgtcaataggaatgttatcatctccaagggggcaaatattggttctcagtggatgaacaaaatcttagatattataatggcttgtggccttcccaatggccacagtaaataagcaaatatacagtgtatctgtggagtttaaatttcatgagtggagtaaaggttggggtggagtacaattaggaaaaaaaaatgtctaaaggtctcctttgggggaagggtgataaggaaaaaaaaaaggttgaggaacagtgttccagagcaattatatttagtttcagcttcaaattattcactcctgcttgtaattcccttttgttctctatcctttcatttaaaaacatataagttatgtgtttgagggggtgtggggaattaggcctcctgcaccttacctcccagctgggagctcccagggaggcctgggatccacgtggagacaggcagtgaaggaagcaagagcccaaggcagagatgaaggctgtgggtggatccacggccacgggggcgattcagaaactgacaggaggccagttccgtctgtgggtcttgaactgtggtgcctggaccagcagcagcggcggcatcactgggaacttgtcggaaatgcaaattctcaggtcccaccccagacccgctgaatcagaaactctaggggtggggcccagcctccaggtgagtctgatcctccctcaaatttgagagtcattggtttagaagtgaaacaggtgactcaaggaaatgaggaggtacgctttgggagaaaggaacaagaaagcagagtttcagtaaactaaaatttcccactctctagttttttaatcatctttaaaaattttcttttagaccytagcaatataaatattgctcgtttccactagggaggaaaacaactctgctgtcaaatttgctgagcacaaagtgaaaggaagtctgcaatctgttggctaattaagacccatgtaagtaatcaaggcagacaagtcaaggacaatgaatctcaggcttgtcttggctgattctgccaacttcaccgatcacctaaactaaataatcagcaatcactttattttgtgttgtgtaaacacagtagaaatgttcacaaagtattcctaatgtgtagcagaaagattgttacttactcagcttcctatgtagggaagctaacatatctattcaggatcacactgtcactgatggcaagatccaagctcccaggttctgactctaaactttcaaatgaagagttcaacttctttttctttttaattctctccttccttatgaactacagcaatttgatttgtaactttatttttttttctatttatgaagcattagcaattatttgccctgaaaacatttttaataagaagaaaactaaggttgaatgcaaacaatttaataacaacccacctcagtttggtccttctgcgccttaggccactgccaggtgcatgaacttgcaaaaccctagattaaaacccaggttctccacagcgctttttgcagagttaatttctgtcagagacatattaatgacagactttagaagaaacaccaaataacagtgactttccagtaacttcagtactagtcctgcccctaggttaccctatgaagctagactccagtgaaaatacgccaacgattcttttcctgaccaaaaccataactgagtctctagaaaaatttgtttgctgtgatttgtatttttgatataataattatgc

SEQ ID NO: 675658 - DNA, 592 bp, Homo sapiens
caaaacagtttccagaaggactgtctgattgagtcatatttatttttaagggtttgaaaacactattagattaatctcagttccatgtcacaaaaatcaatgttttggcagctcttttgmgtcataaattgcttttctacatattatactaaatagcccacattgcctttcaaatctggagaatatacagccaagaactttaacaaaattatttcattaccatcacccatttgggaaaaatgaaaagataggcacaaaacctaaacgtgactgttgggaaaagtggacaacaaattcatcatacaagatttttattgcttaccatgttattctgatttattgatgtgaggaattcctgttaaattataaataaggtaatatttgaaatagtgtatacctaaaaatgtttgcataaattataaaaacaataaaaagtatgtgaatgatgctcaatctgcatatccttgtaaaatgcttatttttgccagtaataataaatgaagatagattccttctaaattaaattttgaggcccctggacttggtccaccatgtagatggactgatctcatttggccatgttgatcatcct

SEQ ID NO: 675659 - DNA, 723 bp, Homo sapiens
cgcatatgattttcagggcttgtcataagctttttttttcccccccataggttactggggaacaggtggtgtttggttacatgagttagttctttagtggtgatgtgtgagattttggagcagtatacactgcacccartttgtagtcttttatcactcacccccttcccacactttcctcctgagtctccaaagtccattgtgtcattcttatgcctctgcatcctcctagcttagtttccacttatgctgagaacatatgatgtttggttttccattcctgagttacttcacttagaataatagtctctaatctcattcaggtcactgcaaatgctattaattcattcctttttatggctgagtagtattccatcatatatatatataactatatatatgtgatatatatcatatatagagagagatatatatcacatatatatcaaatatctttatccactcattgacatttatatttaaagaagttccgatttgacatgttacagggattttttttttttcaagactgagtctcactctgtcacccaggctggagtgcagcagcacaatctcggctcactgcaacctccaccttctttgcttcttcaaaacctcagcttcaattggacatactacatgattaaattgttaaatatctgcaattattctaacagtattccctgacttttgtgactaatatttgtaagtttctgatttttg

SEQ ID NO: 675660 - DNA, 723 bp, Homo sapiens
cgcatatgattttcagggcttgtcataagctttttttttcccccccataggttactggggaacaggtggtgtttggttacatgagttagttctttagtggtgatgtgtgagattttggagcagtatacactgcacccagtttgtagtcttttatcactcacccccttcccacactttcctcctgagtctccaaagtccattgtgtcattcttatgcctctgcatcctcctagcttagtttccacttatgctgagaacatatgatgtttggttttccattcctgagttacttcacttagaataatagtctctaatctcattcaggtcactgcaaatgctattaattcattcctttttatggctgagtagtattccatcatatatatatataactatatatatgtgatatatatcatatatagagagagatatatatcacatatatatcaaatatctttatccactcattgacatttatatttaaagaagttccgatttgacatgttacagggattttttttttttcaagactgagtctcactctgtcacccaggctggagtgcagcagcacaatctcggctcrctgcaacctccaccttctttgcttcttcaaaacctcagcttcaattggacatactacatgattaaattgttaaatatctgcaattattctaacagtattccctgacttttgtgactaatatttgtaagtttctgatttttg

SEQ ID NO: 675661 - DNA, 614 bp, Homo sapiens
caagtgttccatatcaacactttattttttatttttttgagacagaaactcgctctgaccctcaggctggagtgcagtggcgtgatctcagctcactgcaacctcctcctgggttcaagcgattctcctgcctcagcctcctgagtagctaggattacaggtacccaccaccacgcctggctaatttttgtatttttggtagagatggggtttccccatgttggccaggctggtctcaaactgctgacctccagtgatccacctgcctcagtctcccagtgtgcagggattataagcatgagccaccacacccggccycatgtcaacactttaaaacatgctcatttacagatgaaaaagccaaggttcagagaggtagagacttgcccaaggccagagagcaggtgagcagcagagttaggctgcaaacctcggtgcaacatagagaaaaaggaaggctttgggttaatacataaagtcctcttttgcatcagtgtgagagaaaacatatttattttatttaaatagttttttcattaattgagactactttcttacatgatccataattaggcaactttggtttttaacaaggggtttttagtaataaactt

SEQ ID NO: 675662 - DNA, 489 bp, Homo sapiens
gggtgacagaatgagaccctgtctctaaatgaatgaataaatgaatgagtgactatttaaatgagttgggattttttgttgtttttgttttttgagatggagtctcactctgtcggcaggctggagtgcagtggtgtgatctcagttcactgcagcctccacctcctgggttcaaccaattttcctgcctcagcctcctgagtagctgggactacaggcgtgtgccaccacgcccagctaatttttgtatttttagcggagacggggtttcaccatgttagccaggatggtctcaatctcttgtccttgtgttccgcccacctcggcctcccaaagtgctgggattacaggcgtgagccaccacgtctggccaaatgagtatttatgactgaaagatattcacattgaagggttaacaatgtgatrtaattggtatatttttattttatttttacatttaataaaattctacaagaaaagtaactttca

SEQ ID NO: 675663 - DNA, 618 bp, Homo sapiens
aaatgtttggtaaaggtaaacaccacattcaacattgagatttagggacaggaagatatgaatatacagaatgtatcaactgacttggtaatgttttatttcttttgctgagtggtagatgcactgatgtttgttatattattatatatatttaagcaataggatcttcctttgtgcccaggctggagtgcagtgatacaatcatagctcactgcaaccttgaactcaagcaatcctcctgcatcagcctcgcaaagctagggctacaggcacaatggagacagggtctcactatgttgcctctgcgtgatttcaaactcctggcctcatgcgaccctcctacatcagcctcccaatgttacattattgttaatctctttttctctatcaagtattccataattaatattaaaaataattgtttctatgaaaagtaagttaatccctgggaagacattaaaagcaaattgtttaaaaattgtccttctaggtttgagaaagggataaaaatgggytgggcgtggtggctcacacctgcaactgcttgagcctaggagtttgagaccagcctgagcaacagagtgacaccgcatctctacaaataataatttcttaaaa

SEQ ID NO: 675664 - DNA, 533 bp, Homo sapiens
gaagaaacggccaaagtatcatttggtaccttggcttccttacatagatgttgaactccaagaatgatcaaatcacagtttagaacccctttgttgggccctataaagggtttccggatatcaaatgataaatagtctccagatgaagaaatgctctataacgccccaccgctgtgttttcctatattttgtccttttctgaaaactytaaatacacgaatttttggtagaaatgaaaatctttctgttttatatatttgtttctgtccatggcactctgatatctttgaatctagtaaggatatagccttgtcttatttataccagcaagcagtgttgtcacttaatgctctcatttttcacgtaaatgactgacattttcccaagtcttcacaagtgatttttgaagacgttgctgcattgagcagagactatgtcattgtaattgcagaagtttttaaattaaatatgtttaataaaattttagagcctgtttctgtggaacacataacacataatggtggtgtaatgtg

SEQ ID NO: 675665 - DNA, 583 bp, Homo sapiens
tctaatgtttaagtctttaatccatcttgaatttatttttgtataaggtgtaaggaaaggatccagtttcagctttctccatatggctagccagttttcccagcaccatttattaaatagggaatcctttccccattgcttgtttttctcaggtttgtcaaagatcagatagttgtagatatgcagtgttatttctgagggctctgttctgttccaktgatctatatctctgttttggtaccagtaccatgctgttttggttactgtagccttgtagtatagtttgaagtcaggtagtgtgatgcctgctgctttgttcttttggcttaggattgacttggtgatgcgggctcttttttggttccatatgaactttaaagcatcctttatttctgtagctatattcaaaacagaatctgtcttgtcacttgtagcctgaaagtaatttggagtgaattatcaataaataaagaatgtttcaaagaccatacagttactaataaaaaatataaaggagagtttaccttctcagctggttgtttctgagaagacactgaaaagcaaaagggatacataatcactc

SEQ ID NO: 675666 - DNA, 486 bp, Homo sapiens
tgactgcaacaagaacgcttacaagaaataaactcgatctgttgcctggtatccctctaataactaatgatataactacgaaaggttggttctgaacataaaacaacctcggaaaggaattcaactgaagtgcactttgtggttacaaacacctagtgtcagagacagtattatcgaccccattgaaaataatgacttattgcaagtaaccacaaatcagctgactagttgaatggatattacacattgtttactacrcatgacctcaaaaaatcattagatccatactaggaggattaagaggacttactactcatgaatcccttctttctgcaaacctcatatcctcatgcaagaatgagaagagctgtcatttgggaattagagaaccagcctggagtccttgcctgccctgtatttgcggctgtagacagaaattccttaatccctttgagtgtcagtttcaaccataaattgggaatttga

SEQ ID NO: 675667 - DNA, 631 bp, Homo sapiens
gataagcgaagtccaattaatagagaagcatagttgcatataagggtggtgaggatggcagtgacaggctattatttaaattcatgtattctcgaactgtcacccaacactgcttatctgttttgcaaatatcaaaaattatcattgtttaatatcattcaatgattacccatattaaatataagtgaatactttatgggcagttcttttctgttttcttcttctcttgaagaagatataggatccattccctatgactttctttttatatctatgaattagcatattttgttaacaataaataaaccatggtatttctgctgcacaacactgatgtcagatgtgtatacatttaaagcaatttacttttgtggtacctacttcytctccaactggaatggcagccaatcttcaaaaatcagttgggtcattgaacagtcaatatggtttaattgttaagacaacagaaataagtgaccatgtctgcctcaatgaataaatcaaatcaaaactatagcaattgattaatatttggcattcagcaactgtaggaaaagtgagaaaatcacttcaaaaataattaaccagaaaaaggattgattgtatataatggaaattctggttatctgaa

SEQ ID NO: 675668 - DNA, 649 bp, Homo sapiens
tagcacaatgtctaacatgttgtacrcattctataaaacctgcctattagtgttaatattattgttattatcattagtcagggccctaacagaaaacgaattcaaatcaggtgattcaaattaagagacattcacaaagggcaatttacagaggttttggcaggattcaagaagtcaacaagagctactgtagcaagcagagatcagcaacagtagagaaatgcttcttctagttctgaatgggcaataggagaaaatcgtgttcctgaaacccagtaagggctggaacctgggagagtggctggctggcaagatctgtagtcatgaacgaatgcagatactgccagaagtgagcctccaaagtcaaaaaaaaaaaaaaagtgggtaagaaatctccaaatctccttctcttcctaccttccaatctcttgctagtgatccccattagttgaagtcaactggtgatatgattcaaagagtcagcagggtaggaaaaaagatttatttgaaagaacaagagtgccaaattttgtcaaaggccttttctgcatctatggagataatcatgtggtttttgtctttggttatgtttatatgctggattacatttattgatttgcatatattgaaccagcctcgcatcccaggg

SEQ ID NO: 675669 - DNA, 1436 bp, Homo sapiens
ttaggtccaagaggatctatctgaagaacacagaggaaataccctgaaagtatgctaaaaatgaacatgacgagatttgaggaggatttaagtatagtgttgtagaaatagtgttttactgctatgttaaacgtttttcttttttctaattgtgatactggcagaacattgcaatgtgttttatgctttaaaaaggtagaaaatattgacattcaatattctaactgacagtactggcaaagttctgactcaaggactcagattagttttagaggcatatctctgtggaataatcatgcattgggccatttcaactaattgtactaaggattaaatgtatatwttttttccaatgccacactgcattttccctaaaatactctagtataattgccggtatctttgctactttgaaatatctttgaaagtaagaaaactttgtcttttaaaaatatcatctaccaaaaattagctgggtgtggtggcacatgcctgtagtcccagctactcagggggttgaggcagaagagtcacttgaacccagaggcggaggttgctgtgagctgagatcacgccactgcactacagcctgggtgacagagcaagactctctctctctctttatatatatatatatatatatatagtataccttgtacatgacaggtagtaggtatcttagaagtattccttgatatttttttttcagtgaatatagtgcttgtcaattacacaaatcccttgaatattatattcccgtttaaattggtctgcttgattatctataattcaatcagtttagttccaagtctattccccagagtctgataaatccaaaactctaagaacaattttgtggacccacgagtttgactatagtctctgaataagcctcaattaaacaattctattctgggatgccctctggcatgaatcttgacttcccatagcaatgtattttattttctaaaattcttctttcaaacagtttcaagttttaaaaattcaatttaagaaaagataattatgtgtttaacaagtacagttacattaaagacatttatactaacagctcttggattgagtaatggccttgattagtaagattatttattcaatcagtctatttactaaaagatctcatcaagccttagggtggaaaaataagaagatagaaaactgaagtgatactttaacttatcaaaagagttggtcatgtatacaaaatgggtaaaaaaatatttcctaattttggtctccataaaaacaaatattcagtgagcaattcagtcaagcacacattgacaggttaatgactagaagattccatcagaagagttaaactgatttgcatagacaccattaataattgaatgtctctagatttttaaaataaattgaacacgactcatctgaataaacagatttgacattac

SEQ ID NO: 675670 - DNA, 1436 bp, Homo sapiens
ttaggtccaagaggatctatctgaagaacacagaggaaataccctgaaagtatgctaaaaatgaacatgacgagatttgaggaggatttaagtatagtgttgtagaaatagtgttttactgctatgttaaacgtttttcttttttctaattgtgatactggcagaacattgcaatgtgttttatgctttaaaaaggtagaaaatattgacattcaatattctaactgacagtactggcaaagttctgactcaaggactcagattagttttagaggcatatctctgtggaataatcatgcattgggccatttcaactaattgtactaaggattaaatgtatattttttttccaatgccacactgcattttccctaaaatactctagtataattgccggtatctttgctactttgaaatatctttgaaagtaagaaaactttgtcttttaaaaatatcatctaccaaaaattagctgggtgtggtggcacatgcctgtagtcccagctactcagggggttgaggcagaagagtcacttgaacccagaggcggaggttgctgtgagctgagatcaygccactgcactacagcctgggtgacagagcaagactctctctctctctttatatatatatatatatatatatagtataccttgtacatgacaggtagtaggtatcttagaagtattccttgatatttttttttcagtgaatatagtgcttgtcaattacacaaatcccttgaatattatattcccgtttaaattggtctgcttgattatctataattcaatcagtttagttccaagtctattccccagagtctgataaatccaaaactctaagaacaattttgtggacccacgagtttgactatagtctctgaataagcctcaattaaacaattctattctgggatgccctctggcatgaatcttgacttcccatagcaatgtattttattttctaaaattcttctttcaaacagtttcaagttttaaaaattcaatttaagaaaagataattatgtgtttaacaagtacagttacattaaagacatttatactaacagctcttggattgagtaatggccttgattagtaagattatttattcaatcagtctatttactaaaagatctcatcaagccttagggtggaaaaataagaagatagaaaactgaagtgatactttaacttatcaaaagagttggtcatgtatacaaaatgggtaaaaaaatatttcctaattttggtctccataaaaacaaatattcagtgagcaattcagtcaagcacacattgacaggttaatgactagaagattccatcagaagagttaaactgatttgcatagacaccattaataattgaatgtctctagatttttaaaataaattgaacacgactcatctgaataaacagatttgacattac

SEQ ID NO: 675671 - DNA, 680 bp, Homo sapiens
catatgcaaagatatttgttatatacttttgctttacactgttacattcatgttttcttacacatacggatatgcataaaaagatacatgtttttttcttacactttgtactcagttgcattttaaaagtttgttcctgtattgctaaagctttgtactgatcactgttttgctctcttttcattacattaattgatacaaattgttactgattgatttgaatattcttttctattatgatgaaaatgaccttttaaaaagcctaatttgcctatatatatgtattttttaaaattcatgattcatcacaactgtttgacaaagtgaaacctatttttgcycctttaaatatacaatgtttcccccatgtgattttatggctagatagctcatttattttcacgatttagtaatatttgattgcttggatgtactttatttatccattcacctactggaggacaactcttggttgctttccagctttagcatttatgattaaaaatgccatgtgcaagtttttgtgtggatataagttttcaactcctttgagtaaatatcaaggaacatgattgctgaattatatagtaaaagtatgtataattttgtaagaatatgcaacattgtcttttaaagtggatactccattttgcattacaaccagcaatgaatgaagttcc

SEQ ID NO: 675672 - DNA, 680 bp, Homo sapiens
catatgcaaagatatttgttatatacttttgctttacactgttacattcatgttttcttacacatacggatatgcataaaaagatacatgtttttttcttacactttgtactcagttgcattttaaaagtttgttcctgtattgctaaagctttgtactgatcactgttttgctctcttttcattacattaattgatacaaattgttactgattgatttgaatattcttttctattatgatgaaaatgaccttttaaaaagcctaatttgcctatatatatgtattttttaaaattcatgattcatcacaactgtttgacaaagtgaaacctatttttgcccctttaaatatacaatgtttcccccatgtgattttatggctagatagctcatttattttcacgatttagtaatatttgattgcttggatgtactttatttatccattcacctactggaggacaactcttggttgctttccagctttagcatttatgattaaaaatgccatgtgcaagtttttgtgtggatataagttttcaactcctttgagtaaatatcaaggaacatgattgctgaattatatagyaaaagtatgtataattttgtaagaatatgcaacattgtcttttaaagtggatactccattttgcattacaaccagcaatgaatgaagttcc

SEQ ID NO: 675673 - DNA, 3196 bp, Homo sapiens
tcgcccttggcctcatttgcctatttagagaggttcacaggctgcagtgattagaaaatggcacgtgttgttctgtcctctcagtgcggaggatccattccaccacccacagtttttagcgagtctcacttgcctgctggttatctagcactgaagggcaagacgttaagtaaagatatttgtgaagagaagaaagctaaaacttttttctcagtagcactctgatctagtcaagcgagttaactgggtagacttttaaaaataaaaattttttaaacaagctttttgttattttcagaaataagtaaataatattaaaaaaaatattttgtcagaatctactaaccatgaaccaatttctctgctactggatacaatctcctaaaatttgtggaacaatagcttcaattaatacgatcagctctcacatttccacattttacatttttttgttccagtgatttaaaatccactgcataaagagtacagtctcacactctgtgccgaccttgcactgtgaactgcaggtttagataggaaagagacaagacacctagtaataagttactcacaatacctgtacattttggggaaaatagcctgggggccctagagaacaggggagccctgaattcattttactctgaattgttaaagatttggtccaatctcttgactcaatgattagtctgacattatccaaaagaccaaaagcagctttgattgtgcaaaggtgaaaggattttcttccttgccatgtccactcacaaagagcagaaaagcaaggaatgttcttttgtgcctttccagtcaatattattcagtgcccagagatcagttaagcagaataatcaggatcattgtagagagttattttggtagtaagtatgtcttatgacctgcactccttcgtgaaagcaaactaaatattcacattattaaatagacacccatcaagtatctgcgctgggaacatagatctcgcctataattaagaaattaactgaaaaaaaagtattttctgtatgtcaacaattaaatgttggctgtacgaatataattttctactatcactccttttggcttgacaaggactcagctgctgaagaagttaggttgtagtgtaaacagagggttacaaatgcatccctcttgttttccatagctctgctgtccacgtacaggatgtgtccatttgaggtctaatctgaaaggattgtagaccctaaactcagaaaagggttactgtctgatcaccagccatatataaagtgcagttagatctggagtttaaaaaaaaaaaaaaaaaaacagtcaacatgaaagttgtagacaaaccagtttaagggacactttagaaactgaatctattatgagcatgttgtatctgcagatctcatcatgagaatacacatctagaactaaactaggtcagcatgaattggagcttggaaattgtaacatggacacaaggaatcatttactcaagttgttcagtactcatcacctgtgttcgctaattgctctgtcgcagacgtagggtccagtgtcttttaaatgcctaaactctaaaccaaaatccataatgtcaacacagtattacaaattgtcttataacatttagaaaagagggaatgagagattaggagttcccatatgtgttttcagaaacacacaagaaggaagtggtcctgccgtattgacatgagtgttcttactgtaggtggcaaaacacccctgttcttgtgggttttaggccttcgattcacattgcatcatctatcactcattgtaccaccctgccttcctctgccatttttgctgtccacctaacagcctaaacatcataccctaaatgacaatattctggtccttctctgggtctcctcccccctcaaccaacagatargagtcttatcagctaactatgtgtaggtgtggttagtataataaatgtgcttcctgagtctgatcactgctgggtttactgaaaagactgtgtgataacaggttggatttgtgtccccacccaaatctcatgttgaattggaggaggggcctagtgggaggtgactggatcatgagggcagattgcttccttgctgttctcatgatagtgaatgagttctcacaagatctggttgtttaaaagtgtgtggcacctccccaggctcctgctccaccatggtaagaggagcttgcttccccttcgccatctgccatgattgtaagtttcctgaggcctcctagtcatgattcccgtacagcctgcagaactgtgagtcaattaaacctcttttcttcataaattgccctgtctcaggtagttctttctagcagtgcgagaacagaatgatacactacatctattaacacaggaagctgttggacctacaaggacctcatcaaggtacagagttattatatattaattagttaccattcctttttcataaacaacattttaaactgtatttctaaatatattcttgcacattaaaaattaaagttactgtgcagtgcaacaatgtctcaaccacaaacttcacacaggggaaaagtccttttcttcaattactttgtcagagatttgaaaggcttttattcattttccatgctgtcattacttaactcattatctggctgccttgtctaatggctccttagctttcacgtggttcatagtccacatattctagttctatgatggtcaaatggcagcattttaaaaataatgacattgacacaaacaaatggaaacacatcccatgctcatggatgggtacaattaatattatgaaaatgaccatactgccaaaagcagtctacaagttcaatgcaattcccatcaaaataccaccatcactcttcccagaactagagaaaacaatcctaaaatttacatggaagcaaaaaagagcccacatagccaaagcaagactaagcaaaaagaacaaatctggaggcattgttacccaacttcaaactatactataaggcagtagtcaccaaaacagcatgatactggtataaaaaatcgggacattgaccaatggaacagaataaagaaaccgtaattaaagctaaatacagtcaattgatcttcgacaaagcaaacaaaacataaagtgggaaaggacaccctgttcaacaaatagtgctggaataattggcaagccacatgtagaatgaaact

SEQ ID NO: 675674 - DNA, 3196 bp, Homo sapiens
tcgcccttggcctcatttgcctatttagagaggttcacaggctgcagtgattagaaaatggcacgtgttgttctgtcctctcagtgcggaggatccattccaccacccacagtttttagcgagtctcacttgcctgctggttatctagcactgaagggcaagacgttaagtaaagatatttgtgaagagaagaaagctaaaacttttttctcagtagcactctgatctagtcaagcgagttaactgggtagacttttaaaaataaaaattttttaaacaagctttttgttattttcagaaataagtaaataatattaaaaaaaatattttgtcagaatctactaaccatgaaccaatttctctgctactggatacaatctcctaaaatttgtggaacaatagcttcaattaatacgatcagctctcacatttccacattttacatttttttgttccagtgatttaaaatccactgcataaagagtacagtctcacactctgtgccgaccttgcactgtgaactgcaggtttagataggaaagagacaagacacctagtaataagttactcacaatacctgtacattttggggaaaatagcctgggggccctagagaacaggggagccctgaattcattttactctgaattgttaaagatttggtccaatctcttgactcaatgattagtctgacattatccaaaagaccaaaagcagctttgattgtgcaaaggtgaaaggattttcttccttgccatgtccactcacaaagagcagaaaagcaaggaatgttcttttgtgcctttccagtcaatattattcagtgcccagagatcagttaagcagaataatcaggatcattgtagagagttattttggtagtaagtatgtcttatgacctgcactccttcgtgaaagcaaactaaatattcacattattaaatagacacccatcaagtatctgcgctgggaacatagatctcgcctataattaagaaattaactgaaaaaaaagtattttctgtatgtcaacaattaaatgttggctgtacgaatataattttctactatcactccttttggcttgacaaggactcagctgctgaagaagttaggttgtagtgtaaacagagggttacaaatgcatccctcttgttttccatagctctgctgtccacgtacaggatgtgtccatttgaggtctaatctgaaaggattgtagaccctaaactcagaaaagggttactgtctgatcaccagccatatataaagtgcagttagatctggagtttaaaaaaaaaaaaaaaaaaacagtcaacatgaaagttgtagacaaaccagtttaagggacactttagaaactgaatctattatgagcatgttgtatctgcagatctcatcatgagaatacacatctagaactaaactaggtcagcatgaattggagcttggaaattgtaacatggacacaaggaatcatttactcaagttgttcagtactcatcacctgtgttcgctaattgctctgtcgcagacgtagggtccagtgtcttttaaatgcctaaactctaaaccaaaatccataatgtcaacacagtattacaaattgtcttataacatttagaaaagagggaatgagagattaggagttcccatatgtgttttcagaaacacacaagaaggaagtggtcctgccgtattgacatgagtgttcttactgtaggtggcaaaacacccctgttcttgtgggttttaggccttcgattcacattgcatcatctatcactcattgtaccaccctgccttcctctgccatttttgctgtccacctaacagcctaaacatcataccctaaatgacaatattctggtccttctctgggtctcctcccccctcaaccaacagataasagtcttatcagctaactatgtgtaggtgtggttagtataataaatgtgcttcctgagtctgatcactgctgggtttactgaaaagactgtgtgataacaggttggatttgtgtccccacccaaatctcatgttgaattggaggaggggcctagtgggaggtgactggatcatgagggcagattgcttccttgctgttctcatgatagtgaatgagttctcacaagatctggttgtttaaaagtgtgtggcacctccccaggctcctgctccaccatggtaagaggagcttgcttccccttcgccatctgccatgattgtaagtttcctgaggcctcctagtcatgattcccgtacagcctgcagaactgtgagtcaattaaacctcttttcttcataaattgccctgtctcaggtagttctttctagcagtgcgagaacagaatgatacactacatctattaacacaggaagctgttggacctacaaggacctcatcaaggtacagagttattatatattaattagttaccattcctttttcataaacaacattttaaactgtatttctaaatatattcttgcacattaaaaattaaagttactgtgcagtgcaacaatgtctcaaccacaaacttcacacaggggaaaagtccttttcttcaattactttgtcagagatttgaaaggcttttattcattttccatgctgtcattacttaactcattatctggctgccttgtctaatggctccttagctttcacgtggttcatagtccacatattctagttctatgatggtcaaatggcagcattttaaaaataatgacattgacacaaacaaatggaaacacatcccatgctcatggatgggtacaattaatattatgaaaatgaccatactgccaaaagcagtctacaagttcaatgcaattcccatcaaaataccaccatcactcttcccagaactagagaaaacaatcctaaaatttacatggaagcaaaaaagagcccacatagccaaagcaagactaagcaaaaagaacaaatctggaggcattgttacccaacttcaaactatactataaggcagtagtcaccaaaacagcatgatactggtataaaaaatcgggacattgaccaatggaacagaataaagaaaccgtaattaaagctaaatacagtcaattgatcttcgacaaagcaaacaaaacataaagtgggaaaggacaccctgttcaacaaatagtgctggaataattggcaagccacatgtagaatgaaact

SEQ ID NO: 675675 - DNA, 1744 bp, Homo sapiens
tggcctcaagatatcctcccacctcaacctcccaaagtgcagagattaccggcatgagccacaaaacctgacttagactttgtattcagagtcaaaaaaagtttattggaaaaaaaaaagtttattgaggtttattaggaattatacagtataacatgcactgtctttcaagcagttatctatgcttggctyaacagtaattttctttttttttgagtcggagttttgctcttttgttttggagatggagtttcactcttgttgcccaggctggagtgcaatggcgcaatctcggctccctgcaacctccacctcccgggttcaagcaattctcctgcctcagcctcccaagtagctgggattacaggtgcgcaccaccacgcctggctaattttttgtatttttagtagagacggggggttcaccatggccaggctggtcttgaacttctgaccttaggtgatccgcccgtcctcggctctcccacgagctgcatgggacttacagaatgtgagtcacagcgcccggcctaggagttttgctcttgttgctcaggctgtagtgcaatggcaagatctcagctcaccacaacctccacctctcaggttcaagcgattctcctgcctcagcctcccgagtagctgggattacaggcatgcgccaccacgcccagctaattttgtatttttagtagagacggggttcctccatgttggtcaggctggtctcgaactcctgacctcaggtgatccgccagcttcagcctcccaaagtgctgggattacaggcatgagccactgcgcgcggcctcaacagtaattttcatagcttcttaacagaagaaagtcaacttagtgaggctttacagaatttatattttatctttcagataccatataatctttttttttgagatggagtcttgctctgtcgcccaggctggagtgcagtggcaactctcagctcactgcaacctccgcctcctgggttcaagcagttctcctgcctcagcctccggagtagctgggactacaggcacacgccaccacgccaggctaattttttgtattttagtagggacagggttttactgtgttgcccaggctggtctcaaactcctgagctcaggcaatccgcccgcctcggcctcccaaagtgctggcattacaggcgtgcagctgcgcctggcccctatatagtctttataattattgtttaattcttttgagaagaacctatagatctttataattattgtttcttttgagaagaaccttgttaagaaaaaaatcaccaagactaagggagaacacatatactctacagagcttctattttcttcttagagatcttcctgagagagattaattctctccataacttaatcaacgtaaaaaatatgcataaaatcatagcatgacctggaaagaatccatgctttattcaccaactaggcctgctttccctgtactctccattccacacctatactcaccaaatgaagttgcaaaagacgaaaaagataaaaatgcaaatacctaaatgtctttttttatgtacatttccaacttttgtgtattccaagaatttacgatgtaatgtctatgtttctagcaaaaaagaactttttctctatttgtagttggtgtctagagcaattctaatgtaaagaagttttgcatttatttggtactgttgagtggctgagcagcaaggctgctatttcactgagtggagatacaca

SEQ ID NO: 675676 - DNA, 560 bp, Homo sapiens
ttatagtacagtgattccataacagggtttttttcctcacctgaaataattttattttctataaagttataaaatattgtatatcagactttgttatttatttctcttaaatcataaaaccaaaggaaaggtaaagaggaagaacagttaacctctggtgaccaaaggtacacttgatctgttattttgtattctatactcttcaaaagagcaatataaacagaattatttatgcccagcaaaatgttgcttaattacttatgcaccactgtttgsttgtattttaagctctctctaccagccacaggcagacgttaaacagctgctaaaactagctttagtcttgcctcgtttgaaattagcatacttgagctttgaaaaaactttgttaccaatttacatatgcatagagactgatatttagactcaccatatgatatgtccctcaagagcttttcttattgcctccatcctcaggtctcaacctagagactgtaaatctagcaggtgattaattctatacccttgagaaactagcaattagcacttgcaaccagtaa

SEQ ID NO: 675677 - DNA, 1878 bp, Homo sapiens
tgcgttagttgtgttgtgtcccaatatagagtggactggacctaacaacaatctcttgtaagatgaaaatggaatatgtggatatgatcaagtgaaaagaacccaagattctgttcacaaacaggtggaacagatatgagtgcctctctcttggctcactattatggttgtctgttgggggagaatcacttggattatagatccatcggctcagtatgtaagatgaagataaaaattaactgctactataggtcttcaccctggagtggacatgaaagtcagccataggggaaactccttgtactggtcagaaatttgtatagtaggccatccatattgcctgggggaaaatatagtctcaaggcagtggtgaatgatttgactattgggccatagacatgaaaagagaaaaattggaaaacttggaggtctggtaaaaaaaggaatgtagataggtctaagagaatttttgtagatctttgtattgtatgttgacactcatgcaggaacatccaccatagaagtggcactgataacatagaaatcagaacaactctgccatttgacatcagccagtctctatcattggccatttcggtgctctgggctcaagaagagagtagatgggaaggaatatatggagcaaatagcatgggtatgcactcactaaggctgatttagctactaacggtaatgaatgtccaaattttctgcaacagaatactaagccaaaaatcagtgaagtgatagtaaatgtttaacaactggctatccagggaaaagagccctgatttctgtggcattaacacaccaagcatgataaatttcaagtccctaacttgacatcactgaatgtaaaactgtgaagaaatgcaaatttagatcgtaagaaaaaaaatcaagacagctttagcataccactaactatatgacaccatcccttcaggaaatcaacctaggaacttgatggcaagttgattacattataccttttaccatcatggaaaggacagtgaatcctcttgaatggaatcaatatatattccagaaattatgcttctccaacttaaagggcttcagtgagtgctactatctaaggattaacagaatggttctctggtgtgtgattctgtataacatcacattggatgaagagaactttttcccagcaaaggtaatatagctgtgggaatataaccatgagatatagtggttctaccacacattgtactacagcaaagatgttggccagatcgaacaactgaatagccttttgaagttgcagctagctgcttggaaataatcatcttgacagtataaggcatcatcatccaatacttagaatatgtcaaatcaatggcagttatgtatccttaataggttgaatacatggaaccaaaactgtagatgtaagagagatcttgctttcaatgagttctggtttgctgtttgggaaattagtggttctagttcctaaaattctaggttcracagctctagatgtcttattttcatataaaataaatacttctacatagggtactcagcaagagcctcatcgaattgcaagttctcatgccccagctgtaaggattactgcctactgagagctcataaacaaattcccctttgaataaggtcgttgccttaccctcttcccaggggcagcctgcatgaactgtcctgataagcatatctcaatttgggacacctttgaagggccatctcagattcagagtttcatttatgtcaaatgaggcctctcctccaattgtattccagttcagtttcctcccacccaaacgtgcttttctcacagacactggtcccaagagcacttcttatcaaaccacttgtttgagaatgtccattttagca

SEQ ID NO: 675678 - DNA, 1878 bp, Homo sapiens
tgcgttagttgtgttgtgtcccaatatagagtggactggacctaacaacaatctcttgtaagatgaaaatggaatatgtggatatgatcaagtgaaaagaacccaagattctgttcacaaacaggtggaacagatatgagtgcctctctcttggctcactattatggttgtctgttgggggagaatcacttggattatagatccatcggctcagtatgtaagatgaagataaaaattaactgctactataggtcttcaccctggagtggacatgaaagtcagccataggggaaactccttgtactggtcagaaatttgtatagtaggccatccatattgcctgggggaaaatatagtctcaaggcagtggtgaatgatttgactattgggccatagacatgaaaagagaaaaattggaaaacttggaggtctggtaaaaaaaggaatgtagataggtctaagagaatttttgtagatctttgtattgtatgttgacactcatgcaggaacatccaccatagaagtggcactgataacatagaaatcagaacaactctgccatttgacatcagccagtctctatcattggccatttcggtgctctgggctcaagaagagagtagatgggaaggaatatatggagcaaatagcatgggtatgcactcactaaggctgatttagctactaacggtaatgaatgtccaaattttctgcaacagaatactaagccaaaaatcagtgaagtgatagtaaatgtttaacaactggctatccagggaaaagagccctgatttctgtggcattaacacaccaagcatgataaatttcaagtccctaacttgacatcactgaatgtaaaactgtgaagaaatgcaaatttagatcgtaagaaaaaaaatcaagacagctttagcataccactaactatatgacaccatcccttcaggaaatcaacctaggaacttgatggcaagttgattacattataccttttaccatcatggaaaggacagtgaatcctcttgaatggaatcaatatatattccagaaattatgcttctccaacttaaagggcttcagtgagtgctactatctaaggattaacagaatggttctctggtgtgtgattctgtataacatcacattggatgaagagaactttttcccagcaaaggtaatatagctgtgggaatataaccatgagatatagtggttctaccacacattgtactacagcaaagatgttggccagatcgaacaactgaatagccttttgaagttgcagctagctgcttggaaataatcatcttgacagtataaggcatcatcatccaatacttagaatatgtcaaatcaatggcagttatgtatccttaataggttgaatacatggaaccaaaactgtagatgtaagagagatcttgctttcaatgagttctggtttgctgtttgggaaattagtggttctagttcctaaaattctaggttcgacagctctagatgtcttattttcatataaaataaatacttctacatagggtactcagcaagagcctcatcgaattgcaagttctcatgccccagctgtaaggattaytgcctactgagagctcataaacaaattcccctttgaataaggtcgttgccttaccctcttcccaggggcagcctgcatgaactgtcctgataagcatatctcaatttgggacacctttgaagggccatctcagattcagagtttcatttatgtcaaatgaggcctctcctccaattgtattccagttcagtttcctcccacccaaacgtgcttttctcacagacactggtcccaagagcacttcttatcaaaccacttgtttgagaatgtccattttagca

SEQ ID NO: 675679 - DNA, 804 bp, Homo sapiens
gaaactagtcttcaacaaggtaagtttgaagtaaaattgtatactttcacaagttcaaaccaaataatcacattcacatgagataaataatataggttgctcatatttttctaaaaattcaaatgctagaagggatatgtaattcaaaatatayagtttttgacattaaaactggccaacttataaaattcagaatatctgttcaggaacccttgcccatagtccctggaatctaaggcagattcagtagagctagtaaagcaataaatgaactggcccaaagcatttaaaagtgaaagccaggagttacaccaaactgagcactgtaatagctttcttatagtgcatgacagtggaaagtgtcttttactcaagaatcagtatggttgactagaaaggaatttaaagatctggtatggttttatgagattaaggaataaaactgtacattatttcattcactaagtgagcaaattacttctctgcttgctcttgttacgtccttataaattggtgataaccttatcttccttgtgaaaatcaacagatgacatgagggttaaatggcgaatttagggggaaaatatctgtaaataattacaaaatagtgtcattctccttaagttaatttgatttttatataccactaagaatgtatgtagttgttttgaatctaccacaagcttgtcaagtaacttgaggttttgttattgttgttgggtttttgtcctgcctgtttcttcctttatacatgagaattctgaataaaaattgagaggattctgaccaaagaattagtcctca

SEQ ID NO: 675680 - DNA, 672 bp, Homo sapiens
atataagttgtcatcattgggggaagttgggtgatgagtacatgagagtctttgtactgtgtacttcctgagtccacaattattttaaaataaaaagaaagttaaaaaaataaataaaacctaaaacctataaatgacattcttcagattttcaaagtaagtttgaaactctgtattgtatttcagcataccctccaaatcagaaccacttaaactcttaagtcttgtgcttactaaaatactttggccttgaccttccaatgcctctctcttcctccatttgacttgttaaacacatggtctctttcaaggtgcactttaaattcagctgctccctttaagcactgtctggtcaccaggtaaatataatatcttccacctgtgcaaccttgtgacatcttttgatttttagtcccactaaattgtaagctcttgcrgtaaagagtttatatctcacttgtccttttagtctacacagattctaataagtgcgctcagcaatatttattgaaatgaaataaaatgaagcattcagccttcaaatgcaagggccattgtcttataaaaatgaaagtggagatcagttctaatcaactaataagtcaaaaaattaaacacactgaagatcacaataatatgtatttttaatctagtgtaacttttcatgttgca

SEQ ID NO: 675681 - DNA, 626 bp, Homo sapiens
tccttattaataaaaagcattttgatgaccaaattggtgagaacatttaccattcactctcttagcatttttcaacaatacaatacactgtgttgttattaactctagtcaccatgtagtagagtagatcttgaacttattcctcctatctaattgaaattttgtatcctttggccaatatctctgagttagtctagttttgtgctgctattttctatgactacagaaagttcaagtcacaatttctaacttgctgatctttaatgtagcacaaactttcaaagaattcaggatgaagtargactgaactctgttggggaagactaataagtatcttatcagaaagcttatgtcccagatttcaccctctgcatcatttcctatcgcatcacagtgtgctgctctttcatcctgccaactcaaagttgaagtaattacttggtgaaaatgggctaacttttccttggtgctgaacatatcccagtgactatggaggcgaaattgtcagcactttctgaaattgccaaaataccaggtggtaatgcttctattccttatgatgtggtggatataaaacatggtgtgtatgtgtaaaatgattctttcctgatgcaatatttcagctc

SEQ ID NO: 675682 - DNA, 1922 bp, Homo sapiens
tgagacttgtatcatagaagagactaagagggctgatgaagatgcaaaagagaaagcctgatgccaagggaatgaggttgaaagcttaatcagggtggttgtccttagtcaaaataaaggatgctccctcatgcagactagaaaaaaaggaaattaagaccaatttgattgtatatacatttgtggggaaaacaggaagctgagagagatggtggttttcttgattttctcagtaagcaggaaaaagataaacttgcttagagtagggaagaatgtgggcctccagggggtaagtaaaactttatagtcaaaagggaaggagccagtatgactataactagtggagatttgtaaaaggattgaggaacagtgctgaagatcttgatgctatagaccatatgttgctagtggttcacatttataaagttgactgatacctttagaaagtgtattcttacagttttagagcagaaaagtttaactttagcattgatcaattcaagttttgcttcacaggtgtggttgaaggcggaagatactaagcaattaaggatgttggtgagaatattgttttagaatattgtttcacctaaattatcaaatttgcccaacccaagacaagtagagaagagagagttcaaaaataactattcgacttcttagggtaccttatctcttaggtatcctaagagatatacttctgcttcagtaacacacacacacattcaggcactcacattgttaagtcaaaacagtttcaaaggacatcttcctaagcatatgttaaaggagcccaaatctgtaaaaacacagagtagacaaaattatttttttcaaagcttctttatctctggtagtgttaggttgcttatatcaaattacacattatataaaataaaaatagaagtgtttaaaatcttattctaatacttagcctgatttcaattaaaaaaactctgaataaaaatttgagaatgatagatcccttaagatggtctatcatcccaccactgtgacataatggttaatataatttgcctagtgtcataattataagtctttcatgcgtgacatgtaaaaatatctgctaggaactggcaaatattttcatatggttactttagtactatttgtacctcaacaacaattgaaatttataaaatctgtcaaatcaagtatttactgtttcatatatatgcaaaaatggtataatacacttatttttagttatataaaatggtttgccaacttaaatataaaaatatrcatacaaataaaatgtgacaatcttgaaattcttatataacagaccaaaaaagcctcaaaagaagtatttttcacattttaccgtttaagcattatccatagacaattcacaatttatttttcacttgacattattaagcccataaacatgtgtatctgtgaatctgcctgtatgtgtgcatgcttctttagaaaaaatggcagatagaacaatgactttgaaggcacgacttagccatttatcagtctctggagttctagaagccttgtttttatgatgtgtttcatttcagatattgtgatccacgacactgaaactttccaagtgaagctcaaggttatttacaagaaagcatttattattttagaaaataagcagttaaaaaatcctacacatcaatacaagctaggttaagcatcacttttgaaggcaaggagaattgcatttgtctaggctgtaaaacctaagtttagataaagaatccagcaataaagctgaaaggaagaagggataaaagggacaggatattattaaagcttatcactccttaggtccatacagttcaatgacagtttcaaaaggatgtgctgataaaggatttgcctgcagtttgacacactgtgcaggggttccagtaagcctcttgtggaacaaa

SEQ ID NO: 675683 - DNA, 604 bp, Homo sapiens
tgatttctttatgtctttgaataggctgaacatctcattttaaattttattagattgtcctataaagttgattttattaaaagcattgtttttcttttggttattgctttaawttttcttagtatactagttctccatagttcccccaatattaatttaccaatgtaaggtccttggtctccaagaattttagaatttagatgggtttatttcctttcttattctgttatcttatttcctgcacagttgtctctatctagtaattttggaattactttcagctcctcaacttcctcagactccaaaaaatgggtcttaaaatagggatttagggtgtcttttacaaaagttgaataaacagcacatccattaataggatcaatgtttccaataacaatagcgtacctgtgctgtacaacctcactaggtccacacttttgtataaaaatgtaagtctagacatttataaaatgttagtgttcgctttccttttctttggggggcaggcagtggttctcgctccaacatactggcttatcacaagttcagtttatagaatttttaaactaacaagtgttattttcttttgaataatattcatttg

SEQ ID NO: 675684 - DNA, 1963 bp, Homo sapiens
tacatttgtttctaggactgataggtttagtttcaactgcaatttataattatgcgcagtttatgtggtatgtttctttatctataggatatgcattctctgcctttttatttaataaaattgggtgttcaagaaggttgaaaggtttattgtcaggactacctttgcgcttttatctattctgatgactttagtcccctgtttgcttaatattgtactatctgcattatcaggtatttttttggtggggagcattatttaatatatacctattgcttatacaatagttagcttttcatgttttctttttttttcctctttcatctcccctcaattttagtcgtattatttctatgttattagagtatataatatgtatatatttgtttttccctcatgggatttatatatatatacacatatatattcatattttttaaaatgctcactatctttttctgaaattttcccagttatcatctggttggctgtaacttatgcttttttaaaaaaataatttctccttgtttttatttgttttgacttttagttttaatttctgattcaaggtggctttccatattttcaaatacttgtttcaatacttttactgctgtttggagtgcagacttacagttttcttttgcttgatattttgccaggtattaatgtaaggtgcaactcatttaagttgcatgcacatttttgactgattttctgcattagttctctatagatttgttttcttgtgttcatttttagtgatatccaggtggcttacatgattctcatcttaattgcaccattttctgttagtgtggcaaagaactggtagctcagcagtggttggttgtttggttttggaagtgaatgaggggttgttggtactcagattttacatcctttggtcttgcagagccctgaatttttcactttttcttgttttctctttcaccacctaattgacagaggattctcttccctttcttttgaatgttattctccttagaagttaattgtgtgtgttttctcttaattatatatttttggaggggttctcttttggttttaaaacattaaatagtttgcctttttaaaatggatgcctgatattctgtctctttaaatcctgcatctatctctttctatggtgtttggttctttgagagcatgcactttgaaatcccttccttgcagtttgttgtatgatctgcttttttttttttattttttcttctccggtatcttcaaattcagtgtagatttaatctttcctgtcaatggttgcttcaaatcaccctcaggctccttagctggtatccctcctctatatttcttgcaatttttttctgcttttgcttgccacagagctctgacatgcatggggatgggcagggacatgtactgcagcactaatattccttgtattttctcttttcttcacagtcatttttattctcttgtcttttactcttgttaatattgagggtgtggttttgcatagacgtttcataaatgctcagcgtagttaattcctgtcatctgggaagagattcagagaggtagtatgttgttgttgtgggttttgttagtttgtttttactacacagtatttattgcctacaggtaccttgaagtttcttcctaaagtttttttttttttaattaatctktgtttatactttatttgacaatatggatccccccaaatttagtaagcacctatacatgtgcttttggccatttcagttttgcttttcagtttccttgtttctccctcaactcagctgctgctaatggtgtgattgtgaaggtcattttctaaatctggttttgtgattcccagtttattttatgcaaatgagtaatttttctagatctttgttgcccaaaggcatataaaatttcatctattttactgagatctgaaattattcagcttctccacttcaagtccctgata

SEQ ID NO: 675685 - DNA, 636 bp, Homo sapiens
tcacgccattttcctgcctcagcctcctgagtagctgggactacaggtgcccaccaccaagcccggctaatttttttgtatttttagtagagacggggtttcaaggatggtctcaatctcctgacgtcgtgatctgcccgcctcagcctcccaaagtgctgggattacaggcatgagccaccgcacccttgattgtgtttgtttttatggtagtacatacaacattgttttgattactgttgccatatatcgtaatcttatccagttgagtgaatcctttcccttattttagaactatttaatgtgtagatattcaaaacattgtatatctacttccagaactaattcttttgcggccatgcatcacctaatgacagcaatacattctgataaatgtgtccttaggtgatgtcattgctgtgccaacatcatagagcgtaattccacaaacctagataggtgcagcttactaaacacacaggctatatggtatagyctattgctcccaggctacaaacctgtacagcatgttactatactgaatactgtagggaattataacacaatagtaagtattgtgtatctaaacatatctaagtatagaaaaggtattgtaaaaatacagtataaagataa

SEQ ID NO: 675686 - DNA, 630 bp, Homo sapiens
aatcacaacggcatctctcatgatgcagatcactaatgaaaaccactttttaaaatttaccagttaaatttcaaatctcatttatgtatttgtataactttttattagacggagtctcgctctgtcacccaggctagcagtgcagtagcacaatgtcggctcactgcaacctccatctcccgggttcaagtgattctcctgcctcagcctcctgagtagctgggattacaggcgtgtgccaccacacctgrctaatttttgtatttttagtagagacagggtttcatcatgttgcccaggctgatctcgaactcctgagctcaagcaatctgtccacctcggtgtgagataaatcaattattagagtggatgaagagtaaagagaattcaaaagataaatttaaagttagacaggccaggtgtgatggctcatgcctgcaattccagcactttgggaggctgaggcaagcagatcgcttgagcccaggagttcaagaccaaacatctctacaaaaaatacaaaaattagccaagcccatggtcccagctactcagagactgatgtaggaggatcgcttgagcccaggaggtggaaggtgctgtgagctgagatcgcaccactgcactcca

SEQ ID NO: 675687 - DNA, 648 bp, Homo sapiens
ttttaaaaagatctcagatacacagagaacaaaacagtggttgccaccagcaggggtggtgggcagtgagaggaaatgggaagatgtaggtcaaagcatacaaattagcaaatatgtagaatgagcaagtttagagatttaatgtacaagatgaggactgtggttaataaaattgtataagggacttttactaagtagattttagcagctcttgtcacaccaagaagcaacaatatgagatactgtataacaatctataacatcaaaaacaaagaataaaaggacaagcttcctgacatctattcaaatcttgctttctccaacttggtaacaatagctgatgattgccactatactgctattacctttctctgtgccttccttctcctcctcctctttttccctccttgccaacattatcactttccctttatatgcatgaagaaatctttcaagaataggagttartttgttagaaattctaccaatcctacctcagctattttaccttgtgaaagttaccgtatacagcctaaacaatttgcagtcaaaatggactttgagtcttaacacttgaataagatctcacttttatattgctgccaataagaacatagacaaaaataatatcttagatcatatagtaca

SEQ ID NO: 675688 - DNA, 648 bp, Homo sapiens
ttttaaaaagatctcagatacacagagaacaaaacagtggttgccaccagcaggggtggtgggcagtgagaggaaatgggaagatgtaggtcaaagcatacaaattagcaaatatgtagaatgagcaagtttagagatttaatgtacaagatgaggactgtggttaataaaattgtataagggacttttactaagtagattttagcagctcttgtcacaccaagaagcaacaatatgagatactgtataacaatctataacatcaaaaacaaagaataaaaggacaagcttcctgacatctattcaaatcttgctttctccaacttggtaacaatagctgatgattgccactatactgctattacctttctctgtgccttccttctcctcctcctctttttccctccttgccaacattatcactttccctttatatgcatgaagaaatctttcaagaataggagttaatttgttagaaattctaccaatcctacctcagctattttaccttgtgaaagttacygtatacagcctaaacaatttgcagtcaaaatggactttgagtcttaacacttgaataagatctcacttttatattgctgccaataagaacatagacaaaaataatatcttagatcatatagtaca

SEQ ID NO: 675689 - DNA, 648 bp, Homo sapiens
ttttaaaaagatctcagatacacagagaacaaaacagtggttgccaccagcaggggtggtgggcagtgagaggaaatgggaagatgtaggtcaaagcatacaaattagcaaatatgtagaatgagcaagtttagagatttaatgtacaagatgaggactgtggttaataaaattgtataagggacttttactaagtagattttagcagctcttgtcacaccaagaagcaacaatatgagatactgtataacaatctataacatcaaaaacaaagaataaaaggacaagcttcctgacatctattcaaatcttgctttctccaacttggtaacaatagctgatgattgccactatactgctattacctttctctgtgccttccttctcctcctcctctttttccctccttgccaacattatcactttccctttatatgcatgaagaaatctttcaagaataggagttaatttgttagaaattctaccaatcctacctcagctattttaccttgtgaaagttaccgtatacagcctaaacaatttgcagtcaaaatggactttgagtcttaacacttgaataagatctcacttttayattgctgccaataagaacatagacaaaaataatatcttagatcatatagtaca

SEQ ID NO: 675690 - DNA, 649 bp, Homo sapiens
cagatcagactagacaatcatttctaggaataaactattggtatagttactggcacgtggatttgattggaaacaaacagatagaagaatataaaattttgaataaatgattttgccaatggagtcatgaaattgcaataaaaaaacacgtaagatatcagaatttaacacaacctgcatgtcctagaccttcaagcaggtggcaggcagtaggcagtagacttgcacattcatatagctgccaaaaaggtcatgtgccccagttcccactgcagatgcggtcaaggagaataacagacagggggataccttccagagggtgaggacattgcataaaagaactctctccagaaggcataaacagtgcctaatgaagaatttctcctgtccccaaggcaatgtctgcccaatgggattttaaaattgccccaaaccagttgctgtgtttctttttccccttctaaatggaagcgtytattgtggtaattgtaacccttctccaccgttgtaattagatatgtatttattgtctttttagttcataggtctccggagcctggggcatcgcatctagatggaaaggactgaatatcaactgaagagcctaaattttgggctgatgcagtcagtgattaagagttttgagtca

SEQ ID NO: 675691 - DNA, 649 bp, Homo sapiens
cagatcagactagacaatcatttctaggaataaactattggtatagttactggcacgtggatttgattggaaacaaacagatagaagaatataaaattttgaataaatgattttgccaatggagtcatgaaattgcaataaaaaaacacgtaagatatcagaatttaacacaacctgcatgtcctagaccttcaagcaggtggcaggcagtaggcagtagacttgcacattcatatagctgccaaaaaggtcatgtgccccagttcccactgcagatgcggtcaaggagaataacagacagggggataccttccagagggtgaggacattgcataaaagaactctctccagaaggcataaacagtgcctaatgaagaatttctcctgtccccaaggcaatgtctgcccaatgggattttaaaattgccccaaaccagttgctgtgtttctttttccccttctaaatggaagcgtttattgtggtaattgtaacccttctccaccgttgtaattagatatgtatttattgtctttttagttcataggtctccggagcctggggcatcgcatctagatggaaaggactgaatatcaactgaagagcctaaattttgggctgatgcagtcagtgattaagagttttgrgtca

SEQ ID NO: 675692 - DNA, 1804 bp, Homo sapiens
cagaagtaaccaggggctggaggaagaggtcataggggtaattgtttagtaggtagagagtttcagtttaaaatgatgaaaaagctcatgagagatcagtgatggcggcacaacattgtgactatacttagtaacactgaaaggttaaaaatagtaccttttattatgtatatcttaccacaataaaaagccccacagggtagtcaatgttatgtttaaaagagaagaaataaatgggaagtcattttagatatgtatttacacaggtcttagaagagctattcagcagatgagtacctaatgaactggaattttggcagagatcctgggagtgaagtgaaccaaatcacttgggaagtgtgaagtaatttcctcctccagggaggtcagcagatagaacatgtgaagccaatgttaagatttctctggagtctaaaagattatcaaattggacaagtctgttctcagtgttttccaacaaggtgcaactgacgttttggacagaacaactgcttcatcctgtaggactctcctgcctgccayatggtacttaatacccctgaactccaaaccacttaccaggggcattcccctcaccctcatcactctaacaatcaaaaagaaacccacccacgtttgttaccacgactaccatgaccccagatcactcagatgacaaccacagagtgattgaatccaaaactgaaataggagcaccctggtctgttaggatatgacaagctataaagcagtagcaaacaaccctaaatctcaatcaatagcttcaaaccaaaaaaaaaaaaaaaaaaaaaggcttccgtcttgttcacattacatgtccatcacagggccagcccaaggctctattccacactgtcctcacaccagaacctgggctgatagagctaccactctgcagaatgctgacagatgcagtggcagagggaatgagatacagtaagtggtatgctggcatttaaataattcacttagaagtgacatatagtacttctcatattccactggccaaagcaagtcaaatagccttgactgtttcagggccaggaaagtgcaaccctacaccacttacctggaaggaaaagaaccagccctgatgacttccaaactatgcctgcgaagtgctctgaaaagtagaaaacgctatataaatgttaattaaaagagtatattactaacaatactactttgcccttccatccattcaatggatatttattaggcatctaatacatgctggacatcgtctcctaagcatcaaatatatgccagacaccatgctaagagagctgatgaaaactgagtcgtaagtggtagggtaagagaaacaatctttaaacaattccagtgtggtatgataaatgtgatcagggaagtcagcccaggtactccagaagttcccagggcgagcacctgagccagcggtgggggcaatggatgggaagacttccaggagcagtaacctacatagctgcaggatgcagtcaccctggagaacctgctgtagatgcacaggtggaagcatgaatgtgggcgctgtggatggggtgtccctgccttccgccaagtcaatgagaccaacttgccacaaattccccatagccctaatctgcagtcacttccactaaatgtccactgacacatttataggttttcttggttttctaggcagaccggatgtaaagaacagatttctgggactactctccactttccccccaactagaacattctatgagatgctctaagttcaaggagacaacattctttcagtccagttatcata

SEQ ID NO: 675693 - DNA, 622 bp, Homo sapiens
tatagaaaaagagttatgcactacctacttacaacacaaatttttggattatctgattctagccttgttcacttgttcattattattgttattttgagacagggtctccattgctcaagctggagtgcaatggcgtgatcctggctcactgcaacctccccttcccaggctcaagtgattcttgtgcctcagcctcccgagtagttggcactataggcacgcaccaccatgcttgaccaattttttgtatttttggtagagacagggtttcaccatgttgcccaaggtggtctcgaactcctgagytcaagcaatctgtccacctcggcctcccaaagtgctaggattgcaggcatgaaccaccatgcctggccttgttcattattttcaaactactttgctgactcctttgtaagttgtagaaaactgatagacaagcaaattctgccttgtccaaccatgtttgcctctgttttgaatctatttagacctccctttactctttacatatttgtgctttatttgacttttcctttgaactggttctaatgtctgcctggttccctcattgaatgagcctaataaaatcattgagtgtttttgtatctgtatgagattcatg

SEQ ID NO: 675694 - DNA, 607 bp, Homo sapiens
tgaaaaagcattcaaactcacaataagcatttgtagaaatttcaaagcagggtttaaaagtaacaattcagtaaagatcaggttgcagtattccctgggttgcaatgttgcatcagtttcataatatagcttggagcttccttaaaaagcacttttcaaaagaagacatatatgtggccagcaagcatatgaaaaaatgttcaacatcactaatcgttcacgaaatgcaaatcaaaaccacaataagacaccatctcacaccagtcagaaaactaatattaaaaagtcaacaaataacagatgctggcaaggttgcagaaaaaaagggaatgcttattgactgctggtgggaatgtaaactcattctgtcattgtggaaagcagtgagacaatttctcaaagaacttaaaacagaactaccattcaacccargaattctattatcagatatgtacccaaaataatataaatcattccaccataaagacacatgcacacatatgttcttcacagcattattcacaatagcaaagacacgaaatcaacctaaatacccatccatggtagactggatgaagaaaatgtggtacatacacaacatggaata

SEQ ID NO: 675695 - DNA, 641 bp, Homo sapiens
tctgtggggctcattgacctgtctagaagaagaatggataaggcataaggattgagcaaaatttacttttgaaaattttctttttttttttttgataatatctggtcctgcccttatgggaaggataaagctctgtaaaagcacagggccagctcctgttttctgaaccctttctatggatggsgatgaatctatgtattctacttatcagagtaggtttaccctcatggattatatttgaggtcccacatctgagtggttgacatattgtgccaatatacctagccaaagtgcccttgcattaggcctggcttgtttactaaggtatcagctggttggaaggacctaggagactgtatgtataagctgagagagaggcatcagtgatatagggatctgggccaactgttcattcagcctacttttgtcttttgcattttctcttgccctaaaacatattgcatccattataggatagatggttgcagtgaccattcagtcttatgacttggtagatctaatagcacttcagctcaagttggacaactccggatttatacttacttggcatgcctttctcacttagcttaataatttctagcttttaatttaatgacgttcacttgaacatttagaggaca

SEQ ID NO: 675696 - DNA, 641 bp, Homo sapiens
tctgtggggctcattgacctgtctagaagaagaatggataaggcataaggattgagcaaaatttacttttgaaaattttctttttttttttttgataatatctggtcctgcccttatgggaaggataaagctctgtaaaagcacagggccagctcctgttttctgaaccctttctatggatggcgatgaatctatgtattctacttatcagagtaggtttaccctcayggattatatttgaggtcccacatctgagtggttgacatattgtgccaatatacctagccaaagtgcccttgcattaggcctggcttgtttactaaggtatcagctggttggaaggacctaggagactgtatgtataagctgagagagaggcatcagtgatatagggatctgggccaactgttcattcagcctacttttgtcttttgcattttctcttgccctaaaacatattgcatccattataggatagatggttgcagtgaccattcagtcttatgacttggtagatctaatagcacttcagctcaagttggacaactccggatttatacttacttggcatgcctttctcacttagcttaataatttctagcttttaatttaatgacgttcacttgaacatttagaggaca

SEQ ID NO: 675697 - DNA, 666 bp, Homo sapiens
caagtagccctgtgagaaaaaatcttttccrctttgatgagtcaacaacaggatctaacttcagttttaaatctgctttgagtctatctaagtctcctgccaagttgaatcagagtgggacttcagttggcactgatgaagaatctgttgttactcaagaagaagagagagatggacagtactttgaacctgttgttcctttacctgatctagttgaagtatccagtggtgaggaaaatgaacaagttgtttttagtcacagggcagaaatctacagatatgataaagatgttggtcaatggaaagaaaggggcattggtgatataaagattttacagaattatgataataagcaagttcgtatagtgatgagaagggaccaagtattaaaactttgtgccaatcacagaataactccagacatgagtttgcaaaatatgaaagggacagaaagagtatgggtgtggactgcatgtgattttgcagatggagaaagaaaagtagagcatttagctgttcgttttaaactacaggatgttgcagactcgtttaagaaaatttttgatgaagcaaaaacagcccaggaaaaagattctttgataacacctcatgtttctcggtcaagcactcccagagagtcaccatgtggcaaaattgctgtagctg

SEQ ID NO: 675698 - DNA, 279 bp, Homo sapiens
gtgttctgaggggagcaggggctttggtctgttctgtcactgcagaatccccagtatctagagcagcctggcacacggtggccactcagcaagtagttacagagggagcccatgagtgagtaagcactgccaccaaggtgccagcagcctctgatcaccctgttctcccaccttgtttgactcaggtttgcctcacctcccccaaggggaggcctaacactgctttcgcttaccctagtccaagaacccctttgggggtrgggtgcccagacccgactg

SEQ ID NO: 675699 - DNA, 661 bp, Homo sapiens
tgagataattcatgtaaaaaatcagttgtaagataataaagttctgtgcaaactccaaagtacttcaaaatccagaaaacatttcataaactcggacagccagcctctaagagggcctccaatgatggatcctcccctcctggtgtttatgcccttgtatagtctcttcccattttgaatagggcagacctatgcaataataggatatcctgggagaaacagtgtgtggcttctgagactaggccacaaaaacaatgcacttctttcttgctctacggatttctcacactgggraaaccagtcatcagggcacaaggaaacctaagcagcctatggagagggccacagggtgaagagctgaggcctccagccaacagccctgtgcaggtgccatcttggaagggagcctcctgccccagtcaagccttcagataaatgcagccttgtctagctgctcctgactgcaacctcataagagtccttgggccagaaccacccagctaagccactacctaattatttaccccagaaattatgggagatgatacatgttattttaatttgctagattttgaggtaatctgagtaatttgttgtgcagcaataaaaactaatacccatttgctttgtgaaccaaaataaaataacaataaataaacta

SEQ ID NO: 675700 - DNA, 661 bp, Homo sapiens
tgagataattcatgtaaaaaatcagttgtaagataataaagttctgtgcaaactccaaagtacttcaaaatccagaaaacatttcataaactcggacagccagcctctaagagggcctccaatgatggatcctcccctcctggtgtttatgcccttgtatagtctcttcccattttgaatagggcagacctatgcaataataggatatcctgggagaaacagtgtgtggcttctgagactaggccacaaaaacaatgcacttctttcttgctctacggatttctcacactgggaaaaccagtcatcagggcacaaggaaacctaagcagcctatggagagggccacagggtgaagagctgaggcctccagccaacagccctgtgcaggtgccatcttggaagggagcctcctgccccagtcaagccttcagataaatgcagccttgtctagctgctcctgactgcaacctcataagagtccttgggccagaaccacccagctaagccactacctaattatttaccccagraattatgggagatgatacatgttattttaatttgctagattttgaggtaatctgagtaatttgttgtgcagcaataaaaactaatacccatttgctttgtgaaccaaaataaaataacaataaataaacta

SEQ ID NO: 675701 - DNA, 656 bp, Homo sapiens
gttacatgatgatggtacttcaactagtaggactaatcctaatttaagatgttatttacataaatggctactgtcctgcaatagcctctataatkctttttcatcattctccctgggtatcagcattacatggttctgggagtcattccagaaggcttgtccagaacctgctcctgcgccattccagtgattttgaaatcacttgattccttgtattatatttcctccttcttaaaatacagagtatctgtttgctaccctgagtcctgactaatgctatggcatatattaatttttataaattctgaaatgcatgtaaagttgttagcttttttggaaggctgtgtctctaagtgagtccccagctccatttttttgaactttagatttaccttttccccatctcttttgagtgtctagtatggtgtgacattgtgctataataaatatatattatgctgggaactgtggctcatgcctgtaatcccagcactttgggaggctgaggtggatggatcgcttgagctcatgagtttgagaccagcttgggcaacatggcaaaacgccatttctacaaaaaatacaaaagttagctgggtgtggtagtgcatgcctgtaatcccagctacttgggaggctgaggtgggagcatagct

SEQ ID NO: 675702 - DNA, 610 bp, Homo sapiens
aagctgagtatggggcagtagaggcttggggggcctttacgtaaagctgccaattttccaacctcattcctttttctccatatttgctattgagagcctttaaatacttgtatttttcaaatatattttctatattttaaaattatagacaggttatttcaaacaagccactctgccattacyagaaatcatatgtcttatgtgacttttaagttttttcttcctctagtccttctatgcttgagttccactgaagagtcactttctcatatgtgaaagaatattctttgctgatcagtgtgtggatttttttctcctgctagagtctcaaaaaacaatgcagctatgtaattgctacaatttaatgaccttaactcacttttacctcccaaaatggcagaaagtagtcagaatttatttttcatgtctagtagtcagcaaggaggatgggaaaagtgtgaaaaggaaaaaaattgtttttgaaatcaattctgtactcttcatagctaactattgcaaaagttcattggtctctttcattttacttccttaaataaccacttcttctcttactgagaagaacctattgcccaggacctatcctctctat

SEQ ID NO: 675703 - DNA, 614 bp, Homo sapiens
ataaatcaggctttcctcaatcccagtaattcatgtttaatattccttggcaaatactgaatttcaatctgtgcttatttcatagagtagaatctttcaaatgttgtgttatcgagtcctacatagtcaaagggaggggaaagacaaggagggtgattaaggtgaagcgtttcttccattactggtagaacgaagtttctcatctcttaagcaccgaattctgcaatcattccaaaagtggaagctcagctcacagcgcattttggggaagcttaaaccacactaaccatttaaggtcaagcaaacaattggccaaccctaacgtgtattgtgcagggttttcatctcagatgtaacagatctctctatgtctacatcccaactccagaaaacgagaaatcgagttcctcctctcaccatcgaagctctgcagacacctcgctggagaccccatggtgagcctcatcacgtaaaggccccctcgcaagctgccggctccagcttgcgccccacgtctacctasgctccctctagcctctttaacgcacagtcgagcaacaggccccttgcaatcaactctagccgccggactcccgaccaggtctctcgctcgg

SEQ ID NO: 675704 - DNA, 1616 bp, Homo sapiens
  misc_feature 800, 811, 823, 824, 825, 826, 827, 828, 829, 830, 831, 832,833, 834, 835, 836, 837, 838, 839, 840, 841, 842, 843, 844,845, 846, 847, 848, 849, 850, 851, 852, 853, 854, 855, 856,857, 858, 859, 860, 861, 862, 863, 864, 865, 866, 867: n = A,T,C or G
  misc_feature 868, 869, 870, 871, 872, 873, 874, 875, 876, 877, 878, 879,880, 881, 882, 883, 884, 885, 886, 887, 888, 889, 890, 891,892, 893, 894, 895, 896, 897, 898, 899, 900, 901, 902, 903,904, 905, 906, 907, 908, 909, 910, 911, 912, 913, 914: n = A,T,C or G
  misc_feature 915, 916, 917, 918, 919, 920, 921, 922: n = A,T,C or G
atcattacaaaaatacccctgatgaaggggtgggggaagtataagggaaaaaggaaaggaggaaagattagaggccagttagaaagcttggcctgacccttttctcctcctttccctgccagactttctgactgacagctcaccctgatggggggaagtctgctttatattttgtgatcattctggctgctatgcagaaarcaggtcggaaagaatgagaaaggagatggagaggttgtctaggaaacttttggatttctagctgaaagacagtggtagctttgatgtgctgtgtggcagtgctggagacagatagagatgggcttacccaaaacatttaaaagtcggtaaacctgtttttaattggcagtttaccagagatactaatttgtctaatggatacaaacttatttattttagtaagaaatagtatttttaagaaatattttggttttcagagcagatgttagtttgcttttagccaataacagttgataaatatttttctgtggtggtgggtatgactttttgttcatagttttcccctgcatatattttttaagcttctggtttacgtattaaaacccttttttcatataaaatagctgctcaaagttagcatgaataatttttgtatcattttaacccagttgtaattacataaatgcatgtaatatttagctctggtaattattaattctgctctattttttagatattatgatcagatctgttctattgaacaaaaattgcccattttcctgaaaatccaggttatgtccttcaatcccctgaagagnagtttgagttncccctaacgggnnnnnnnnnnnnnnnnnnnnnnnnnnnnnnnnnnnnnnnnnnnnnnnnnnnnnnnnnnnnnnnnnnnnnnnnnnnnnnnnnnnnnnnnnnnnnnnnnnnnacaaatttcagtaaccctgtcagcccattgctggaaagcaagtcttcagattaaagattttttttttgaaaccaatgcttaaatacttggtggggaaagagaaataaaatcacctccctcttttttttttttgttgttgacgtttttctttttagcatgcagcagaactgattaaaacagtggcatctcgctatgatgaatatgttaatgtgaaggatttttctgacaaaatcaatcgtgcccttgctgcagcaaagaaggataatgacttcatttatcatgatcgagttccagaccttaaagatctagatcctattggcaaagccacacttgtgaaatctaccccggtcaatgtacccatcagtcagaaatttactggtatgtcagttattcagacacactttaatctcatttttctctagtttactctgtttttcctagctaaaaatcacataattgctgttgtatgctttgaatataatttgtattcatgttgtttaaaatgaatatgagaataaatattgtgccagtgcaatgttaagatggaaagtaaacaataataaagcatatgtaaagtatacaatagttagaagacttgaaactgtgtgtttgattaagactgtagcacttgtcattttgttaacttttgttatttaagatgctgccattaaaaataaacaaatatggctggatg

SEQ ID NO: 675705 - DNA, 1616 bp, Homo sapiens
  misc_feature 800, 811, 823, 824, 825, 826, 827, 828, 829, 830, 831, 832,833, 834, 835, 836, 837, 838, 839, 840, 841, 842, 843, 844,845, 846, 847, 848, 849, 850, 851, 852, 853, 854, 855, 856,857, 858, 859, 860, 861, 862, 863, 864, 865, 866, 867: n = A,T,C or G
  misc_feature 868, 869, 870, 871, 872, 873, 874, 875, 876, 877, 878, 879,880, 881, 882, 883, 884, 885, 886, 887, 888, 889, 890, 891,892, 893, 894, 895, 896, 897, 898, 899, 900, 901, 902, 903,904, 905, 906, 907, 908, 909, 910, 911, 912, 913, 914: n = A,T,C or G
  misc_feature 915, 916, 917, 918, 919, 920, 921, 922: n = A,T,C or G
atcattacaaaaatacccctgatgaaggggtgggggaagtataagggaaaaaggaaaggaggaaagattagaggccagttagaaagcttggcctgacccttttctcctcctttccctgccagactttctgactgacagctcaccctgatggggggaagtctgctttatattttgtgatcattctggctgctatgcagaaaacaggtcggaaagaatgagaaaggagatggagaggttgtctaggaaacttttggatttctagctgaaagacagtggtagctttgatgtgctgtgtggcagtgctggagacagatagagatgggcttacccaaaacatttaaaagtcggtaaacctgtttttaattggcagtttaccagagatactaatttgtctaatggatacaaacttatttattttagtaagaaatagtatttttaagaaatattttggttttcagagcagatgttagtttgcttttagccaataacagttgataaatatttttctgtggtggtgggtatgactttttgttcatagttttcccctgcatatattttttaagcttctggtttacgtattaaaacccttttttcatataaaatagctgctcaaagttagcatgaataatttttgtatcattttaacccagttgtaattacataaatgcatgtaatatttagctctggtaattattaattctgctctattttttagatattatgatcagatctgttctattgaacaaaaattgcccattttcctgaaaatccaggttatgtccttcaatcccctgaagagnagtttgagttncccctaacgggnnnnnnnnnnnnnnnnnnnnnnnnnnnnnnnnnnnnnnnnnnnnnnnnnnnnnnnnnnnnnnnnnnnnnnnnnnnnnnnnnnnnnnnnnnnnnnnnnnnnacaaatttcagtaaccctgtcagcccattgctggaaagcaagtcttcagattaaagattttttttttgaaaccaatgcttaaatacttggtggggaaagagaaataaaatcacctccctctttttttwttttgttgttgacgtttttctttttagcatgcagcagaactgattaaaacagtggcatctcgctatgatgaatatgttaatgtgaaggatttttctgacaaaatcaatcgtgcccttgctgcagcaaagaaggataatgacttcatttatcatgatcgagttccagaccttaaagatctagatcctattggcaaagccacacttgtgaaatctaccccggtcaatgtacccatcagtcagaaatttactggtatgtcagttattcagacacactttaatctcatttttctctagtttactctgtttttcctagctaaaaatcacataattgctgttgtatgctttgaatataatttgtattcatgttgtttaaaatgaatatgagaataaatattgtgccagtgcaatgttaagatggaaagtaaacaataataaagcatatgtaaagtatacaatagttagaagacttgaaactgtgtgtttgattaagactgtagcacttgtcattttgttaacttttgttatttaagatgctgccattaaaaataaacaaatatggctggatg

SEQ ID NO: 675706 - DNA, 1616 bp, Homo sapiens
  misc_feature 800, 811, 823, 824, 825, 826, 827, 828, 829, 830, 831, 832,833, 834, 835, 836, 837, 838, 839, 840, 841, 842, 843, 844,845, 846, 847, 848, 849, 850, 851, 852, 853, 854, 855, 856,857, 858, 859, 860, 861, 862, 863, 864, 865, 866, 867: n = A,T,C or G
  misc_feature 868, 869, 870, 871, 872, 873, 874, 875, 876, 877, 878, 879,880, 881, 882, 883, 884, 885, 886, 887, 888, 889, 890, 891,892, 893, 894, 895, 896, 897, 898, 899, 900, 901, 902, 903,904, 905, 906, 907, 908, 909, 910, 911, 912, 913, 914: n = A,T,C or G
  misc_feature 915, 916, 917, 918, 919, 920, 921, 922: n = A,T,C or G
atcattacaaaaatacccctgatgaaggggtgggggaagtataagggaaaaaggaaaggaggaaagattagaggccagttagaaagcttggcctgacccttttctcctcctttccctgccagactttctgactgacagctcaccctgatggggggaagtctgctttatattttgtgatcattctggctgctatgcagaaaacaggtcggaaagaatgagaaaggagatggagaggttgtctaggaaacttttggatttctagctgaaagacagtggtagctttgatgtgctgtgtggcagtgctggagacagatagagatgggcttacccaaaacatttaaaagtcggtaaacctgtttttaattggcagtttaccagagatactaatttgtctaatggatacaaacttatttattttagtaagaaatagtatttttaagaaatattttggttttcagagcagatgttagtttgcttttagccaataacagttgataaatatttttctgtggtggtgggtatgactttttgttcatagttttcccctgcatatattttttaagcttctggtttacgtattaaaacccttttttcatataaaatagctgctcaaagttagcatgaataatttttgtatcattttaacccagttgtaattacataaatgcatgtaatatttagctctggtaattattaattctgctctattttttagatattatgatcagatctgttctattgaacaaaaattgcccattttcctgaaaatccaggttatgtccttcaatcccctgaagagnagtttgagttncccctaacgggnnnnnnnnnnnnnnnnnnnnnnnnnnnnnnnnnnnnnnnnnnnnnnnnnnnnnnnnnnnnnnnnnnnnnnnnnnnnnnnnnnnnnnnnnnnnnnnnnnnnacaaatttcagtaaccctgtcagcccattgctggaaagcaagtcttcagattaaagattttttttttgaaaccaatgcttaaatacttggtggggaaagagaaataaaatcacctccctcttttttttttttgttgttgacgtttttctttttagcatgcagcagaactgattaaaacagtggcatctcgctatgatgaatatgttaatgtgaaggatttttctgacaaaatcaatcgtgcccttrctgcagcaaagaaggataatgacttcatttatcatgatcgagttccagaccttaaagatctagatcctattggcaaagccacacttgtgaaatctaccccggtcaatgtacccatcagtcagaaatttactggtatgtcagttattcagacacactttaatctcatttttctctagtttactctgtttttcctagctaaaaatcacataattgctgttgtatgctttgaatataatttgtattcatgttgtttaaaatgaatatgagaataaatattgtgccagtgcaatgttaagatggaaagtaaacaataataaagcatatgtaaagtatacaatagttagaagacttgaaactgtgtgtttgattaagactgtagcacttgtcattttgttaacttttgttatttaagatgctgccattaaaaataaacaaatatggctggatg

SEQ ID NO: 675707 - DNA, 1648 bp, Homo sapiens
aataagatgttaccaagatcaaaaagctacatacctccctcaccattggcccacaaggaaattccttgtggagggaggacaagtgacgatccctgtaaattatgcatttagccaaaggctaatcagaaactcaaaagaatgcaaccattggtctcttatctgcctgtaacctggaagactcctcctggcttcgagttattctgactttccagactgaacccacgcacgtctcacacatattgattgatgtctcacgtctccctgaaatgtataaaaccaagctgtgccctgaccatcttgggcacctgtcatcaggacctcctgaggctgtgtcacgggcgcacgtcctcaaccttggcaaagtaaacttgtcaaatgggttgggacctgtctcagatattttgggctcaccccttccaagcagaaggaaaggaggctgcctttgggtcatgttgtttcccaaaatgtcctgtctgtggctgttgtccaggggaggcaaggttgactctctcgttcagctcccgatcttcgatgtagagaggggacggggtgcagtgtgggttcccacctgcagcagctctgaagtatgtgactgagctcctgacctcagggacagtgacccctgcccccaacaggtggtgttataaccccacccctcagtgcccctgtgatcctgcccagccctagccaaggaaggcgtgtccccctacaaggagtgggtggtgggggctgctcagatggaaagcaggaaagatgttccccagaacctatggaggtggagggcatacacagcccatgagcggtagctacccggctcaaccatggtgcagaccccatcagagctacgttcctgctatgagaggagaacatcccactctgtgggtgaacagagcctcgtgtacctccaagtccactgatggacattgagctgcttccagtccattgctgctgtggatatgtgtgcacaagtacatctgccccaacacccatttcccagtcttttttttttttttcttttttggagacagagtctcactctgttgcccaggctggagtgcagtggtgcattcacagctcattgcaacctccacctcctaggctcaagtgatcctcctatctcagcctcccaagtagctgggactacaggtgcacgtcaccaccacactggctaattttttttttttttttaatttttgcaaaagcaacatattcctacattgtccaggctggtctcaaactcctgggctcaaggaatctgcctgccttgtcctcccaaagtgctggggttacaggcatgagccaccatgccaggcccatttccaattcctttgggtgcacgcccaggaatggaacaggcagtgactgctgttgagatggagttcagggttctctgggtggtgattaaaatgacccagaactagatggaggtggtggttgtacaacgtaatgaaagcactcagagttactgaattgtgtgcactttatcatkgtgaatggttaattttaggttacgtgcatttcacttcgatggaaaacaaaacacactcatccacagaccctccctcccaaaccatggcacccacgtggcgtggcacactttggggtcccatgtccatcagggtgatcacaggcatcacaaagctcaggc

SEQ ID NO: 675708 - DNA, 1015 bp, Homo sapiens
tcagcctcccgagtagatgggactacaggtgcccgccaccacacccagctaattttttgttttttttattagagatggggtttcactgtgttagccaggatggtttcgatctcctgaacttgtgatctgcctgccttagcctcccaaagtgctgggattacaggcgtgagccactgcgccccgccagccattattttttttttaatcctcttttgctgtagctgcttttaacttctatatcaagaactctcttctgcatatatttaatttattaaataaaagaagctgattgaggagcataatccccaaagtttctacctcaatttagacattgaagatcatcctaagactaagaggcctcatgggattgtagaataaacatcaagtagtgcagtgcctataaagcaggaagagcaagaatatggattccccttcctcatgctgctcgtaccccaaactcccaactccaggaatgagaaggtctgggttttagagaggttaagtgacttgtctaaggttacacagatagctgggagtagagctaggattcaaactgatacccattgactccaaagcctgtgaactatgtctatagagtacatactatgtgccaagcctcccactggaagctgaggatatggaaatcgtggcactgtgtcatgatcctggccttcgagtaattcatagactgctgcagtgaaacagacaattaaaacgcagtgtgataattgtgctgatagaagtcagccaaggctgggtgcggtggctcacrcctgtaatcccagcagtttgggaggctgaggtgggcggatcatgaggtcaggagttcaaggctagcctggccaacatggtgaaaccccgtctctatgaaaaatacaaaaatcagccaggcatggtggcaggcacctgtaatcccagctactcaggagactgaggcaggagaatcacttgaacctgggaggcagaggttgcagtgagccgagattatgtcattgcactccagcctggtcaacaa

SEQ ID NO: 675709 - DNA, 635 bp, Homo sapiens
atttataaaacaattactaatagacctaagaaattagatagatggcaacacaataataatgggggacttcagtactccactgacagcactagacaggtcatcaagacagaaagtcaacaaagaaacaatggatttaaactataccttggaacaaatggacttaacagatagttacagaacatttcatccaacaaccacagaatatacattctattcaacagcacatagaactttctccaagatagaccatatgataggcccgagcctcaataaatttaagaaaattgaaactatatcaagcacgctctgagaccacagtggaataaaactggaaatcaactccaaaaggaaccttcaaaaccatggaaatatatgggaatyaaataacctgctcctgcatgagtattgggtgaaaaatgaaatcaagatggaaattaaaaaaatctttgaactgaatgacaataatgacacaacctaccaaaacccctgggatacagcaaaggtggtggtaacaggaaagttcatagccctaaacgccttcatcagaaagactgaaagagctcaggccatttttgtgttagtatttgcagtctttttctatctgttttgctccaaagcgtttttctttgtacaag

SEQ ID NO: 675710 - DNA, 1497 bp, Homo sapiens
tgacctatgattagcaagatattaatcagcagtaacagttgcagcaaaagctggttacaaacaatccatagaaacaggatgtgaagctagacaaccggttagaccagaaattctcagaagggagtatgccttaaccctaaagaggcctagaagagccgtggcaagatgagggcgtttatagccctatcttatccatatggacaggtgctcctcatgcatccgtttataggctctccacaagggtcacattccattcccagagctatgaacatctgcttttctaggataggaatcttggtgatgtgaaacctccctgactgcacgtccattcataggctctctgcaggggaaagcacatcacgtgctgttggctcattctggcagtccaacctggcattgtctttacacaatcctgcatgcaattatgtatttacaataatcaggagcatttcatcttttattccatagcaatagtttcagggggtctccctacatcaacctctggttccctctggtgctgttttctgagcacactgtgaacttccttgctggtaagggtgcttgtgctgcctcccctatgggaatgcccttttcaacccagcagtcactcagcttgtcagggtccaggtcactccatgaggtcagctggcaaggcttattcccaggggctggcccagcacagctctccaccattggttgggtggatcctgaactcctatgaggttgggcatgttgatgagccatctcccctctggactaagaggcccatgaggatggcggagaccacagtgcaaatgtggccctcaatacatgttggatgaggcaagttctatgtcaccaggagctcagtggggtttagcatccttggacatggctccacattagaacagtgataacagaacaattattgtgagctcctattgagacaggaaaatagggyctagaaacagggaacttaaggccactctgtgctaacttcctaaaagagaaaacaccagggtctggaggcaggaaatctaaggccaattcactctgacttcccaaagctggatcaaaaggaaaataccggggtctgggggcaggaaacctaaggctgattaacacaaacttcctaaagctaaaccaaaagacaaaaaccccatctctccatgctgagtaacaaaggatcagaggctactctccctacaaccatccctcttccaccacatctcagatggaaagggaggggagggtgccttgttgaccatgggccaagcagggaccatcccttcatctgcatagggtgccagttcacctcagcctttaattagccacagaccaaatccttcatccagataaggggtagtcattaagaacctcaaatagggtacttaaagcccagaaaactttgtaactgggcccttgagccacttgctcagacccactctcaccttgcagagggctttctcactttaataaattcctgctttcactgctttgttcctgcatttcattcct

SEQ ID NO: 675711 - DNA, 648 bp, Homo sapiens
taagacccaggtgtgttctggagaagattaatcacaggcagacacaactttgcatttcttcctttcccacccacctaacttatttccaccaaaaaaaaaaaaaaaaaaaaaaaagccttgaagcaggctggcagaagataaaagggtctccagtttaggtagatatgcaagaaagggagagctgtttgtagaaacatcagatctttcttggccatgactgggcatcactttgccccatctcccatctttccatagctagaaggaaggattctcctggataccttcaaggttcatttaagtaggacacagaactcattggctcccttgttcctggacttcccctgctagtggtgtggtcttttcctgactaatcaaatcccaggaaacttaggaaacaaactacagaacaagatataattttgcaggtgattcagcagctctcagatttctgttcagctagaaggcaaatttatccttcaaaccagtatacccatttcttcacatctcctgtgtcccagcagttrgataaactctccaggtaatggtgaatcaagaaaaggtcatctgacaagctcagtgagtgaaaatggcccatcccactttgctgaagtcacatcacgggcttgctgtcactgaaggtcattgcca

SEQ ID NO: 675712 - DNA, 623 bp, Homo sapiens
agatcataccactgcactccagcttggtgacagggtaagacactgtctcaaaaaaaaaaaagtaattggaacatggagggcatttattaatctaggcaaatctgcccagaacattttcaaaagtaactgggcgcataaggaaacaaaactcaaagagagaataaaaacaaaccccaaaagacaagtaatagtggaattatcctttccacggtctccctctgatgccgagccgaagctggactgtactgctgccatctcagctcactgcaacctccctgcctgactctcctgcctcagcctgccgagtgcctgcgattgcaggcgcgcgccgccacgcctgactggttttcgtattttgttagtggagacggggtttcgctgtgttggccgggctggtctccagctcctaaccgcgagtgatccrccagcctcggcctccggaggtgccgcgattgcagacggtgtctggttcactcagtgctcaatggtgcccaggctggagtgcagtggcgggatctcggcttgctacaacctccacctcccagccgcctgccttggcctcccaaagtgcccagagtgcagcctctgcccggccgccaccccgtctgggaagtgaggggcgt

SEQ ID NO: 675713 - DNA, 1410 bp, Homo sapiens
tggcagcattagatttcatctgtatttacagcccctctcaatcgctcacattactgcctgagctycgccacctgtcaggtcagtggcagcattagattctcataggaacatgaaccctgttgtgaattgtgtataggagggttctaggttgcccactccttatgagaattaaatgcctggtgatctgtcactgtctcccatcacccccagatgggaccgtctagttgcaggaaaacaagctcagggctcacattgattctacgtgatgatgagttgtatcattatttcattatattttacagtgtaataataatggaaataaagtgcatataaatgtaatgcacttgaatcatcctgaaaccacccctcttccaccacacctggtcagtggaaaaactgtcatccacaaaatttgtccctggtgccaaaaaggttggggaccactgctttcaaggtagcaaagttttaccctagcatttgaaaaatggtattctgtggtacaacaaagaaaacgagagatactctaagggaagttctgtgtcttctaaatgaccgattaaagaaactaatgaaaagtcactttttgtggccatgaaacatgaatttaagaactattctgaagttggcatccacatagtctagaaaatttttcatctctttcatttcccacattctttacaaagttgtataacagcaaggccttcgagggtcactgaggcacagggcactactagacctctgatccctgtgcggatgctgcctgccacatgcttcactggatgtgaggtgaggaaagaatgaatatttttttcatcaaactgctgagctttttagcccactgtgatttatagtcactaaaataaaacaattcctttatcattcaaatactactgacatctaaattcagactaatacactctaccaaaatcatatcatctggcctgtaacttaagacctacagacatcagttaatttaggaaataatctgatgtgcaagggaaaaattccatggagagatgacatcctcctctcttctccccagtatgcagggccattcagctaatggggtaagcatttcaggaaataatgtggccctgatatatgtcagtggcaatggaattaaagaggaagagacaataaaaggaaaaatttcaaaagaattgccggttgaagatggatagaatgaaaacaaaagttttgagccctggagaggagagtttcagtaccgcggacagaggtttttgccgttgcctacttttccttaggcctccatctatgataattcattctacaaaaataaaaggagtgaattgaaactaaagtgtagctcataaagagtagtagctgtgctacttatttctacagagcatcaaacctaatgctgttgatgttgatacctcttctgaagat

SEQ ID NO: 675714 - DNA, 1410 bp, Homo sapiens
tggcagcattagatttcatctgtatttacagcccctctcaatcgctcacattactgcctgagcttcgccacctgtcaggtcagtggcagcattagattctcataggaacatgaaccctgttgtgaattgtgtataggagggttctaggttgccyactccttatgagaattaaatgcctggtgatctgtcactgtctcccatcacccccagatgggaccgtctagttgcaggaaaacaagctcagggctcacattgattctacgtgatgatgagttgtatcattatttcattatattttacagtgtaataataatggaaataaagtgcatataaatgtaatgcacttgaatcatcctgaaaccacccctcttccaccacacctggtcagtggaaaaactgtcatccacaaaatttgtccctggtgccaaaaaggttggggaccactgctttcaaggtagcaaagttttaccctagcatttgaaaaatggtattctgtggtacaacaaagaaaacgagagatactctaagggaagttctgtgtcttctaaatgaccgattaaagaaactaatgaaaagtcactttttgtggccatgaaacatgaatttaagaactattctgaagttggcatccacatagtctagaaaatttttcatctctttcatttcccacattctttacaaagttgtataacagcaaggccttcgagggtcactgaggcacagggcactactagacctctgatccctgtgcggatgctgcctgccacatgcttcactggatgtgaggtgaggaaagaatgaatatttttttcatcaaactgctgagctttttagcccactgtgatttatagtcactaaaataaaacaattcctttatcattcaaatactactgacatctaaattcagactaatacactctaccaaaatcatatcatctggcctgtaacttaagacctacagacatcagttaatttaggaaataatctgatgtgcaagggaaaaattccatggagagatgacatcctcctctcttctccccagtatgcagggccattcagctaatggggtaagcatttcaggaaataatgtggccctgatatatgtcagtggcaatggaattaaagaggaagagacaataaaaggaaaaatttcaaaagaattgccggttgaagatggatagaatgaaaacaaaagttttgagccctggagaggagagtttcagtaccgcggacagaggtttttgccgttgcctacttttccttaggcctccatctatgataattcattctacaaaaataaaaggagtgaattgaaactaaagtgtagctcataaagagtagtagctgtgctacttatttctacagagcatcaaacctaatgctgttgatgttgatacctcttctgaagat

SEQ ID NO: 675715 - DNA, 1410 bp, Homo sapiens
tggcagcattagatttcatctgtatttacagcccctctcaatcgctcacattactgcctgagcttcgccacctgtcaggtcagtggcagcattagattctcataggaacatgaaccctgttgtgaattgtgtataggagggttctaggttgcccactccttatgagaattaaatgcctggtgatctgtcactgtctcccatcacccccagatgggaccgtctagttgcaggaaaacaagctcagggytcacattgattctacgtgatgatgagttgtatcattatttcattatattttacagtgtaataataatggaaataaagtgcatataaatgtaatgcacttgaatcatcctgaaaccacccctcttccaccacacctggtcagtggaaaaactgtcatccacaaaatttgtccctggtgccaaaaaggttggggaccactgctttcaaggtagcaaagttttaccctagcatttgaaaaatggtattctgtggtacaacaaagaaaacgagagatactctaagggaagttctgtgtcttctaaatgaccgattaaagaaactaatgaaaagtcactttttgtggccatgaaacatgaatttaagaactattctgaagttggcatccacatagtctagaaaatttttcatctctttcatttcccacattctttacaaagttgtataacagcaaggccttcgagggtcactgaggcacagggcactactagacctctgatccctgtgcggatgctgcctgccacatgcttcactggatgtgaggtgaggaaagaatgaatatttttttcatcaaactgctgagctttttagcccactgtgatttatagtcactaaaataaaacaattcctttatcattcaaatactactgacatctaaattcagactaatacactctaccaaaatcatatcatctggcctgtaacttaagacctacagacatcagttaatttaggaaataatctgatgtgcaagggaaaaattccatggagagatgacatcctcctctcttctccccagtatgcagggccattcagctaatggggtaagcatttcaggaaataatgtggccctgatatatgtcagtggcaatggaattaaagaggaagagacaataaaaggaaaaatttcaaaagaattgccggttgaagatggatagaatgaaaacaaaagttttgagccctggagaggagagtttcagtaccgcggacagaggtttttgccgttgcctacttttccttaggcctccatctatgataattcattctacaaaaataaaaggagtgaattgaaactaaagtgtagctcataaagagtagtagctgtgctacttatttctacagagcatcaaacctaatgctgttgatgttgatacctcttctgaagat

SEQ ID NO: 675716 - DNA, 684 bp, Homo sapiens
agacttggctatagtatcctctgcatttttccaagtttaagaatgttgtgggccaggtgcagtggctcgtaatcttagcactttgggaagctgaggcatgcggatcacttgagctyaggagttcgagaccagcctgggcaacatggtaaaatcttgtctctacaaaaatactaaaaaattagctgggtgtggtggtgcattcctatagtcccagctacttgggggttgaagtgggaggattgcttgagcccagggaaatcaaggctgcagtgaaccaagatcatgccactctactccagcctgggtgaaaaagcgagaccctgtctcaaaaaaaaaaaaaagaatgttggttttatgttcaaattgcaagttgccagggcttaaaattcttcattcacactttctggactcagtacaggttgtgtcattttcttcttgtattaagtcttgtgtaggactttgtattgtggcttctccattcaccttctggtgagctaaattcattcttgtcatttttttctagaagcatctgttgtgtttatgcttgggtgtgtggcattttcatggatcacactttattttccttgctctgttctctcgggcattaattctgtttgtgcctgatgtcaattattactattatttaatccagttggtcttcctggaatgcctactggataaatg

SEQ ID NO: 675717 - DNA, 684 bp, Homo sapiens
agacttggctatagtatcctctgcatttttccaagtttaagaatgttgtgggccaggtgcagtggctcgtaatcttagcactttgggaagctgaggcatgcggatcacttgagctcaggagttcgagaccagcctgggcaacatggtaaaatcttgtctcyacaaaaatactaaaaaattagctgggtgtggtggtgcattcctatagtcccagctacttgggggttgaagtgggaggattgcttgagcccagggaaatcaaggctgcagtgaaccaagatcatgccactctactccagcctgggtgaaaaagcgagaccctgtctcaaaaaaaaaaaaaagaatgttggttttatgttcaaattgcaagttgccagggcttaaaattcttcattcacactttctggactcagtacaggttgtgtcattttcttcttgtattaagtcttgtgtaggactttgtattgtggcttctccattcaccttctggtgagctaaattcattcttgtcatttttttctagaagcatctgttgtgtttatgcttgggtgtgtggcattttcatggatcacactttattttccttgctctgttctctcgggcattaattctgtttgtgcctgatgtcaattattactattatttaatccagttggtcttcctggaatgcctactggataaatg

SEQ ID NO: 675718 - DNA, 636 bp, Homo sapiens
tcataatatgtagaggctgtgtattggttagttgcccattgatccccaggaaattctagaccatagtacatacagtaggtttgtacctgggatatataccttttataggcatcatgtgtaatctttgggcaaaattgatgccgttacatggtatttggtctgtggtaatgcatgtagttgcagtttggcaatttaagctaaacaattagtaacgatatttttatatcgagcaagaaaaaatattaccgtaatcttcacatttgatttattttaagatgaaaaatatttttgttggaatttaagtttaatggctaaatatgaagactccttgatataaaatattgtgtttaaaatgtcatgcatgttatactgaaatattctggagatgtctgaagcagttctttaagcagcactgtgtattatggaaaaatgtttgtcttttacctagcatatttgtaaatagacctttaataaaatgtgtgtgtgtgtgtgtgtgtgtgtgtgtgtrtatatatataccattaaaaggtgggctaatgtggctttccactacagctcttaccagattttttattttcagtgtgatttggctggaatattaataacagttggttgacatgtattcacaattgcatg

SEQ ID NO: 675719 - DNA, 639 bp, Homo sapiens
ttctggagttccctcttctctttattctaaactagttcactatacattccttttacccgtgtttctttgaaacatataaacattttattttggcactatcatgctataataggatggttgttttcctgtctgttttcccccaaatcgagtcatttgatgggaactatttggaggaaggttgtgtcatggctctgggtcttcagtggcaactcaggaccttccctgtacataggyaggtgctcactaagaactggttggcctgagaataagttttatgcactcctgtgactgcagtgaccatttataactcagtgactttggactctgagctgggctcatatctttcacctgaactcccgcctgtgtctgacagaggcactgtgtgtaatagtgattgagagcacaggctctggagctcagcagtgtgttcacattcagttctgccccgacacattgcccatcctcatcagcctctccatccacaaagcagagacgataacatacctgcgacacgacgaaggtgatgcacacaccacaccaggcagagaccgcatgtgacctatgactgctgctatttgtacattcgccagcatgatccagttctaccccattcaaaactcaatgtgcaagtggattccc

SEQ ID NO: 675720 - DNA, 639 bp, Homo sapiens
ttctggagttccctcttctctttattctaaactagttcactatacattccttttacccgtgtttctttgaaacatataaacattttattttggcactatcatgctataataggatggttgttttcctgtctgttttcccccaaatcgagtcatttgatgggaactatttggaggaaggttgtgtcatggctctgggtcttcagtggcaactcaggaccttccctgtacataggtaggtgctcactaagaactggttggcctgagaataagttttatgcactcctgtgactgcagtgaccatttataactcagtgactttggactctgagctgggctcatatctttcacctgaactcccgcctgtgtctgacagaggcactgtgtgtaatagtgattgagagcrcaggctctggagctcagcagtgtgttcacattcagttctgccccgacacattgcccatcctcatcagcctctccatccacaaagcagagacgataacatacctgcgacacgacgaaggtgatgcacacaccacaccaggcagagaccgcatgtgacctatgactgctgctatttgtacattcgccagcatgatccagttctaccccattcaaaactcaatgtgcaagtggattccc

SEQ ID NO: 675721 - DNA, 639 bp, Homo sapiens
ttctggagttccctcttctctttattctaaactagttcactatacattccttttacccgtgtttctttgaaacatataaacattttattttggcactatcatgctataataggatggttgttttcctgtctgttttcccccaaatcgagtcatttgatgggaactatttggaggaaggttgtgtcatggctctgggtcttcagtggcaactcaggaccttccctgtacataggtaggtgctcactaagaactggttggcctgagaataagttttatgcactcctgtgactgcagtgaccatttataactcagtgactttggactctgagctgggctcatatctttcacctgaactcccgcctgtgtctgacagaggcactgtgtgtaatagtgattgagagcacaggctctggagctcagcagtgtgttcacattcagttctgcccygacacattgcccatcctcatcagcctctccatccacaaagcagagacgataacatacctgcgacacgacgaaggtgatgcacacaccacaccaggcagagaccgcatgtgacctatgactgctgctatttgtacattcgccagcatgatccagttctaccccattcaaaactcaatgtgcaagtggattccc

SEQ ID NO: 675722 - DNA, 600 bp, Homo sapiens
attccattgagaatttggcatatttttggttcctactatgttgagtaatttkgaatggtatccttagcatatagcctattctgttttgagagtatgggttctgtcacatcctctgcagatgttgacattttgttttatcaggcaatcaacttagttaagtttagactaaaaattcaatctcactttatataggtggtaattacaatatcagctcaattgtcaaagcttttgctatgcttattaggtgtgcatatgaaatgttttcataaatagtattttcattatttttcagttcctaatgtattctaatttctcttttgatttgttttgatccatcacttatttaaaagtgtttttacctgttatcacagatattttgagaaatatacaaaaggagagaaaatagaacagaaagccaccatacacctttcttgcaaacataaccacaattacatattacacattaaaaattaaagtgattcattaaaataaagtatccagttagtgcagaagtagatttcttaatttataaagggattttctaattatgtctttttttattttacctaatttagttgaattgtgatcaaaaaatatttg

SEQ ID NO: 675723 - DNA, 600 bp, Homo sapiens
attccattgagaatttggcatatttttggttcctactatgttgagtaatttggaatggtatccttagcatatagcytattctgttttgagagtatgggttctgtcacatcctctgcagatgttgacattttgttttatcaggcaatcaacttagttaagtttagactaaaaattcaatctcactttatataggtggtaattacaatatcagctcaattgtcaaagcttttgctatgcttattaggtgtgcatatgaaatgttttcataaatagtattttcattatttttcagttcctaatgtattctaatttctcttttgatttgttttgatccatcacttatttaaaagtgtttttacctgttatcacagatattttgagaaatatacaaaaggagagaaaatagaacagaaagccaccatacacctttcttgcaaacataaccacaattacatattacacattaaaaattaaagtgattcattaaaataaagtatccagttagtgcagaagtagatttcttaatttataaagggattttctaattatgtctttttttattttacctaatttagttgaattgtgatcaaaaaatatttg

SEQ ID NO: 675724 - DNA, 600 bp, Homo sapiens
attccattgagaatttggcatatttttggttcctactatgttgagtaatttggaatggtatccttagcatatagcctattctgtwttgagagtatgggttctgtcacatcctctgcagatgttgacattttgttttatcaggcaatcaacttagttaagtttagactaaaaattcaatctcactttatataggtggtaattacaatatcagctcaattgtcaaagcttttgctatgcttattaggtgtgcatatgaaatgttttcataaatagtattttcattatttttcagttcctaatgtattctaatttctcttttgatttgttttgatccatcacttatttaaaagtgtttttacctgttatcacagatattttgagaaatatacaaaaggagagaaaatagaacagaaagccaccatacacctttcttgcaaacataaccacaattacatattacacattaaaaattaaagtgattcattaaaataaagtatccagttagtgcagaagtagatttcttaatttataaagggattttctaattatgtctttttttattttacctaatttagttgaattgtgatcaaaaaatatttg

SEQ ID NO: 675725 - DNA, 617 bp, Homo sapiens
ataaaaaggaatggactactgatacacatgacactatgaatgatgttgaaaactgctgtgtgttatgaagaagaaaaaggcaacacaatgactgcatactgtatgatttcattttatgtgaagctctagaaaacccaaaatatagtggcagaaagcagatgggtggttgcctgtggctggtggtaagaaaggggaaattttggagggtgatggaaatgttctctatcttgataatgctagtgtttatatgactgcatacatttttcaaaagtaactgaactacacacttaaaataagaagatgttattgcatgcaagttatacaacaatatagctgattacaaaaggaagaatatataataaaatgaaaataaactgataaaatagttctaacaagttggyacataatctttccattgttttcaataggtactgaatatattgccttataagctttttcacgtaatgacacacagtgaacatctttctatgtcaataaagtcttcctatactgtcattataaaagaccgcataatagttcaatatgtttgtaaaaatcatttaccaaactattgttgaatattcaagtaattttctgttttttaatgttacaagtta

SEQ ID NO: 675726 - DNA, 618 bp, Homo sapiens
caaatgaactctttaaacacagcactgtgcctcagtttacctttttgacagtctcgtcagaagtgagatccccaggagcagcgagtaaccaggcgygggcagcccccgggccactgcacccactgctgtcttgctgcatttggtggccacaggggaagcccctctaggaggtcgagctccacaacttgcaccctgagctctccgactccatgggagcagtttttattccagagctcagcctgggtctgacagggactgcactggaacctggactgggatccagagtgaaactgggtgttctacaggaactggcctggatccagtcggaggcctcaggtaagaaaaatgtgagaaaaacagggaattatgggttcatcagaatccatggagtctgggacaccccatctggaactccagctaattatatgttcagaaactacagacccagagcccgtgcctttctggagaaatgggtgcagctcagggggatgactccgagtcacagtggccacagtgggaagtttattccacatgaaatcattcacggacgggctcattcaagaacaaggaatcgtgagtatctgcaaaccacgcaatatattttttgattggcataca

SEQ ID NO: 675727 - DNA, 618 bp, Homo sapiens
caaatgaactctttaaacacagcactgtgcctcagtttacctttttgacagtctcgtcagaagtgagatccccaggagcagcgagtaaccaggcgcgggcagcccccgggccactgcacccactgctgtcttgctgcatttggtggccacaggggaagcccctctaggaggtcgagctccacaacttgcaccctgagctctccgactccatgggagcagtttttattccagagctcagcctgggtctgacagggactgcactggaacctggactgggatccagagtgaaactgggtgttctacaggaactggcctggatccagtcggaggcctcaggtaagaaaaatgtgagaaaaacagggaattatgggttcatcagaatccatggagtctgggacaccccatctggaactccagctaattatatgttcagaaactacagacccagagcccgtgcctttctggagaaatgggtgcagctcagggggatgactccgagtcacagtggccacagtgggaagtttattccacatgaaatcattcacggacgggcwcattcaagaacaaggaatcgtgagtatctgcaaaccacgcaatatattttttgattggcataca

SEQ ID NO: 675728 - DNA, 615 bp, Homo sapiens
agtcatccaaggaactagactttctgagggaagagaaccacaaattacagctggagaggsaaaacctgcagctggagacccgaaggctccaatcggaaatcaacatggcagcgacggaaacacgagacctgcggaacatgaccgtggcggactctgggaccaaccatgactccagactgtggtccctggagagggaactggatgacctcaagaggctctccaaggacaaagacctcgagatcgacgagctgcagaagcgcctgggctccgtggccgtcaagcgggagcagcgggagaaccacctgcggcgctccatcgtagtcatccaccctgacacaggccgcgagctgtccccggaggaagcccaccgtgccgggctcattgactggaacatgttcgtgaaactcagaagccaggagtgcgactgggaggagatctcagtgaagggtcccaatggggagtcctcagtgatacacgacaggaagtctggcaagaagttctccatcgaagaggccctgcagagtggcaggctgacccctgctcagtatgaccgctatgtcaacaaggatatgtccatccaggagctggcggtcttggtatctgggcagaagtagg

SEQ ID NO: 675729 - DNA, 619 bp, Homo sapiens
taatttacacagcgaaatgctatggcaaactttccttttcttggtttttctaataaaaaaacacattcatcatgcaacataactccttactgtggttatggcaactctgaatacaatacatttgtactttcagcaacaataatcattttgaaagaataagcacatttctgttggtggtgaatgacattaatttttttctcctaaatcagacagcttatctgtggtaggtgttccacaaaatatagcagcataacgaggaggagcgtgatgcttatatcgatcaacttcaaacctacttggaatttttaagttctatttttatgtgattgctctattcttcaagaccaatttactttgctaaagggcatttttgatcaattagatatttatttctacagttgttataatattagcctaataaaattaagcatttcttgtacatgttgaataaaattcaatataaaggctaacttccctcaataggtcaacatggaaatcaactgtgttttatagtctgtttattgtgtgtgatgattttgtgtgtgtcaacttgactggctaagggatgcccagatagctggtgaaacattaattctggrtgtgtctgtgaagcgaggat

SEQ ID NO: 675730 - DNA, 612 bp, Homo sapiens
tattttcatatttctatatatttatgacttttcataataaaatgatgaaaaatcacaaaaccatagcaaagtattgtctctccacatttattstatttaactatagtattaggagtaaaatatctgtggaaattactgtacagaaatcaattgtaaatcatggcaatttagaattactgtaacaaaagtccataggacaaagaagatgagagataagggatagagggatgcctatacaggaatcaaatagattctttaatggtgataaatcaattaatcaagatataaatactggaaaaaccaataaaaatataaccaagttaatttggggagtggcatacttagaatactttataatttcatctctggccatagtgggaagttgacactgtatttggaaaaagaagaaggctggctgcgcatggtagctcacacctgtaacctcagcacttcggaaagccaaggcgggaggattgcttgagcctaggagttcgagaccagcctgggcagtatggtgaaactccatctctaccaaaatatacaaagttagtcaggtgtggtggcacatgcctgtggtcccagctactcaggaggctgaagcgggaggattgc

SEQ ID NO: 675731 - DNA, 1541 bp, Homo sapiens
cgcttggctcaaccgtggcagagccaatgtggccatggtgagagatcattcaggatggatgactgcttagggactggcagggcaagagtctcccagctgttgcggcatttcatcctgtggtctttggtcattctttggcttttatctgagtacacccggcatggcattttaccagctgtactggggaggactgggggaatggaaagctggcattrctgctgaaagcaaagaaaagatgtgtctttctctgtggccggtttttgtaatccgggaagaccccatgtgggttttctgatctcatgtcagcttccctagttgaagtataaaattgctagaagaaccacatcatcctcggagggacaggcaggcatccttagtgttcttgaaatgattacatcgtcagtttcatttagttctagaagactggccctgcctgttggtttttcccctaatcgtctgtgtaagaaagacttacccttaaatgggtgagttacaggcagggctcagtttctgtcattacactgatctttcattgacagttttccaccctctgttactcttggcatcgggctggtcagccataacttctagggatggggagagaaatcgaatctcttctattcttctctgtactgcttcaatctggcaacttctacgtagactgtgagaatataaccttgtaataaacatttgggtctctttgcctttgtccgagagcccactgttattttttttctaatcacagcagctgctctagctagcatctggctcatataccagcagcctttattctgagactaatctaaggattcaacaccaattcaggaaggcaatcaaagaagtgggttggatggacaagtatttcctttgtgtacagttcagatgcagaaggtggtagacacctacattgatgcattgtcctagcatcctacagatccatggggttgccaagggtggcttggtggggttggggggtgcaggtgaatttggctgtagctggcataaatggaggtgcttgcatgttgattcctgggccctttgacccaacctctggtttggggagaggctgctgattagagcagatgcacacaccttgtaacagggccactgagttctcccagtcttccatccacatttcttctttgtcatcagcgttccctcctcctgtattttccctttctagaaaaaaatatgagctgtgatttgtacaaaacacacaaaatgcatccgttggaatcagagatccaggaaacttcagctgaaattaacaacttcgtaacacaggtagagcctacgtccttcatgagaaaaatgacacaaatctcagtattctttgtttggagtctcttgacatccatgtgaggtacatattttctgtattctattttattttaattcaccatgaaaaagaaactggtcaaataaagaagccaaggctttgaggagcagaatcatttatttgtggtgattcagccatatttactcccagtgtttcaactgtgagctcaatgcactgttttcattacttttactatattgca

SEQ ID NO: 675732 - DNA, 1541 bp, Homo sapiens
cgcttggctcaaccgtggcagagccaatgtggccatggtgagagatcattcaggatggatgactgcttagggactggcagggcaagagtctcccagctgttgcggcatttcatcctgtggtctttggtcattctttggcttttatctgagtacacccggcatggcattttaccagctgtactggggaggactgggggaatggaaagctggcattactgctgaaagcaaagaaaagatgtgtctttctctgtggccggtttytgtaatccgggaagaccccatgtgggttttctgatctcatgtcagcttccctagttgaagtataaaattgctagaagaaccacatcatcctcggagggacaggcaggcatccttagtgttcttgaaatgattacatcgtcagtttcatttagttctagaagactggccctgcctgttggtttttcccctaatcgtctgtgtaagaaagacttacccttaaatgggtgagttacaggcagggctcagtttctgtcattacactgatctttcattgacagttttccaccctctgttactcttggcatcgggctggtcagccataacttctagggatggggagagaaatcgaatctcttctattcttctctgtactgcttcaatctggcaacttctacgtagactgtgagaatataaccttgtaataaacatttgggtctctttgcctttgtccgagagcccactgttattttttttctaatcacagcagctgctctagctagcatctggctcatataccagcagcctttattctgagactaatctaaggattcaacaccaattcaggaaggcaatcaaagaagtgggttggatggacaagtatttcctttgtgtacagttcagatgcagaaggtggtagacacctacattgatgcattgtcctagcatcctacagatccatggggttgccaagggtggcttggtggggttggggggtgcaggtgaatttggctgtagctggcataaatggaggtgcttgcatgttgattcctgggccctttgacccaacctctggtttggggagaggctgctgattagagcagatgcacacaccttgtaacagggccactgagttctcccagtcttccatccacatttcttctttgtcatcagcgttccctcctcctgtattttccctttctagaaaaaaatatgagctgtgatttgtacaaaacacacaaaatgcatccgttggaatcagagatccaggaaacttcagctgaaattaacaacttcgtaacacaggtagagcctacgtccttcatgagaaaaatgacacaaatctcagtattctttgtttggagtctcttgacatccatgtgaggtacatattttctgtattctattttattttaattcaccatgaaaaagaaactggtcaaataaagaagccaaggctttgaggagcagaatcatttatttgtggtgattcagccatatttactcccagtgtttcaactgtgagctcaatgcactgttttcattacttttactatattgca

SEQ ID NO: 675733 - DNA, 1541 bp, Homo sapiens
cgcttggctcaaccgtggcagagccaatgtggccatggtgagagatcattcaggatggatgactgcttagggactggcagggcaagagtctcccagctgttgcggcatttcatcctgtggtctttggtcattctttggcttttatctgagtacacccggcatggcattttaccagctgtactggggaggactgggggaatggaaagctggcattactgctgaaagcaaagaaaagatgtgtctttctctgtggccggtttttgtaatccgggaagaccccatgtgggttttctgatctcatgtcagcttccctagttgaagtataaaattgctagaagaaccacatcatcctcggagggacaggcaggcatccttagtgttcttgaaatgattacatcgtcagtttcatttagttctagaagactggccctgcctgttggtttttcccctaatcgtctgtgtaagaaagacttacccttaaatgggtgagttacaggcagggctcagtttctgtcattacactgatctttcattgacagttttccaccctctgttactcttggcatcgggctggtcagccataacttctagggatggggagagaaatcgaatmtcttctattcttctctgtactgcttcaatctggcaacttctacgtagactgtgagaatataaccttgtaataaacatttgggtctctttgcctttgtccgagagcccactgttattttttttctaatcacagcagctgctctagctagcatctggctcatataccagcagcctttattctgagactaatctaaggattcaacaccaattcaggaaggcaatcaaagaagtgggttggatggacaagtatttcctttgtgtacagttcagatgcagaaggtggtagacacctacattgatgcattgtcctagcatcctacagatccatggggttgccaagggtggcttggtggggttggggggtgcaggtgaatttggctgtagctggcataaatggaggtgcttgcatgttgattcctgggccctttgacccaacctctggtttggggagaggctgctgattagagcagatgcacacaccttgtaacagggccactgagttctcccagtcttccatccacatttcttctttgtcatcagcgttccctcctcctgtattttccctttctagaaaaaaatatgagctgtgatttgtacaaaacacacaaaatgcatccgttggaatcagagatccaggaaacttcagctgaaattaacaacttcgtaacacaggtagagcctacgtccttcatgagaaaaatgacacaaatctcagtattctttgtttggagtctcttgacatccatgtgaggtacatattttctgtattctattttattttaattcaccatgaaaaagaaactggtcaaataaagaagccaaggctttgaggagcagaatcatttatttgtggtgattcagccatatttactcccagtgtttcaactgtgagctcaatgcactgttttcattacttttactatattgca

SEQ ID NO: 675734 - DNA, 589 bp, Homo sapiens
ctgcaatgcaggcttgggggtgtggcgtgcccctaggggacatattcggggaatgtcctctcctagggctcttcagtctccccagcaggcgtggccgagggcttccctgtgggtatcagcagtagaaagggccccctgtactgctcgtgggtccccgcctctgcccgggagtgatggggctggggaagctcctcacagggccaccctgctcctgtggccttgtcactgycactggggtcatccttggggaaccttggcaggctccaaggccctgaagagtggttctgggagtgggtgcctggctgtggtcccttcccttactctcctcccctacctttgtgcctgctgaatctggggtatttagaactgtactttcctgacttccagggccacagaccatttgtactgaaccctgtgccaccgagtctaattggttgtcccttctccactgcagtcgggtgccccattctcttccttacacactcctgactggctcagcggaaggagctcctgccactcctctaacagcatctgaccttccccgccgccccgggaactggactctctgaagtatacagaaaagtagcga

SEQ ID NO: 675735 - DNA, 589 bp, Homo sapiens
ctgcaatgcaggcttgggggtgtggcgtgcccctaggggacatattcggggaatgtcctctcctagggctcttcagtctccccagcaggcgtggccgagggcttccctgtgggtatcagcagtagaaagggccccctgtactgctcgtgggtccccgcctctgcccgggagtgatggggctggggaagctcctcacagggccaccctgctcctgtggccttgtcactgccactggggtcatccttggggaaccttggcaggctccaaggccctgaagartggttctgggagtgggtgcctggctgtggtcccttcccttactctcctcccctacctttgtgcctgctgaatctggggtatttagaactgtactttcctgacttccagggccacagaccatttgtactgaaccctgtgccaccgagtctaattggttgtcccttctccactgcagtcgggtgccccattctcttccttacacactcctgactggctcagcggaaggagctcctgccactcctctaacagcatctgaccttccccgccgccccgggaactggactctctgaagtatacagaaaagtagcga

SEQ ID NO: 675736 - DNA, 589 bp, Homo sapiens
ctgcaatgcaggcttgggggtgtggcgtgcccctaggggacatattcggggaatgtcctctcctagggctcttcagtctccccagcaggcgtggccgagggcttccctgtgggtatcagcagtagaaagggccccctgtactgctcgtgggtccccgcctctgcccgggagtgatggggctggggaagctcctcacagggccaccctgctcctgtggccttgtcactgccactggggtcatccttggggaaccttggcaggctccaaggccctgaagagtggttctgggagtgggtgcctggctgtggtcccttcccttactctcctcccctacctttgtgcctgctgaatctggrgtatttagaactgtactttcctgacttccagggccacagaccatttgtactgaaccctgtgccaccgagtctaattggttgtcccttctccactgcagtcgggtgccccattctcttccttacacactcctgactggctcagcggaaggagctcctgccactcctctaacagcatctgaccttccccgccgccccgggaactggactctctgaagtatacagaaaagtagcga

SEQ ID NO: 675737 - DNA, 589 bp, Homo sapiens
ctgcaatgcaggcttgggggtgtggcgtgcccctaggggacatattcggggaatgtcctctcctagggctcttcagtctccccagcaggcgtggccgagggcttccctgtgggtatcagcagtagaaagggccccctgtactgctcgtgggtccccgcctctgcccgggagtgatggggctggggaagctcctcacagggccaccctgctcctgtggccttgtcactgccactggggtcatccttggggaaccttggcaggctccaaggccctgaagagtggttctgggagtgggtgcctggctgtggtcccttcccttactctcctcccctacctttgtgcctgctgaatctggggtatttagaactgtactttcctgacttccagggccacagaccatttgtactgaaccctgtgccaccgagtctaattggttgtcccttctccactgcagtcgggtgccccattctcttcyttacacactcctgactggctcagcggaaggagctcctgccactcctctaacagcatctgaccttccccgccgccccgggaactggactctctgaagtatacagaaaagtagcga

SEQ ID NO: 675738 - DNA, 664 bp, Homo sapiens
agggcaatttatatctatgaagcaatagtgactcatgagaatgcattcagtgcattcaatgtccaagcccagcgtctggtctcactgtgtcctgggttatgtgcaaagcttgggatgcaggtggctgagtggtctgtgatggaccctgtctgtgttgaaggaatgtttgccttattctggaaacttcttgaatctgcaatgacccttaatgatcccctacagaagaaatcattgttcccctgagagctgtgttctaagatctttgtcaatgactttcatttttgatgaattttagctgaatatacagagtatttgccatgacattttcctaggagtgggataaacttgttccaagccatctctggtagactcatctgttccttcttgtgcctatcatagtgygtccaaggtggtttatgcacgtcccttactgactcttaatgtccctctcagaaattagccaggtcaatatgaccatcttcaggagaacactcttttatttacaccgggcccttatctagaaacctaaagtagcacagagtggtttcctgtgtccagttcaatcccccagtgcagtgcctggcccgggtgctactggcagaatgcacttcagtttccgtaaccaggcgttcctctttcaaggaacacgctgaaattcagggca

SEQ ID NO: 675739 - DNA, 664 bp, Homo sapiens
agggcaatttatatctatgaagcaatagtgactcatgagaatgcattcagtgcattcaatgtccaagcccagcgtctggtctcactgtgtcctgggttatgtgcaaagcttgggatgcaggtggctgagtggtctgtgatggaccctgtctgtgttgaaggaatgtttgccttattctggaaacttcttgaatctgcaatgacccttaatgatcccctacagaagaaatcattgttcccctgagagctgtgttctaagatctttgtcaatgactttcatttttgatgaattttagctgaatatacagagtatttgccatgacattttcctaggagtgggataaacttgttccaagccatctctggtagactcatctgttccttcttgtgcctatcatagtgcgtccaaggtggtttatrcacgtcccttactgactcttaatgtccctctcagaaattagccaggtcaatatgaccatcttcaggagaacactcttttatttacaccgggcccttatctagaaacctaaagtagcacagagtggtttcctgtgtccagttcaatcccccagtgcagtgcctggcccgggtgctactggcagaatgcacttcagtttccgtaaccaggcgttcctctttcaaggaacacgctgaaattcagggca

SEQ ID NO: 675740 - DNA, 1276 bp, Homo sapiens
tgctgtccacacaactcccagcctcccagaggcctcagggaacagaactgtcaccctgagagatgtccacccgacaggagcctctgtggctggagacgtccaagccaggtagtgtagattctcactattcatcatagtgaccgtgtagaagtcaccacggacactgaattaggaaacactgaacctctgctccacaggaaaatatgtgcrtatattcagtatacacatatctcacacacatagagtcaagattaaatcctaagacaacgcacccaagtagattctattttattttacaagagaaaaaaaaatgaggttcagaagagttaagtgactcagcagaagctgccccactaacaggtgccagaattaggatttgaccctgtccaactggcccagagctggagcttccctcccatctccccctacaggccatctgtgtatgaggctgaaacaactgggcagagtatggcctgcttcaacctcaggtggaaacatgcgtattggggacctcagaattttcactgttctgtgtgtgtctactcaaatgaccactaattgccccaaagtattgatttggaggttacaaataaattttagcaaataggtaaattttcaaatatggaacgtgcaactgtacttttctgccaccatgtcatagcctgaacaaaaatcagcctcgtcaggatggacaatctgtaagggtggctgccccgagtttgctcattcaaagctaggacctgggtgttagacccaggcatctaccaggttggttcctcactgctatagcttgaatgtctgtcccttctaaaacccgtgttgaaacttaatccccagtgtaacagtattaggaggtggggcctttaagaggtgactgggtcatgattcacccatttatggattgaaggatttgtgggttatcatgggagtggacaggtggctgtataaaaagaggaacagatctgagcaagcactctcagcccctttttcatgtgatactctgagctgccttgggcctctgcagaggccccaccagcaagaaggctctcaccagatgcagcccttcaactttggacttcccagcctccagaactgtaagaaataaattgcttttataaattacccactctcagatattcagttatagcaacagaagatagactaagacgctcactgaccacaaaatacaaggacagaaactgcatcccttgcccatcactgcctcctgagcaattggaagtaagcacatgccaaagagcagacagaggaaaatgaa

SEQ ID NO: 675741 - DNA, 855 bp, Homo sapiens
cagcctaggtagcctaccaaaactctgtttctacaaaaacattttaaaacttagccgggcatggtaacatgcgcctctaatcccagtctccttgggagactgaggcaggaggatgacttgaggctaggagttcaaggctgcagtgagctatgatcgcgccactgcactccggcctttgctacagagcaagagcctgtctcttaataaataaataaataaatraataaataaataaataaataaaattaaataaagtgggagatatctcgtgcttttcctcagtcagagatgacctagccacctcaccttgctctaggtaggattaattgacaaggcaacggatcttgttttttattatggttaagtatacataacatagacatttaccattttaacaatttctagtgtatgattcagtggcattaagtatattcccaggacagctgtttttctagtagtgaaactgaaccagtagcaagctggtatacttttttttttttgagacggagtcttgctctgttgcccaggctggagtgcaatggcgtgatctcggctcactgcaacctctgcctcctaggttcaagtgattctcctgcctcagcctcccaagtagctgggattacgggtacttgccaccacacctggctactttttgtatttttagtagagatgaggtttcgccatgttggccaggctggtctcaaactcccaacctcggatgatctgcccacctcagtctcccaaagtgctgggattataggcgtaagtcaccacgcccagccactggcatgatttttaaaccaagatcgctccctggaattttacatacataatatgctccacttgtcacaacct

SEQ ID NO: 675742 - DNA, 855 bp, Homo sapiens
cagcctaggtagcctaccaaaactctgtttctacaaaaacattttaaaacttagccgggcatggtaacatgcgcctctaatcccagtctccttgggagactgaggcaggaggatgacttgaggctaggagttcaaggctgcagtgagctatgatcgcgccactgcactccggcctttgctacagagcaagagcctgtctcttaataaataaataaataaatgaataaataaataaataaataaaattaaataaagtgggagatatctcgtgcttttcctcagtcagagatgacctagccacytcaccttgctctaggtaggattaattgacaaggcaacggatcttgttttttattatggttaagtatacataacatagacatttaccattttaacaatttctagtgtatgattcagtggcattaagtatattcccaggacagctgtttttctagtagtgaaactgaaccagtagcaagctggtatacttttttttttttgagacggagtcttgctctgttgcccaggctggagtgcaatggcgtgatctcggctcactgcaacctctgcctcctaggttcaagtgattctcctgcctcagcctcccaagtagctgggattacgggtacttgccaccacacctggctactttttgtatttttagtagagatgaggtttcgccatgttggccaggctggtctcaaactcccaacctcggatgatctgcccacctcagtctcccaaagtgctgggattataggcgtaagtcaccacgcccagccactggcatgatttttaaaccaagatcgctccctggaattttacatacataatatgctccacttgtcacaacct

SEQ ID NO: 675743 - DNA, 1977 bp, Homo sapiens
tgcatagtgcaagtaaatcttggcaaaaagtaaaggagaaagtataagatcaaatcttcctgaaatgcaaaagtctctgctatgctttcaaggagacgtgagccagcctgagtctgctctgcagctgcccaggagccaaggggaaggaagtgggaagcagcatgatagccactgcctctgcatcccacagcagtcagaacaggcttgctctgggttcaaatcttcccttgtgagcccccctgcagaggacgacctgagaggacactgatacccaggtactcagcaaatgactttttcaactggattgacagcctggagggagaggcgaatccgtcagggctttgaattcacagagggggaagtaatttggcttcttcaagcaagcagaatgggctcagccaggaagcatctaattttagcactatctttgatgacaaaatcctttcagggtttataacctaatgaggatttacatttggactagcagtaagggctttcaaagatagaagatgagacatttatagatctcagaatacatgtggaacctttaacacatttccagaaatttgagtttggcctccttttaaggttcctttgtgaagcccttctttgtggctgattcatgctcccagcttcctgctaggatgtggcccatgtttctaacacctggggcaagagcttgttgacttgagctgagcacaatatttcaaaagagggccaaaaataaattgcattgcacacaaagttaacagaagcttatctttggactaaaaacaataaatttgggagaatgagcttcattggagccttcctgttgtacagatggaagccactctgagaccctgaacacacatcacacgaggatcttttcatcaagcagttaatcctgagatttcactcaacagcccaaagacggcttatttgcttttctttaaccatctcaagactttttcactgacttccccatgtgcaccaaccctgaasggaacttaaaatgcagtacttaagagtgtgggatctggagccagaggttgagttcagaaccgcgctgcaccacagataagcttctgaccgtggacgaggtactaaccatggctcaatgttcttatctttaaggcatgagaaataacagtaactcactccatttagggatattttgagttatcaaatgagttaagacatataaagggcttagaatagtgcgtggcacataacaagttctccaataagcattaatgatgatcgttagccattcttttattctacttacataagaccatgcatgcttagtaacacctgcccatggagaatgtctcagccaacatcccactcagtcatcccaagcactgtctcaacatttgggctgaaaagggtcattctgttatatttgtacatatcagcataaggcacactcccacggcacttttgattgggcgacagcccgtgtatcctgaaatcaattcctagcccaacagcatatatgcatgtgtttactcatgttcaaatgcttaattgtgcagttctttgccgatctgataccatgtcttcagctcattttaaccagcttcattaataaagttaattatattgacatctatttaagaatgaggaggaggagaaaagaagagaagagcagctaattaaagccaccttctaaaggatttctaccaatatgtataaatggcagcatttacatcttaagcttcaaatgaaactgttctgttatcagcctaaaagaaacatgtttaaggttttaaatagtctttgttgccgttgctacatgctctcatttatttcttatgtattagacttaataataagtaataaaagcaagtttgagtttctcaaatgttatatcttttgcaagagccaaattattaatattattattatttgagtcagagtctagctcggttgcccaggctggagtgcagtggcaccatctcatctcactgcaacctctgcctcctgagttca

SEQ ID NO: 675744 - DNA, 1308 bp, Homo sapiens
cagctgagccacatagtatatgatgaacactttttctattacagctttgtgtttttcctaggattaataatcacttgcttctttgtttacttagttttcactgcatgtgttactaattcattccccaaattctccaacggactaaacactcttcttaatacattcagatgcattagcgtgcttgaatgtttatttttttcctggaaacatctctccaggagccttctttctgctttaatctggactgatttctgctgtatgtttgttgttctgttatcgttcacagttattctggaaattctttttgtttctcacctatgttgtaccgtctgttttctggatatcgtatgttctttctgagtttgcaaccttttaattcattttttaattgctttttgaagaagggtacatgagaggtcaaaattttgactttgcatgatctaaaattgtcctcgtttacttgtttgatactttgagtatggaattctaggtcagtcacaccttgctttataaatggctgcacactgaggtccagaaaaggcaggcccttggtctccacactcctaggtcagaacctgagagcaggttccaactacagagaaccccagaaatgatggcaccttttctcacaaagaaatgctttttccacctccacagaggtctgccttcggttacatttaagtgttgattgcattgtccatacactcagtgctgtgtgagcacacggtttacaaggatgacaatgccccctttgctgcattcaaggtacaaatgttttggcaatgaataaagtcacatatacgaacagtctgttgatatgcaagggcaaaaatacagaactggatcaggtggtatgagtacaagggatggtaaagtcaggtgagtttcattcatgcagtattccccaatgtcctctgggaagatagaagagtacctcatacctggagcccggacgcaggtttttttttccatcactgctttggcgacagtaggcattgctgataagaaaaggcaactggacatctacactttgtcattgctycctcatcctgccacagaagcttcattaacatggaaataaagggatttacaaacactctaaggacaaaggggaagagagatgagatgctggcagtcatgagatgccaatggcaatggatttaacattgtggagaaagccaaaagaagtcatactagaggaagccagtgagccagtctctcattcagagcaaaccctggaaaggctggtaaattcgagggaccagattagactggagtcaatccttaaagagtctttcaaagtttttt

SEQ ID NO: 675745 - DNA, 730 bp, Homo sapiens
tatcagataggactagtcagagtcttttattaatttttatatcagttcatatgactcagacattcttactaacttctgaaatttattcaacttaaacagttccagagaagagttaaagtacccactcttcaagaatcaataatcgaagaaaagtagattagaatgttacaggaaaaatcgagacacagatagtgattaccctgacagtggaaacaattctatgtttttagtctggaaacaatgatattaaaactcggcaagcattgtagatgatcatttttatttgtgtcatgtctcccaaagtccttaaaatgtgattattatcatatgcgcacagaatgagagagaagagttagaatgatttccagatttgtggtttggagactgaatgtgacacagtctcacaagtataaatgacaggagcagttagaagtaaaaggagacagagaatttcgtttttacatatatgcccttgagacatgcaacaggagatgtctagaaagcagatatacacacacattggaaagcaggtcttctagaagctgggtgcagatacagactcaggagttaccatgatggaggagatggttggaaccayagaatcatgcaggaaatgtgtatagagcaagaagagcacaaagcagaggacagaatctcaaagggttccaaatgctagaaatgctcttaaataatgttataaagaggaaatagagctttgggatatagacag

SEQ ID NO: 675746 - DNA, 596 bp, Homo sapiens
cacacagatattgctctgttttgaattaggttgctatgttaaccaaaagaaaaaaaaagttaccagctatcattgttccaaaggttgatttctgatttctctaacttctgttgtgtctgcatttctctcctcatttttcaaagaatgaccctcaatagcttaataaatcagctaacaaaatgttttagcatctgctaacattccctcagtgtgttacatgcatgttcaaaggctttgttagaaaacacaatgaagggaaaccacaggcaattctgacaggcaatatgatcgggtttcaaaatacttcaaaaccccaatctttacattaagactttgcttgtaaatatttacattgattgcccagatggtggcagaattggagaatgtggatcactttttttttagaaatgtctcttaataaacttaaagattcataagccacaattgcaaactttagtaaacacagtactacatgttcatgtgaaaagttttgcagctataattattattagttttttaaatcagagcaatgggaagtgaaaagatacaagttttcttcagattttgaggacagcaccttcctgcactatccrtca

SEQ ID NO: 675747 - DNA, 657 bp, Homo sapiens
tccgaggaagctcagatgctgcagtcattagtttctagtgtcccatcagccttggtctcaagaggccgagagggtgcaaccccaggggctcccctcccatcttgagctcttcctgaataaaacctcattcccctgtctggcgtctttgctctcaaggctaagctgcaggaaggagtggacctcagttacccttacagcaccaggtgggggcccaacctgtgaccccatcacctggcacaatccccaggctctggggcgttgatggtgccatcctcactttcgagtggaggaggtgggcccagggaagttgattggcaggcccaggagtgggagtcaggcacaggtcactccagagcctgcccttccctgaatggaaccaggctgctggctcccaggggctagattctgtcccakatggtgggaggggctggtggcagctgcagtcagagagggagctggggtctggcaggctgtggctgcctctggactaggggatcccagccacacccacatcctctgggtgcagggagtgaagtctgtgttctaactggggtctggggaaccgcctgggaaaagaaagggattctgctcctccagccggatgcaagtggaagaaagaataacacatcacaccagaaggttggaagcagaggatgg

SEQ ID NO: 675748 - DNA, 1515 bp, Homo sapiens
gctaatgtaagcgttttgagtacatttaaggtaggctaggctaagctatgacgttggtagtttaggtgtattaaatgcatttttgggtacaatattttcatcttatgatggttagccccaacataagcatgtatatgcaatataatattattaactatggtcatgagctgtacaatagatctccagaacttacctatcctaactgaaactttgtgccttttgaccaactccccattcctcaccctcctcacccaagaaaggattctaaggccatatttccttggcttaagtccctgctctgctacttctttctaagaatgtgaccatgtggagctgaatctccatttgtaactcaactgagcaggctttcacctggcaactccagtcatcgggcatcctccacaaattaatttatgatgagcaacagagagtgagaccctcctaaagctcattgaaggggttaatgcccatctcatgggtcctatgtggacatttaggagaaatatcaaggaaggaataaacctctccttgtttctttttggaggaaagtcagagcggagttgggagaggtatgcacactggaaaatgaataacacagctcaagtagagtcttgtgttgcaaacaaaaatgattatgcaactgctgcaattttggagcttcttgggggcatgcagatcctrtttttctgctattattatagtcagtgtaagtaatttaaatgtttgtaagtcaacatcgtgtcaccagttctacatggtggccattcctgcatagaaggattccaaggactcaaggatggtagaactcatcctcctggtatgttggcctttatgaattgacaagttatcggaaacggtggcagttcattactttgagtgctttccctttctcttgttaccaccaaggaaggctgagctcacccaaagggctcatttctcccatctaattgttactaagggaaggaaatgcctaaagtcatacaactctagtgtttgagagacataaaagaacttaaggcccacttgattaaagcattgtatcacgtatgacatgtctactgtgtgccagatactgttacaaatatttgcatggaagctatctcagcactttatgaatgtacttttgaaaaaattcatgtttgattctcactataaactgtgaggaagatatggaaagtattagtacattaaaatgaccacaaccactaaggatctgagaggttgaatgactgaacccaactggtaattggaagagctgggagcgacatcaagagttttggctcttgtcctgtgatcttctcattgtgtggtcatgtttttctgaggacaagtttggatatggtgaaggaggaggggagtgagagagcacagggctccactgcaggcatggggaggaggagctggcagagggagtgatggctgaagatgcatctgcttcttcccagggtttctagggccagctgtagctcatttggctgttgttgatttactcccctagctttcttctggaggaca

SEQ ID NO: 675749 - DNA, 589 bp, Homo sapiens
atggtgaaaccccgtctctactaaaaatacaaaaattagccgggcgtggtggcgcatgcctataatcccagctactcaggaggctgaggtaggagaatcacttgaacccgggaggcggaggttgcagtgagccaagatcatgcccctscactgcagcctgagtgacagattgagactgtctccaaaaaaaaaaaaaaagcaaaaaaaaaatttcaggatggttgtgggaagtactgaatctcaagagttaggaatgatcaaacaaatctgttatatattgatacagcccaatgcatgtcttctaattctgtctttcttctcctgctgtcttcctgcccctgaaggagaaggcaaaagaaaacttttctttcagctgagtcggggactttcttgggtaacagtgactactggtgacatcagcatgagtagctctccatgctggggtctgtgaggagggctgcaccggctgtgaggcctgactgacctgattctaattgcagacattgagctgatgttattcttggcgcaggacagagcgattactcagtagtttctgttaaagtgatcctttgttaaacttctgctccca

SEQ ID NO: 675750 - DNA, 613 bp, Homo sapiens
tgagaattaacraaatattatgcttggggttattgtgatcattatacctgttccaaactatttgacaaggacagtgatggatgaagacatcaaaaaatcagaaactgcaatgaggtctctcaggcaaaattccatacaagcaaattactgtgtctacaaagcattcctgccacacttaattcaccattccctgaacagaatatgccatcttcgttgttcaggtctgtacagtgctggtttcccttcccggacagtttgcgctatcccatcccggcccattccccatccctccacctcccccttccctccccactctcatacaactcttcctcatctttcaggacttggcttcaatgtcaccttaactggaagcttctctcactctccagaagagcttcccattgcacctgatgcatgggaaacataatttgatcatttttaagttacagtccaaatctttttgtacctgaataacatgttgcccagtcagtctctcttcctggattcacaagtctttcatggtagatccagctggaagtgacaaaaagacatcttttgacataaagggatgacacagacagacataagttcttaaatgtcttaaatgttatgt

SEQ ID NO: 675751 - DNA, 613 bp, Homo sapiens
tgagaattaacgaaatattatgcttggggttattgtgatcattatacctgttccaaactatttgacaaggacagtgatggatgaagacatcaaaaaatcagaaactgcaatgaggtctctcaggcaaaattccatacaagcaaattactgtgtctacaaagcattcctgccacacttaattcaccattccctgaacaraatatgccatcttcgttgttcaggtctgtacagtgctggtttcccttcccggacagtttgcgctatcccatcccggcccattccccatccctccacctcccccttccctccccactctcatacaactcttcctcatctttcaggacttggcttcaatgtcaccttaactggaagcttctctcactctccagaagagcttcccattgcacctgatgcatgggaaacataatttgatcatttttaagttacagtccaaatctttttgtacctgaataacatgttgcccagtcagtctctcttcctggattcacaagtctttcatggtagatccagctggaagtgacaaaaagacatcttttgacataaagggatgacacagacagacataagttcttaaatgtcttaaatgttatgt

SEQ ID NO: 675752 - DNA, 613 bp, Homo sapiens
tgagaattaacgaaatattatgcttggggttattgtgatcattatacctgttccaaactatttgacaaggacagtgatggatgaagacatcaaaaaatcagaaactgcaatgaggtctctcaggcaaaattccatacaagcaaattactgtgtctacaaagcattcctgccacacttaattcaccattccctgaacagaatatgccatcttcgttgttcaggtctgtacagtgctggtktcccttcccggacagtttgcgctatcccatcccggcccattccccatccctccacctcccccttccctccccactctcatacaactcttcctcatctttcaggacttggcttcaatgtcaccttaactggaagcttctctcactctccagaagagcttcccattgcacctgatgcatgggaaacataatttgatcatttttaagttacagtccaaatctttttgtacctgaataacatgttgcccagtcagtctctcttcctggattcacaagtctttcatggtagatccagctggaagtgacaaaaagacatcttttgacataaagggatgacacagacagacataagttcttaaatgtcttaaatgttatgt

SEQ ID NO: 675753 - DNA, 669 bp, Homo sapiens
ttatttatttatggagactaggtaacacatatgtaatgtatacaactccagaagtgagcttcaagtcaataacaagtaaaaaaaacaaaaaaactggccaggcacagtggytcacacctgtaatcccagcactttgggaggccgaggtgggtggatcacaaggtcaggagattgagaccatcctggctaacacagtaaaaccccgtctctactaaaaacacaaaaaaaattagccgggcacggtggcaggcacctgtagtcccagatactggggaggctgaggccagagaatggtgtgaacccgggaggcggagcttgcagtgagccgagaccgagccactgcactccagcctgggcgacagagcaagacttgtctcaaaaaaaaaaaaaaaattagccgggcgtggtggcaggtgcctgtagtcccagctacttgggaggctgaggcagaagaatggtgtgaacccaggaggcagagcttgcagtgagccgagatcgcaccactgcactccagcctgggttgacaaagcgagactctgtctcaaaaaataaacaaacaaacaaacaaacaaaaaacccttcagaggtacaaaggaacatgcagagaaaagtgaagtgaatgaagaagccctcttccccagacaaccatgctcatatgtttgccattcc

SEQ ID NO: 675754 - DNA, 669 bp, Homo sapiens
ttatttatttatggagactaggtaacacatatgtaatgtatacaactccagaagtgagcttcaagtcaataacaagtaaaaaaaacaaaaaaactggccaggcacagtggttcacacctgtaatcccagcactttgggaggccgaggtgggtggatcacaaggtcaggagattgagaccatcctggctaacacagtaaaaccccgtctctactaaaaacacaaaaaaaattagccgggcacggtggcaggcacctgtagtcccagatactggggaggctgaggccagagaatggtgtgaacccgggaggcggagcttgcagtgagccgagaccgagccactgcactccagcctgggcgacagagcaagacttgtctcaaamaaaaaaaaaaaattagccgggcgtggtggcaggtgcctgtagtcccagctacttgggaggctgaggcagaagaatggtgtgaacccaggaggcagagcttgcagtgagccgagatcgcaccactgcactccagcctgggttgacaaagcgagactctgtctcaaaaaataaacaaacaaacaaacaaacaaaaaacccttcagaggtacaaaggaacatgcagagaaaagtgaagtgaatgaagaagccctcttccccagacaaccatgctcatatgtttgccattcc

SEQ ID NO: 675755 - DNA, 358 bp, Homo sapiens
aggtttcaccatgctggccaggctggtcttgaactcctgacctcaggggatccgcctgcctcggcctcccaaagtgctaggattacaggcatgagccacccctcctggccaggaactttcttctattgacatttgaacatttcaaaatrtagtacatttctcttttatatcaacagcatattttaaggcataaatgacaactttagagtcatcttttattttaatccaaaccagcctttcccatgctgaccgccccatccttatctaccggtccatattctgcatttcaggtggttgcttctccagcaacttttccacacttccttcactggtgagcagtcatttattagagggttga

SEQ ID NO: 675756 - DNA, 590 bp, Homo sapiens
gaaatatcccaagaagagagacgattccctcaattcattccagctgtgctaacaatgaagacaagtatgagcacctgcatccatcactaccatggtttccagggtgcagaacctatgtaatggagcaagtgggaggttttgcaatactttgagagacttaagatgctctcttaaagggacatttccagtctataagaaatttaagcccttgagggctaaaattttacttatgacaacaaatatatgtggaattccaacagagtggctgcatttattaacttattggttgaacatgtgcaaatattggggcggcatagtgctttcttcaggattacagaggctacsgaccaacgcctgggacagtgctgcccaaaagaaatatgttgtgaaccacatatgcaatttaaaattttctagtagcctcatgtaaaaagtaaaaataaatcaattgataaagcaagtgaaattaattaataatattttattttaccccatagatccaaaaattttgtattttaacttgtaatcaatagttcaagatgagatattttatgttctttttttgtactaagtcttcaaaatccagtgtg

SEQ ID NO: 675757 - DNA, 1320 bp, Homo sapiens
tgccaggtccatcacagccttcctgtgtaaatacagcccctgaagatgttttccagctacttctgtctattttaattcataatattccaccagataaataattcttgcttttatttatttatttttgagatgcagtcttgctctgtcacccaggctggagtgcaatggcrccatcttggctcactgcaaactccgcctcccaggttcaatcagttctcctgcctcagcttcctgagtagctgggactacaggtgtgtgccaccacacccagtgaatttttgtatttttagtagagacggggtttcatcatgttggccaggctggtctcaaactcctgacctctggtgatccacctgcctcggcctcccaaagtgctgggattacaggtgtgagccaccgtgcctggccaaataattctcacttttttttttttttgagacagagtctcgctctgtcgccaggctggagtgcagtggcgtgatctccactcactgcaacctctgcctcccgggttcaagcgattctcctgcctcagcctcctgagtagctgggactacaggcacgcgccaccgcacccagctaatttttgtatttttagtagagacgcagtttcaccatgttggccagggtggtctcgatctcttgacttcgtgatctgcccatgtcagcctcccaaagtgctgggattacaggtgtgagccactgtgcctggctaattcttacttttataaatgatgccatggtaaacatctacaagcaccttgctcttcccatattctgtgctgtagtcttaggtagagtctcagaggtgagtagggtatgcacattttaatgggaaaatatctgtgatcagataatatctgccaaatagactataccaatttccttcccacctaaactatgtaaggaggattatttcaccacatctttgccagctttggggatcatcttacaattttgtgtttaaatgaataactaaaaaaattattatctgagaattttacttgcatgaccactgagtggtctttatccccagtgtcatggacatctgttaactctgagaatgggttttctgggctgtgggagatgctaagccgattccctccctgtttcagccatcaacgtggggctcacgtcactggatctgagctggaataacttccacacaaggggagctgtggccttgtgcaatggtctccgggtaaggcactctccaggagtgatgtgtggagcccagttgaggacagccagggcctcccatcctgccatcctaagcctcttcctcatggtcaccatcaatgagggcatactgggctctca

SEQ ID NO: 675758 - DNA, 1100 bp, Homo sapiens
gttttctcctcgggatgggagggagctgttctgttgcatgagaaagagaataccccactgtacaactgctgtagtsatttactgacacgtgggtgttattttaggcaacctttattacagaagtccactattttaagtgactttttgccaattttagatttgaagggaaggtctcaagttaagcttggaaccacttagaatccaagagggtagcaggaagatccaacccctcaaagcaggtggcgtgggtgccactgggaggggatctggggcctgtcttgagccgtaaatcttcctccacctgagacgtgcaccccactgtaccagagatgcctaagactccaatccctgggttctggctgtgtggaaaatgtctctacacagtcaagcttcagctgactacatgtcaaagagagacaaagttaagagcagcctttcatggtgtcaagaagcagttagcatcttgacttcccctccactcactcgctgacctgctgcagcctccccgggcacctcaggcatagaaaatgagctcagggatctgcccaccctggaccccagtcccgttggtgctgtccgaggagcactggaactggaaggccacctttccacactgcacttccgtcatcccctcctgcccaaagtagctgagttcgctgccgtccaggacggcactggccgtgtagaaggtgtcttgttcaacctggaccgggtgttcaaaccagaccgggaaggtgttactggatccgtctgacatgaacttggtcaagttctgagccagaaccaccccgagccgcttgagctcaatcttcacgctgtactcagccttcccagagctggagccatacaggcccagccctgcaataaatacccttctgtccactgcaaactggatgctgtcgcagcgcccgcggtaccgccactggttgctgcggtaggcagaagactggaatcggtggcacctctgcggggcgaggcccttcctcttggtcaggggaaagtccaggcggggcttgttggtggccgtgtaccacaggaagatgctgtgggtctcctccagagtcaggatgtctgactgggcagcgccgttggcaaactcc

SEQ ID NO: 675759 - DNA, 1331 bp, Homo sapiens
tttggaattctttacttaatatttcaataactttaaaagttccaaatgtttgaaattgtagggttttgtttaaaatacacaccacctatgaggaagacatttcacttctggatatacagccaaagaaatttaatttcatgtacaacaaaagtcatgggcaagaactttaaaagcagcattatgtgtattactccataatgggaaacaagtaaaaaccccattattagggttataaatggaaaactatacaacaatgaaagggtgcaaatattgttatatcctacagtatgaaagattttcacaaaaaaaatttgagtaaaaagagcagcataaaatagagtacacactgtattaatccatttacataaagtttaaaaatagtcaatataactaaataaatgtgtggtgacagatataaaaataatacttacctttgggctcaggatatgaaggaggctactggtatgtgaataatggtcaggctctttttctggttatactcatgtatacttatggtttatacacttatctatatgtatgtcataataaaagtttatgtattcaaacatcatttgtacataaggctgtattagctggctactgcataaaatggcagttttaatgcaaacattgacctccaatcccaccagaagcccttataagataattttttacaaaatatataaaaccataatgatgaagaggaaagtctgatagtagcaatccagttttagaacatggaaaacagattaatgaaggataagtaactcatcagattttaaaagctataaaccagaaacagttgtagtaaactaaaaagcgagctgataccaaaggctcaccaatctggcagcagttgtatttcctgtgttcccttacattctgttcatctggatgggcggcctatttcaacctctccatgaatgcagcatgtaggtaattctcaggacattgtcaaagagacaatctatgcattgaaggataacaagtacaatggaggctagatgtattatgttcaaaatagggacattaagtgactatttacacactaaaccttgaaatctttatttttcttagygcatctggttcaaagattactatcagccaaaattacaccctccaggcaggaaattggggaagacatttctgggatgtctgacaatcccaaaacacaggaactgaagataataacaatatcagttccaaattaatctaagttatcttactctaaaggtgatagccaaagaggccctctcacacacgaagagctactaataattttgtagtccctgatataagaagaaggttactatagataatatctaataaaa

SEQ ID NO: 675760 - DNA, 619 bp, Homo sapiens
tgcaacttccacctcccaggttcaagccattctcctgcctcagcctcccgaatagctgggattacaggcgcctgccaccatgcccagccaatttttgtatttttagtagtaacaggtttcaccatgttggccaggcctgtctcgaactcctgacctcatcatccgcccacctcggcctctcaaagtgctgggattacaggcgtgagccactgcgcccagccgactcttagtactcttgatttctcaatattttattcttttatttagtttcttctttgccctcacacatagcctgttgagttaaccatacattccaattaatactacattatcatagttatctatatcaagaagtttctctktttattttcttctccttcattcccatgtgatgtcatacttcctttgcttgttgcctcatgggtactactctattgtgtttgctatgtctttaaattctcatgggctttggtataaaacattgctttgtattgtgtgtatatattttttaattccataaatgttatcgatctttgtacatataaaccattttttcttttttcacacaatactgtttttataatctatgttagtgtgtgtatatatattatatatacat

SEQ ID NO: 675761 - DNA, 615 bp, Homo sapiens
aaaggggacctcaggagtgggaaataagttcccctctctcttagtccattttgtgttgctgtaacagaacttgtgaggctgagtaatttataaagataagagctttatttagcttatgattctggtggttggaaagttcaaggttaggcagctgcatctgctgaaggcctccctcacactgcttccactcatggcaaaaagtggaaggggggcaggtgtgtgccaagaractacgtggcaagatagaaagttagaaaaacaaaagaataaaagaaggaggactccttcaatatgttctgcagtcttgcagaactaatccattcctgagaaagcaagaactcacttgccactgcggaatggcattaaggagggacccacactcatgatgcaaacacctcccactaggccccacctctcaacaccataacatgaggcttctaatttcaacatgagttttagtggggaaaccacattcaaaccatggcgcccttctagcaaggtaatgattaagaataaaggactaatagttaagaacaagaaagaaattctattcatatgctttggacaagttacctagcctccttatactattttctaatttctgaagtggggata

SEQ ID NO: 675762 - DNA, 639 bp, Homo sapiens
tgttttctgaaacatttaagaggaagatgcacctataaatgacccttcaactctaaacccttcagtatgcatctcctgagaacaaaaacgttcttctacacaatcaaaataagatggtcacatttgaacagcaacacaattctataattttatatatagacagtccatatttcagatatccgcaattgtccttataatgatttgtgtagttgtttctaccattggacacatcatttaggattcaataaaaagttacaaagtgaatcgggttggcatgtctgtttaacctcctttaatctacaacagttttcctgcctttttatttttcctttcacaaaactgatgtcgatgatgagtacaggaaaattgttttggagactgctcttcgatttgagtttgccagtcttgactgatctgatccaagttaaatgcttttttttttttttttggcaagaataaatttcggatgatgtatatgtgtcagtgtatcataacaggagcaaatgatgtctatttgtctcattatgatcgacattgcttgatcactgtgaataatttacttctcagttaattcacaaacattatattttaatgagtagtaaattagcttctgcagacttgataaccrctgggagatac

SEQ ID NO: 675763 - DNA, 591 bp, Homo sapiens
gtcagggatgtcgggcagcacatatgggatcagagtttctcacaccttgagcagcatggccagcctgcagctctgggcttctgttttctctccctgaaatttcttactttccatgccttgccctggtcctgccctgccaatgtctgctccattacagtggtttcacctcccagaagacaggtttgctccaaccctccaatgtccctggcagttctgcaccccagagggatgaatacccttctctccaggataactcatttcttagacaggaaaaaatttaatttcatcttctctaatctaactcttcctgaaagatgcgtagctgaatcagaatgattccaggcatttcctctcactttcttaatagaaaactgtaccataaagacacatgcacgtgaatgttcattgcagcactattcacaatagcaaagacatggaatcgaactaaatgcccatcagtgacaaattggattaaaaaatrtggtacatatacaccatgaaatataatgaagccataaaaaagagcaagataatgtcttttgtgggaacatggaaggagctggaggccattatccttagcaaactaaacta

SEQ ID NO: 675764 - DNA, 1412 bp, Homo sapiens
taagtagttttaatctattaattcctaagtgcatgctctctctttctcattcttttcatctttatacaattttaaactctctttatcattataatttgtttcttagagaaaccagatcattagtgttgagagttcttcacaatttggatttttctgctacttaacttgttccctgtgttttctttaaattggaggttggctctagagcttttttttttttttcacaattcagcttgatttttggcaaaaatttcccatgtactttgttttgtactttcatcagcaagtaaatgttgtctgagatgttagcagcaaatgaaaatcagtgtctagaatgatccgtcatccgtcattgcagtctatcaccattggttgcaaaatggcaacattctaattctactattccttcatttgtcagctgaaatgcttccataaagaaacttcccttcatcaaccctttggtttccctgaaataaattcttacaggaaaggaagaataaatctgagtcttttattattttcagttttcaaaataaatgagacggctctgtaacatactccaaaggagaatgagcaggttttttcttttagtaacttcatgaactcatggataaaacatgtttgaaatctttcaatccattgtgattattcttatgatgacaaatcactccatctatgactagtagccatcttttaaatggactccctgagctctttagacctttcaatacaatcttattagatattacagtttctttggcttctagtatgacatcatatcatatcagttcatctagagggatatttaagacatccatgaggttttctttttcttttctttatgtttttttaagtgggagactacattctaggtgctaaagattctccttgctactgggttggctattatttctaagcccttttattggacaggcaggagataaaaataaatcatcataagttcacgtagatatttataaatcaaatttagaactatatagtttttacttactatcatagatcttatatctctgtttcttttctcttattccaagcattgtattttttaacgatactaatataattattcattttctttcacacatagttcacatacaatgaactcagaataacaayataactattaccatcaaggatatgattattaaaagcaattttaaatcttttgaagttctttttgtcctccggatataccccactaaagatgcttagtaaagttttttttgtttgtttgttttttgttttttttgaaacagagttttgctcttgtcacccaggctggagtgcaatggcatgatctcggttcactgtaacctctgcctcttgggttcaagcaattctcctgcctcagcctcccaagtagctgggattgcaggcacctgccaccatgc

SEQ ID NO: 675765 - DNA, 1412 bp, Homo sapiens
taagtagttttaatctattaattcctaagtgcatgctctctctttctcattcttttcatctttatacaattttaaactctctttatcattataatttgtttcttagagaaaccagatcattagtgttgagagttcttcacaatttggatttttctgctacttaacttgttccctgtgttttctttaaattggaggttggctctagagcttttttttttttttcacaattcagcttgatttttggcaaaaatttcccatgtactttgttttgtactttcatcagcaagtaaatgttgtctgagatgttagcagcaaatgaaaatcagtgtctagaatgatccgtcatccgtcattgcagtctatcaccattggttgcaaaatggcaacattctaattctactattccttcatttgtcagctgaaatgcttccataaagaaacttcccttcatcaaccctttggtttccctgaaataaattcttacaggaaaggaagaataaatctgagtcttttattattttcagttttcaaaataaatgagacggctctgtaacatactccaaaggagaatgagcaggttttttcttttagtaacttcatgaactcatggataaaacatgtttgaaatctttcaatccattgtgattattcttatgatgacaaatcactccatctatgactagtagccatcttttaaatggactccctgagctctttagacctttcaatacaatcttattagatattacagtttctttggcttctagtatgacatcatatcatatcagttcatctagagggatatttaagacatccatgaggttttctttttcttttctttatgtttttttaagtgggagactacattctaggtgctaaagattctccttgctactgggttggctattatttctaagcccttttattggacaggcaggagataaaaataaatcatcataagttcacgtagatatttataaatcaaatttagaactatatagtttttacttactatcatagatcttatatctctgtttcttttctcttattccaagcattgtattttttaacgatactaatataattattcattttctttcacacatagttcacatacaatgaactcagaataacaacataactattaccatcaaggatatgattattaaaagcaattttaaatcttttgaagttctttttgtcctccggatataccccactaaagatgcttagtaaagttttttttgtttgtttgttttttgttttttttgaaacagagttttgctcttgtcacccaggctggagtgcaatggcatgatctcggttcactgtaacctctgcctcttgggttcaagcaattctcctgcctcagcctcccaagtagctgggattgcaggcacctgccacmatgc

SEQ ID NO: 675766 - DNA, 1381 bp, Homo sapiens
tttatttgggagtcataattttatttacctcctaagtatgctttggaaattaaatcatggaatacatgtaatcacttaagacagtgtctagcatataaaaaacattgaataacatattggctattatttaaacaccaacactcattgttccttataaccgtagtctcatatttacaaaatcacatcataggacacactttttttttttttgagacagagtcttgctctgccggccagactggagtgcagtggcatgatctcggctcaatgtaacctctgtctcctgggctcaagcaattctcttgcctcagcctccctagtagctgggattacaggcatgtggcaccatgcctggctaatatttgtatttttagtaragacagggttttaccctgttggccaagctagtcttgaactcctgacctcaggtaatctgcccacctaggcctcccaaagttctgggattacaggcatgagccaccatgccaggacacactcttttttttttttttttcagacagagtcttgctttgttgcccaggctggagtgcagtgatgcaatctcggctcactgcaacctctgcctcctgggttcaagtgattctcctgcctcatctgtgtgccaccacacccagctaattttttatatttttagtagagacggagtttcactgtggtagccaggatggtctcgatctcctgacctcgtgatccgctggccttggcttcccaaagtgttgggattacaggcatgagccaccgcacccatcgcaggacacactctttagtaaataaaaactgcaaaaagtttataaaagcctattttatacacagcaaccttgggataactggagactcaaagaagatataggcctccgtgatgcctaatattatctcagtgagatcaagcaaatatgaggaggcagcagttaggagcttcttctagctccttctagttctcctttcctactttcctggatgcaagcagatcatttttaaatacaggaagtaagaacttctggctgtactgttatcgacatgtcactaaatcttcttatgaaaaggaaggctattggtagttcaagtgtctgctatgctgctgagttaatgggccgaggtaatgggtctgaaccatataaagaattactggcttctggatgattgctatccaggtaacccaggtttctcactagttattttcagaatgcccagtctgagcttagttatcattgttgcccaaaggtagtaaccttttgtttatctcaataatgctgcaaaaagagaaaaggaataggcgtacaaggagaacgtaaaatagatcataaatagaaaattatttttgataaatttgcttcaaacatttagaaagaaaataacacat

SEQ ID NO: 675767 - DNA, 1381 bp, Homo sapiens
tttatttgggagtcataattttatttacctcctaagtatgctttggaaattaaatcatggaatacatgtaatcacttaagacagtgtctagcatataaaaaacattgaataacatattggctattatttaaacaccaacactcattgttccttataaccgtagtctcatatttacaaaatcacatcataggacacactttttttttttttgagacagagtcttgctctgccggccagactggagtgcagtggcatgatctcggctcaatgtaacctctgtctcctgggctcaagcaattctcttgcctcagcctccctagtagctgggattacaggcatgtggcaccatgcctggctaatatttgtatttttagtaaagacagggttttaccctgttggccaagctagtctygaactcctgacctcaggtaatctgcccacctaggcctcccaaagttctgggattacaggcatgagccaccatgccaggacacactcttttttttttttttttcagacagagtcttgctttgttgcccaggctggagtgcagtgatgcaatctcggctcactgcaacctctgcctcctgggttcaagtgattctcctgcctcatctgtgtgccaccacacccagctaattttttatatttttagtagagacggagtttcactgtggtagccaggatggtctcgatctcctgacctcgtgatccgctggccttggcttcccaaagtgttgggattacaggcatgagccaccgcacccatcgcaggacacactctttagtaaataaaaactgcaaaaagtttataaaagcctattttatacacagcaaccttgggataactggagactcaaagaagatataggcctccgtgatgcctaatattatctcagtgagatcaagcaaatatgaggaggcagcagttaggagcttcttctagctccttctagttctcctttcctactttcctggatgcaagcagatcatttttaaatacaggaagtaagaacttctggctgtactgttatcgacatgtcactaaatcttcttatgaaaaggaaggctattggtagttcaagtgtctgctatgctgctgagttaatgggccgaggtaatgggtctgaaccatataaagaattactggcttctggatgattgctatccaggtaacccaggtttctcactagttattttcagaatgcccagtctgagcttagttatcattgttgcccaaaggtagtaaccttttgtttatctcaataatgctgcaaaaagagaaaaggaataggcgtacaaggagaacgtaaaatagatcataaatagaaaattatttttgataaatttgcttcaaacatttagaaagaaaataacacat

SEQ ID NO: 675768 - DNA, 1381 bp, Homo sapiens
tttatttgggagtcataattttatttacctcctaagtatgctttggaaattaaatcatggaatacatgtaatcacttaagacagtgtctagcatataaaaaacattgaataacatattggctattatttaaacaccaacactcattgttccttataaccgtagtctcatatttacaaaatcacatcataggacacactttttttttttttgagacagagtcttgctctgccggccagactggagtgcagtggcatgatctcggctcaatgtaacctctgtctcctgggctcaagcaattctcttgcctcagcctccctagtagctgggattacaggcatgtggcaccatgcctggctaatatttgtatttttagtaaagacagggttttaccctgttggccaagctagtcttgaactcctgacctcaggtaatctgcccacctaggcctcccaaagttctgggattacaggcatgagccaccatgccaggamacactcttttttttttttttttcagacagagtcttgctttgttgcccaggctggagtgcagtgatgcaatctcggctcactgcaacctctgcctcctgggttcaagtgattctcctgcctcatctgtgtgccaccacacccagctaattttttatatttttagtagagacggagtttcactgtggtagccaggatggtctcgatctcctgacctcgtgatccgctggccttggcttcccaaagtgttgggattacaggcatgagccaccgcacccatcgcaggacacactctttagtaaataaaaactgcaaaaagtttataaaagcctattttatacacagcaaccttgggataactggagactcaaagaagatataggcctccgtgatgcctaatattatctcagtgagatcaagcaaatatgaggaggcagcagttaggagcttcttctagctccttctagttctcctttcctactttcctggatgcaagcagatcatttttaaatacaggaagtaagaacttctggctgtactgttatcgacatgtcactaaatcttcttatgaaaaggaaggctattggtagttcaagtgtctgctatgctgctgagttaatgggccgaggtaatgggtctgaaccatataaagaattactggcttctggatgattgctatccaggtaacccaggtttctcactagttattttcagaatgcccagtctgagcttagttatcattgttgcccaaaggtagtaaccttttgtttatctcaataatgctgcaaaaagagaaaaggaataggcgtacaaggagaacgtaaaatagatcataaatagaaaattatttttgataaatttgcttcaaacatttagaaagaaaataacacat

SEQ ID NO: 675769 - DNA, 615 bp, Homo sapiens
tattttttactttctcttttgctaatctgttatgtgattatgtgaaattaattaacttctttaggctcaagtgttacattctgaaaaatcatggtttatgttgtcccaatggttctattcaatttcaacattcccgaatttaaattttcatttatcagttatctgccataaaatgttgcacttgaactctcactgcttcattcaatagattcaaattcatgtcccaaattatctctgtctaataaaataaccttagaaaccactgccttctatagataataataaaactacttaagctttgatctcattttattcctataaattatattttttggctttgcaaaattaaacagtataattttacccatgatcataagcaaagsctcaaaaacaaaagatcaatattaatgtcattgagagctactacttattgagtgcctaagtaatgactgttaggaatcttttacattttttaccctcacaataaccagcttgaggtaagcattagcattcccattgttccaactatacagctggaaaccaaggctcagagaagtgcgatgcgttatcaacattacccaaagttatgcagcaaaaaaatgttgaagcagggat

SEQ ID NO: 675770 - DNA, 615 bp, Homo sapiens
tattttttactttctcttttgctaatctgttatgtgattatgtgaaattaattaacttctttaggctcaagtgttacattctgaaaaatcatggtttatgttgtcccaatggttctattcaatttcaacattcccgaatttaaattttcatttatcagttatctgccataaaatgttgcacttgaactctcactgcttcattcaatagattcaaattcatgtcccaaattatctctgtctaataaaataaccttagaaaccactgccttctatagataataataaaactacttaagctttgatctcattttattcctataaattatattttttggctttgcaaaattaaacagtataattttacccatgatcataagcaaaggstcaaaaacaaaagatcaatattaatgtcattgagagctactacttattgagtgcctaagtaatgactgttaggaatcttttacattttttaccctcacaataaccagcttgaggtaagcattagcattcccattgttccaactatacagctggaaaccaaggctcagagaagtgcgatgcgttatcaacattacccaaagttatgcagcaaaaaaatgttgaagcagggat

SEQ ID NO: 675771 - DNA, 1306 bp, Homo sapiens
cgggctttttattattattagtttttgcagaaacgggatctccctatgttgccctggctagtcttcaactcctgrgctcaagtgatctgcccacctcagcatcctaaagtgctgggagtacagacgtgagccactgcacctgactgaaacttgtttcgaaaccccctcattccacgaaaaatacccagccatctggggccattatcactaattaaaggaatttgaggcagaaaactttgagagcctcaatctcagttttttaaggatagagaaagatcctgacttggaactaacaacagaagatggaattagaaatacaatttacctcattgtcactactacagcaaaggtgatattaatgaataaatatttttcccacatttgtgagaaatagaataagtgtttcaccatgtttttctaatgtctagatttctagatttatttttgtgagaaagtggggtatatttacaagtaagtgataattttagtttcttgaaattataaaacctgctgaaattaagtaatgaatattaaaaatgaaattaagcaataaaaatgggaaaatgcaataaattaaaaatattaacgaaatataaaaattatataatttttaaacgtatagaaaataggatatccagccggccatggtggctcacgcctgtaatcccagcactttgggaggccgagggggcagatcacgaggtcaggagattgagagcatcctggctaacacggtgaaaccccatctctactaaaaatacaaaaaaattagctgggcctgttggcgggcgcctgtagtcccagctactcgggaagctgaggcaggagaatggcgtgaacctggaaggcggagcttgcagtgagccgagatcgcgccactgcactccagcctgggagacagagcgagactccgtctcaaaaaaaaaaaaaaaaatgtatatatatacttatacttctaggccggacgtggtggctacacctgtaatcccagcctttgacaggccgaggtgggtggaccgcctgaattcaggagttcaagaccaacctggccaacatggtgaaaccctgtctctactaaacatacaaaaaattagccaagtgaggttgcggacatttgtaatcccagttactcgggagggctgaagcaagagaatagcttgtatctggaggcagaggttgcagtgagccaaggtcgcaccattgcacaccagcctgggcaataagagcaaaactccgtctcaaaaaacaaaacaaacaaacaaaaaaaacagaaaatatacttctaaaattgaaaaacagaaaatta

SEQ ID NO: 675772 - DNA, 1360 bp, Homo sapiens
taattaagtaatatgaagttatagtggaatagtgtgtgaccctaatccaacgtgacaagtgtccttattaaatgggtaaatttggacacagacacagacacacacacwtacatacacagagagagagagagaaagagaaagagagagagagagagagagagagaaaacaccacgtgaatatgaaggcacagatcaggctgatacttctacaagccaacaaataccaaaattgtcagcaaaccaccaagaattagggaagagggatgaaacaaattcttcctcacggccctcagaaggaactgtctctgctaacaccttgatgttgggcttttagcctccgtaaccatgagacaataaatttctgttgtttatgccacccattttgtggtgctttgttatgacagccttaacaaactaatacaacaggcaaaatcatttcatggcattagaggtcaggatagtgactatctttgggtacatacaggaggagaaagaggggttagtggttagtgacttgcagagagcataaattacaggtggagggtggtagtgcgcttctagggaactgacaatatcttgtgggtggtaataacatgtgtatgtcattttgtgaaagctcaaccagctgtacacttaggattcacatacttttcagtttgtaggttatacttgaatacatgcatttgtttaaaaaggaaatatttaccagtgaacgaacacagtcctacccttaggagctttcagcccagagagagatgtagacaaggcaagagtgaaataaattctgatgaaagtttcagtacaaatgcaatagaaatactcgcagcctgtgctggggtgtagggaggattagaagaataaaattccccgaaaaagttaatgacaaaaatctaagacttgaaaaatgagtagaaacagagaagtgaacaatgtgttctatcagagcaaacagcatgcacaagactaaggaaaaaaataaaaagtaaaaagtaagagaaagcatgacccatttaaggaacaaaaagttgttccatttggctgactctcagagtggaaggtgtgaagtgtgaaaagagaaagcgggagaaatggacaacagctagtaaatggggagctttgaaagaaagaagctggaaagcattgtaggcatgattacaacttaattggaaatcaaatattatatcttaaggtgtttatgaaagaacatgtataaatgtatgaaaacatgtctttccctttacaagatggaattaaactctgcaaatatcaggaaaagattcttcgttcaagctaatcatagtgttcacgttttacaaaaaaccagtaccaaagacagggtatgtgttttatgcctttacat

SEQ ID NO: 675773 - DNA, 2109 bp, Homo sapiens
aggcgtgagccgcggtgcccggccagttcagtgttctttagatgtctgttagatcaactggtagagcttgtgactatgcatatcttctgtgtccttactgattttttactaatgctacagtgtattgatagttatgttaaaatctccagcggtaattctagatctgtctacttgagcagtttttgcttaaagtattttgaagccgtcatgtgtacacatttaggattgttaagtcttccttataaattcagtctttcattttcataacattttaaccttatttctgttaaatgtcttgatgcctagtcaaattatttgaccacccttttgctcctgtcaagcctgggcctttgttagtttgtgcttatttattagggttttgctcgtagacttagacagtgactcttagtctaggaaaggttcatcctcatgggcctcagccacatgttctaggtatacttagtgagttctctccactctgctgtgtcccaaatttgtgtgatctctggcatctccagtcagccctcagaagtgccagccactctgcagaggccttgtggagcctgcctgctgcatgcactccccccagcccttggccacagacctgcagagaacttttgcgtactcttttgaggcctcacctgtatgtagttccctcttctccagtaccttattctataaactcccaacatgttagcactgtaagactctcagcttagtgacagtgacattgcctcatttctggaggtctctacctctctccgtgtggtcaagaaactgccattgggcagaaaacacaagtgtgtatgagatttgcctccagtgttttcctgttctcaaatatcacagtcctgttctgcctgtgttccaatctctgaaaacagttttctcaaatattctatccagtttcagttttctcgttggtcatggtgggagggcaagtccatcttggctggaagaggaagtccttctgcgtctttttctctttgtccttccacatkgttttgcattgtggattttctaaacttgccgtataagtaagcatgtgcctatttgtgaagggaaagaaaaaaaaccttttaattttttaaagctgttctgttggttcctcacaaggatctgaagggattggtaaataggatgaaagaaattctgtctttcacatggagaaaaccaagtgtgacattaataaaaacgagcatgtctgtaggcaaagagtttcactgagctctgctagattcagaagcagttggacttacaacatcgtactttgcaaaacacatatattttatttacccaggaactaaagctaagtcagctgtggattaatagaaggtctgtgaagggtacttagactacagtaagattggggaagaaaattccatttccaaatctaagatatatcattcctttgtgccaagcacataatgatagtagagatttaagggggcccttagcacggaagcactgggttagtcagaaggtgaggtgagctgtcacacagccttgatgctagaatgagggtgccctggtactatcttatcagccatgacactggtgcattgggccatttttttgttttgttttttttgagacaggctcttgctttgttgctcaggctggagtgcagtgacatgatcgtggctcagtgcaccctcgacctcgtaggctcaagcaatcctctcacctccgactcccgagtagctgggaccacaggctcgtaccaccacacccagctaatttcttaatttttttgtagagatgggggtctccttttgttgcctaggctgattttgaactcctgggctaaagtgattctcctgcttccacctctcaaagtgctggattacaggcatgccagacatatgtaaacattctaaactatgtgacaatatgtgtaaagctttctcatgcattgtgagacaacacagcaggaatatttcaccatctgcctaaggtttaaaaggaaataactttaagcatgtgtctaaatagcaagtaatgttttagagcggattctcttaaattcagcttgggcatctgcaccatatacacagcttgagctgtcacctgacgtagagacaggcaacttcagtgcccgtgttcata

SEQ ID NO: 675774 - DNA, 2109 bp, Homo sapiens
aggcgtgagccgcggtgcccggccagttcagtgttctttagatgtctgttagatcaactggtagagcttgtgactatgcatatcttctgtgtccttactgattttttactaatgctacagtgtattgatagttatgttaaaatctccagcggtaattctagatctgtctacttgagcagtttttgcttaaagtattttgaagccgtcatgtgtacacatttaggattgttaagtcttccttataaattcagtctttcattttcataacattttaaccttatttctgttaaatgtcttgatgcctagtcaaattatttgaccacccttttgctcctgtcaagcctgggcctttgttagtttgtgcttatttattagggttttgctcgtagacttagacagtgactcttagtctaggaaaggttcatcctcatgggcctcagccacatgttctaggtatacttagtgagttctctccactctgctgtgtcccaaatttgtgtgatctctggcatctccagtcagccctcagaagtgccagccactctgcagaggccttgtggagcctgcctgctgcatgcactccccccagcccttggccacagacctgcagagaacttttgcgtactcttttgaggcctcacctgtatgtagttccctcttctccagtaccttattctataaactcccaacatgttagcactgtaagactctcagcttagtgacagtgacattgcctcatttctggaggtctctacctctctccgtgtggtcaagaaactgccattgggcagaaaacacaagtgtgtatgagatttgcctccagtgttttcctgttctcaaatatcacagtcctgttctgcctgtgttccaatctctgaaaacagttttctcaaatattctatccagtttcagttttctcgttggtcatggtgggagggcaagtccatcttggctggaagaggaagtccttctgcgtctttttctctttgtccttccacatggttttgcattgtggattttctaaacttgccgtataagtaagcatgtgcctatttgtgaagggaaagaaaaaaaaccttttaattttttaaagctgttctgttggttcctcacaaggatctgaagggattggtaaatasgatgaaagaaattctgtctttcacatggagaaaaccaagtgtgacattaataaaaacgagcatgtctgtaggcaaagagtttcactgagctctgctagattcagaagcagttggacttacaacatcgtactttgcaaaacacatatattttatttacccaggaactaaagctaagtcagctgtggattaatagaaggtctgtgaagggtacttagactacagtaagattggggaagaaaattccatttccaaatctaagatatatcattcctttgtgccaagcacataatgatagtagagatttaagggggcccttagcacggaagcactgggttagtcagaaggtgaggtgagctgtcacacagccttgatgctagaatgagggtgccctggtactatcttatcagccatgacactggtgcattgggccatttttttgttttgttttttttgagacaggctcttgctttgttgctcaggctggagtgcagtgacatgatcgtggctcagtgcaccctcgacctcgtaggctcaagcaatcctctcacctccgactcccgagtagctgggaccacaggctcgtaccaccacacccagctaatttcttaatttttttgtagagatgggggtctccttttgttgcctaggctgattttgaactcctgggctaaagtgattctcctgcttccacctctcaaagtgctggattacaggcatgccagacatatgtaaacattctaaactatgtgacaatatgtgtaaagctttctcatgcattgtgagacaacacagcaggaatatttcaccatctgcctaaggtttaaaaggaaataactttaagcatgtgtctaaatagcaagtaatgttttagagcggattctcttaaattcagcttgggcatctgcaccatatacacagcttgagctgtcacctgacgtagagacaggcaacttcagtgcccgtgttcata

SEQ ID NO: 675775 - DNA, 2858 bp, Homo sapiens
tgcatgactgtcatcagacatccaaaaggcatcaaatgtctaacatgaaatataaaatttgtctatagtcttagcggtctgcaaaattcagggctctcaccattctgagtataccgctcaagtttctttcctatgacttcttcaggttctgtcatttattaacacagtgtgtctaaaattgtcactgctggtcatctggaagaatctgagaagaagcagatccttgttctcattcccagagctgcatctctgctgaatagggtcagggtgctcacagcttagcctcatctgatccactgacagtctcagttatctcctgcccagggaagggatgggcttctctatccagggctgattccccaggacctggcagtgtggctgggacaagccagctctcagcagggaagacataagctgcctgggtggccatggaatacaaggtctgcacctgggcacacagaggcccccggagccgagtgagcagtgtcagctgctcacaggtaagtggagaatggatctgctgtgcccacacctgggctaggtcttgataaacagcctctgacatagctcgcacagaagtcaccaagctttttcgaattgacggtgtttggactcctagggcccgagacctatgccgcttgctgtgcccagtgcaagccctggaatgtcccctatggtgggcatcacaggtctcctggatttcactgttgtgcacagcagtggaggatcttgattttttattcaatgacaagctgcactccttttctggacagttccctgcaaagaaagcatgtgagagactcaccagagcagtccccacagaccctgatttccagaaccccctgtacacccaggtgaaccccacttgtctctcccactccttcctgaccatctcagcactggaatgaagtgaggctgaaccccctgtgagtccccaaatattctcagagtgctaagatctcaaaaatttactcgtcaataagtaactccctttccgctcaagcctcgtataaaagtttcctgattatttgccttttggggcaaaccaaaaacaaaaaaaccaccaccamcaacaacaaacaccaagattctacctgctgtgtcttggcagctgtccttggaactcatttttcttttcctgcagttttcccgatatgagctggactctggttctgtgaacacaatgagagtttgagaaagtgcctccaactgaacaccctgaaattcctagtccatcctggacacacaggagctgaggttaccaccaaaccccagctctcttctgttctccagtgtccaggatctgtacggccctggctgccaaggagctcccagtttccttgccaggggagcctgtgttgcttccctgtcccttctcaccttgaaagagtcaaatcttacctgatccagcagtgctgttcccggccttgagcttggtttcctcagaattctccttgtttggattgggctccgatcctgctgcaagagaaggtttaggtgactcacctctccctaggcagagtcccacagtctatctctgatgcatttttgcggatcagtctttcatgtgaagctcttctgccagtgtcacgagtgaacacatttctcaagtcccctgagggcactaagccatttcccatccccaaatctcaaaataaaaccctgctaaagacacagctcagtatccctgattccaaccctccttccagactccacaggagcagcccaaggccttaccttgcctttgtatgtgcttctcactggaatgggagaaggcggtcttgcctttttctttgaatggtttcttctcatctgagcccttttctgtaaaggagatctgttggaaagggggctggtcagtggagcactggatggaggagcagtggagatcggagtcttcatttccctttcccatgttgaagctcaagtgaaaggtgcgctctctctcacgtccaaaggcagagtgtgggttagtctgctagacctgccttttatacgtccctcggctgggcgtggcttactcttattggctgaagagttttctcattcctgccgcttcttagagcctcaatcagaagtttcttgctgtagttctactggggacctagacacagttaaagggagacattttcaggatcctgtcatggtgtccagaaaacaaagaaccgggagcacagggaccggaaaatcggggaagcatttcttcctatttctgtcccagttcctacctggaaggatttatgatcctgttcacctttcaagatgcacaattaaacatgcctatattgtcatatgttatatattttgcacagaaagagaatttattatacatagtgttaacattgtatgcatagatattataatttcttaaatgcttggaaacaacaaatgtcaaattatggttgattgtattaggtccacacatatatgatgaaataaaaatgcagagaaaaaataaataccaaatgaaatggcccttcctaccttaaaaatggggaagataattagatcaaatgcaataaaattgaattgattaggttgagtcagtgctaacctaattagcccccgattcctgaggtagcaaaaagtctcggtggaaaaactttcccccattctcacccttcctcagtcatcctgggagcgccattgtgttctgtgggctttattcagccctccctagtgaaaatggacttggtctcaaacaggtaacccaactgatcacaagacaaacagcctagattctgaacatcagctcctgtcttcacactgcggacaccacctgaatcccgtcaaagcccacattgattctcaacatccaccagcaagacgtattccagggcagcctctcaaaactgcct

SEQ ID NO: 675776 - DNA, 2858 bp, Homo sapiens
tgcatgactgtcatcagacatccaaaaggcatcaaatgtctaacatgaaatataaaatttgtctatagtcttagcggtctgcaaaattcagggctctcaccattctgagtataccgctcaagtttctttcctatgacttcttcaggttctgtcatttattaacacagtgtgtctaaaattgtcactgctggtcatctggaagaatctgagaagaagcagatccttgttctcattcccagagctgcatctctgctgaatagggtcagggtgctcacagcttagcctcatctgatccactgacagtctcagttatctcctgcccagggaagggatgggcttctctatccagggctgattccccaggacctggcagtgtggctgggacaagccagctctcagcagggaagacataagctgcctgggtggccatggaatacaaggtctgcacctgggcacacagaggcccccggagccgagtgagcagtgtcagctgctcacaggtaagtggagaatggatctgctgtgcccacacctgggctaggtcttgataaacagcctctgacatagctcgcacagaagtcaccaagctttttcgaattgacggtgtttggactcctagggcccgagacctatgccgcttgctgtgcccagtgcaagccctggaatgtcccctatggtgggcatcacaggtctcctggatttcactgttgtgcacagcagtggaggatcttgattttttattcaatgacaagctgcactccttttctggacagttccctgcaaagaaagcatgtgagagactcaccagagcagtccccacagaccctgatttccagaaccccctgtacacccaggtgaaccccacttgtctctcccactccttcctgaccatctcagcactggaatgaagtgaggctgaaccccctgtgagtccccaaatattctcagagtgctaagatctcaaaaatttactcgtcaataagtaactccctttccgctcaagcctcgtataaaagtttcctgattatttgccttttggggcaaaccaaaaacaaaaaaaccaccaccaccaacaacaaacaccaagattctacctgctgtgtcttggcagctgtccttggaactcatttttyttttcctgcagttttcccgatatgagctggactctggttctgtgaacacaatgagagtttgagaaagtgcctccaactgaacaccctgaaattcctagtccatcctggacacacaggagctgaggttaccaccaaaccccagctctcttctgttctccagtgtccaggatctgtacggccctggctgccaaggagctcccagtttccttgccaggggagcctgtgttgcttccctgtcccttctcaccttgaaagagtcaaatcttacctgatccagcagtgctgttcccggccttgagcttggtttcctcagaattctccttgtttggattgggctccgatcctgctgcaagagaaggtttaggtgactcacctctccctaggcagagtcccacagtctatctctgatgcatttttgcggatcagtctttcatgtgaagctcttctgccagtgtcacgagtgaacacatttctcaagtcccctgagggcactaagccatttcccatccccaaatctcaaaataaaaccctgctaaagacacagctcagtatccctgattccaaccctccttccagactccacaggagcagcccaaggccttaccttgcctttgtatgtgcttctcactggaatgggagaaggcggtcttgcctttttctttgaatggtttcttctcatctgagcccttttctgtaaaggagatctgttggaaagggggctggtcagtggagcactggatggaggagcagtggagatcggagtcttcatttccctttcccatgttgaagctcaagtgaaaggtgcgctctctctcacgtccaaaggcagagtgtgggttagtctgctagacctgccttttatacgtccctcggctgggcgtggcttactcttattggctgaagagttttctcattcctgccgcttcttagagcctcaatcagaagtttcttgctgtagttctactggggacctagacacagttaaagggagacattttcaggatcctgtcatggtgtccagaaaacaaagaaccgggagcacagggaccggaaaatcggggaagcatttcttcctatttctgtcccagttcctacctggaaggatttatgatcctgttcacctttcaagatgcacaattaaacatgcctatattgtcatatgttatatattttgcacagaaagagaatttattatacatagtgttaacattgtatgcatagatattataatttcttaaatgcttggaaacaacaaatgtcaaattatggttgattgtattaggtccacacatatatgatgaaataaaaatgcagagaaaaaataaataccaaatgaaatggcccttcctaccttaaaaatggggaagataattagatcaaatgcaataaaattgaattgattaggttgagtcagtgctaacctaattagcccccgattcctgaggtagcaaaaagtctcggtggaaaaactttcccccattctcacccttcctcagtcatcctgggagcgccattgtgttctgtgggctttattcagccctccctagtgaaaatggacttggtctcaaacaggtaacccaactgatcacaagacaaacagcctagattctgaacatcagctcctgtcttcacactgcggacaccacctgaatcccgtcaaagcccacattgattctcaacatccaccagcaagacgtattccagggcagcctctcaaaactgcct

SEQ ID NO: 675777 - DNA, 2715 bp, Homo sapiens
tataactgtcaaatattgtattaggaaaaaaattaagggcatgtcttccatgctcatgtatcctgattaaaatcagttaagacccatctgcccggtgtggtggctcacacctgtaattccagcactttgaaaggcagaggctggaggatcacttgagctcaggagttcaagaccagcatgctcaacatagaaaaacctcatctctgccaaatatacaaatattatctggttgtggtagtgtgcacgtgtggtcccagctacttgggaggctgaggtgggagaatcgctggagcacagaatgtcaaagctgcagtgaaccactgcaccccagccagaatgacagggaaagagaccctgtctcagaaataaaaataaataaagagacccattctttcagacaccctcattcttctacataaaacacggtgcttttgactgaaatgttttaagatgaactgaagattctcccataatcaggagcagtagatggaggttgctcccttcctgttctttgagttgaagcaaggcagaggtctggagactcaaactggtaagtactcaaactggtaaatatatcaattgctttcttttcatatgaggtattaagctattcttgcattgctatttaaaaaacctgagactgggtaatttataagaaaagagtttgattggctcatggttctgcaggctgtacaggaagcatagcaccagcgtctgcttctgggaaggcctggggaagcttacaatcatggtgaaagagaagcaggcatctcacatggtagaagcagaaacaagaaagatgggggagggatgggccacacttctaaacaaccagatctcacgagtactcactatcacaaggatggcacagatccatgagggactcacccagtgattcaaccacctcctccccaggtcccacctgccacattggggattaaaattcaatatgagatttggaggggacatctaaactatatcacatgaccatcagaaaaacagatgaagaattcatggtttctactgtccagtaacttttcatctagagcaaacagattaatggctgaattcagcatcctgtggtcggaagggaaacggattaatggctgaattcagcatcctgtggtcggaagggaaatggattaatggctgaattcagcatcctgtggtcggaagggaaatggattaatggctgaattcagcatcctgtagtcggaagggagaagggagctgcacagggggccttggctgcatttgctccatttcccttatgctgttccttgagttccgatgtcactacctgaaggrctattcatggacagaagaattattgttgttgttgtgattatttctatttcttttatcttggtaaaaataagtttttagcttctcatataattgtcctaaaaaaccctaagagttttgcttaagtttcttgttatcatgtgttataaaaattgacagggaagtggctaaaacagattaaaattacacaagctctaagagtcaagtctctgttgggaaggcttaggaaagacagaactggaaatactccaccagcatgaacatcagaaacatggggtccactttctgttccagccctgcccagatccaccctcttctaaggcctcatccaggtctggcctcaccctagaatcttctctcacagaactcattaaaggagaccagagattcgggcgggggctcctgctgcctctcctgagctggtgcccacaatttcctaaaatggaaaagcagataagtggaagcaaataattctatattggggggttatactttctttttcattgaagccagcgcttctagagacacctcacctagcaacttgttttccattcctgcaaattcagtagctgctccacaaggcacaagaaggtaaatataaatataaaacatctctctgaacagttcatccttttttctctatcccttcatctgtcgatatagcttttattctgcacattttattttccaggtaaataatttttaaaatggaagaaaaaatagaaatgctaggcccttcatttaagtcctgaaaattacagaaaacttagcacccaactccccagggtgctatgaggattaactcacatcatgtaatgtttcctgaacagtgctctgtaacagacttctgaacacatagtatgtgctcaataaacattgtattaactcatgtgtacatgttttccaaatgcagacttactcaaacattgatgccttctctaggctttctaaactgcaaagagccagcagaaaatgacatgtttgaaaatggcgattggtggcttccactttgagccaaaagtatttgtgttgtggtaacagtgttgggtgtcaggagctctgtgctgtgcctactttctctagctgagtgctactatattggatgtagtggaagaaacatcagcattaagaggagactttttaaagaagccaattcatggaccgcttccaaacctgcagaatcacattactaagagagagcctggaatcggaaataattcatatgcacattgaaacttgagaggcagccgggtgtggtgacttatgcctgtaatcccaacactttgggaggcggaagtgggcagataacctgaggtcaggagttcaagaccagcctgggcaacatggccaaaccatgtctctactaaaacatacaaaaattagccaggtgtggtggctggtgcctgtaat

SEQ ID NO: 675778 - DNA, 2715 bp, Homo sapiens
tataactgtcaaatattgtattaggaaaaaaattaagggcatgtcttccatgctcatgtatcctgattaaaatcagttaagacccatctgcccggtgtggtggctcacacctgtaattccagcactttgaaaggcagaggctggaggatcacttgagctcaggagttcaagaccagcatgctcaacatagaaaaacctcatctctgccaaatatacaaatattatctggttgtggtagtgtgcacgtgtggtcccagctacttgggaggctgaggtgggagaatcgctggagcacagaatgtcaaagctgcagtgaaccactgcaccccagccagaatgacagggaaagagaccctgtctcagaaataaaaataaataaagagacccattctttcagacaccctcattcttctacataaaacacggtgcttttgactgaaatgttttaagatgaactgaagattctcccataatcaggagcagtagatggaggttgctcccttcctgttctttgagttgaagcaaggcagaggtctggagactcaaactggtaagtactcaaactggtaaatatatcaattgctttcttttcatatgaggtattaagctattcttgcattgctatttaaaaaacctgagactgggtaatttataagaaaagagtttgattggctcatggttctgcaggctgtacaggaagcatagcaccagcgtctgcttctgggaaggcctggggaagcttacaatcatggtgaaagagaagcaggcatctcacatggtagaagcagaaacaagaaagatgggggagggatgggccacacttctaaacaaccagatctcacgagtactcactatcacaaggatggcacagatccatgagggactcacccagtgattcaaccacctcctccccaggtcccacctgccacattggggattaaaattcaatatgagatttggaggggacatctaaactatatcacatgaccatcagaaaaacagatgaagaattcatggtttctactgtccagtaacttttcatctagagcaaacagattaatggctgaattcagcatcctgtggtcggaagggaaacggattaatggctgaattcagcatcctgtggtcggaagggaaatggattaatggctgaattcagcatcctgtggtcggaagggaaatggattaatggctgaattcagcatcctgtagtcggaagggagaagggagctgcacagggggccttggctgcatttgctccatttcccttatgctgttccttgagttccgatgtcactacctgaaggactattcatggacagaagaattattgttrttgttgtgattatttctatttcttttatcttggtaaaaataagtttttagcttctcatataattgtcctaaaaaaccctaagagttttgcttaagtttcttgttatcatgtgttataaaaattgacagggaagtggctaaaacagattaaaattacacaagctctaagagtcaagtctctgttgggaaggcttaggaaagacagaactggaaatactccaccagcatgaacatcagaaacatggggtccactttctgttccagccctgcccagatccaccctcttctaaggcctcatccaggtctggcctcaccctagaatcttctctcacagaactcattaaaggagaccagagattcgggcgggggctcctgctgcctctcctgagctggtgcccacaatttcctaaaatggaaaagcagataagtggaagcaaataattctatattggggggttatactttctttttcattgaagccagcgcttctagagacacctcacctagcaacttgttttccattcctgcaaattcagtagctgctccacaaggcacaagaaggtaaatataaatataaaacatctctctgaacagttcatccttttttctctatcccttcatctgtcgatatagcttttattctgcacattttattttccaggtaaataatttttaaaatggaagaaaaaatagaaatgctaggcccttcatttaagtcctgaaaattacagaaaacttagcacccaactccccagggtgctatgaggattaactcacatcatgtaatgtttcctgaacagtgctctgtaacagacttctgaacacatagtatgtgctcaataaacattgtattaactcatgtgtacatgttttccaaatgcagacttactcaaacattgatgccttctctaggctttctaaactgcaaagagccagcagaaaatgacatgtttgaaaatggcgattggtggcttccactttgagccaaaagtatttgtgttgtggtaacagtgttgggtgtcaggagctctgtgctgtgcctactttctctagctgagtgctactatattggatgtagtggaagaaacatcagcattaagaggagactttttaaagaagccaattcatggaccgcttccaaacctgcagaatcacattactaagagagagcctggaatcggaaataattcatatgcacattgaaacttgagaggcagccgggtgtggtgacttatgcctgtaatcccaacactttgggaggcggaagtgggcagataacctgaggtcaggagttcaagaccagcctgggcaacatggccaaaccatgtctctactaaaacatacaaaaattagccaggtgtggtggctggtgcctgtaat

SEQ ID NO: 675779 - DNA, 2715 bp, Homo sapiens
tataactgtcaaatattgtattaggaaaaaaattaagggcatgtcttccatgctcatgtatcctgattaaaatcagttaagacccatctgcccggtgtggtggctcacacctgtaattccagcactttgaaaggcagaggctggaggatcacttgagctcaggagttcaagaccagcatgctcaacatagaaaaacctcatctctgccaaatatacaaatattatctggttgtggtagtgtgcacgtgtggtcccagctacttgggaggctgaggtgggagaatcgctggagcacagaatgtcaaagctgcagtgaaccactgcaccccagccagaatgacagggaaagagaccctgtctcagaaataaaaataaataaagagacccattctttcagacaccctcattcttctacataaaacacggtgcttttgactgaaatgttttaagatgaactgaagattctcccataatcaggagcagtagatggaggttgctcccttcctgttctttgagttgaagcaaggcagaggtctggagactcaaactggtaagtactcaaactggtaaatatatcaattgctttcttttcatatgaggtattaagctattcttgcattgctatttaaaaaacctgagactgggtaatttataagaaaagagtttgattggctcatggttctgcaggctgtacaggaagcatagcaccagcgtctgcttctgggaaggcctggggaagcttacaatcatggtgaaagagaagcaggcatctcacatggtagaagcagaaacaagaaagatgggggagggatgggccacacttctaaacaaccagatctcacgagtactcactatcacaaggatggcacagatccatgagggactcacccagtgattcaaccacctcctccccaggtcccacctgccacattggggattaaaattcaatatgagatttggaggggacatctaaactatatcacatgaccatcagaaaaacagatgaagaattcatggtttctactgtccagtaacttttcatctagagcaaacagattaatggctgaattcagcatcctgtggtcggaagggaaacggattaatggctgaattcagcatcctgtggtcggaagggaaatggattaatggctgaattcagcatcctgtggtcggaagggaaatggattaatggctgaattcagcatcctgtagtcggaagggagaagggagctgcacagggggccttggctgcatttgctccatttcccttatgctgttccttgagttccgatgtcactacctgaaggactattcatggacagaagaattattgttgttgttgtgattatttctatttcttttatcttggtaaaaataagtttttagcttctcatataattgtcctaaaaaaccctaagagtttygcttaagtttcttgttatcatgtgttataaaaattgacagggaagtggctaaaacagattaaaattacacaagctctaagagtcaagtctctgttgggaaggcttaggaaagacagaactggaaatactccaccagcatgaacatcagaaacatggggtccactttctgttccagccctgcccagatccaccctcttctaaggcctcatccaggtctggcctcaccctagaatcttctctcacagaactcattaaaggagaccagagattcgggcgggggctcctgctgcctctcctgagctggtgcccacaatttcctaaaatggaaaagcagataagtggaagcaaataattctatattggggggttatactttctttttcattgaagccagcgcttctagagacacctcacctagcaacttgttttccattcctgcaaattcagtagctgctccacaaggcacaagaaggtaaatataaatataaaacatctctctgaacagttcatccttttttctctatcccttcatctgtcgatatagcttttattctgcacattttattttccaggtaaataatttttaaaatggaagaaaaaatagaaatgctaggcccttcatttaagtcctgaaaattacagaaaacttagcacccaactccccagggtgctatgaggattaactcacatcatgtaatgtttcctgaacagtgctctgtaacagacttctgaacacatagtatgtgctcaataaacattgtattaactcatgtgtacatgttttccaaatgcagacttactcaaacattgatgccttctctaggctttctaaactgcaaagagccagcagaaaatgacatgtttgaaaatggcgattggtggcttccactttgagccaaaagtatttgtgttgtggtaacagtgttgggtgtcaggagctctgtgctgtgcctactttctctagctgagtgctactatattggatgtagtggaagaaacatcagcattaagaggagactttttaaagaagccaattcatggaccgcttccaaacctgcagaatcacattactaagagagagcctggaatcggaaataattcatatgcacattgaaacttgagaggcagccgggtgtggtgacttatgcctgtaatcccaacactttgggaggcggaagtgggcagataacctgaggtcaggagttcaagaccagcctgggcaacatggccaaaccatgtctctactaaaacatacaaaaattagccaggtgtggtggctggtgcctgtaat

SEQ ID NO: 675780 - DNA, 2715 bp, Homo sapiens
tataactgtcaaatattgtattaggaaaaaaattaagggcatgtcttccatgctcatgtatcctgattaaaatcagttaagacccatctgcccggtgtggtggctcacacctgtaattccagcactttgaaaggcagaggctggaggatcacttgagctcaggagttcaagaccagcatgctcaacatagaaaaacctcatctctgccaaatatacaaatattatctggttgtggtagtgtgcacgtgtggtcccagctacttgggaggctgaggtgggagaatcgctggagcacagaatgtcaaagctgcagtgaaccactgcaccccagccagaatgacagggaaagagaccctgtctcagaaataaaaataaataaagagacccattctttcagacaccctcattcttctacataaaacacggtgcttttgactgaaatgttttaagatgaactgaagattctcccataatcaggagcagtagatggaggttgctcccttcctgttctttgagttgaagcaaggcagaggtctggagactcaaactggtaagtactcaaactggtaaatatatcaattgctttcttttcatatgaggtattaagctattcttgcattgctatttaaaaaacctgagactgggtaatttataagaaaagagtttgattggctcatggttctgcaggctgtacaggaagcatagcaccagcgtctgcttctgggaaggcctggggaagcttacaatcatggtgaaagagaagcaggcatctcacatggtagaagcagaaacaagaaagatgggggagggatgggccacacttctaaacaaccagatctcacgagtactcactatcacaaggatggcacagatccatgagggactcacccagtgattcaaccacctcctccccaggtcccacctgccacattggggattaaaattcaatatgagatttggaggggacatctaaactatatcacatgaccatcagaaaaacagatgaagaattcatggtttctactgtccagtaacttttcatctagagcaaacagattaatggctgaattcagcatcctgtggtcggaagggaaacggattaatggctgaattcagcatcctgtggtcggaagggaaatggattaatggctgaattcagcatcctgtggtcggaagggaaatggattaatggctgaattcagcatcctgtagtcggaagggagaagggagctgcacagggggccttggctgcatttgctccatttcccttatgctgttccttgagttccgatgtcactacctgaaggactattcatggacagaagaattattgttgttgttgtgattatttctatttcttttatcttggtaaaaataagtttttagcttctcatataattgtcctaaaaaaccctaagagttttgcttaagtttcttgttatcatgtgttataaaaattgacagggaagtggctaaaacagattaaaattacacaagctcyaagagtcaagtctctgttgggaaggcttaggaaagacagaactggaaatactccaccagcatgaacatcagaaacatggggtccactttctgttccagccctgcccagatccaccctcttctaaggcctcatccaggtctggcctcaccctagaatcttctctcacagaactcattaaaggagaccagagattcgggcgggggctcctgctgcctctcctgagctggtgcccacaatttcctaaaatggaaaagcagataagtggaagcaaataattctatattggggggttatactttctttttcattgaagccagcgcttctagagacacctcacctagcaacttgttttccattcctgcaaattcagtagctgctccacaaggcacaagaaggtaaatataaatataaaacatctctctgaacagttcatccttttttctctatcccttcatctgtcgatatagcttttattctgcacattttattttccaggtaaataatttttaaaatggaagaaaaaatagaaatgctaggcccttcatttaagtcctgaaaattacagaaaacttagcacccaactccccagggtgctatgaggattaactcacatcatgtaatgtttcctgaacagtgctctgtaacagacttctgaacacatagtatgtgctcaataaacattgtattaactcatgtgtacatgttttccaaatgcagacttactcaaacattgatgccttctctaggctttctaaactgcaaagagccagcagaaaatgacatgtttgaaaatggcgattggtggcttccactttgagccaaaagtatttgtgttgtggtaacagtgttgggtgtcaggagctctgtgctgtgcctactttctctagctgagtgctactatattggatgtagtggaagaaacatcagcattaagaggagactttttaaagaagccaattcatggaccgcttccaaacctgcagaatcacattactaagagagagcctggaatcggaaataattcatatgcacattgaaacttgagaggcagccgggtgtggtgacttatgcctgtaatcccaacactttgggaggcggaagtgggcagataacctgaggtcaggagttcaagaccagcctgggcaacatggccaaaccatgtctctactaaaacatacaaaaattagccaggtgtggtggctggtgcctgtaat

SEQ ID NO: 675781 - DNA, 606 bp, Homo sapiens
cacagactgggggacttaagcaacaaacatttatctctcacagttctgcaggctggaagtgtgagacctggttgccagcatgggagtttggtgaggaccctcttcctgatttgtgaaagaggtttctcatgtctcttgctataagggcactaatcccatcattggggctccacccccacgacctcatttaaacctattcacctcccaacagccctatctgtaaacaccatcaaatcgggggttctccctcaccatgtgaactttggagggacataaacatcagtccataagtaggaggttagggcagtaagcacacaggtaaatacataattgtaacttgtggaaagtgctttaagtgaaaacaacagcatgtcatgagacaggagatcagagcagaactagaattaggagagtctggggacgcctctcaaggaatgagccttttcaactaggacttgggatgaaaaaaagagtgaaatcatgctggatgcagagaacagtgkgttcaaagacccagaggtgaatgggaaggatgtgggtgtgttgagtggctggtgtggtaaggcccaagcccaggagggtacagagctaaataatgagacacac

SEQ ID NO: 675782 - DNA, 1475 bp, Homo sapiens
ggcataccaggggggtcagtgtgcctgcaatagagacccacggagcaggagcaagggagaggggaagatgaggatggtggcatgggcctgtggttgttgagagttttcagacatccaagagaagctatttagaaggttatagatgtgggaacccgagtaaggaaagagaggaaaatggggagctgkgtacccatggccaggaagagtgtgctgtgactgtggtttatagaaatgggccagggatggagtcttggcgagtgcaactagttgaaggcagtgttgacagtgggggacctgcgaagtgcttgagaaggaatcagagaagaaaacagcaaacaaggacagaggcgtgtcctggaagtcactggagggcacctttttggtaaactcctaatttaccctcagcaacaagcttggtgtgaccacactctcatctctgagctgcatgagcactctccctgccgcctgctacactcctccacctggggctgctcagtgctcttggacaaaagaatcttctggcatcacctggtattccctggacagggctggctcgttggtgatgaaccagctgacaggggccaccactgtagtgcctctggagcaaagctgaaattctccgtccctacgaccttgagggggatggagtgcgaatcatcactagccagggctcatatcatttcaggcacattttctctccaggagctcgatctctgctggtgctaacacagcatcaggtgtcttgaaggcatgtgtaatggctgtttcagggatgctgcaatggtacggtttggaactcaagctttgagcctgactgccgggttcacattcgcggcgatggctgctcagccatgcaccctgggcgaggtggtccacctctcagagcacttgttttcttttccgtaaaacatgcatgtcagtgaggctccctgtccccggggtcatgtgagaagcagatgggtgacctcatgcaaacactgagaatgggctgaaacatgtgaaatactcagcagatgttagctcttattctacttaaataaacaggatttttatttgcacgcctactatgtgcctggcattgtgttaggtgctggacattcagaagggaaaaaagaacaccatttctaccctcagtgaacttctttgtaactatcctgggaagtgagcaattaggcaaaaaattgtaagacagactgatttttttccaagccctccaatgtacagatttggaaacggaggcaccagaagccagtgtagggaagcagccagctgtctgcaaaatagcaaatggcctggattcattagcagaacccactctctttccattgtttcttccctgatgtccaaattgctgtatagcatctccaaaaagcaactctccagcctttgcccatatggctctgaggacagagctcacttccccatgagacagcagcccagccatcacagagtctgcagtaggaacaggcttttgc

SEQ ID NO: 675783 - DNA, 1475 bp, Homo sapiens
ggcataccaggggggtcagtgtgcctgcaatagagacccacggagcaggagcaagggagaggggaagatgaggatggtggcatgggcctgtggttgttgagagttttcagacatccaagagaagctatttagaaggttatagatgtgggaacccgagtaaggaaagagaggaaaatggggagctgggtacccatggccaggaagagtgtgctgtgactgtggtttatagaartgggccagggatggagtcttggcgagtgcaactagttgaaggcagtgttgacagtgggggacctgcgaagtgcttgagaaggaatcagagaagaaaacagcaaacaaggacagaggcgtgtcctggaagtcactggagggcacctttttggtaaactcctaatttaccctcagcaacaagcttggtgtgaccacactctcatctctgagctgcatgagcactctccctgccgcctgctacactcctccacctggggctgctcagtgctcttggacaaaagaatcttctggcatcacctggtattccctggacagggctggctcgttggtgatgaaccagctgacaggggccaccactgtagtgcctctggagcaaagctgaaattctccgtccctacgaccttgagggggatggagtgcgaatcatcactagccagggctcatatcatttcaggcacattttctctccaggagctcgatctctgctggtgctaacacagcatcaggtgtcttgaaggcatgtgtaatggctgtttcagggatgctgcaatggtacggtttggaactcaagctttgagcctgactgccgggttcacattcgcggcgatggctgctcagccatgcaccctgggcgaggtggtccacctctcagagcacttgttttcttttccgtaaaacatgcatgtcagtgaggctccctgtccccggggtcatgtgagaagcagatgggtgacctcatgcaaacactgagaatgggctgaaacatgtgaaatactcagcagatgttagctcttattctacttaaataaacaggatttttatttgcacgcctactatgtgcctggcattgtgttaggtgctggacattcagaagggaaaaaagaacaccatttctaccctcagtgaacttctttgtaactatcctgggaagtgagcaattaggcaaaaaattgtaagacagactgatttttttccaagccctccaatgtacagatttggaaacggaggcaccagaagccagtgtagggaagcagccagctgtctgcaaaatagcaaatggcctggattcattagcagaacccactctctttccattgtttcttccctgatgtccaaattgctgtatagcatctccaaaaagcaactctccagcctttgcccatatggctctgaggacagagctcacttccccatgagacagcagcccagccatcacagagtctgcagtaggaacaggcttttgc

SEQ ID NO: 675784 - DNA, 1185 bp, Homo sapiens
tcagaagcatcacttcttggataactagcactggaaaaatgaaatcatctgtgtaagtgaagggactcatttttctttgctttcagcccatgtaaataaataatacagtattaacattttcgtgctgcttcccattagcttgtagattgagccatactctggctgcctctttgccttcctaggggcattttctttaacttccagaatagtgattttaaaagtaaaaataaaaataaaccttacttacaagcataacagattgtatttaactttatcacatatgatagagatatatatgctgtaaaatgagggaaaggaactttctaataaaccaatgatttgtggaaacttagcagagtctgtcgtaattgttgccccatccactcaaagttaggtagggttggaggtgtgggttataaataacatcttgtttgacatgaccaaggaatagattcctgtgaaccagttagagatgtttgcagttgtgcttctgaaagctcaggctacgcaaagagagaggaaagatgatggtgtgggaggtggtaatagtagttaatttctctcagttgtaggtagatgtattgggatgtacacctcctttccacttcctctttcccacaagaggaaagatttccttccattttagatatataatctgtgtgtagtagaatatatggtgtatatataggtgcttactaaatgggtgtggaatttctggctttgaattttaggattttggactactttaagggcactgagatgacaagaatcatctgccggacttttgtcctccaggtggagttctgtatgccagtcttcagttactctcctcagccctttaataccactacagtgtttgagcacctctacttggtataaggaaatatggcctaattgttacagagaagatataacccctactcttccatatcaaaaaatcacaaaagaggcmgggaaaatttagcatggaaagctaccatagagttgtagtgataaattagctttccctctcaacctcagcctttcaagaaggaaaggctttctttcctactgtcttttgatacatttctttcctactctgtttgatacatctgtgttctccctttgattaaagaggagctgttcaacttgaacctggggttgagtactcagatctgcctatattcctaaaatagcaaagatcct

SEQ ID NO: 675785 - DNA, 565 bp, Homo sapiens
ccgctggtgagcaccttgttagtgccatttcccacacctcccctcttgcccagggtgtgaggccagcatgcagagccggtgggttcccacagcacagccctctgatccacagattaaattctgactctgggaggaacagatgctgattgcttcgtttagggccaaacatcgaagtcaaartgtcatctttttatttttatgtattcatttattttttattttatttatttgtttagagacagagcttcactctgtcgcccaggttggagtaaagtggcgcaatctcagctccctgcaacctctgcctcctgggttcaagcgattctcctgcctcagcctcccaagtagctgggattataggcgcccaccaccaggcccagctaatttttgtatttttagtagagatggggtttcaccatgttgactaggctggtcttgaactcctgacctgaggtgatccacccgccacggcctcctaaagtgctgggattacaggtgtgagccactggcccggccattgattgattgagacagagtctcactttgtagcccaggctggagtgca

SEQ ID NO: 675786 - DNA, 470 bp, Homo sapiens
cccaccagatgagatctaagatggtcccctgtgcacgcccacagctgagctcaggacggccccaatccctacagctggcattgggagagccccctgtgctcatgaccagcccctcatggaggccctgaggcaggctctgtgtccacaggggagccccaaagctcccaagccctgattcaggtggagcttgggcattacctgaagcaccaccggtagtcgtccttgccatcaggtgtgtaccccacctgcagcagcttgcctgagcggaaggccttcctcatgcacttaaggaagctcttctccgtgtccaggatggtgatggctctctgcaggaagacaccaagggtagaggagctgaggggcagaggktgcatcccggggccaccctggctgccagtatccagctccccaggggctctcccaggcctagatgcctccagggtggttgtccagtgccctccacgctagct

SEQ ID NO: 675787 - DNA, 613 bp, Homo sapiens
tacagatcacagacaaaacgtatgacaatctactgtgtatgttattggtagggcttctagttaacagcagtagttaagtttttggggagtcaaaagttacacataaattttcaactgtggggggaatcagcaaccctaaccactgtgttgtttaagggtcaactgtagttctcaactctcttattttaacttgtttctgccatagttaattacaaattcaatttctacaaatatatgacaaaaaattgaaatttgtgtatccaaacttgtgaattatccaaatttattttaaatacagtgtgttaagctaaatattcaacgttaaccttaattttcctgatatatatccaaagacctaytaaaattttataaataatcattaagctaaaaagcactaatataaaaacctactcaatatggaatacacatttttaaaaaactatctattaaatatctagattttatgaattcgtttagttgtaactaccacttgttgatcaacacactcaagtattttgaaggaactcttgtgagactgggaaagtatacttaactaatggaatattattgtataatgatataaatatctgaaaatcctttcttttatagaaat

SEQ ID NO: 675788 - DNA, 1947 bp, Homo sapiens
tgtctacatgtaggagtggactgtttataaaaagcaaaatgagagttatttttaaccttcatatatttctaaagatcgtttaaaatcaaatagatttttaaaaactttatttcaaggtttcaatcaataaaaagtaaaataaaataaagtactagaaaaataaaatttggattcagaggctagaaacctacaatgaacacgtctatcaaggcaggaggattgctttgaggccagaagtttgagaccaggctgggcaacataggaagaccccatctcaataaaaaacaaaaattagcccagtatggtggctctcgcctgyagtcctagctacttgggaggctgaggtggcaggatcacttaaacccaggcattggaggttgtagtgagctatgatcataccattgtactctagctcggagacagaacaagattctgtcttaaaaaaaaaaaaaataacaagtctagaaagctcagggtagccaatccttccatccccttagagaaacagcaaagttaagacatgcatatcagctcaggctcggcgggccttaaatgcacacatttgcacagatacgtgtatacttttatataaactccctgacaccagtgactgggtctgttttatcaaacaatgtccattaaacttcagatgaagcctttattaaacatttgctgaatgaatggaacatctttagaatgctatatgcgattacacagacaggtgacctctctcgttttgcagcatcctgagatgtgggtcaccatggtgaacattcaggtgatgataagcgatgatgacttcccttacatttttctgctttaggaagcacctacctcttattgaacctggaatgatgggatggggtgggagtctgtccttccttattcacacaggcggctgacacaataatgtgatcatcaactcctctcttcctgcagcccccaacccgccagccgccccagctgcagaatgcaaacatctgccagcatcattaaggcatttctatacagcaccatccaaggcctgaccctgtgaccgtttccaccattagatttgaatgacctcagcagcagggctgaaaggctggagtattaattcacagaaccacaagctcaatttaagatttaatttgagataacgaagagctactgaaagtgtattcaaacttcaaagcatgcaataaaaggcctttccctgttttccaagttgaatatgaatccaatatttctttaacagatttattcacaaatttacaaacaacacgaagcctcttttctctgtttctaattcctttttttttttcttttagttttttggctttatcaagcccctttatgatgtttcttgctaggaatcttttttagctcttcctccctaatttacaaatgactcttgtttaggaattacctttcaatttgatagcattcttgaagagaaagtagacttccttaagaatctcccctacctttagttcccttgcattccaacctaaatatgctaagcgtctgtttattcaacaatgatgatgttgcataaaaagctttcacccatcaatgtaactctcatcatggaaagattcaaaataatattccacccattaggaacacgtgaccactgggttctagtgaatatctaggctctgaagactttatttataaaatatttagaattctaggtggggatgggaatttttattggttcaagtagatttttgtttgtttttgtttttgtttttctttgagacagagtctcgctctgtctctcaggctggagtacactggcgcagtctcagctgactgcaacccctgcctcctgggttcaagccattctcctgcctcagcctcttgagtagctaagattacaggcacatgccaccacacctggctaatttttgtgtttttagtagagatggcgtttcgtcatgtcagccaggctgggcttgaact

SEQ ID NO: 675789 - DNA, 1947 bp, Homo sapiens
tgtctacatgtaggagtggactgtttataaaaagcaaaatgagagttatttttaaccttcatatatttctaaagatcgtttaaaatcaaatagatttttaaaaactttatttcaaggtttcaatcaataaaaagtaaaataaaataaagtactagaaaaataaaatttggattcagaggctagaaacctacaatgaacacgtctatcaaggcaggaggattgctttgaggccagaagtttgagaccaggctgggcaacataggaagaccccatctcaataaaaaacaaaaattagcccagtatggtggctctcgcctgtagtcctagctacttgggaggctgaggtggcaggatcacttaaacccaggcattggaggttgtagtgagctatgatcataccattgtactctagctcggagacagaacaagattctgtcttaaaaaaaaaaaaaataacaagtctagaaagctcagggtagccaatccttccatccccttagagaaacagcaaagttaagacatgcatatcagctcaggctcggcgggccttaaatgcacacatttgcacagatacgtgtatacttttatataaactccctgacaccagtgactgggtctgttttatcaaacaatgtccattaaacttcagatgaagcctttattaaacatttgctgaatgaatggaacatctttagaatgctatatgcgattacacagacaggtgacctctctcgttttgcagcatcctgagatgtgggtcaccatggtgaacattcaggtgatgataagcgatgatgacttcccttacatttttctgctttaggaagcacctrcctcttattgaacctggaatgatgggatggggtgggagtctgtccttccttattcacacaggcggctgacacaataatgtgatcatcaactcctctcttcctgcagcccccaacccgccagccgccccagctgcagaatgcaaacatctgccagcatcattaaggcatttctatacagcaccatccaaggcctgaccctgtgaccgtttccaccattagatttgaatgacctcagcagcagggctgaaaggctggagtattaattcacagaaccacaagctcaatttaagatttaatttgagataacgaagagctactgaaagtgtattcaaacttcaaagcatgcaataaaaggcctttccctgttttccaagttgaatatgaatccaatatttctttaacagatttattcacaaatttacaaacaacacgaagcctcttttctctgtttctaattcctttttttttttcttttagttttttggctttatcaagcccctttatgatgtttcttgctaggaatcttttttagctcttcctccctaatttacaaatgactcttgtttaggaattacctttcaatttgatagcattcttgaagagaaagtagacttccttaagaatctcccctacctttagttcccttgcattccaacctaaatatgctaagcgtctgtttattcaacaatgatgatgttgcataaaaagctttcacccatcaatgtaactctcatcatggaaagattcaaaataatattccacccattaggaacacgtgaccactgggttctagtgaatatctaggctctgaagactttatttataaaatatttagaattctaggtggggatgggaatttttattggttcaagtagatttttgtttgtttttgtttttgtttttctttgagacagagtctcgctctgtctctcaggctggagtacactggcgcagtctcagctgactgcaacccctgcctcctgggttcaagccattctcctgcctcagcctcttgagtagctaagattacaggcacatgccaccacacctggctaatttttgtgtttttagtagagatggcgtttcgtcatgtcagccaggctgggcttgaact

SEQ ID NO: 675790 - DNA, 604 bp, Homo sapiens
ggatgaaaggatgcagtttggagatgacaagataactgtagtaatcaggaatagcaggttttgtagctctgtctcataggcctcagaggagatgggcttttgaaggacaagagaaatgatgatgaataaattctaagcaggggaagtgtttgggaaagcagggcaggctttgtgctgttgatggcaaatgatgtaccagacaggatgaagttgagaatytggaagttgatcactgattagaaaggcttacattttattttggccgggggtggcagctcatgcctgtaatcccagcactttgggaggccaaggtgggcggatcccttaggccagaagttggagaccagcctggccaccattgcgaaacactgtctctactagaaatacaaaaaaaaaaaaaattagctggtcgtggtggcacatgcctgtagtcccagctactccgggggctagggaatgagaatagcttgaagccgggaggtggaggttgcagtgagccgagattgcgccactgcattccagcctgggtgacagagtgagactctgtctcaaaaaaaaaaaaaaggaagggcttacattttattttggtgctgactgggaatga

SEQ ID NO: 675791 - DNA, 652 bp, Homo sapiens
tttcccaaggatacctttaaacttggttttattgtaaatgtcgacaatggattttgggttttactatctagttctgtcttaattctggaattcagaaagattaaaagctctgttgttgcagctgctgccacctcttcccagtaccctctcctcctatgtcatttttttcttcttatttttcttgactgtataagagagaatgtatgacatttcctgcttgaccgctgagtttgattataaattaaawtacacaatattttatacaaattgttttgtagaagatttatttacagatgctcattcacaggtaaaattgacttatgaaaatagttttcatgacaaatgtatcaggctcggtaactaaatatatggattgatcttgtttataaatgaaattaaatgtgaatgtaacttacatatttctgtatttgcttacatccgtatgtacacatataatcagcaaatgagttgatgtttcctattcgtaacttaatggtaatagcttggtaacagagttgggagtattaaaaagatgtaaagagccccttaaaattttgttgctgggaattttagtgttctactgatgaaggaaatagacactggaaggtgttgtttctattaggtaacttagatatcatactgaagacttcaa

SEQ ID NO: 675792 - DNA, 944 bp, Homo sapiens
ggaagaatggatagctataaagagaaagaaacattgcattttgtagttttgcacttggagaatgacagtgcagtgttcatatataaatcaggagcctccagaattgacaggtttaagactgtctgcacaatttcagggaaactgttgcaaagctaaaaaaaaaaaaagcatcaatcgactagttgttgctgatgtcaggacttgcctgatttcttgcttctcctctgttcctccccacatctggatctacttgagacccacttgcagattagctggtgccaccccataccctgaacctagttcttccctctgccaacaggggctttaaaaaccctagcgggcttctgggtaacctggagccacctaccctggtgtgtgagccagctctgttctgagtytggccttgtaaccttgagcccttgaatccacccttgggatcgactttgctgatatccctgaacacagccctgtttgtccagatctctgaataaatttcccccaggattctacatactcacctgtcaggatgtcctgttattgcttactttcacatatcaaagcctttcttagattacagcccacatcttacaagtgaagcttttcacttccacagtagtgatggaagcaacggagatagcatgggctttgaaatcagccagacctaggttctaatttcagctctgctttctcttaactatgtggtattggatatatgagccagttttctcctctataaaatggtatgttaatagtaacatcacagggtgttttatcctaaagaaaagagacaaaataggtggattaactagtacataatagctgctaacacacaaacgacaacaataaaatgacaataactacatctagcatttgttgagcacttataatccatgaggcattgagccaagtgttttacttacattatcctagccaccataaaaaaa

SEQ ID NO: 675793 - DNA, 610 bp, Homo sapiens
cttctgagtttttacttttcatagccataatgtagctttaggtttctcccagttctcactttaaaatattctcattttcaggtatagctgagagtcactgtgtttttagccaaatctaagggagaaaatgaatattgatagcagcatgctgtagccagctccttaaaggaaggatggtgcctggtacagagttagagttagtgcttcagtaaataatgaatgtgtgctaggtaggttctgctgggtaggctgcatgcattgaccaatttattcctccttgtttcaaaacaggatttaagggcacttatatatatatattttttagtttttttaatgtaaatgagagaataaagatatatatatatgtctatatatgtatatatgtatatatatgtctatatgtctatatgtatatatgtctatatgtatatatgtgtgtgtgtacatatatatatatatatatatatatatatataagttttctgttgctagcataacaaactaccagaaacttagcaactgaaacaacatgaatttatcttacggttctatagttcagaartctaacgtgtcactgggatgaaatccaggtttcaacaggactgggttc

SEQ ID NO: 675794 - DNA, 1195 bp, Homo sapiens
tacttgtttattgcttccaaccaggcacaagctccaggcagaaacatgttcctctcctccatagctacattccctgcacataaaacaggcgcttactatctattccttgaatgtgtgagtaaatgttgcaagaatacatggttgtagttgttggtacatttgcaaggctcactcatgcctgtaggctttttttttttttttttttacagcttcattcagctataactgatacacaataacatgaacatattaaaagtaaataattggataagtctaaatatgtgtatacatatacatgcctgtgaaaccatcaccatgataaagctaatgaacatatctatcacccccagggtcctcatgcccctctgttatgcctccctccccgcctgtgtggtgctcctgtaatgctagtcccagcttgtgcaccggggactctacccccacccaaggcccaccttggacatttcctccttcagacagcttccccgacattgcaggcacctcctctccccttggcccccaggactgaggccaagatccctctgttctgagagcctggccactatgtcttatccctgacagctgacctatctgtctccctcctcggactgggagttctgcgaggaaagggttctgtgcacctcctgtggccctgacccactacaggcctggtgaacgggcgctcactgagtgtgaggaggccaactgcactagtcccacacatggcatcaaggggaagacgccgggaggtaraaatacattactcaagtggatatgtccttgggagacacgattcatctgagagtgagccaacagcccagcccgggctagtttcctcctatctacctgggagaacacactgacagatcaattcacgtccccagtgctggttccctcatgctaaacacagcaggcccatcgctcagcctcccagtgggcctggaggcctggctccagggtaatcagagcctgggatagcaggcatgctacctattagcctttcagaacacgtttactgcatcttctcccctgccccctcctttcttttggttataaaatattaactttaaaaagctaaatgccacaaagacagcagaggatctatctttctccaagccagggtcttgcaatgagggcagactaattttattaacttcaggggaacttcaaaaagctccagggctttcatgccaga

SEQ ID NO: 675795 - DNA, 1097 bp, Homo sapiens
tctgacaaaaaatataagaagtaccttgaaaggatagctttacgtgaattaaatgagaagatatatgtaaagtgagtagcacaaatcttatcttatccaataggtactttcaactacccattttacagatggggaaactgaggttcaaaaagtttttttagaacttttaaaaatgattttgattttaaaaagctactatatattgtaaacaagaatcacatctaaaacaaaatgactcagaaaggtgaaaagtaaaaaaaagatagattacgttaacaaatagaaaactggattgccaaatttaaatctaacaagcctgaattctaggcagaggaggttaaatgagtcaaaggggccactaatggttaatgaagggcttaatttacagtgaggatatgaatagtaaatatttatatatcaaaaggcagagcaacaaaatttgtaaagcacaaattgtaggcaatgcaaaaacaaacaatttataaaataagtgattagtttgaactaagacctatattataaggtggggggtttatctcaaactttatattcttataacagaataactcttctttttaaaagccrttggatcatttacaaaatcatatattaggccacaaggaaaactcaataaactccaaacagctgacatgacacagaccatattctcccttcacagtgcaataaaaactttaaatgcatgacaaaacaaagaggggaaaaaaaccaaacaacttggaaatgagacgattttctcattaaataactcgagttaaagaaggatgcaaaagagaagttgcaggatatctagaaagtaacatacagtggaatgcaactaaaacggtgctcaaaggacattcacaagctcaaaggacattcacaaccttaaacacctaggtaactattatatgatcaatgtatttagtctttaagtcaagaaactagcaaaaagacaaattacccaatgaaagaaatacatagcaaagataaaagcacaaattattctattagaaaatatggaataatagaattgatagataaatgcaattgcaagttcttaaaaaccagtaaagcccaaatacacaaagttagaaatt

SEQ ID NO: 675796 - DNA, 1270 bp, Homo sapiens
ctctttcccaggtctgtccctgtagcagccaggccagtaccctggaaaggtgctcagctctgcaggtgcctggggggtggtgcactgaacttcagcctccttgtctgtgaaatgggtcctgctgttatgatggggaagggggaagccctcagagagggcctgagatagggagggccccacagagggctctggaaagaaagcttcttctttgttttttaaacaaagtatgtggaagccttaaaggccaggtgcctgggcgctgggaaaagctgccacctcctgctccttcccatggacacatggctgccacatgtgggcctctgacagcaaggctgggctcagaggaggccccctgtcttctgaagaccctgaaaaccaagggaaaccagggccacaggagacagcaaacactgaaggaggtctggggagggggctgtacccaccacccccttccctgctcatggtgccccacaccagcccgagggcacgtggagccagcagacagcgagcctagggcagcacccgagcagcctgtgtgtgccaggcccagcctctgtcatccccccacactctctcaggtgggcacaagtaggctcaggggtgaggcgggagtggttgtgcacagtggtctgggcagcatgctgggaagggagcttggcgtgaggggcagcctcctgtcacttgtttggctctgtgtggggccagggatgctctgggtcagggcagcagcaatggcactgagtgcccatgacagctaggccctaagcgagatgccgcgtgcctcggcccatggaagtagatcctgtccagaatacaggtggatggcaggttctgtcacgggtgagctgaggtaccctgggtcccctcgcctattacaaggggacaatgaccctgcctccctgggcaggccccgtctgtgcaagactgcatgcctggtgggcagggcccacatgtggaaccctgctccccggtgaggaacaaccagctgacatggcatgaatgacttgcgtcagttcccacagccaggacatagggggcctggctttgaacctaggcggctggctccagaacctgcatctgcaatgtctgctgccctcacggggggctggtgcgggtctcttctgcctaactcccactctgggtcccgcatgccctggctcagagacaacagaggctagcactgggcatgagggctgccagcaggctgttaaragctgcagatccctaccccagaacacatagctctgccctcagctggccacctcactct

SEQ ID NO: 675797 - DNA, 1573 bp, Homo sapiens
cccattcattttactgctgttggctttcttgcttatgctttcagacagagacactctcctttgaccaaacttgaatcgggctcctctgagtcctgtttctgactaggtctcaacctcaggctctgtccttcatccagggactctgcccatttagcctttttcagcaaaaaacctgtcaagtcggtttagccagaatccccctgcacctgaggcttcctccaagtaatttcccatcttctgacccccggctcctactccctgactacaaatccccacttgtccttgtggagttgaagtcgatcccaatatcactctcccactgcaagaccccattgcagtggtccctgtacctatcacagtagtcccccctctgagtaaaatcgtccttacgatctttttttttttttattttcagagacaaagtctcactctgtaactcaggctggagggcagtgacccaatcctagctcactgcagcctgaaattccagggcccaagcaatcttcctgccccagcctcccaagtagctggaactacaggtacgcaccaccacacccaggtatttttttttttcagttctctacagacgcaggaacttgatgtgcccggcggatttttctattttttgtagagacagggtttcaccatgttgcccaagctggtcttgaactcctgggctcaaccaatcctcttgcctcgggcacccaaagttctgggattacaggcatgagccactgcagctgacccttccttacagtctttaataagtgcaataaatacttgtttgctttaacatttccctgtgtcttcaatctcctgaagtcttacatgcttgacattgtattttcctctgtaagtaacctgctatttctctccgatcattttaaaatattttttccttgtctttcacaattttacatttcactgttcctgtgtgtgtactataatacctttaaatcttaagtcatttttttaaatctgaggaattctcattgattacttatttaagtacactctcctttttaatgactatattctcttcttataaggctactattagatgtgttttgacatttattcttctatcctccctattaattaacttttctttcatttacttcttctctatccattaccgattactttcatgaattctttagacgcatttcctcagctcagtaattgctttttcaactctatcagttttaatatccaatctattccaccraataatttatttgagcagttaatgttttcatatccaatctatccaatagtttttctttttatttatttatttatttattcatttattcgtttgagatagagtcttgctctgtcacccaggctggagtgcagtggcaccatcttggctcactgaacctctgcctcccgagtccaagcaattctcctgcctcagcctcttgagtagctggaaccacaggcatgtgacactatgccaggttaatttttgtatttttagtacagacggggttgcaccttgttggccaggctgatctcgaactcctgacctcaggtgatccacccgcctcagcctcccaaagtgctggga

SEQ ID NO: 675798 - DNA, 682 bp, Homo sapiens
ggtttcayccaatgagatccacacagaaaatataaggaagaagtgtaggagtttgattgattgtttttttcccctggcttcatccctgtggggttcctttgggctgactgtctctaaaaaaacttctttcactcaaggcagctcttagggcccagaggtgttaagatctctgccaatacttagtgtgttcttgtcatgtttttatacccgtacttttataagtgttgttgggttttttttttttgttaaactcttgttgaattaccctaatttgaatgtattttctattgggatcctaacatacttaaagaacaaaaaacaaaaaaaaaaaaaagaaggaaagaaaaaaaaagcattgcattgcttttacgtaagtcatctgatcatctggccttaataggcaagattcatctattcatcttctgatcttaactctacaacacaaatgtaaaattttgcaatctgacttggtcttcaatttggaatataagtatctttttttaatagaaaacaatatcagtcctgccactaatatttttagagccctggatattataataaatggaggcccacatgctatatgtctaattattaaaaagaatgtgcattgaggtaacaaatatattttattcttttgacaaaatactttcatagcagcatgtacacctgtgatgtttcatat

SEQ ID NO: 675799 - DNA, 1051 bp, Homo sapiens
aacaatcatagagctcaccttatttgctttcccgctcttagagatcactgtcctgtgctgtctgatgttcagtgtctaaaaactatactttctgatattttgcccgtttactttttagcatttttcaagacaggatcaattaggtctttggtattcctctttgcctgaagtgaaagtcttgaacattatggcttctgactgtggttgatgagtaatatttttagagaacaaaataaagtataccttgaatgaccaattaaagctttctgaatggtttaagacactttaataaaatttacatcacctataagtgtcaaaacaattataaatttatactcatagttttcatataaccccttagtgagtaggtgtcaaagtttcatttctcattaatgaggtaatcagaagaatgataaagccagtgaggaaagtgacacaaagagaaggcaaatggccaggcacagtggctcatgcctgtaatcccatcactttgggaggccgaagcaggtggatcacttgagcccaggagtttgaggccagcctgggcaacatggtgaaaccctatctctactacaagtacaaaaattagccaggcgtggtggcacacacctgtaagctcagctactcaggagactgaggcatgagaatcgcttgaacctgggaggtggaggttgcagtaagccgagatggcaccattggactccagcctggatgacagagcaagactctgtctcaaaaaaaaaaaaggaagggggggacaggcaaatgacgtattagaaggaggaagagaggcagagagagagaaagggagagagatggggagagagagartgcaaaaatatgctggaataaaattgctaaattacatacaaactggttaatgtcccacagggcaaaaaatcataacctttggggttatcatctaagctgaacagaaataatttttatctctatgataaaaaactcatttgcatcatatttgttttccacaagttacatcaaatcctttacaggcttaaaaatgtctagatgtttaatagtagtaatggta

SEQ ID NO: 675800 - DNA, 605 bp, Homo sapiens
tggctcatgcctgtaatctcaccactttgggaggccgaggtggaaggatcgcttgagctcaggcgttcaagaccagcctgggcaacatggtgagacccccgtctctactaaaaatacaaaaaattagctggttgtggtggtgcacacctgtggtcccagaaactcaagaggctgaggtgagaggattgcctaagcttgtggggtggaggttgcmgtgagccaagttcacgccactgcactccagcctgggtgacagagcaagaccttgtctcaaaaaacaaaaaagtattttaatcaaattgcatgttagtcctgtacacgttatatttattccatgatgccttatttatcatttttagtcgtattattaaaatacattttcctgctttgggggactaacgcatagaaatacaaatgatttctgaatattgttattacaggcaaccactttcctaagccctcttattataataagtcagtggttttttaaatattttcttggtaaataatatcatctgttagtgatgacaattttgttcgtattttcctatccttttccctttcatttttttttttctttattttgctggctaggacttccagtg

SEQ ID NO: 675801 - DNA, 605 bp, Homo sapiens
tggctcatgcctgtaatctcaccactttgggaggccgaggtggaaggatcgcttgagctcaggcgttcaagaccagcctgggcaacatggtgagacccccgtctctactaaaaatacaaaaaattagctggttgtggtggtgcacacctgtggtcccagaaactcaagaggctgaggtgagaggattgcctaagcttgtggggtggaggttgccgtgagccaagttcacgccactgcactccagcctgggtgacagagcmagaccttgtctcaaaaaacaaaaaagtattttaatcaaattgcatgttagtcctgtacacgttatatttattccatgatgccttatttatcatttttagtcgtattattaaaatacattttcctgctttgggggactaacgcatagaaatacaaatgatttctgaatattgttattacaggcaaccactttcctaagccctcttattataataagtcagtggttttttaaatattttcttggtaaataatatcatctgttagtgatgacaattttgttcgtattttcctatccttttccctttcatttttttttttctttattttgctggctaggacttccagtg

SEQ ID NO: 675802 - DNA, 605 bp, Homo sapiens
tggctcatgcctgtaatctcaccactttgggaggccgaggtggaaggatcgcttgagctcaggcgttcaagaccagcctgggcaacatggtgagacccccgtctctactaaaaatacaaaaaattagctggttgtggtggtgcacacctgtggtcccagaaactcaagaggctgaggtgagaggattgcctaagcttgtggggtggaggttgccgtgagccaagttcacgccactgcactccagcctgggtgacagagcaagaccttgtctcaaaaaacaaaaaagtattttaatcaaattgcatgttagtcctgtacacgttatatttattccatgatgccttatttatcatttttagtcrtattattaaaatacattttcctgctttgggggactaacgcatagaaatacaaatgatttctgaatattgttattacaggcaaccactttcctaagccctcttattataataagtcagtggttttttaaatattttcttggtaaataatatcatctgttagtgatgacaattttgttcgtattttcctatccttttccctttcatttttttttttctttattttgctggctaggacttccagtg

SEQ ID NO: 675803 - DNA, 605 bp, Homo sapiens
tggctcatgcctgtaatctcaccactttgggaggccgaggtggaaggatcgcttgagctcaggcgttcaagaccagcctgggcaacatggtgagacccccgtctctactaaaaatacaaaaaattagctggttgtggtggtgcacacctgtggtcccagaaactcaagaggctgaggtgagaggattgcctaagcttgtggggtggaggttgccgtgagccaagttcacgccactgcactccagcctgggtgacagagcaagaccttgtctcaaaaaacaaaaaagtattttaatcaaattgcatgttagtcctgtacacgttatatttattccatgatgccttatttatcatttttagtcgtattattaaaatacattttcctgctttgggggactaacgcatagaaatacaaatgatttctgaatattgttattacaggcaaccactttcctaagccctcttattataataagtcagtggttttttaaatattttcttggtaaataatatcatctgttartgatgacaattttgttcgtattttcctatccttttccctttcatttttttttttctttattttgctggctaggacttccagtg

SEQ ID NO: 675804 - DNA, 1305 bp, Homo sapiens
aatctacaaggcaatagtttaatgaatttaatatgctggttcatgtaaaatgtcatatgccatatgtaacatgactgtaacttaaggatattcttttaactcagtaaacttggtagaaaatccttgtatgaacctgatacggattaaactgtgctctctcaaaaaaaatatgttgaaatcctaacctccagtaactcagaatgccaccttatttagaaatagggtaattatagatgaaattagttaagatgaggtcatgaatgaattctaatccaatatgactggtggacttgtaaaaaggaggtattgggcagtcccacagaggctggactgcctggctggtgcatctttcctggtctgcaaaagacaagaaaataaaattaaaaagggaaaatgggacagacatagacatgcagagagaaaaggttatgtgaagagacatccagggagaagatggacgaatgaaaatggaagaagagattcaaattatgctgccacgcaccaaagaatgcctgggttcaccaaaagctaggaaaggacaaggaaggatgctacccagatgcttcagagtgaccatggccttactaaccccttgatttcagacctctagcctccataactgtgagactaaatttctgctgttcttaagcaactcagtttgtggcacttctttatggcagctctaggaaacaaatatagagcccttgaaggtactttcagctggaaaatgtcagaggcaggcacaactaaactgaggttcctgcttaagtgaatttattcagcacaggactttaaatgccatttatatcatatgacttccaaaggtattatctaccatcattaccacttcccgagctccagaatcaaatctgcaaccacccgatgggtagcttctcttgcctaatagcatctgaaaattagcacaaccaaagcagractttgaattcattgcctgcccatacttcccctagtctactgcatctaagtaaagacatcaccatctactaagttatttaaagaaaaacccgggagtcatcctaattccttcctgcctacccaccatatccaatccatctgtgtgtcctctaaattctacgtccaggtcagtttcctgggagacacattctgaggtggagattagcatgcagaattgttatcagggattgccctcagaatcaacatccacagacagagggagaagctgaactgcaatgcagtcaccatagggacctcagttcatcctacaaagaactctggagctgtgagggcccctatcttgagtcatctttacccccactccactga

SEQ ID NO: 675805 - DNA, 657 bp, Homo sapiens
ttcctttgtcaaattctacccttccaaaaaaaaaaaaaagcctactggaaacatgacgaggattgcattgaatcagtagatcaatttgatgagaaataacatctcaacaatattgaatgtttcaatccatgaacatggtatatctccttttatttgggtcttgtttaatttcccttggcattgctttgtggttttcagtgtaragagcttatatatttatttataaatacattatatctttatgttattataaatgcagttgtttttatttcatttttcaattatgtactgctagtatatgaaataaaattgatcttttacattaaccttgtataccgtgattttgctaaattcacttatgagttctagtggttgtagaactcttagaactatttatgtaaacaaccatgtcatttgctaataaagacaattttactttttcctgtctgctctttatattagtatttaacaaaatgcatttcaacttattcaaatttaatagttttaattaagagaatggtattattaatgttcatcaagataactcatttttcaaagcactcaagaacaacagattaaaactgtcatttcagtcatcaaattttacttttgctagtttgtgcaaaaagagtggcaataaagcaaaataaaattttg

SEQ ID NO: 675806 - DNA, 595 bp, Homo sapiens
tgatccactcgtttctcctctgaagtgactctttcaaatgttctttaccttcagactttctctcctgcttcaaaaaacaaaacagaagccataagaatggaactccctataacttgyggcccccaagtctgcacgctgatttccctcccctgtgttacagatgacgaggagtcccttcttgctcaggccacttctccctcctgtgctctgggtcccagtttctgctacttgctctagaatctgacatcatcagtcaccttttctctcctggcaggttttctgctgccctccttgcttgatcctctattcacctttgcctgtgccagcatcccttctgtctccgctgaccccacgttctctccctcctgcttctggccagcacctcatcaccctccccttcactgctgacccctgcagagttgcctgtacttgccttctgcacttgctcacccccgtaagtgttagcccccggcatctgccagattctgcaggtggttttttagttttcctcttgaagtggttgaccactcctacttaaaacactttgtcttcccttgccttgagaccacactctgctggttttcctcttaactct

SEQ ID NO: 675807 - DNA, 655 bp, Homo sapiens
aaaaaaaaaaagaaaagaaaacattgacaacattgacttgcacgtcaagaggtccccaggacaacccagaggtttgatgattcactaggagggctcacaggactgagcatatagtcatactcatagttatgatttattacaatgaaagtataccaagcacaatcaatgaagggaaaaggcagaagcaggaaaatgaaaggagtttctgctttgtggagaaaatgacagattaggcactgaacatattgcattaaagtttgaacctctgagtgcaaatgttcacaagtcattggagataaagaccttgagtgaagttgagagctgaagaaatataaatataagctcggtggtaaaaattacctccatggtctcaatgtgggagaattgcagaaggctgtgccatgagaacaggtgcaattaaggagggggaggaggaaatcctcagggcacaaagagaacaagcatagtacaatatcagaagaggctsgcatgggagatgggggatgtcagaaaaaggagtagagtagctattgtagaaatctgactttcttttgtgtacgtcattactgcttaatctgccaaaatatctgacaaacaagatatgctgggactcagaaattcaataaagctaaattgaagaagacaagataaatct

SEQ ID NO: 675808 - DNA, 1482 bp, Homo sapiens
ttttgttttcttaacaccacctcgttccccttgaccatccttcatgagatggagaagaaaatgagttatgtgggctccatagctaatggctggctttccttttttaaagaaactactcctaatagatatgcagaggctttgttccaaaaaaaatttaaatacattttctgcaagatattttaagtaaaaaaaattcaagataaagaatgataaggttagggacaagagtaaatataaggtttaatatataaaatgcatgaggtctcttgcaattgagtcacaaattttcctgtacattcgtagagttaagagagaaatgtggtgaattatctatttcacaacactcatagggaaataataaaccagtttctcacagaaacccagcctggttctgtgaccagagtggaaattcccccatgtctacggaggccacgtaggtaatgtwagtcagtgaaacagattgggaataagacaatagggagtaggggctggggctgagtcaaactggaaagcacatgcacagtctaagggcagctactactactcagcctcagccaatattccagagggaagcataagccctgtgttgccagatttattttgacttttaatatattagcaactatatcagtgaaaataataactgaacaaaatgcttctgtagtccagagctggtcaatcgctgccagtttaaaacctctggccttgaagagtaggcagaaacatctaatgcaagacaatccttataaatatgacctctttcagcctagctttgggtaactattgaatgtcactgagtcggtgattaagctttctgacatgcacttagaatgaagattgtatggatggtcaggtatggtgtcatacactttcatagtcagccaacaatagtaaaaatatgaacaaaagacttgaacaggtgcttcacgaaagaagatatccaaattgccaataaatatattaaaagcgctcaatgttattagtcatgaggaaaatacaaattaaaaccacagtgagataaaactacatactcactaaaatgataaatataaaaaacacccactcaagtgtgggtgaagatgtggagtaattggaatgctcgtacattgctgataggaatgtaaacttgtacatccttgtcatttctaatgaaatttaagacattccttcctcatcgcctagcaatttctttttttcaggtcatatccaaatgtttatttaactcataacctccataacacattaagttgaacttacagaaacgaaagtaaagcattggaaaattgatctgtggatacaggatatttctataggaaacaaatgtaaaacatgagactcaatgagtttgatggtgataataattaatgcttaggattcaacttatattctaattaatctaattgggttaactacaatcatgaaatattccatattttcctcttatgactttgtttttgtttgtttttttaaacttttatttta

SEQ ID NO: 675809 - DNA, 601 bp, Homo sapiens
atacagggagcttccactgggcttctagtgtgttgatatcttaagaacatgtgtgaagaaaatatggcaaaatgtgaatcttcaacaaagctagatggtaggtgtatgagtgctcattatattattcctgaaacttttctgtattcttgaactatttcaaatttaaaaaaaaattaggttgcatcagcattaatttgtttcaggggagctctgattgaataattatgcagagcagttatgtgtcaaatagtaatataatttgccactagttcttaaattaagttaatgtacctaagtataatttcgatggaatttgactaacaaaatattgagttttatcccaaatgtcatggtttaatttttattctagttgagagatctcacttgataaacttttgattatatttccagttgtcttatcggagcactttgtaaacggggtgatttatccattttctggttgggaaaactgtaactcaraagaatttagtaattcatttgagatcactcaacagtagaaaggtaagagaacaatgcaggagctctgcccttttgttttaacctgtgatcttctccctgttttacccaaatcttcacaaaa

SEQ ID NO: 675810 - DNA, 884 bp, Homo sapiens
gaaaagacttgggcctaaaggccttgttttgggtggaaaaaagtccagacatcaagacaactttgattcaaatcctggcattgccatttaccagcggtttgactttggctttcttatcctggaaggacttcagcttcctcatctatcaaacagggataaaaaatatctacctcagagaactttcaggggaaaataatggcataaattgctagcatttgatagacattcaacaataataataacaactgtaatcacgagtggcttttatgtacattcagaggatagggcctacccagtgcccacaccttggcaacttgaggtctgctaaatgtcagccaacttgttgatttagtaataaatttgagatggtgtttcttcacagtattactcttttctttctttctttctttttttttttttttttgaracagggtctcactctgtcacccaggctggagtgcagtggtgcaattttggctcactgcaacctctacataacaggctcaagcgattctcctacctcagcctcccaagtagctaggaccacaggcacacaccaccacacctggctaatttttggattttttgtagagatggaggtttcaccatgttgcataggctgtccttgtactcccgagctctagtgatcctcccacctcggcctcccaaagtgctgggattacaggtgggagccatcaattttgtcttctacattttaatagaaggcatttatgaatagctttcttatcaatttaaacattttgagtaggtcaaccccaaggagctattactccataccctttaggatggctataatcaaaatagcagaaaacgacaagtgttggtgagggtgtagagaaattggaaccctcgtatattgctgg

SEQ ID NO: 675811 - DNA, 884 bp, Homo sapiens
gaaaagacttgggcctaaaggccttgttttgggtggaaaaaagtccagacatcaagacaactttgattcaaatcctggcattgccatttaccagcggtttgactttggctttcttatcctggaaggacttcagcttcctcatctatcaaacagggataaaaaatatctacctcagagaactttcaggggaaaataatggcataaattgctagcatttgatagacattcaacaataataataacaactgtaatcacgagtggcttttatgtacattcagaggatagggcctacccagtgcccacaccttggcaacttgaggtctgctaaatgtcagccaacttgttgatttagtaataaatttgagatggtgtttcttcacagtattactcttttctttctttctttctttttttttttttttttgagacaggstctcactctgtcacccaggctggagtgcagtggtgcaattttggctcactgcaacctctacataacaggctcaagcgattctcctacctcagcctcccaagtagctaggaccacaggcacacaccaccacacctggctaatttttggattttttgtagagatggaggtttcaccatgttgcataggctgtccttgtactcccgagctctagtgatcctcccacctcggcctcccaaagtgctgggattacaggtgggagccatcaattttgtcttctacattttaatagaaggcatttatgaatagctttcttatcaatttaaacattttgagtaggtcaaccccaaggagctattactccataccctttaggatggctataatcaaaatagcagaaaacgacaagtgttggtgagggtgtagagaaattggaaccctcgtatattgctgg

SEQ ID NO: 675812 - DNA, 884 bp, Homo sapiens
gaaaagacttgggcctaaaggccttgttttgggtggaaaaaagtccagacatcaagacaactttgattcaaatcctggcattgccatttaccagcggtttgactttggctttcttatcctggaaggacttcagcttcctcatctatcaaacagggataaaaaatatctacctcagagaactttcaggggaaaataatggcataaattgctagcatttgatagacattcaacaataataataacaactgtaatcacgagtggcttttatgtacattcagaggatagggcctacccagtgcccacaccttggcaacttgaggtctgctaaatgtcagccaacttgttgatttagtaataaatttgagatggtgtttcttcacagtattactcttttctttctttctttctttttttttttttttttgagacagggtctcamtctgtcacccaggctggagtgcagtggtgcaattttggctcactgcaacctctacataacaggctcaagcgattctcctacctcagcctcccaagtagctaggaccacaggcacacaccaccacacctggctaatttttggattttttgtagagatggaggtttcaccatgttgcataggctgtccttgtactcccgagctctagtgatcctcccacctcggcctcccaaagtgctgggattacaggtgggagccatcaattttgtcttctacattttaatagaaggcatttatgaatagctttcttatcaatttaaacattttgagtaggtcaaccccaaggagctattactccataccctttaggatggctataatcaaaatagcagaaaacgacaagtgttggtgagggtgtagagaaattggaaccctcgtatattgctgg

SEQ ID NO: 675813 - DNA, 597 bp, Homo sapiens
ccgcaaataagcatgaggatttctgtgcttagggaatagtttgycagctctttgcaggtgtgatttgacgatgccagtgagtgaacagagcctgaggtttcaccccaaaagatcgttctgtggtttgcctaccatgattcaacagcccaggatctgctcgggcacagacaacctgaagtgtaaagaggctcctgagagccgggtcccagctcggccccagacaccccctctgcaccgaccccacgagcccccaaaagtcatctctaccagaggttctcctcatttctgagaagagggaagcagggcccatgcgttttgaggttgcctctggctccaacgcggtgacacgcaatgccagcctcatgagggtgagagtcctctgaatggcccacgctctcttgtgacaatgacacttgtctgtgaaggagaaggccaagctgactcacacgctgagtgccccaaggatgaagggggtccccggagtgggtaccgcacctccctctttgcagacaaggagggggcggctctgagacccacagggatgtaccagagagtgcgtgttaggcagaaccgaacatccccaggaagggagggaaa

SEQ ID NO: 675814 - DNA, 597 bp, Homo sapiens
ccgcaaataagcatgaggatttctgtgcttagggaatagtttgtcagctctttgcaggtgtgatttgacgatgccagtgagtgaacagagcctgaggtttcaccccaaaagatcgttctgtggtttgcctaccatgattcaacagcccaggatctgctcgggcacagacaacctgaagtgtaaagaggctcctgasagccgggtcccagctcggccccagacaccccctctgcaccgaccccacgagcccccaaaagtcatctctaccagaggttctcctcatttctgagaagagggaagcagggcccatgcgttttgaggttgcctctggctccaacgcggtgacacgcaatgccagcctcatgagggtgagagtcctctgaatggcccacgctctcttgtgacaatgacacttgtctgtgaaggagaaggccaagctgactcacacgctgagtgccccaaggatgaagggggtccccggagtgggtaccgcacctccctctttgcagacaaggagggggcggctctgagacccacagggatgtaccagagagtgcgtgttaggcagaaccgaacatccccaggaagggagggaaa

SEQ ID NO: 675815 - DNA, 597 bp, Homo sapiens
ccgcaaataagcatgaggatttctgtgcttagggaatagtttgtcagctctttgcaggtgtgatttgacgatgccagtgagtgaacagagcctgaggtttcaccccaaaagatcgttctgtggtttgcctaccatgattcaacagcccaggatctgctcgggcacagacaacctgaagtgtaaagaggctcctgagagccgggtcccagctcggccccagacacyccctctgcaccgaccccacgagcccccaaaagtcatctctaccagaggttctcctcatttctgagaagagggaagcagggcccatgcgttttgaggttgcctctggctccaacgcggtgacacgcaatgccagcctcatgagggtgagagtcctctgaatggcccacgctctcttgtgacaatgacacttgtctgtgaaggagaaggccaagctgactcacacgctgagtgccccaaggatgaagggggtccccggagtgggtaccgcacctccctctttgcagacaaggagggggcggctctgagacccacagggatgtaccagagagtgcgtgttaggcagaaccgaacatccccaggaagggagggaaa

SEQ ID NO: 675816 - DNA, 597 bp, Homo sapiens
ccgcaaataagcatgaggatttctgtgcttagggaatagtttgtcagctctttgcaggtgtgatttgacgatgccagtgagtgaacagagcctgaggtttcaccccaaaagatcgttctgtggtttgcctaccatgattcaacagcccaggatctgctcgggcacagacaacctgaagtgtaaagaggctcctgagagccgggtcccagctcggccccagacaccccctctgcaccgaccccrcgagcccccaaaagtcatctctaccagaggttctcctcatttctgagaagagggaagcagggcccatgcgttttgaggttgcctctggctccaacgcggtgacacgcaatgccagcctcatgagggtgagagtcctctgaatggcccacgctctcttgtgacaatgacacttgtctgtgaaggagaaggccaagctgactcacacgctgagtgccccaaggatgaagggggtccccggagtgggtaccgcacctccctctttgcagacaaggagggggcggctctgagacccacagggatgtaccagagagtgcgtgttaggcagaaccgaacatccccaggaagggagggaaa

SEQ ID NO: 675817 - DNA, 615 bp, Homo sapiens
ggctggtcattgttgcaacattrttttcatgatgatacaaggatacgttaaccttgtctggaaattttacactaaaaatccatctaggagatacaacgagatatacttcctgaataggaaaactgaatggtaagaagccagtcatgcaagataagaggaaagaacattccagggagagggaacagaccactacacagaccttgaggagtggacttggcatgattcatgaacagacagcatgtcattttacttggagcatagtagcctactaggtgggggtagtagagacatcatcaaggtgaacaaaggctagatcatgtaggcttgtaagcaagggaaggagtttgggttctgttcggtctgcaatgagaagtttttgcaaggtttaaacatggaaatgctacacatcttaattcaccccctgttcctcaatgtatttactcatcatttagctttaattccttttacttcacttaagctttaactccagcctcttttctttggttatctttgtatttcttgacattaagtcctgctgcttttcttttaccctaaattctgtcagtcctctgacctttcttatctacctgccaatgatacggtctagcctctttg

SEQ ID NO: 675818 - DNA, 615 bp, Homo sapiens
ggctggtcattgttgcaacattgttttcatgatgatacaaggatacrttaaccttgtctggaaattttacactaaaaatccatctaggagatacaacgagatatacttcctgaataggaaaactgaatggtaagaagccagtcatgcaagataagaggaaagaacattccagggagagggaacagaccactacacagaccttgaggagtggacttggcatgattcatgaacagacagcatgtcattttacttggagcatagtagcctactaggtgggggtagtagagacatcatcaaggtgaacaaaggctagatcatgtaggcttgtaagcaagggaaggagtttgggttctgttcggtctgcaatgagaagtttttgcaaggtttaaacatggaaatgctacacatcttaattcaccccctgttcctcaatgtatttactcatcatttagctttaattccttttacttcacttaagctttaactccagcctcttttctttggttatctttgtatttcttgacattaagtcctgctgcttttcttttaccctaaattctgtcagtcctctgacctttcttatctacctgccaatgatacggtctagcctctttg

SEQ ID NO: 675819 - DNA, 615 bp, Homo sapiens
ggctggtcattgttgcaacattgttttcatgatgatacaaggatacgttaaccttgtctggaaattttacactaaaaatccatctaggagatacaacsagatatacttcctgaataggaaaactgaatggtaagaagccagtcatgcaagataagaggaaagaacattccagggagagggaacagaccactacacagaccttgaggagtggacttggcatgattcatgaacagacagcatgtcattttacttggagcatagtagcctactaggtgggggtagtagagacatcatcaaggtgaacaaaggctagatcatgtaggcttgtaagcaagggaaggagtttgggttctgttcggtctgcaatgagaagtttttgcaaggtttaaacatggaaatgctacacatcttaattcaccccctgttcctcaatgtatttactcatcatttagctttaattccttttacttcacttaagctttaactccagcctcttttctttggttatctttgtatttcttgacattaagtcctgctgcttttcttttaccctaaattctgtcagtcctctgacctttcttatctacctgccaatgatacggtctagcctctttg

SEQ ID NO: 675820 - DNA, 615 bp, Homo sapiens
ggctggtcattgttgcaacattgttttcatgatgatacaaggatacgttaaccttgtctggaaattttacactaaaaatccatctaggagatacaacgagatatacttcctgaataggaaaactgaatggtaagaagccagtcatgcaagataagaggaaagaacattccagggagagggaacagaccactacacagaccttgaggagtggacttggcatgattcatgaacagacagcatgtcattttacttggagcatagtagcctactaggtgggggtagtagagacatcatcaaggygaacaaaggctagatcatgtaggcttgtaagcaagggaaggagtttgggttctgttcggtctgcaatgagaagtttttgcaaggtttaaacatggaaatgctacacatcttaattcaccccctgttcctcaatgtatttactcatcatttagctttaattccttttacttcacttaagctttaactccagcctcttttctttggttatctttgtatttcttgacattaagtcctgctgcttttcttttaccctaaattctgtcagtcctctgacctttcttatctacctgccaatgatacggtctagcctctttg

SEQ ID NO: 675821 - DNA, 1248 bp, Homo sapiens
tggagttgtggcacgacctcgctcactgcagcctctgcctgcctggctcaagcagttctcctgtctcagcttcctgagtagcggggactacaggcacacgtcaacacacctggctaattttttttatatttttagtagagatggtgtttcgccatattggttaggctggtcttgaaatcctgrcctcaggtgatccacccgccttgtcctccctaagtgctgggattacaggggtgagccaccacgcccagcctgcagtaaatatttcaagaaaatttcataaatggaaacataggtactgtattttgatatctcttggacaaattattagaagtttactttatattataagaagagtactttcagttttaaaagtagccagagaaccatagtgttaaacctaaaaaatacctacccctttggaacaccaagctaacaacacagcagattagaagtaccagactttgcttttagttcacttgtgcttgttgtggtatttttggagacattactgttgctagcactacctaatttgtattgtgaaattattgaaggctaaagctgataataactgttcctgtagttatcaaaacaggattgggtctaatttcttgttctacttgatattgaactcaattttatatatgagacttcttttaataattccctaaagagtgaagtgttggctgctgtaactccagtgtatacaagtgattgtatttaccaaaaagacaaactgtaaactcttttgtttcttttaccagttatcttcctttctgccctctgtcttcattgctttcacttttcgcaaattagacttactgtttataagcaaccttggttttacatagtatgttggaagagtgtggggccggggttgatttaagatttggaggcgtaaagtttgcctttgagacaccaaaccttctatggctgcttttaaaactgatagtactcttgggctgtaagaatgactttgatcgtatttaacaatcagcaatagaatttgacttttaatagaaagttgcttctaaatagcctatcctccacttgtcattattgttctcatttccccatcccacagtccttgtataatttactagcttggacagtttacctgagaaattggcctcaaagcagaaagaaacttaatgctaatattaaactatttttgggttaaattatttttcttaggttcaaattcagtccctgccaggtagtgtttttttagtttctgtagtatttgat

SEQ ID NO: 675822 - DNA, 1248 bp, Homo sapiens
tggagttgtggcacgacctcgctcactgcagcctctgcctgcctggctcaagcagttctcctgtctcagcttcctgagtagcggggactacaggcacacgtcaacacacctggctaattttttttatatttttagtagagatggtgtttcgccatattggttaggctggtcttgaaatcctgacctcaggtgatccayccgccttgtcctccctaagtgctgggattacaggggtgagccaccacgcccagcctgcagtaaatatttcaagaaaatttcataaatggaaacataggtactgtattttgatatctcttggacaaattattagaagtttactttatattataagaagagtactttcagttttaaaagtagccagagaaccatagtgttaaacctaaaaaatacctacccctttggaacaccaagctaacaacacagcagattagaagtaccagactttgcttttagttcacttgtgcttgttgtggtatttttggagacattactgttgctagcactacctaatttgtattgtgaaattattgaaggctaaagctgataataactgttcctgtagttatcaaaacaggattgggtctaatttcttgttctacttgatattgaactcaattttatatatgagacttcttttaataattccctaaagagtgaagtgttggctgctgtaactccagtgtatacaagtgattgtatttaccaaaaagacaaactgtaaactcttttgtttcttttaccagttatcttcctttctgccctctgtcttcattgctttcacttttcgcaaattagacttactgtttataagcaaccttggttttacatagtatgttggaagagtgtggggccggggttgatttaagatttggaggcgtaaagtttgcctttgagacaccaaaccttctatggctgcttttaaaactgatagtactcttgggctgtaagaatgactttgatcgtatttaacaatcagcaatagaatttgacttttaatagaaagttgcttctaaatagcctatcctccacttgtcattattgttctcatttccccatcccacagtccttgtataatttactagcttggacagtttacctgagaaattggcctcaaagcagaaagaaacttaatgctaatattaaactatttttgggttaaattatttttcttaggttcaaattcagtccctgccaggtagtgtttttttagtttctgtagtatttgat

SEQ ID NO: 675823 - DNA, 1248 bp, Homo sapiens
tggagttgtggcacgacctcgctcactgcagcctctgcctgcctggctcaagcagttctcctgtctcagcttcctgagtagcggggactacaggcacacgtcaacacacctggctaattttttttatatttttagtagagatggtgtttcgccatattggttaggctggtcttgaaatcctgacctcaggtgatccacccgccttgtcctccctaagtgctgggattacaggggtgagccaccacgcccagcctgcagtaaatatttcaagaaaatttcataaatggaaacataggtactgtattttgatatctcttggacaaattattagaagtttactttatattataagaagagtactttcagttttaaaagtagccagagaaccatagtgttaaacctaaaaaatacctacccctttggaacaccaagctaacaacacagcagattagaagtaccagactttgcttttagttcacttgtgcttgttgtggtatttttggagacattactgttgctagcactacctaatttgtattgtgaaattattgaaggctaaagctgayaataactgttcctgtagttatcaaaacaggattgggtctaatttcttgttctacttgatattgaactcaattttatatatgagacttcttttaataattccctaaagagtgaagtgttggctgctgtaactccagtgtatacaagtgattgtatttaccaaaaagacaaactgtaaactcttttgtttcttttaccagttatcttcctttctgccctctgtcttcattgctttcacttttcgcaaattagacttactgtttataagcaaccttggttttacatagtatgttggaagagtgtggggccggggttgatttaagatttggaggcgtaaagtttgcctttgagacaccaaaccttctatggctgcttttaaaactgatagtactcttgggctgtaagaatgactttgatcgtatttaacaatcagcaatagaatttgacttttaatagaaagttgcttctaaatagcctatcctccacttgtcattattgttctcatttccccatcccacagtccttgtataatttactagcttggacagtttacctgagaaattggcctcaaagcagaaagaaacttaatgctaatattaaactatttttgggttaaattatttttcttaggttcaaattcagtccctgccaggtagtgtttttttagtttctgtagtatttgat

SEQ ID NO: 675824 - DNA, 1248 bp, Homo sapiens
tggagttgtggcacgacctcgctcactgcagcctctgcctgcctggctcaagcagttctcctgtctcagcttcctgagtagcggggactacaggcacacgtcaacacacctggctaattttttttatatttttagtagagatggtgtttcgccatattggttaggctggtcttgaaatcctgacctcaggtgatccacccgccttgtcctccctaagtgctgggattacaggggtgagccaccacgcccagcctgcagtaaatatttcaagaaaatttcataaatggaaacataggtactgtattttgatatctcttggacaaattattagaagtttactttatattataagaagagtactttcagttttaaaagtagccagagaaccatagtgttaaacctaaaaaatacctacccctttggaacaccaagctaacaacacagcagattagaagtaccagactttgcttttagttcacttgtgcttgttgtggtatttttggagacattactgttgctagcactacctaatttgtattgtgaaattattgaaggctaaagctgataatarctgttcctgtagttatcaaaacaggattgggtctaatttcttgttctacttgatattgaactcaattttatatatgagacttcttttaataattccctaaagagtgaagtgttggctgctgtaactccagtgtatacaagtgattgtatttaccaaaaagacaaactgtaaactcttttgtttcttttaccagttatcttcctttctgccctctgtcttcattgctttcacttttcgcaaattagacttactgtttataagcaaccttggttttacatagtatgttggaagagtgtggggccggggttgatttaagatttggaggcgtaaagtttgcctttgagacaccaaaccttctatggctgcttttaaaactgatagtactcttgggctgtaagaatgactttgatcgtatttaacaatcagcaatagaatttgacttttaatagaaagttgcttctaaatagcctatcctccacttgtcattattgttctcatttccccatcccacagtccttgtataatttactagcttggacagtttacctgagaaattggcctcaaagcagaaagaaacttaatgctaatattaaactatttttgggttaaattatttttcttaggttcaaattcagtccctgccaggtagtgtttttttagtttctgtagtatttgat

SEQ ID NO: 675825 - DNA, 1009 bp, Homo sapiens
tgcccagaaccctgctgatgagcccactccaggggccccagccccccaggaacttggggctgccggtgagcaggatggtgagtagagctctcaggcggggtgggcaggcaggggcaggggaggctcgcactgtgctcagacccccgcctccctctctccgaagttttttatgaagtgagcctggacaacaacgtggagcctgcaccaggagcggccagggagggttctccccatgacaaccccactgtacagcagatcgtgcagctgtctcctgtcatgcaggacacctaggagcacccaggcttgcccagcaaaccctgcgtgccattcttctaccaggcagccgagaacagggagataaacatcatcatcttctaagagctggtcaagaaatttaaaacaacaacaacaacaaaaagttacggggttcatctcctacacaattcatttactccatttgaatgctagagccactcacatttatttgtgtttctaatttaccgtttaaatttatttgtaaaaagttaagggagagttggtctttccctgatgttctttctggcatcctttagcatttttatttttaatttgataattgtaggtcattagtatgcatatcgagtttgcccttaggtggtgggaattcaaacacacaaagacccactaatttgcacaaaactattctggctggtttggaacaggctgccatgcttttttaatgttattgcagcatgtatattcattmcagaattcagataaaatgtgcttatgttctgctattacgtttgatcgaatcctaaccacagtgagctcttcattagctcaatatgtggtttgccctcaattgagcactgtttattactttgtaatatgccactgtgagtactgacatttagagttgtttaaaggccaagaactggaaacagccttttccctattttctgtgtattggggatgggagtaataacattttggggagctttttaaatctcacagaagaggaaagtgg

SEQ ID NO: 675826 - DNA, 1009 bp, Homo sapiens
tgcccagaaccctgctgatgagcccactccaggggccccagccccccaggaacttggggctgccggtgagcaggatggtgagtagagctctcaggcggggtgggcaggcaggggcaggggaggctcgcactgtgctcagacccccgcctccctctctccgaagttttttatgaagtgagcctggacaacaacgtggagcctgcaccaggagcggccagggagggttctccccatgacaaccccactgtacagcagatcgtgcagctgtctcctgtcatgcaggacacctaggagcacccaggcttgcccagcaaaccctgcgtgccattcttctaccaggcagccgagaacagggagataaacatcatcatcttctaagagctggtcaagaaatttaaaacaacaacaacaacaaaaagttacggggttcatctcctacacaattcatttactccatttgaatgctagagccactcacatttatttgtgtttctaatttaccgtttaaatttatttgtaaaaagttaagggagagttggtctttccctgatgttctttctggcatcctttagcatttttatttttaatttgataattgtaggtcattagtatgcatatcgagtttgcccttaggtggtgggaattcaaacacacaaagacccactaatttgcacaaaactattctggctggtttggaacaggctgccatgcttttttaatgttattgcagcatgtatattcattccagaattcagataaaatgtgcttatgttctgctatkacgtttgatcgaatcctaaccacagtgagctcttcattagctcaatatgtggtttgccctcaattgagcactgtttattactttgtaatatgccactgtgagtactgacatttagagttgtttaaaggccaagaactggaaacagccttttccctattttctgtgtattggggatgggagtaataacattttggggagctttttaaatctcacagaagaggaaagtgg

SEQ ID NO: 675827 - DNA, 677 bp, Homo sapiens
gagaatggcgtgaaacagggaggtagagcttgcaatgagccaagatcgtgccactgcactccagcctgggcgacagagccagactccatctcaaaaaaaaaaaaaaaaaaatttagccagtcatggttgtgtatacctgtggtcctagctacctgggaggctgaggtgggaagattgcttgatcccaggaggttgaggctgcagtgcagtgagctgtgactgcaacattgcactccagcctaggcgacagtgccagcccgtctcaaaaaataaaaaatataaaataagtcatytatagccaccaggaggcactgacatcctcccccaacctcctcccaatctagggctgtggggcttccccttcctggtctggtagcccagtactacccatggggaacctccgaaatttcggccccacccacaggggactcagttcagccctgctcaactaattgaggctggatgatttaagcttttctgagcagagcagagcaggctcatatttttgtttgagtctcttttacattttatttcaggcaggggtcattttatagacatggaaatccaggctcctgccctctgctttctgcccttcctgttctctagcctcagggctacaagtgaacctctcctagagcctcccaccctccactcccagttggcaccccaggtagggg

SEQ ID NO: 675828 - DNA, 677 bp, Homo sapiens
gagaatggcgtgaaacagggaggtagagcttgcaatgagccaagatcgtgccactgcactccagcctgggcgacagagccagactccatctcaaaaaaaaaaaaaaaaaaatttagccagtcatggttgtgtatacctgtggtcctagctacctgggaggctgaggtgggaagattgcttgatcccaggaggttgaggctgcagtgcagtgagctgtgactgcaacattgcactccagcctaggcgacagtgccagcccgtctcaaaaaataaaaaatataaaataagtcatctatagccaccaggaggcactgacatcctcccccaacctcctcccaatctagggctgtggggcttccccttcctggtctggtagcccagtactacccatggggaacctccgaaatttcggccccacccacaggggactcagttcagccctgctcaactaattgaggctggatgatttaagcttttctgagcagagcagagcaggctcatatttttgtttgagtctcttttacattttatttcaggcaggggtcatttyatagacatggaaatccaggctcctgccctctgctttctgcccttcctgttctctagcctcagggctacaagtgaacctctcctagagcctcccaccctccactcccagttggcaccccaggtagggg

SEQ ID NO: 675829 - DNA, 643 bp, Homo sapiens
ctacaggctgaattatggagaggaggtgaggaaaatgaaatgaaaccgagaagataagtagaaaagttaaaaaaaaaaagtagtaaatttcataagtcagacgcaaatgctaaagagcttgagtttcttataagaaatagcacyggagcaacaacaggagggaaaatatgtaccttatgtgcaaaaatatcttcttcctggatttcagaaactaataaaattttagtagattttaaatgcaaaatcttattaccaagtgtgttttcaataacacccattattattaaaattttatataaaagtgaaaaatgccagctattgaaatgtaagcataatgtttttaaattaaaatctgtaattcttccacctaaggtgctgttttacaatgccttcttttttctttcaaaatctgtctcactcaataactggcttatttctaagacactaaacacaatgataaggagagaataattgttctatgcctgattttctttgaaaagtatgatgaatttcaacagaagctattgtaaaattgactgatatgtttgaggatattgaagtatatgtaatactttaatatgaattattttgacgtgtcacttactggtagttattcaagcctggcattttctgctctcaaata

SEQ ID NO: 675830 - DNA, 593 bp, Homo sapiens
attttaaggcttaataatgtttgcagactgaaggaaaagatgcagtggaggatgagagaccttagcaggggattaaaatagtggagcatttttgtggcaatgccattcaataagaagacagcattggaaagaagagagacatttattcctcctaggtaggaagcaaaaagtagaaatttgtaaagaaaaaagtattgggagataaagaagaatcacaggtgtaatcctgaacatcctaaatcaaaattattgtttatgtatttctccttccagaaatgaaacttgtaatagacgatctktggcttaataaccttctatctccagcacctgacgtatggcaggtctctcaatatataattaagatatggatctatggaggtacaataattcttgttatatgaatcactattcctgaagttggagtatattggctcatctgggaatagggaaattggcagttagttgagagaccattggaacacctgctgaaagaaacgtgataatgattcaaggggaggaaaaaaaaaaaaaagaaaaccaagtgaggaatgaccacaataacactaacttgaagtggatgcagtcggcatatt

SEQ ID NO: 675831 - DNA, 684 bp, Homo sapiens
tacacatttactacaaggtataattgacaaaaggtaaagatcatttgtaatgagaaactttctgccgcttgtataatacagtgtctgtactttcaccaatagcttctctatttaacattatgtggttctaaataatctttcaaaacacatactaacctgtttctctgtaatatcatctcacagacagatttaaggataagttaagtgttttaaaaatctatttatattaaattatataagaatggaggcaggaagacagagcttggaacattatctacaattagtgtcttatattgccatggtcagaatgtttgtgtcctcccccaaatgtatatgttgaaacctaattcctaaatttgatggggtttagggaagtgatttggttataaaggtagcaactgtcatgaatggaattagtgcctttatatggggctgaagataccagagttcttcccttctactctgtcaggagatagcaacaagctggctatctgcaacccagaagaaggccttcaccaaaactcaaccatgctggcattctaatctagaacttccagcctccagagctgtgacaaataaatttctattatttataggtcatccagtctatggcattttgtyataacagtccaaactgactaaaacaaccacaaaggcagaaaatgctagttttctactaaatgg

SEQ ID NO: 675832 - DNA, 1709 bp, Homo sapiens
agtgtatttgaaggagagttaaataatcaatatttgaaatccatcatttcttcttgagcatcttatgtaattctaatagtttgcaaaattgctaaatatgagtgaactgatacaaaggattatcttttcttaaactagataagtgatgatcctaagatgatcaatgtatgtcagcatggctatttcaagsaaattgtttatgttgataaaaagctcagacctaaacccagcttgaagtcttaagtattattgagataataaatgaagaaattcatcatttaatgcatttcataacaaataaaggaaactattttgcttaatgggtctactaagtaaaatcccacagaaagctacataggaccttgacatgtgatatctgtttatggtaaaaagaatgtaataaattaaaatctgatgtgactatattcatgctttttatacatttatgaaataaactatagtaaaaacctaaatttaaaaaccgtatttctaaagttagattttttagtattaagtgttgtcatgatataataaagcttcaatcagtttgatttttaagtaggtgtgaaaatttaatattataaattcatatcggaatgaattatttatccccagggggatcacactcacattgaaaaaagaagttttactgtaatgtggaattacttactattttcttccgaatatgttataaccgtatttggcatgtttcaaagttatatttaataaagaaaatgcatgtttctatatatgctgctatgaatacaaagtgcctcaaaacttactggcttaagacatctctatttcctaatgttccaatgtgtcaggaacataagaaggaatcagctggacagctgtgccctgtagtgttagcaccattcactctctctcttcacttcactggaaggtagaaaaagttcactcacatgtctggagcccatgtactccttcatgtgttctcttcctcaccatctgggaaaattgggcttcctcacaaaatggtggtcacctggatctcttacatgacatctggcttccaaaagggagtgtaccaacataggtgacacaagaagctgcaagcatctttaggcccaaccttgagaggtacacaacgtcacttctgaccattatattggtcaaagtcagtcttcaggcctgtccacattcaaggggaatagaaaccccttatttcaatgaaaagtggcaaataatttgtggccatctttagtccattatgctatttagaccatatttctgatatgaagttaaacatataaagaagctactacctatatttataaattagaaaatggagaagaaaaagaactttcattataaaattgtcttgccaatttctaggctcctttaaaaatattgtctatgaataatatgaaagtttcagaaagctgctattagaatttgaagagaatgctgtaagtatatggtttaaatagtatcttcctaccaaaatgtcttaaaaagtgacgagagtaaggaagtttattgaactaagaaaaagaaaagccttaaaatagattggccagtttcttcattcatgcgattattttttcatttattcattcatccaacaaatatttcttgatatcccattgtgagcccagggattttgttaggcaaggaggctgtaacaatgaaaagaaaaatattgttttgttttcttaactgtgcttacaacttaatgttacaaa

SEQ ID NO: 675833 - DNA, 1709 bp, Homo sapiens
agtgtatttgaaggagagttaaataatcaatatttgaaatccatcatttcttcttgagcatcttatgtaattctaatagtttgcaaaattgctaaatatgagtgaactgatacaaaggattatcttttcttaaactagataagtgatgatcctaagatgatcaatgtatgtcagcatggctatttcaaggaaattgtttatgttgataaaaagctcasacctaaacccagcttgaagtcttaagtattattgagataataaatgaagaaattcatcatttaatgcatttcataacaaataaaggaaactattttgcttaatgggtctactaagtaaaatcccacagaaagctacataggaccttgacatgtgatatctgtttatggtaaaaagaatgtaataaattaaaatctgatgtgactatattcatgctttttatacatttatgaaataaactatagtaaaaacctaaatttaaaaaccgtatttctaaagttagattttttagtattaagtgttgtcatgatataataaagcttcaatcagtttgatttttaagtaggtgtgaaaatttaatattataaattcatatcggaatgaattatttatccccagggggatcacactcacattgaaaaaagaagttttactgtaatgtggaattacttactattttcttccgaatatgttataaccgtatttggcatgtttcaaagttatatttaataaagaaaatgcatgtttctatatatgctgctatgaatacaaagtgcctcaaaacttactggcttaagacatctctatttcctaatgttccaatgtgtcaggaacataagaaggaatcagctggacagctgtgccctgtagtgttagcaccattcactctctctcttcacttcactggaaggtagaaaaagttcactcacatgtctggagcccatgtactccttcatgtgttctcttcctcaccatctgggaaaattgggcttcctcacaaaatggtggtcacctggatctcttacatgacatctggcttccaaaagggagtgtaccaacataggtgacacaagaagctgcaagcatctttaggcccaaccttgagaggtacacaacgtcacttctgaccattatattggtcaaagtcagtcttcaggcctgtccacattcaaggggaatagaaaccccttatttcaatgaaaagtggcaaataatttgtggccatctttagtccattatgctatttagaccatatttctgatatgaagttaaacatataaagaagctactacctatatttataaattagaaaatggagaagaaaaagaactttcattataaaattgtcttgccaatttctaggctcctttaaaaatattgtctatgaataatatgaaagtttcagaaagctgctattagaatttgaagagaatgctgtaagtatatggtttaaatagtatcttcctaccaaaatgtcttaaaaagtgacgagagtaaggaagtttattgaactaagaaaaagaaaagccttaaaatagattggccagtttcttcattcatgcgattattttttcatttattcattcatccaacaaatatttcttgatatcccattgtgagcccagggattttgttaggcaaggaggctgtaacaatgaaaagaaaaatattgttttgttttcttaactgtgcttacaacttaatgttacaaa

SEQ ID NO: 675834 - DNA, 1709 bp, Homo sapiens
agtgtatttgaaggagagttaaataatcaatatttgaaatccatcatttcttcttgagcatcttatgtaattctaatagtttgcaaaattgctaaatatgagtgaactgatacaaaggattatcttttcttaaactagataagtgatgatcctaagatgatcaatgtatgtcagcatggctatttcaaggaaattgtttatgttgataaaaagctcagacctaaacccagcttgaagtcttaagtattattgagataataaatgaagaaattcatcatttaatgcatttcataacaaataaaggaaactattttgcttaatgggtctactaagtaaaatcccacagaaagctacataggaccttgacatgtgatatctgtttatggtaaaaagaatgtaataaattaaaatctgatgtgactatattcatgctttttatacatttatgaaataaactatagtaaaaacctaaatttaaaaaccrtatttctaaagttagattttttagtattaagtgttgtcatgatataataaagcttcaatcagtttgatttttaagtaggtgtgaaaatttaatattataaattcatatcggaatgaattatttatccccagggggatcacactcacattgaaaaaagaagttttactgtaatgtggaattacttactattttcttccgaatatgttataaccgtatttggcatgtttcaaagttatatttaataaagaaaatgcatgtttctatatatgctgctatgaatacaaagtgcctcaaaacttactggcttaagacatctctatttcctaatgttccaatgtgtcaggaacataagaaggaatcagctggacagctgtgccctgtagtgttagcaccattcactctctctcttcacttcactggaaggtagaaaaagttcactcacatgtctggagcccatgtactccttcatgtgttctcttcctcaccatctgggaaaattgggcttcctcacaaaatggtggtcacctggatctcttacatgacatctggcttccaaaagggagtgtaccaacataggtgacacaagaagctgcaagcatctttaggcccaaccttgagaggtacacaacgtcacttctgaccattatattggtcaaagtcagtcttcaggcctgtccacattcaaggggaatagaaaccccttatttcaatgaaaagtggcaaataatttgtggccatctttagtccattatgctatttagaccatatttctgatatgaagttaaacatataaagaagctactacctatatttataaattagaaaatggagaagaaaaagaactttcattataaaattgtcttgccaatttctaggctcctttaaaaatattgtctatgaataatatgaaagtttcagaaagctgctattagaatttgaagagaatgctgtaagtatatggtttaaatagtatcttcctaccaaaatgtcttaaaaagtgacgagagtaaggaagtttattgaactaagaaaaagaaaagccttaaaatagattggccagtttcttcattcatgcgattattttttcatttattcattcatccaacaaatatttcttgatatcccattgtgagcccagggattttgttaggcaaggaggctgtaacaatgaaaagaaaaatattgttttgttttcttaactgtgcttacaacttaatgttacaaa

SEQ ID NO: 675835 - DNA, 1709 bp, Homo sapiens
agtgtatttgaaggagagttaaataatcaatatttgaaatccatcatttcttcttgagcatcttatgtaattctaatagtttgcaaaattgctaaatatgagtgaactgatacaaaggattatcttttcttaaactagataagtgatgatcctaagatgatcaatgtatgtcagcatggctatttcaaggaaattgtttatgttgataaaaagctcagacctaaacccagcttgaagtcttaagtattattgagataataaatgaagaaattcatcatttaatgcatttcataacaaataaaggaaactattttgcttaatgggtctactaagtaaaatcccacagaaagctacataggaccttgacatgtgatatctgtttatggtaaaaagaatgtaataaattaaaatctgatgtgactatattcatgctttttatacatttatgaaataaactatagtaaaaacctaaatttaaaaaccgtatttytaaagttagattttttagtattaagtgttgtcatgatataataaagcttcaatcagtttgatttttaagtaggtgtgaaaatttaatattataaattcatatcggaatgaattatttatccccagggggatcacactcacattgaaaaaagaagttttactgtaatgtggaattacttactattttcttccgaatatgttataaccgtatttggcatgtttcaaagttatatttaataaagaaaatgcatgtttctatatatgctgctatgaatacaaagtgcctcaaaacttactggcttaagacatctctatttcctaatgttccaatgtgtcaggaacataagaaggaatcagctggacagctgtgccctgtagtgttagcaccattcactctctctcttcacttcactggaaggtagaaaaagttcactcacatgtctggagcccatgtactccttcatgtgttctcttcctcaccatctgggaaaattgggcttcctcacaaaatggtggtcacctggatctcttacatgacatctggcttccaaaagggagtgtaccaacataggtgacacaagaagctgcaagcatctttaggcccaaccttgagaggtacacaacgtcacttctgaccattatattggtcaaagtcagtcttcaggcctgtccacattcaaggggaatagaaaccccttatttcaatgaaaagtggcaaataatttgtggccatctttagtccattatgctatttagaccatatttctgatatgaagttaaacatataaagaagctactacctatatttataaattagaaaatggagaagaaaaagaactttcattataaaattgtcttgccaatttctaggctcctttaaaaatattgtctatgaataatatgaaagtttcagaaagctgctattagaatttgaagagaatgctgtaagtatatggtttaaatagtatcttcctaccaaaatgtcttaaaaagtgacgagagtaaggaagtttattgaactaagaaaaagaaaagccttaaaatagattggccagtttcttcattcatgcgattattttttcatttattcattcatccaacaaatatttcttgatatcccattgtgagcccagggattttgttaggcaaggaggctgtaacaatgaaaagaaaaatattgttttgttttcttaactgtgcttacaacttaatgttacaaa

SEQ ID NO: 675836 - DNA, 650 bp, Homo sapiens
ttaaaaacaattaaagaagataagaaggaaggaaggaatgaaggaaagaaggaaggaaggaaggaacgaaggaaatcattctattcagatttctaatagcctgtctatctaaacttggagttgaggtaatgtatgatccaagaggaaaaagaagcaacacggatagcttaagcgaaaattaaattyctgtaaagggtgaaagtttacactttctttttaggtggaagcttgattagaccactagaaaaaaaaaagagttaaattacttctttctcttccaatagtcttgtttattacattgcagcaaacgtttgtatatggaattgctttttaaaagcaggaaatctgcttctctgtgaacactggtttgtagctcctttttcattttcttgactaacaactcagttctataaattgtttcagtagttcaataaacaagtgctaaattgtgagctccctaaggataatgactgtgtcttattcagtaatgtttaccaggagcctcactaataccaggaaggcaagtttgcctacatttactcgagaatatattgttgttaattctctaaagaccagtggagtacatgttctctcaatgtctatccacatggcaaaactgtgtgaagaataacaaccagacagacctcaaa

SEQ ID NO: 675837 - DNA, 650 bp, Homo sapiens
ttaaaaacaattaaagaagataagaaggaaggaaggaatgaaggaaagaaggaaggaaggaaggaacgaaggaaatcattctattcagatttctaatagcctgtctatctaaacttggagttgaggtaatgtatgatccaagaggaaaaagaagcaacacggatagcttaagcgaaaattaaattcctgtaaagggtgaaagtttacactttytttttaggtggaagcttgattagaccactagaaaaaaaaaagagttaaattacttctttctcttccaatagtcttgtttattacattgcagcaaacgtttgtatatggaattgctttttaaaagcaggaaatctgcttctctgtgaacactggtttgtagctcctttttcattttcttgactaacaactcagttctataaattgtttcagtagttcaataaacaagtgctaaattgtgagctccctaaggataatgactgtgtcttattcagtaatgtttaccaggagcctcactaataccaggaaggcaagtttgcctacatttactcgagaatatattgttgttaattctctaaagaccagtggagtacatgttctctcaatgtctatccacatggcaaaactgtgtgaagaataacaaccagacagacctcaaa

SEQ ID NO: 675838 - DNA, 650 bp, Homo sapiens
ttaaaaacaattaaagaagataagaaggaaggaaggaatgaaggaaagaaggaaggaaggaaggaacgaaggaaatcattctattcagatttctaatagcctgtctatctaaacttggagttgaggtaatgtatgatccaagaggaaaaagaagcaacacggatagcttaagcgaaaattaaattcctgtaaagggtgaaagtttacactttctttttaggtggaagcttgattagaccactagaaaaaaaaaagagttaaattacttctttctcttccaatagtcttgtttattacattgcagcaaacgtttgtatatggaattgctttttaaaagcaggaaatctgcttctctgtgaacactggtttgtagctcctttttcattttcttgactaamaactcagttctataaattgtttcagtagttcaataaacaagtgctaaattgtgagctccctaaggataatgactgtgtcttattcagtaatgtttaccaggagcctcactaataccaggaaggcaagtttgcctacatttactcgagaatatattgttgttaattctctaaagaccagtggagtacatgttctctcaatgtctatccacatggcaaaactgtgtgaagaataacaaccagacagacctcaaa

SEQ ID NO: 675839 - DNA, 1302 bp, Homo sapiens
ttttgttgaaaaagtgaacagtgcctagtaaagtgagatggcttttacaccttttatgatgactgcttctgctggagttgaaatgttttcattctgcatttgtgtagttcggtgctttgttcaaaggtaagtgttttcaccaaagtatgttttgcatgtgttttttatttgytgcaattttgactgcttagaagtttctgttgtcagaagtaaatttaagacaatgccaattttcctcccatccatgaaacataccatgctgaatatacctgcaacttaagtgttaaaaattctgctaatatcagaattacagatctttttttttttttttttttttttgagacggagtctcgctctgtcgcccaggctggagtgcggtggcatgatctcggctcactgcaaactctgtctcccgggttcacaccattttcctgcctcagcctcccaagtagctgggactataggcgcccgccatcatgcccggctaattttttgtacatttagtagagacggggtttcaccatgttagccaggatggtcttgacctcctgacgtcgtgatccacccgcctctgcctcccaaagtgctggaattacaggcgtgagccaccgtgcctggccagaattacagatctttacagcaaatgcttatattttaagaagtgtgtctgtcacctctagtcttggtggctcagatgaaggataactgcatttctcaaccagtgatgtatttacagtaggtgctgcttttcttttgtgtgtgtgtatcttaggaatcttttgggtgagttgtgaggctggcacctacattcggacattatgtgtgcaccttggtttgttattgggagttggtggtcagatgcaggagcttcggagggttcgttctggagtcatgagtgaaaaggtatgtgttacggggctagaagttttagagctggttcttaccatctgccagcctttgatggcactccacttgcttcatgtcgtgggaaagatgctttccaaagtgttgagttcagtccagggcagcttccctgttctgttaattaaactttgggacattaaaatgggctaagggagatgattgggtagaaagtattattctattcatttgcctcccagcctacaaaaatgcctgcttggggtctaatacttcaacggttaaagatgcctggaagagggcgcggtggctcacgcctgtaatcccagcactttgggaggccgaggcgggtggatcatgaggtcaggagatcgagaccatcctggctaacaaggtgaaaccccgtctctactaaaaatacaa

SEQ ID NO: 675840 - DNA, 1310 bp, Homo sapiens
gaggccgaggcaggcagatcgcaaggtcaagagatcgacaccatcctggccracatggtgaaaccctgtctctactaaaaatacaaaagttagctgggtgtggtgatgcacgcctgtagttccagctactcgggaggctgaggcaggagaatcgcttgaactcgggaggcggaggttgtagtgagccgagattgcaccactgcactccagcctgggcgacagaacaagactccgtcttaaaataaataagtaaataaataaataaatggccacatatgatccagggggctcttccccataatgaccagtcctctggtgctgggatttaggggcttggtcccacctcctggagtgtgctgtgggggtgccgctggcttaattgcctggggaaggtgctttgcaaatggggcccgggcgccgagtctctgagctttaatgggcttatcttgcttcctgttgttcttcatggcagttctggggtgaataaaatggaactttgtggttgtggtcttccaacccctgctgtttaagcagatgcttctaaccagtaggaaggggaagatgagggtcctctggcaggggctgctgctggagaaggttgtccccctgaacccttctcttcgtccaaggaaagacctccctaaatggtgtcttatgagccacaaaatggccttgggacaagatgaggcacctgacggtgaaggctgaggtcccacacggtgttggcaggtggccctcaagcccattgtcttctgcccgcatgcccaggaccgccacatccttcctgttccactgacgtcacccatttcccacctgggatgcctacctgggctggctttgaaatgacagctaggcttcaccacttccttcttcctggtgtctcctgaacaaaaagctcacaaacccttattgtctcaggatcttttctgctaactaccatgggcaaaagatgcagtcaaaacaacaaaaacggggaggttacgcagttcagaaaatcccacacattctcaagaagggtgtccccgccaagctgagagatacctgggacatcatgctttcctggaggggaaggctccctgcccccattcctgtacagccgggagagtcgctcctgttcgtcatcccatcttctcgctctcatttgctgggctgacctctgctggtatttcaagactgtttggtgccaccctctctgagagatggcctccctcatctgatttagatgcttttctttaccttctcatagcagcttgtactaatacttgctaccccctgttgaaattgtcaccaggcaggtctgtctctaagac

SEQ ID NO: 675841 - DNA, 1310 bp, Homo sapiens
gaggccgaggcaggcagatcgcaaggtcaagagatcgacaccatcctggccaacatggtgaaaccctgtctctactaaaaatacaaaagttagctgggtgtggtgatgcacgcctgtagttccagctactcgggaggctgaggcaggagaatcgcttgaactcgggaggcggaggttgtagtgagccgagattgcaccactgcactccagcctgggcgacagaacaagactccgtcttaaaataaataagtaaataaataaataaatggccacatatgatccagggggctcttccccataaygaccagtcctctggtgctgggatttaggggcttggtcccacctcctggagtgtgctgtgggggtgccgctggcttaattgcctggggaaggtgctttgcaaatggggcccgggcgccgagtctctgagctttaatgggcttatcttgcttcctgttgttcttcatggcagttctggggtgaataaaatggaactttgtggttgtggtcttccaacccctgctgtttaagcagatgcttctaaccagtaggaaggggaagatgagggtcctctggcaggggctgctgctggagaaggttgtccccctgaacccttctcttcgtccaaggaaagacctccctaaatggtgtcttatgagccacaaaatggccttgggacaagatgaggcacctgacggtgaaggctgaggtcccacacggtgttggcaggtggccctcaagcccattgtcttctgcccgcatgcccaggaccgccacatccttcctgttccactgacgtcacccatttcccacctgggatgcctacctgggctggctttgaaatgacagctaggcttcaccacttccttcttcctggtgtctcctgaacaaaaagctcacaaacccttattgtctcaggatcttttctgctaactaccatgggcaaaagatgcagtcaaaacaacaaaaacggggaggttacgcagttcagaaaatcccacacattctcaagaagggtgtccccgccaagctgagagatacctgggacatcatgctttcctggaggggaaggctccctgcccccattcctgtacagccgggagagtcgctcctgttcgtcatcccatcttctcgctctcatttgctgggctgacctctgctggtatttcaagactgtttggtgccaccctctctgagagatggcctccctcatctgatttagatgcttttctttaccttctcatagcagcttgtactaatacttgctaccccctgttgaaattgtcaccaggcaggtctgtctctaagac

SEQ ID NO: 675842 - DNA, 988 bp, Homo sapiens
tgcctcataactagtagatggtaatttgggatttgaatgctattcggtttgcctgcagtaccctgtgctttcttttctctcaatatttcccaaattgaggatgtttagatccccatgaatgggcctacagactgctggaggtttgcaccctccagttagagacagtgcataaagttagccagcaacagcggtgtgkacatgaacgcaactgtgagctctgaattcacaaggcaatgtaagtttataaggtggccaaccagatgaccccagatctgctcctattatttatttattaccaaagtgaaaataccaacttaaaaatatatgcttgaatcatgcagacttgggaatactcaaacccagggtatgtctttataagccagactccagttgggatgtgctgtcctctgctagactcctgccaaggaaagcttggactagttcctccttcctgtgtctatcagtcaccataccatggtgagaggaaccactcaaatgttgtacagttgagccttgaacaacgtgggtttgaaccgtctgggtccacttacgcatggattttcttcagcctctgccacccctgagacaggaagaccaacccccctcttcatcctcctcctcctcagcctcctcagtgtgaagatgctgaggatgacgacttttatgatggtccacttccacattacaaatagtaaatatatgctctcttatttatgattttcttaataacattttctgtagcttactttattataagtacaaaatatgcattaactgactatgttatcagtaaggctttcagtcaacagtaaactaccagtatttaagttttgggggaatcaaaacttatatgcagatttttcaactgcacaggggatcagcaaccctaactcctacactgttcaacgatcaactgtaactggaaaacgtgcccatctgcttactctcatatccacagagagctgttgcctttcaactgccctctgga

SEQ ID NO: 675843 - DNA, 603 bp, Homo sapiens
taagaaagcacttaaatatgaataccccatttttcatgtgatatttcacattgcatgcctatatcaaaacaccccatgtaccccataaatatatgcacctactatgtacccacaaaaattaaaagttaaattaaatttaaaattttttaaattaaaaaataataattcgttacaagctcctggaacgtcgtcagctagaagaaatgccaaacaagttttcatcattgccgtatcaagttgcctatccgctcatttgkattttccacaaaatgcaaataaagacaataacaaagtaatagttccaccttaaaaaaaaaggtaaaaaatgtttgcaaggatgtggagaaaaggaaaccttatacatcattggtgggaatgtaaattggtgcaaccgctatggaaaatagtatggaggtcctcaaaaaattaaaagaaattgaagtcagaagagatggtagttgcactcccatgttcattgtagcattattcacaatacccaaaatatggaaacaataaatgatggaagaatggataaagaaatatagtatatatacacgatgtgattttatttggtctttaaaaagagggaaatcctgccattca

SEQ ID NO: 675844 - DNA, 606 bp, Homo sapiens
ccttcactctcttgacgcctctccagatctgacttgcccgtgtaccacaggtcagagcccatcacttcccaggcctcccagtgcttccctggacagattctgggatcatttactggtgactgccctgctagggtgtcagctgtcagatcctccccaacccccgagctcagctctggcctgaagtacttaccgtgggctcctgayggtcactgtctccagggccaaggtctagaaccttcacctgcctcaccaacaacattctcaggatcgattgccactggtctgccccagagctgggacagggctccagcccctggctcctcttcaccaggtgagcatggagggccatgcccacctggacagggatgagggtgagttccccaggattgaagcagctatgccaggacagtgtagcagccccgtggtgctgacaaatgccctttccagcaaccaggctcctggcggcacacataagtgcatcttgcggggcagtgagtgcaccgtcgtgctgccacctgaggcagtgctcgtgccatctgacaatttcaccatcactttccaccactgcatgtctgggagggagcaggtcagcctggtggacccgga

SEQ ID NO: 675845 - DNA, 621 bp, Homo sapiens
ccccaggtgtctcgaagccgcggtctctcccatgcgggtcctggggagaggaagctcagtcctcatagtggccgcaaagtgactgccgctgtgtggatgagacgcggtgcgtgcacggcgccccgagttgccaggggccatgcgcccccttgcggcagccatggggagtctctgaaaatcagcgtctagatttttccaggctgtggattttggaaattacgactgaaatggagcccaccatcccatgccttgatcggaactcatggagcaaggaagcaaagaagatggccagttcatgcctgtaatcccagcattttgggaggctgargcgggcggattacttcaggtccagagtttgagaccagcctggctaacatggtgaaaccgcatctatactaaaaatacaaaaattagctgggcatggcggcacgtgcctgtaatcccagctactcaggaggctgaggcaggaggattgctcgaacccaggaggcgcaggttgcagtgagccaagatcatgtcactgcactccaacctgggtgacagagccaaactccatctcaaaaaaaagatggccagtaggcaaaacttaattgattttctttcttttctctttaagagaca

SEQ ID NO: 675846 - DNA, 621 bp, Homo sapiens
ccccaggtgtctcgaagccgcggtctctcccatgcgggtcctggggagaggaagctcagtcctcatagtggccgcaaagtgactgccgctgtgtggatgagacgcggtgcgtgcacggcgccccgagttgccaggggccatgcgcccccttgcggcagccatggggagtctctgaaaatcagcgtctagatttttccaggctgtggattttggaaattacgactgaaatggagcccaccatcccatgccttgatcggaactcatggagcaaggaagcaaagaagatggccagttcatgcctgtaatcccagcattttgggaggctgaggcgggcggattacttcaggtccagagtttgagaccagcctggctaacatggtgaaaccgcrtctatactaaaaatacaaaaattagctgggcatggcggcacgtgcctgtaatcccagctactcaggaggctgaggcaggaggattgctcgaacccaggaggcgcaggttgcagtgagccaagatcatgtcactgcactccaacctgggtgacagagccaaactccatctcaaaaaaaagatggccagtaggcaaaacttaattgattttctttcttttctctttaagagaca

SEQ ID NO: 675847 - DNA, 657 bp, Homo sapiens
agatttacctgacagtattaaataatgagctccttgagagcaaagactgtgtctttctcatttctgagctctcagagctttgggtgacacttctgggatgaatgaagatgcagctgggtgctgtgggtgaaggaggggtctgtgcaagcatgtgcacatgtgtgcagcctctgtctttggtgccagacgtaggtatccagcatgcccygtacctactgatagctaattagaattttcttccttccttaaaaataaaatgtgggttgggtgcagtggctcatgcctgtagtcctagcactttgggaggacaaggccgggatagcttgagcctgagttccagaccagcctgggcagcatagaccttgtctccacaaaaaaaaatgaggaaaaaaaattagccaggcctgatggcacttgcatatggtcccagcttcttgggaggcttgagcccaggaggtgaagggcgcagtgagccatgatcgcaccactgcactccagcctgggcaacagagagagacctcatctcaaaataataataatttttttaaaagatgaataaaaaataaaatgtggtcttaaccagagagaaaagtgaaaaatatatgtctgtcttcatcaaagttctctgaaaaagggtcagatagtctctgcagagca

SEQ ID NO: 675848 - DNA, 1324 bp, Homo sapiens
tgcatcaaagcggcccctgcttctcttcctaggtgagagatcagctaacttttcagtcagtcatacaactatctattgtggctatcctctctgacaccttagaggagatcttagttgtttggcacattccttggagaacaatggaattaaatcttttgtagcctaacaaatattcctcaacatgcagagctgatttctggggaaaagaaggaccaattggcatatggcattcggaatcttttggaaaggaagtaacctagactcctacacctttctatccaagatttaaaattacagaagcaggagtggcctgaccatgttttgttggcaggagaggatcctaaaggccccaaagacaagaggagtgaagggatgccatgctggggactcagacttatcactggggcctgaggcttatgggtatgaatcaactctgggagagtgtgtggctgaggcagaaagaggctcatagtgcagccatcagaactcatggtagtcctttgggagcaatgtttgagagtgacagtgtgaacttagggagctgtacccttgcagcctaagtgtgggttcaacagtactgacaatagcctagaactttgaagatgccatgggattggcaaatagttttcaacagggataccatgtggcagcaggaaaaataagctgcattggatcagaccctgctttgtcacctactgtgtttgagccaaaagtctggctcactttggattgagtgaccccctggtgttcagaacaatggaagagaaaagggcttctcatgagatcctggacttcctacaaataaggataaaagtgcaccctggtgattaactgaaaaaatgaaaagcaccatctacttggwagtggccatatatgcagtatggtatatggtacgccatatatatgacaaataatatatatacctgatatgtatggaaaagacatgctgctttacaatcatgaaaatttggctaaagctgtcttttctgggaggacaatgggtgtttttatttatctttttaattgtatggactttcaaatactctaaaaattttctacatgcattactttttctaaaaaaagtaaatcaaatataaaagaagagaatgtttagccctcatcctgccagacagatgcccctgcaggtgaccccgggaacttatcaccaatgataacttccacatccttttgtggctcctgtgatgtccataggtggtgattcctaggccagtgagtggccaggacctgtgctcccctcaagcaggaatcctggcccacctgtcttccccagcccagaataggatgaataggaggaccttcctgg

SEQ ID NO: 675849 - DNA, 1324 bp, Homo sapiens
tgcatcaaagcggcccctgcttctcttcctaggtgagagatcagctaacttttcagtcagtcatacaactatctattgtggctatcctctctgacaccttagaggagatcttagttgtttggcacattccttggagaacaatggaattaaatcttttgtagcctaacaaatattcctcaacatgcagagctgatttctggggaaaagaaggaccaattggcatatggcattcggaatcttttggaaaggaagtaacctagactcctacacctttctatccaagatttaaaattacagaagcaggagtggcctgaccatgttttgttggcaggagaggatcctaaaggccccaaagacaagaggagtgaagggatgccatgctggggactcagacttatcactggggcctgaggcttatgggtatgaatcaactctgggagagtgtgtggctgaggcagaaagaggctcatagtgcagccatcagaactcatggtagtcctttgggagcaatgtttgagagtgacagtgtgaacttagggagctgtacccttgcagcctaagtgtgggttcaacagtactgacaatagcctagaactttgaagatgccatgggattggcaaatagttttcaacagggataccatgtggcagcaggaaaaataagctgcattggatcagaccctgctttgtcacctactgtgtttgagccaaaagtctggctcactttggattgagtgaccccctggtgttcagaacaatggaagagaaaagggcttctcatgagatcctggacttcctacaaataaggataaaagtgcaccctggtgattaactgaaaaaatgaaaagcaccatctacttggaagtggccatatatgcagtatggtatatggtacgccatatatatgacaaataatatatatacctgatatgtatggaaaagacatgctgctttacaatcatgaaaatttggctaaagctgtcttttctgggaggacaatgggtgtttttatttatctttttaattgtatggactttcaaatactctaaaaattttctacatgcattactttttctaaaaaaagtaaatcaaatataaaagaagagaatgtttagccctcatcctgccagacagatgcccctgcaggtgaccccrggaacttatcaccaatgataacttccacatccttttgtggctcctgtgatgtccataggtggtgattcctaggccagtgagtggccaggacctgtgctcccctcaagcaggaatcctggcccacctgtcttccccagcccagaataggatgaataggaggaccttcctgg

SEQ ID NO: 675850 - DNA, 2456 bp, Homo sapiens
ggctgtaaatggtgtgggtgtcagtcagcctgtaaatggtgtgggtgtcagtcagtcaggctgtaaacggtgtgggtgtcagtcagtcaggctgtaaatggtgtgggtgtcagtcagtcaggctgtaaacggtgtgggtgtcagtcagtcaggctgtaaatggtgtgggtgtcagtcaggctgtaaatggtgtgggtgtcagtcagtcaggctgtaaatggtgtgggtgtcagtcagtcaggctgtaaatggtgtgggtgtcagtcagtcaggctgtaaatggtgtgggtgtcagtcagtctataaatggtgtgtgtgtcagtcagtcagtctgtaaacggtgtgtgtgtcagtcaggctgtaaatggtgtgggtgtcagtcagtcaggctgtaaatggtgtgggtgtcagtcagtcagcctgtaaatggtgtgggtgtcagtcagtcaggctgtaaacggtgtgggtgtcagtcagtcaggctgtaaatggtgtaggtgtcagtcagtcaggctgtaaatggtgtgggcgtcagtcagtcaggctgtaaatggtgtatcagtcaggttgtacatggtgtgggtatcaggctgtaggaaaactgttaggaaagcgatgactccattgcaatgctgtgtacatagttttcatgttggcagatgtttgaataaaaatggtctattctaggaaatatttttctattaacaaccatctcattacttcacggcatatacaagctattatagggataatttcttgtagacaaaaacccagttgttcctgaaatggtattttatagggtttaggatgcaggattcaggcagcccacctggaatatgctgtgtgaggaacaaaagatccagctgctcagacttattgctgcaaaaacattaaccaaaatgagcagaaacagctaccaaaacatcatttgaagagtttcaggcaaaatattgttctacaacagtggctaagtcacaggcaatattatatcaagcataaaatctttactagcctcctaataacagcctccagccaccattttagagatttatctgagtgaatgcactcatttcacgtagacgaggggctagagatacctgtgggaatggccagtgcagttgctctcgttaaagcaaagtcagtttcacgggaaaagttcaggaaactcggctgcctatagaaatccctgtggatccactccagctactagcttcagtttctcacatcttgacgtatccacccattcacaacagcgtccccgtctccctctttctccttcaagatggctccgcctggtgaaggcctatcagtcagcctcggaatctcgcttgcagcctcaccctctggctgcagagctgtgctgggagcacataatcggggagtgggtgagagaagggggagctccgggcccttctggggccttggtgacacccagtcagcttgtggaaagcaggatcagaggcctcaagccaaggaactgtgaaaaaaggacccagtgggatgtgaattccacaaacgccttctgtaatgtaggaagggagacaccttttgtcttgttacccctatggtggcttggggccaccttgtgaaagttcaagctcactcacctttgcagatgatgccgcagccaacacagtcctccacaccttgggccccctccaccaccagcaggtgtgaattcccgtcctctgagggcagttatggggctgagcagcagaaggccagggcgctggcccctttgatctctgacactcctcagggccatttgtgagcagagtgggaggaaggtggagaggccctacttctcagccaggtgttgatggcttagctccatgaatccctgagttcacaaaggaggaaggcaggagccagccctgtgaagcacagaccggcctgcacggtgttgatggtctctcagggcgtgggcggggaaaccccctaactctcccagagagaggaggggtgagggccaaacctcctgtttcacactttaacactcttgttttatgtgggaacctctctctcttacagctttgttttttaaccattcatgggctctcatgagtacactggtggggatttgtgagggaaggaatccaaaaaggtccttcaatccagcctgctgcctcttggcagaaccacacttctcagggatctggggctgaggcgagtcagacggcgggtgcagagcagcacggtgcccccttcctcaagtgggaggcttgagaacctgctggctgccccagtcggccgcacggaggggagagggcatgggaactgcacatagctataggatcaggctcaggcatctggggtgcgggtgaactgtgtgaacccagtgctgctcacargacacccagggctaccctgtgaggggttcagaaagacaggcaggctgctttggcctgggtgacaaagaatttgggcctctaagcaaaacgataggaaaaaggctg

SEQ ID NO: 675851 - DNA, 633 bp, Homo sapiens
gcagctcatcagcgtgctcttctctctaggctgacagcctctcggatccaaggtacgtacaaatgcaaggcccgattcaggaccaaaaagcactctgatggcttggaagagtggctcgtttctgaggtggaggcacagaagtctggagggactctgtgtgtggaaactcctgtcagggcagctgcccgtgttccccaagcacacgttgtacacagagaaagccgtgtgggctctgaggccctccagacaacagaacaggttgcctgcccagttttgtcatttggtggctcctgccaggccacagggcccagggggagcccaagagccctcttcccacagtgtagggcctggcagctaccccttcccagggactgcgctatcttggtggttttctcctggccccgctggactgtgctgaggtgacagtgaggyagggaggcacacctgggacgggggccttctagcaaagagacaactggtgtcccatacttctagcaggtccgcatcctggcagaatgtcctgaagacaggaatggaaattccctcagaacatctccgttgtctgggctctcccatctccacggtaacactccaggatggtctgtaatcaggagggggctgggttgccatgat

SEQ ID NO: 675852 - DNA, 633 bp, Homo sapiens
gcagctcatcagcgtgctcttctctctaggctgacagcctctcggatccaaggtacgtacaaatgcaaggcccgattcaggaccaaaaagcactctgatggcttggaagagtggctcgtttctgaggtggaggcacagaagtctggagggactctgtgtgtggaaactcctgtcagggcagctgcccgtgttccccaagcacacgttgtacacagagaaagccgtgtgggctctgaggccctccagacaacagaacaggttgcctgcccagttttgtcatttggtggctcctgccaggccacagggcccagggggagcccaagagccctcttcccacagtgtagggcctggcagctaccccttcccagggactgcgctatcttggtggttttctcctggccccgctggactgtgctgaggtgacagtgaggcrgggaggcacacctgggacgggggccttctagcaaagagacaactggtgtcccatacttctagcaggtccgcatcctggcagaatgtcctgaagacaggaatggaaattccctcagaacatctccgttgtctgggctctcccatctccacggtaacactccaggatggtctgtaatcaggagggggctgggttgccatgat

SEQ ID NO: 675853 - DNA, 611 bp, Homo sapiens
gcgaggaggcctgggatgacaactctctccaacttcatcagctcctgtaaagtttttctccagctctaattctgttgtgagggcctgaagcagaaatgtttaccttggaggcctggaaaagcaatgctttcccccgtataacttgaktctgtactcttggctttccttgatgagtctgaattgttccatgtaaccaggaaatctcatatactgacactaagagccgtgcactctgacttgctgaaggtactggttttcttatttatactcctttacaatatgggacacattcataagtttggacacacattttttttttctgtgtttaattaaattcaagtacctttcatcagattcaatttccaagatatctaaatgggcttcccagaaggaagagcaatcgcagtgcaggagggtttctccaccttcttggtaactggccctttaaaaagcccagtggatttaccttttaccaagacaatttcctgtgttgtctctattacgtttttggttacttaggaaaacagcttgaaaagggttaaggttttaacatccatgtacttttctgtattgctttgaagtcttttgattactactctggttaaatgact

SEQ ID NO: 675854 - DNA, 639 bp, Homo sapiens
tgtattttgcttgtaattttcatttattatgccagatgcatgaacgttatgataaagaccttccttttattatttacttttcttcttttaatgtgcatgcttaacattttagcatacatacataaacttacatttttccaaaaacatccagatttaataaaaatttgtatcctttctaagcaaggtaagaaatttagtatgcttttatttttctttttayctcattgccctcattcatctctttccttgaaataatatggaaatttagtctccaattgtttggcttcttcactttgggttaatagttgtttagcaatgactgaaattttactaatttctttactcaacattgtttctcattgtccatgtattcccgttagatgtgctcattttgctatccactttctcttggaaaggctctatgggtcaaagaatttctgattcctgaaaatgtgttaatttttccttagtgtagaatgctaatttggctgaccttaggattctgggctcagcattatttttctataaaggtaaagaaacatgatgtggctgctggagtgagaagcaggttgcagaggttttctgtaagatgggggggacagcatggagaggacaccgctgatgactcaggggcaaggg

SEQ ID NO: 675855 - DNA, 639 bp, Homo sapiens
tgtattttgcttgtaattttcatttattatgccagatgcatgaacgttatgataaagaccttccttttattatttacttttcttcttttaatgtgcatgcttaacattttagcatacatacataaacttacatttttccaaaaacatccagatttaataaaaatttgtatcctttctaagcaaggtaagaaatttagtatgcttttatttttctttttacctcattgccctcattcatctctttccttgaaataatatggaaatttagtctccaattgtttggcttcttcrctttgggttaatagttgtttagcaatgactgaaattttactaatttctttactcaacattgtttctcattgtccatgtattcccgttagatgtgctcattttgctatccactttctcttggaaaggctctatgggtcaaagaatttctgattcctgaaaatgtgttaatttttccttagtgtagaatgctaatttggctgaccttaggattctgggctcagcattatttttctataaaggtaaagaaacatgatgtggctgctggagtgagaagcaggttgcagaggttttctgtaagatgggggggacagcatggagaggacaccgctgatgactcaggggcaaggg

SEQ ID NO: 675856 - DNA, 1390 bp, Homo sapiens
cagtgtccttagtgattgagaagggtcagttatggtgagaggcctggctgctcaaatgcatcttatcacttaggagacaaagtcactggtttagagggacttctgggaagaagagcctgggtcccctagcaagtacaggcacaaagcttgggtcataccaggcctggagaggagacaaaattgctgttggggcttttagggaagagggatagtagagtagaggtggcctttttattgttccaggctgctctgtgaacctctgatgaccctgtatttatgtgaatgtctggggaaattcagacatcagcatgagtatactctagtgctggcccagagggatgccactctcccctgcttcccaagacctttagccacacgaaaagtgctgcattgtacagtcatgtacaaagtgtaagcgatgtgcaaaggaggcacatgaaagtgtgtgtgtgtrtgtctaccgatgaaggaggggctgactctccaggccttcttagggccattccaagatataaacccagcctatgtgcatgccctaactcttactgatccatctacataaacttattactgttcccatagacacctcattcctttccaattctgtgcacaggattgacgcagtgcctgtaagatgcacgtggttctcaactagtgaactcctctctaatcctggaaacccagcgagaatgtctctttcagtatgatctttcttcaccacactttatctctgggcctggaaagtcaatgtctccttcatcactctgtggatactgacctagcaaatgctttgcctcccatccctatcaaggtaataaggagtctgccttttaaagaactggagaaactgcttcgctttctttctttcttacatcagtactatgtcaattatcttgctctttcacaagatagtcagaggagtcataatcatcctgatgtcacacaaatcattgcataatccacttacaatgatgatatcatgcttaatggagctgacgaacagaaagtagaagccactctagataccttagtaagatacttgcgtgccagagcatgagagataaacctcatcaaattctgtggcctgactcattagagaagttattaggagtccagtagtctggaaatcaaattgctacacattggcatcactcacaactaagaaaagagtacaatatttggtaggcttctttggatattggagagagcagacaccacattcaattgtgcctgctccaactcatttaccaggtcatatataatattgccatttttgagtaaagccatgttatgaatgtttcctctttgttttgttaatgaatatattagtgtgtatatacatatagtaagcaaatatctttcttttttcctctcttattccctaatcatg

SEQ ID NO: 675857 - DNA, 424 bp, Homo sapiens
aaaactgaattactcctaaatctatttaacaagttgaaatatgactaagctgttcagtaatatttgtcrtttatttcaatgaatattttccttaactttctgaggaaactaagtaactaatttcaaatgagaagaaatacaatgacaacaaacaaaaataaagtgaaataaattaatgatatgagaaagtgcttgtgttcccaggttaaaagatgaaatcatgagacaaccttttagtaacttctgataggggtttatacgtatttatatatgtatactactcaaagtgggcatttatggcatgaagtgatgagcggtatctaagccttcctcttagggctccaagcaaacagttgcctctcattttacagagtctaaccccgtaaatggagaaagactccttgagggcatgaatattgacaaa

SEQ ID NO: 675858 - DNA, 650 bp, Homo sapiens
ccaggtgtgggtggcatgggcctgtagtctcagctagttgggaggctgaggcaggacgatcaccttgagcccaggagtttgaagctgcagtgagctatgatcacaccacagcaccccagcctgggcaatggagggaagccctgtccaaaagaaaaagaaatttttacaaagtaaaaaaaagtttgtaagtttccctatatttaagctctgatttggaaggtgaagagctctgggcttctgtggttttgcatgaagggtaatgatcaaggaaaggagatgaggtggcacgggctgctgtgggcagtagctgttctcagtagtgaatttaaaaatctcacagagccttggcccaagcctcttgtgtcttgggcactggggacattccaaagggttgtagagcatacctattcacaatgtggaggagaatggaaggcaaccagcattactgtgttcatkcacgccacaaatatttactgggcatctactatgtgccagcctctgttctaaggctatagctatgaacataacagaaagaagattctctgttctcatgaagctcacattatattgggcttggcaggttttcagtttgatcctccaacaaccctggtgaggtacctatgaaacctccattctcagtgtgagaaaac

SEQ ID NO: 675859 - DNA, 1903 bp, Homo sapiens
tgaatttcactcttatttccagggaaagcatgacaaagatacaaatggtagcaccttaaccagtttagaggaaggtcatgagggaaagagaacaaaagggaagaaggcgagggggcaagaagaaaggaaggagaagagagaagaggagatggggaaaaagcaaaagcatgggggaagggagagagaatatttcaaactgacttcaagaggctttgtggtgtggatgttaagaaatcacagattagagggttctaaaagaatctctaccatctgtcttcagagtctcaattttgcccctgtaaaatgggcagtaacaaacttgcccttcacgctaaactttgccatgaagaaggatttaggcatgatctcaagaatgtggtgcattccttcccaagaatgtcacgagtcttggtgagttgttttgcaagatttgggacagcttaatactgagatggagaaatagttaatttgccagacttccaggaaggctgtggaaggcagagcagcctcacagggctcttgattcgagaggcaattggaacagggctaactggaccatccctcccagtggggctgcatgtttaggtcaaggtctcttggcaggagcagcaggtttgaatgaaagcagggcttgagggagtgcactagaacagcagtatgcagtctttggtcccttaaaaattayggaagaccctggccgggtgcagtggctcatacctctaatcccagcactttgggaggccaaggcgggcggataacgaggtcaagagatcgagatcatcctggccaacatgatgaaaccccgtatttactaaaatacaaaaattagctgggcatggcggcgagcgcctgtagtcccagctacttgggaggctgaggcaggagaattgcttgtacctgggaggcagaggttgcagcgagccgagattgcaccactgcactccagcctggcaatagagcaagactccgtctcaaaaaaaaaattgtggaagactccaaaaacttttatgtttttttaaacccattggttttaaaaaaatatattggtaattcaaactgaggacattttaagataccagaatgcgcaagcacacatttcattggccctccaatcagtgacatcatcaggcatcaggtagatgctggagaacttctctgtgcacttgacagagcatgagagtggaaaatgcaaaccacatttggcgtggttatgaaaacagtttagatctctcagacacctgtgtactccctggcccaccctgtgagaacctctgaactacagacgtggcagaatgttacaccagatggaaatcctgctgtaactcttcaagacctcagacaaggcggtgacctcatgtgatcacaactgcgattggatttcttgagctatgtgtaccagttaatgtgcaaacaagtcagaatgattcactcagccagaggcacaaaactagagggctccagagagaagtacagtcaggaatttggggaaatcacagaaagggccctggatccacgtgaggtatgaaatttgaggatttggatccacttcgtctaaatctgccagaagcagaaatgccctgtgtatcatctaggttcaaacttgttgctgtaagttcaaaaatataactcttcccaaaggccttgagcctatagcagcatctgcactccccttatgaggtcagcgtctgtgctcagccctaccagccccctcccctttcccagtgctagagaaaacataaagccactgcaatcaaaatgaaatgtcaaatttttaaaaacccgaggaacagctgtaatttgcaaggagacagaatgcaattagcatacacttgtcagaacgggagatggctctgtgagccctttattgccttagttttattaagactggactgattattacagt

SEQ ID NO: 675860 - DNA, 2334 bp, Homo sapiens
gactttaaaaataatttgattttgtttctcaaaaatcatatattccttttggcattgtcagaatatagtgaagaacaaacatgcctcaggtagtacagagctgtttgttgaagtgaaggcgttgcatctgacagtgactaccaaagaattgtcttcagttatttgttcacttctcaccttgaacccaaagaatgtgaacaatcaaataatgagaagctacaaatgacaataaaagcaggatgagggaaattacaagattagaaatcaaaaccagagaagcaaaaagaacatagatttggcttttgggtttctggctccaaagtttaaaaggaaattatgtggttcagattttcaaagatgagaaaaatagacaccccaggagtggtaaagattctcttagcacttaattctgaaagaaatgtgtaacatgggattgtatatagggagaaggaaggtctttacaartaatttagcatgtggtttttacctactaaaattaaaactgatgttcatctctgagtggtaagtaacatggattaaaaatgtattttcctggccaggcatggtggctcaagcctgtaatcccagcactttgggaggctgaggtgggcagatcgcctgaggtcaggagttcgagaccagcctggccaacatggtgaaaccccatctctactaaaaatacaaaaattacccgggtgtggtggcaggcacctgtaatctcagctactcagaaggctgaggcaggagaatcgcttgaacccaggaggcggaagttatagtgagccaagattgcgccactgcactccagcctgggcgacagagtgagactgtatctcaaaaaatatatatatatatattatcctgtttaggaaagctggttagtagtttggaactcttcccttgatgaaaaagtttaggtatccttctattttattactatggattcagggttactaaacctgggttctaatcaagtcttaccctgttgtatcttctatgcggcattagccaaaaaagaagaacatgtcggcctaccaggtgttctgtaaagagtatcgcgtgaccattgtggctgaccatccaggtataggtaagaacattactgatctgtagcgcttttgctttccatttatatcttgaagcagtgcgattaatttcttcttcctgtagcattagagcataaatcttgtttctttcctcagttctgcaaatcactttagattttgccttagtttatctcatctgtaaaagagatgaactttctatacatatctcttaaacggataaggtgggaaactatgtaaaaataaatgttgtaaagcacatacataaatgcacaaaaatatacaattgtttatttccaagattctacaattggccttttccttaaattgcccttggatgtaaagttataatgagatatcttgtattatattgttgtaaagatgctcttcaacttatgatagtgttacatcctgataaacccattgaaaattgaaaatactgtaagtcaaaaatgcatttaatacacctagcctacagaacatcacagcttagctgagcccaccttaaatgtgctcaagacacttacatttgcatacacttgggcaaagtcatttaacacaaagcctgttttataataaagtgttgaatatcttatgtaatgtattgaatactgtactgaaagtgaaaaacagaatggctgtatgggtactagaagtacagtttttactgagtgcatattgcttttgcatccttataaagttgaaaaatcaaaagtcaaaccatcataagtcagggactgtatttgtctctgtattagaagttaatgaggtaagaaaaacactataccagagatcctggacacatgtcacttaaccgctacaaatttcatttgcctaatgtgtaaaatcgctgccctaccaactccaaaagactgcagtgttaggcacacatgaatatgctttataaagcataaaactcttatacaatggaagggtaagattacacatctagaggattgcttctgagctgctctagggaaatccttctttggttctaatcattcagaaatttggtaaaaacctaacatcttttttcaaattctacacatattttttaacctaagttgataggccttgtattgtgggatcaaattaaagacaccagaggcaggatgcagtggctcatgcctataatctcagcactttgggaggctgaagcaggagaattgctggagcccaggagtttgagagcagcttgggcaacataacgagacctcatctctacaaataataattttaaaaaatagctgggcgtggtggctcacgcctg

SEQ ID NO: 675861 - DNA, 491 bp, Homo sapiens
tgaaaacccacataagcactgtgaaccaagaacattggagaactttgtctttgcacaatgctcagcacattagtgagcattcartaaatattataatcatctcagtggcaatggaagttcaagacccagaatttggctggaacttgggtgagaaattgggtgttcatgtgtgataaatgaaataggtaaatggataagaggaaattgagctcagagcagaattttgtagaacacttatacaggggcatttatataagagaaggaagagggggcggctatgttggaggagaaacacagaagggaggagaaaaacagtttcaagagtagaacaatctcatgctagagaggccaaggagttcaagtgcagtaggtaggaatggagctggatcaggggttgaggaaagagtgagcggtgtggaagtgaacgcagcagcggtgggctcttacttgagaattttgactgacacaaagaagggaaattacactatttc

SEQ ID NO: 675862 - DNA, 491 bp, Homo sapiens
tgaaaacccacataagcactgtgaaccaagaacattggagaactttgtctttgcacaatgctcagcacattagtgagcattcaataaatattataatcatctcagtggcaatggaagttcaagacccagaatttggctggaacttgggtgagaaattgggygttcatgtgtgataaatgaaataggtaaatggataagaggaaattgagctcagagcagaattttgtagaacacttatacaggggcatttatataagagaaggaagagggggcggctatgttggaggagaaacacagaagggaggagaaaaacagtttcaagagtagaacaatctcatgctagagaggccaaggagttcaagtgcagtaggtaggaatggagctggatcaggggttgaggaaagagtgagcggtgtggaagtgaacgcagcagcggtgggctcttacttgagaattttgactgacacaaagaagggaaattacactatttc

SEQ ID NO: 675863 - DNA, 491 bp, Homo sapiens
tgaaaacccacataagcactgtgaaccaagaacattggagaactttgtctttgcacaatgctcagcacattagtgagcattcaataaatattataatcatctcagtggcaatggaagttcaagacccagaatttggctggaacttgggtgagaaattgggtgttcatgtgtgataaatgaaataggtaaatggataagaggaaattgagctcagagcagaattttgtagaacacttatacaggggcatttatataagagaaggaagagggggcggctatgttggaggagaaacacagaagggaggagaaaaacagtttcaagagtagaacaatctcatgctagagaggccaaggagttcaagtgcagtaggtaggaatggagctggatcaggggttgaggaaagagtgagcggtgtggaagtgaacgcagcagcggtgggctcttacttgagaattttgactgacacaaasaagggaaattacactatttc

SEQ ID NO: 675864 - DNA, 2398 bp, Homo sapiens
gccagagagaaatttgtgatgagaacagttcttctcccaccctctgctccctttgctctctctcttcctctttcttaaaagaaaaaaaaagaaaaaaagcactttattgtcattttgcatctggagtacagcaaggggcatctggcagtgtggcagcgttttgggctggctggctgggagggtcagagaacttcagagaggagagagggttttggagagctgggctaaggttaggtctttccttgggtttgctgtgaggccttgggcaaacgacgatctcttctgtgccttagttttctcatctgaaaaatggagctattaacaatggttcctctgcctgcccctgtcttccaccaggaccgctggggagagcctctaagtttacaaataatgaagatcttcaaaatgcttagaatgaaagtgatgctgacctgctgcttacgggatcaggaattttatacaagtttcttatagataccatctcatgtgtacttactaaaggccttgcacattctgactcattcaaatctcacaacaatgtcatgaagttgttgctatgattaacatcaccattttacagacagaaaaattgaagcacagagaggttgagtaattcggcttaggttgcacaaccaggaaatagcagagagggatttgagtcaagcactctgcctgcagagtcctggctcctaaccactgtgcaggatcctcccttgttctttggggtgcatcctgcagaagtgccaactaggggtgtgcaggccaaaggtggccccaagtgctttttttaaaaaaaattatttttaattgacaaataaccactgtctatatgtatagggtacaatgtgatactttgatatatgtgtacattccatttgaaatttgaatcagttgccaacattgaaaacgaatctcattatttctatataaaacacaaggccaggcacagtggttcatgcctataattccagcactttgggaggtgggggcgggtggatcagttgaagccaggagtttgagaccagcctgggcaacacagcaagatcccatatctacaaaaaataaaaataaaaaattagccagtcttggtggtgcctgtagccccagctactcaggaggctgagacaggaagatcacctgagccaggggaggttgagtcttctgtgagccgtgattgcatgcactccagcctgggtgacagagcaaaaccctgtctcagaaacacaaacaaacaaacaccccacagatttccaggatctatctctctctcgctcactagcttttttttttttttttttttttttgagacagagtctcactctgttgctcaggctggagtgcagtggcgtgatctccgttctcggctcactgcaaccaccgcttcccaggttcaagcaattcttctgccttggcatcyggagtagctgggattacaagtacctgataccatgcctggctaatttttgtatttttagtagagacagggtttcaccatgttagccaggctggtcatgaactcctgacctcaggtgatccgcccacctccagtatctcttagatgctctggtaatgataggctcctgtacccacatggcaaagataagctggagtcaagcctcctccatttgcctcagtcaccaccactccctactgtctctttggctctaaggcccagaatctattttctattatttatttatttattcatttatttatttattgagacttagtctcactctgtctcccaggctggagtgcagtggcacgatctcgacttattgcaacctctgcctcctgggttcaaacaattctcctgcctcagcctcccgagtagctgggattataggcacatgcccccacacccagctaattttttgtattttagtagagacagggtttcatcatgttgcccaggctggttgtgaactcctgagctcaggcaatcctcccactttggcctcccaaactgctgggattgcaggcgtgagccaccgcgcccggccctatttcctgttattttactgtatctactcattgccctcacttacatcctgcagtgtgtcccttggaggggtgctggcagaggacaaactcaagaccactgtggaagacatcaaaaaagaacagcagaatgtggagaaaagacttcaatttgtcacagaatagagcctgtgactcacagccacatgcagataaggatttctatcaatgacttaatgtggacataattagcaatcatattagaggtctaccgtgtgccacttggagtctgttatgtataattatgctgaaattatcagtagagttcttccagagaggggattcagtcattctcaaagaattctttcgtgttgacttcattaagtttccgttgaagaattcctctaggtattaccgt

SEQ ID NO: 675865 - DNA, 3026 bp, Homo sapiens
tgtttaagagggaagcactggcaaacttccaaagacaagatgtttacaaacctatacacatttgtcagacacgaagaaaagaggcaatatctccaactcatcctacaagcctattctaatcttgatactcaaaccggacaaagctagcatgagcaaagaaaatgatagagaggcgaggctcctgcataaaattacatggaaaaaaaaatcccaatcctgacattcacatgaagccgcctctcccttccctcctttcttttcttttcttttcttttctttcttttttttttttttttttttggtttttttttgaggcagagtctcactcttgttgcccaggctggagtccggtggtgcaatctcagctcactgcaacctccgcctcctgggttcaagcgattctcccaagcagctgggattgacaggcgcccaccaccacacccgcctatttttttttttttttttttgtatttttaggagagacaaggtttcaccatgttggccagggtcttttctcttcttcattcttccctctctcctccccgcttccattcattatccctcctttttctcctcttccttcctttttctttgattttctcttcttgtcctcctatgtctttctccaagaccacatacagtttattccaagaattacttgatttaatattttaaattgcatcaatctaatttaccacattaccacgttaaaggagaaaacccatgtaattatttaaataaatgcatgcatataaatgagttaatataatttgaaatcacccctgatcaaaagtaaaaccaaaaatatcttttaccaaagtaaatgtgattctatcaggatcctcagaaaatatagaaattatcctaggtatttcaaatgaagggaatttaacacagagatgatttattcatgtattggaaggcataaagaaaaatttttttaacaaggtaattcgtatgtaataaattacggaagcagttgtcaccactgggctgaagttactgaaattttaaagtggattaaaatttaatgtgtatggggaatagatgctaactcactgctgggggtggcccagagagcctccccccaaacccacacgcaccgcaaatgatgggtgctcagagctcaggctggcgtccctgtatgtgtgtggtgtggtatgtggcgattctcgagagatggctgatggtgccttgcacgggtcttggcactgggagcacgtggaagtcggatgaggtgatttgggctccagcttcctctgctgcaggacaggtgctgacagtgcctgcagccagaaaaacgtctaatggtctcttttcagtaaatcagcaatattgaagacataactattgaaaatatttgtaacatcaatgtaaggtacataggaagaaatctaactagatacgtgcacaacctcactagaatattatacatttattttgaaaaacagaaatatgttgaaatacattccatatttaaagtgatagagattcagtatagtctccctaaattgagtcatagattcagtgaaaatctccatacaggtctttgtagaaattggcgaaatgattctaacagttacatggaagaacaaggaccaacagaaaaaagcctctcttctcctcctcctgctttccgtactcccagcagatcctcccactagcagggcccaactggaagccagccagcaaaggagtctgggaaatttaatttgcaggagctaagccctggcatccccgagcagggtacagagcgggaggctcttagtggagatgaacaggtaaacacccaggtctccatcaggagccttcaggatagcccccacctaataacaaagcagggaacctaaaaaaattataaataaaaagaaataagtctaatatcataccttttatatgaaaggtttagacagtatgataaaataaggttatatatacgtaaaagcacatatgatatataaatagatatacaatacttccctttacattatatatatatatatataaaatgtaaaaagggaaaaatttctctttacattttatatataatacataatatatataatgtaaagggaaatattgtaactatttggaggtataataatcatctacatagaaccccagatgcattctacaaaaaatattaaagttagtatgcatttagtatagcactggatataagatcaatacatataaaaactaatggtctcttttctctaaatcagcaatatttaagataacaacaatgtaaggtacataggaagaaatctaacaaaacatgtgcacaacctcactagaaaattatacatttattttgaaagacagaaatatattgaaatacattccatatttaaagtgagagagattcaatacagaatgatgtcaaatctccctaaattgagtcacagattcaatgaaaatctccatacaggtctttgtagaaattggcgaaatgattctaacagttacacagaagaacaaggaccaacagaggccatgactctccggaggatgacctctaggctctcgaatctagctcaggaaccagggatggtgctggcacaaggacagagaaagagcctgatggaccaaaacagagaacccagagaaagaaccagaacaggacggcaccgtgacttggcgggggaggaagawgcattcagtgtgtgcttcaggacttctatttgtccacgtggacaagttctgggactggcaggtgaggcgtggtacagcagggccacctagggaagagtgggaatgggcactgccactgagagcacccgggggtgtgggggtaagatgtgaagaggaagcggcaaggtgcctgggtgctgggaggcacaggcgcagagcaaactaggcctcgctccttctcagtacacggcaccggagctcagagcttcactcacaccttggtgaggtcaccccagacatccattctgtgccgctggtctaactgtgcaacctcttcgccatgtaacctttccagcgccccctccccagcgcaggcctagctgctgcatgat

SEQ ID NO: 675866 - DNA, 1822 bp, Homo sapiens
caacaaaatatttcattctacatacttctgcaatctgatttccaaagtcaacaatcttcacctttccatttcagtaacttttcatcttgtctaactcctagatgaaattcggttattcaagatggactccagctggtatgttcaaatttataccaaacctataaccatcatcaaccaatttttacttaaagctctgtctgccgtgccaggtatgatctgtcttcttccctttgccagtgtgtacggctccagtcctgctcagcatttcaaagagtgccaggactcttcctttttaaaaagatacaaatacatattcaccaagctttgaaaaggcacatattctattcttattttaaattaatcttttagcttatttaattcttgtttatatttgaattgagaaagaagatggggtattaagggcaggaaagacccagtgcacatatagttctatatagtagtggtagtagtagcagtggcaacagtagcagcagtgataccatcatcctgcacttggaaatgtctccttatcccacacatacaaaacttaaagcaaaacaaaatcctttaagtttgtaaggagccttttcccaatctggaagaaaacagaaccttcaagttagaggccatattgttcaaactgattgagatatatatgaattttgtgacttaatatgtaaatattggctaaaatatttaggatagcccagatggtaacagcaatagtgccaattctccaggccactttttaatgcatttctagtattattattttagtcttttatattctaaacaagtacacataagaaatccaacaagagtccaatctaatttcttcaactcttagattcaaacattttttaaaatatacaaatatatattcactgaatactaaaaaggcacaaattctattcttattttaagttgatgttttagcttctttaattcttattcatatttgagttgagaaagaagataggagtagtaaaggccagaaaaatggaaatcagggaagtatgataagaaagatggtacagagttgtttatagtctaaaaaggagaagtctaagaaggagaaggaggagaaagaggaaaaggaagaggaggagaaggaaaaggagggggggaggaggaggaggatgacgatgacgatgacgacgacgatgacgacgacgacgacgacaactactaacttcttccagctgaactattttcagtgggctaaagtctcttgataaagacacattcattaaaaaactaaaycagggccaggcacggtggctcatgcctgtaatcccagcactttgggagaccgacgtgggcggatcatctgaagtcaggagtttgagaccagcctggccaacatggtgaaaccccatctctactaaaaatacaaaaattagccagacctggtggtgcctgcctgtaattccagctactcaggaggctgaggcgaaaaatcacttgaacccaggaggtggaagttgcagtgagctgagatcgcaccactgtactccagcatgggcaacagagcaagactgtctcaaaaaataaaacaaaataaaaaactaaaccaggtcaggcacagtggcctgcatctgtaatccgagtactttgggagactgagacaagatgattgcttcaggccagaggattccttcaagccagaccagcctaggcaacaaaagcgagaccccatctctacaaaaaaaatttttaaatagaaaaattaaaaattaaccactaggctcacaggagagcatagacataatcaattaatttactgattgatgatgccagacctaaatattaacttgttaga

SEQ ID NO: 675867 - DNA, 589 bp, Homo sapiens
ggcatcaccccatgacaggatccagtcagattgggcctcactgcatcacctcattgcaaggtccaatcagatcacttctctttaccctgtgcttataaaacccgatccagctcccagctcagggagacagatttgagcatttcctcctgtctccttgtcacttggctcacaataaacctttctcactgcaaaaacccagtgcttcagagtttggcttcccgttgtgcaggggcaaaccaacctagtttgtttcagtaacgttattgtccccctatcatagacatgaaaactgagacttcgagtgaataagtaaattgcgttgaggtcccacagagagaaggtggcagagccatgtttagaacccaggcagtcgggctttagccatcattctgtgcacaagtgtttcctgggtaaggctcaccgtggggakggctccacaacgttcaccacccccataagattcctagggagttgcttgtgaattggcagaattgatcttgtcaaatacaatgtctggagaaaatgtttctctatctcccaatccgtcccatatcagatcctatgactataggttctctgataattatta

SEQ ID NO: 675868 - DNA, 644 bp, Homo sapiens
catttaattatgtatcaaaaggtaaagagggccatgtagatttagaagtatttgtactgttgacatataaatggaaatctgattttgaagaccctttaaagaagttgctaccatattagatagcatctttattattttcgttgccagtattcccacgagcattctgctgagatgaacaatcagatgacctcgtgtgagatttggaggagagaaggaaatggagagcatgcktctgccgcttctgtggtttctgtcggtaagcacagtgatgaggtgctgagttttccccagaaggcctcccagtgtcctattaccagcttcacaagcgtcgagggcagggcatgggcatctattgttcaccagtggagatctatctggcacagaaccgatccaaccattgcagtggtcacagcggtgttggctttctgattctcaaccttcctgaccgccagaggagacagcctctttggtggccctgttctgtggtattgtgctaaccggtggtgggactaaaactgtctctataatgttttatttcttaaaaaaaaattctgaagcaaatgtgacaatatgttaacattcttaaaatctgggtagtgggaacatggatgttgttatttgtggtgtgtttgaaattgtgtcat

SEQ ID NO: 675869 - DNA, 644 bp, Homo sapiens
catttaattatgtatcaaaaggtaaagagggccatgtagatttagaagtatttgtactgttgacatataaatggaaatctgattttgaagaccctttaaagaagttgctaccatattagatagcatctttattattttcgttgccagtattcccacgagcattctgctgagatgaacaatcagatgacctcgtgtgagatttggaggagagaaggaaatggagagcatgcgtctgccgcttctgtggtttctgtcggtaagcacagtgatgaggtgctgagttttccccagaaggcctcccagtgtcctattaccagcttcacaagcgtcgagggcagggcatgggcatctattgttcaccagtggagatctatctggcacagaaccgatccaaccattgcagtggtcacagcggtgttggctttctgattctcaaccttcctgaccrccagaggagacagcctctttggtggccctgttctgtggtattgtgctaaccggtggtgggactaaaactgtctctataatgttttatttcttaaaaaaaaattctgaagcaaatgtgacaatatgttaacattcttaaaatctgggtagtgggaacatggatgttgttatttgtggtgtgtttgaaattgtgtcat

SEQ ID NO: 675870 - DNA, 1146 bp, Homo sapiens
caaatccgtagttcaccctcttccccatgctattctgcctactatgtgatcccctttcacacttgctcattcaccatgtaccaaaagccaagcactgggaatggtgctgcagacacraagaaaaacaacgtactgcctcctaccctcagggagatcccggtcactgggggagacgctaggaccatgctctgcaagagtgcaatgggagaagtgcttaaggagaaattaacaaagagcaatcaatagcccagaggatgggactctaacttagggactgaggtaaggggtcataggacgggtactcagttacattccccaagaaacagagacagatttgtgtgcaagaggtgtcctggatcagtgctcacttgtaagaaagtgaaggagacaggactgggcagagtgagagatgcggtcgccaaagaggcctcggcggatcccacaggaagtcagctctgaagctggaataacctttctgaggggacacgaattgagacaagggagtcagatcgtggtaccctgcattcactactccttagatgtgggcagtcccacaagggggagggtcataacctcagacacagctgctgccttggaccaagggcaattctgggagagggatccatgtatgagcctgcagcaggcagcaccctagcactggggaaaagggcaccctgcgcctgaataggagatgggacagcaaaccacagcatccactacaggagactttctaaaacgggagcagccggggtgttctggagtgtgcaaatactgacaaggagagcaaagtgtcctaggcagaaaaaacaccaatgggaccttcaaggagcatccggctttaggaaaactacgagagcttcagcatggctgcaaggcagggcaaggggaggggagtggggagagatgggacaggagagtgggcagccagatccaaaagaactccacttgctgagctgaagggtctggattttgtcttggaaatcagggcaaagtcagagaaggattttcaatactgtttataaagttattttctaatttatattcataaagtttgggagtacaattaagtacaaggagaaaataaaatacacctataatcccaccaccccaatataaccataattaacattttgatggtttcctttc

SEQ ID NO: 675871 - DNA, 1146 bp, Homo sapiens
caaatccgtagttcaccctcttccccatgctattctgcctactatgtgatcccctttcacacttgctcattcaccatgtaccaaaagccaagcactgggaatggtgctgcagacacaaagaaaaacaacgtactgcctcctaccctcagggagatcccggtcactgggggagacgctaggaccatgctctgcaagagtgcaatgggagaagtgcttaaggagaaattaacaaagagcaatcaatagcccagaggatgggactctaacttagggactgaggtaaggggtcataggacgggtactcagttacrttccccaagaaacagagacagatttgtgtgcaagaggtgtcctggatcagtgctcacttgtaagaaagtgaaggagacaggactgggcagagtgagagatgcggtcgccaaagaggcctcggcggatcccacaggaagtcagctctgaagctggaataacctttctgaggggacacgaattgagacaagggagtcagatcgtggtaccctgcattcactactccttagatgtgggcagtcccacaagggggagggtcataacctcagacacagctgctgccttggaccaagggcaattctgggagagggatccatgtatgagcctgcagcaggcagcaccctagcactggggaaaagggcaccctgcgcctgaataggagatgggacagcaaaccacagcatccactacaggagactttctaaaacgggagcagccggggtgttctggagtgtgcaaatactgacaaggagagcaaagtgtcctaggcagaaaaaacaccaatgggaccttcaaggagcatccggctttaggaaaactacgagagcttcagcatggctgcaaggcagggcaaggggaggggagtggggagagatgggacaggagagtgggcagccagatccaaaagaactccacttgctgagctgaagggtctggattttgtcttggaaatcagggcaaagtcagagaaggattttcaatactgtttataaagttattttctaatttatattcataaagtttgggagtacaattaagtacaaggagaaaataaaatacacctataatcccaccaccccaatataaccataattaacattttgatggtttcctttc

SEQ ID NO: 675872 - DNA, 1146 bp, Homo sapiens
caaatccgtagttcaccctcttccccatgctattctgcctactatgtgatcccctttcacacttgctcattcaccatgtaccaaaagccaagcactgggaatggtgctgcagacacaaagaaaaacaacgtactgcctcctaccctcagggagatcccggtcactgggggagacgctaggaccatgctctgcaagagtgcaatgggagaagtgcttaaggagaaattaacaaagagcaatcaatagcccagaggatgggactctaacttagggactgaggtaaggggtcataggacgggtactcagttacattccccaagaaacagagacagatttgtgtgcaagaggtgtcctggatcagtgctcacttgtaagaaagtgaaggagacaggactgggcagagtgagagatgcggtcgccaaagaggcctcggcggatcccacaggaagtcagctctgaagctggaataacctttctgaggggacacgaattgagacaagggagtcagatcgtggtaccctgcattcactactccttagatgtgggcagtcccacaagggggagggtcataacctcagacacagctgctgccttggaccaagggcaattctgggagagggatccatgtatgagcctgcagcaggcagcaccctagcactggggaaaagggcaccctgcgcctgaataggagatgggacagcaaaccacagcatccactacaggagactttctaaaacgggagcagccggggtgttctggagtgtgcaaatactgacaaggagagcaaagtgtcctaggcagaaaaaacaccaatgggaccttcaaggagcatccggctttaggaaaactasgagagcttcagcatggctgcaaggcagggcaaggggaggggagtggggagagatgggacaggagagtgggcagccagatccaaaagaactccacttgctgagctgaagggtctggattttgtcttggaaatcagggcaaagtcagagaaggattttcaatactgtttataaagttattttctaatttatattcataaagtttgggagtacaattaagtacaaggagaaaataaaatacacctataatcccaccaccccaatataaccataattaacattttgatggtttcctttc

SEQ ID NO: 675873 - DNA, 689 bp, Homo sapiens
ccatgccttgattctggttgagagtcccaaaggatgacagaatcacttcccttgggcctcactgccaaatataatccacttaatatcctccaagtttgaggccataagtctgtggcgcatccagatgcgacccccgaggcgatagcatcaacgtgggagccaatgcaactcaaaagaaggatggggcttcgcacctcctccttgggtaggaagtaggttagctgcttggaaaatgcaggaactggcactgaagagatctgagtctgaacatatccctcacccgtcagtagcactgggaccttgtgcaatgttagttttcccttccctgcttcaacttagatggctcgggccctgagaaagtgattcacagctgaaaaataaatcaaaggcctcgtgttctaaaaagagtttatggaaggagaggcagctgatgaaagtctagaaagaaggctgaacttttccaatgagcacaatwagccatttttaccctgcctgtaatcctcggggtggaatcccgcgagtggccgaggcgagcacccttcccgccgttcctgtttctaaggctaaatgatgtcatgccagcctgcgtgagcatatcaatctgtatttctgagtatgaactggatttgaggggtgcattggtgctccagccctccagatcagtaagacaaccaatgcagaaacaaggg

SEQ ID NO: 675874 - DNA, 1371 bp, Homo sapiens
atcccagtgattcaggaggcatttgagagaagtaaagactgaagatgattagtgatccaaccagaaagaggggaacaaggtgtccctagttcttttcacttcccagtgaatgcccagggcacatgagagacagaaaaaagaggcatcccccttccttcttccatccttatatccctgagtcccagcgaccttggcaggatgctgcccatgggtgccaatgcagctttcatccatgttaacagggggcctatggggtgggaattatctatgctcacccacacactgcctgtccccgctgctgtaggtaacctttgagttccccagacctcatatgtgccatggatactaatatgacctctatccatgaaatgggggggcctaattggcaggaattagtcatgcttacctgtgctgtgccccttggcttcctttgtgatctgcctctggattccttagatccagttttccttactaggacttcaaccagaggcatggaattgagtttggggcaaaaatgtgtcttgggagggctcgtggactcactaagacccaggcggtcctcaccaggctgcagccagcagccggtggggtcgctcctctgctgctgcctccccacaagtcgaagcctaaggcgaagctgtggagctgggtgtcctcctcaaacaagggagagaaaagggggtcccatgaattggggtcctggcctagtaggacacctttccaaaaacacctctcacatgggaaatctccctgtattcgcagggttgtgttaactcctgacatggtggagaaaagaaaaaagagcttaaataaaggggcaggaaggtgcctggaggaaaaaaaaaaaacccttgctctatgcaaatgggttccttcaacacagtaaaacgttaagttgttgtttgctccttctggttcagactaagctggaccgctctgccaggcaaggaaaagactctgtgggcacatgctgggagggtgtagagggtgggaaacactggccagttggccccacasggctcctagcccttaagatcaccctcgggcctgggcggcagctgcggctcactcccatcctgaggccattggacgcagcatgtgcatgcggtggacatgggcacgcaccgcagctgggaagggagggaggcagggagccactgtgtacctgtccatccatcatgcatgcctgcggccattaggacgggggtggagaacgtgccactaagaagagacagaaatcacattgttctgaattgcgtatctgatggctgggccaaacgctcattctacctggtaataactctgcagtttgcagcaatacccttaacagtttaaacaaagagacaggagccatttcaaaccatgaaagaa

SEQ ID NO: 675875 - DNA, 653 bp, Homo sapiens
ttttcttctaccacttttatattttattttctaacatttacatttttagtccccatggaatttagtttggatataaggtatgtagcagattctaatttcattttattaattattattattattaactatagtcattttatgcaatactgtttataaaataagacctccttttcacattggtgtgagataccatcttaatttcacactgtttccatttattcttgaatatatttctagatatttctagaaataggaatatttctattgctgtggcttttwaaaattttttaatttttattttactttacttttagagatgagatctctctgtgtcacccaggctggagtacagtggagccatcatagcttactgcagcctcaaactaccgggctcaagtgatcctcccacctcatcctcctgagtagctgggactatagacatgagccatctcacccagccctctgtggcattctttaatgtattaattagacactttaaaaattgtttgatagtatgaatattattttatttttccagaagaactgcagattatttttgtcattatctcctaaaaatttatttgaatcataaaaatgcttacaggttaacttaaagagaatgaaaatccttatgatatgtcttctacatttat

SEQ ID NO: 675876 - DNA, 593 bp, Homo sapiens
cgctgcaaggctgcgagttcccctcatcaagccagggccttttcccgctgctggcgccagcgaacttccttagattctccacgacacgtggctctgcgtgtctccatctctgacgcagctgcattctctgaaagctgatgcctgaccttggcatctcctcagcactgctcaggcgcaggcagccgctgtgccctgagaatatcctccaggygatccggcttgagtccagctcaacaagtggaagtccagggacctcccgatctgtgcgcaggaggaggctggcagcgcctgggaaggtgtctgggaacgtgcagggaggcgcctgggaatctgtggggaggtagctgggaccatggggaggtacctgggagcgtgtggggaggcgcctgggagcgtgtggggaggcgcctgggagtctgtggggaggcgcctggcagcgtgtggggaggcgcctgggagtctgtggggaggcgcctggcagcgtgtggggaggcgcctgggagtctgtggggaggcgcctggcagcgtgtggggaggcgcctgggagtctgtggggaggcgcctggcagcgtgtggggaggcgcctgggagtc

SEQ ID NO: 675877 - DNA, 1362 bp, Homo sapiens
agaagcttcagccgtgaacctaggatgggtgaggaaagacgtctttcccctactgagcagctctgttggaagttttgcatcctttccttcctcccctgttggctgctattcccaggaccccttccttgtccactgtccctcccttcccagcctgaatgcgacaatggagactgccttgggacggcttggagggcctccactggccttcccttctgtgcctctcttgctcttcctgctgtccccacccctgtgggtctgcatcctgcagaggtgcacacggttcctgtgggacagtagagaaagcataagctatacacaggctgctgagcaggtgccacaygctctcgtgcttaatctattcctggacctgggctacagaaacacgccaagaaaaaggtgtagaagttattaccctgaaaggaaagaatcatcaaaacgaaattcaacaggtgtcacccaaggatgttggcctaggaaggcactccctggatgcggcgccgtgctgtggggtgcctgcggctgtggggtgtgcctgggcccgccatgggtccagggcagcctagggcgggtgtggatgggagcctgcagggctggggtctcagtggagcgggaatcctgtcttggccccaggatcttcctgcagtgcttcaggtaacatttttctaggctgcaggaagatttccaggagcttccttgagatggctgcagccttgtttgcgtccttggtgaatacgtagatgtttcacgattcttggtcatctctgaatccgggagatcgacgctgagtcctactggcgctcctgctgcctcgctgggctcactgtgggtgtccagcggccctggaccagcccagatgcagcctctcgcctggagggtattcaggaaggaggccagtgtcaagcaactccaccctatggattctgtttcagataaaacatgctcatttggccaaggccaacacaggcaccctccccctgctttgtctggacgtaagcagctgaggcttggccctgcaccgtcaagaggtctacctggctgcagaggctcagcctcccccctgagcactgtggggtgtcttccaccctccccatcacatgctaagctctttccttgtagccatggggcatcgtgacaacatatttagcaaaatgccacagctgtcatacgtgtgtttctccagctgctgcttctgagccagcttcccaggcctcggatagaccagagttcgctcatcatgccgtctcttcagtgactgattacgcgggaattcgggaagtgccgactttccccggatgactgggtttcttgatgtgatactccgctcagcaaatcctaccttcctttccctttgcaattcttgag

SEQ ID NO: 675878 - DNA, 1462 bp, Homo sapiens
gacacgattgctatcctcaaggagtttacagtctgggggaatttgaacatacacgtgctaaccaaattctttggttatgtgattgtgtaagctgtaattgagtgtaatctatttcactttacaagctgacaggagttagcagatttaagatgagccatgggcctttttgctgtcctctcaagaacttgttcatagaaaaagctggatttcagaaaatcaaatatttcttcatgttttatggctmagttgataccaaacattcaagcatttagatctgcttttaaaatcatttcaaaatatgtatatattagcttttttcaatacaacccttcttctccttgctctggtacttatgtgaatatctacaagagggctaggggaagatgaagaattattttgggacaagctccatgagagcagaatgcaaacagatctgtaagagttccaaagatggctacataggtcaaaggacaatgcaaggattggctctactcccttgatactttgagtcatttaaaatccagcacagttgatgtcatctgggaggctgctagaaatgcagaatctcaggccccacctaaattgtgctgaatcctaatttgtactttcaacaagacacccaggtcattcaaatgtcagtatatatctctctccaaagttccacactcaggtcagcctcccagcctctcttctctctattgctaccctttcatgacccccatggcagcctccttctctctattgctatcctttcatgccctccacagcaggctccttctctctattgctaccctttcatgctccccccacccccatggcagcctccttctctctattgccatctttcatgccctccaccccaggcctgtctcacccatcgccctcttcaaaaaccctgagttgttcatgtctgtcccttttccatttcccactattcttttgctctctgatgtcttttctcacaagcatcctacccccacaaataaaacatttcatctcattgcacacactttgagattgccatagataacaaatgcaacagatattgaaaaggtaaaatcaacaggactcagtaattgcttggataattacaatattctctaatattaatttctttctatgaagcagatagggttgttatccatattcaaagatgggtaaaccacagctcagaaaggctacataacttgtttaattcacagacctggaaagtggcaaagacgggatttgaattcaggaggtctgactctgggacttggacatttgactcctgtactggtgtgagaaagtaagagaagtctgtgatgattcctaggacttatattaattacctgcagttgatgaggccaccaacagaagtagaaaaaatagatgaaagtgtagagcttttgttttgtggggtggtatgggtagttctaagttaccgttacttttatattaaaactccagtttatttctaagg

SEQ ID NO: 675879 - DNA, 655 bp, Homo sapiens
taatattttcctcctcttaacagtcaatgtccatgatcctgagttattttcaacactgatccttttatgaaatcatttgagtatttgtgtattggctgtctccctcrctggaatttgaactccataagggtagggggccttatttgtcttaatcttattcactgctgtaagctcagtgccaaaccattgtatagacataattagtgcccaacaaatactttttaaaataacttgaataaaaggataagactctcctaagcaatatctccccatcttgtccttgtgcaattatctctcagatcaaaatgtgagattttgcatttatcccttctcatttcatcttgttagatctggcccattgccctcatctatagatctctcttgggtgtgactctgaacctgccccctgccagtggatctgcaggcccttcttaccactgcatgttagtaggcaggcagccacatggcttgcactgtatcaattgacactcaaggttccacacttctttaatctacacttcttgttcattgcacccccttttcatatgagcttctacaatctccatagttgtttacaaagcaagaactgagtgtcatggggaataatgaacaaggattcaggagatctggatgctagctccaattccactgctgt

SEQ ID NO: 675880 - DNA, 655 bp, Homo sapiens
taatattttcctcctcttaacagtcaatgtccatgatcctgagttattttcaacactgatccttttatgaaatcatttgagtatttgtgtattggctgtctccctcgctggaatttgaactccataagggtagggggccttatttgtcttaatcttattcactgctgtaagctcagtgccaaaccattgtatagacataattagtgcccaacaaatactttttaaaataacttgaataaaaggataagactmtcctaagcaatatctccccatcttgtccttgtgcaattatctctcagatcaaaatgtgagattttgcatttatcccttctcatttcatcttgttagatctggcccattgccctcatctatagatctctcttgggtgtgactctgaacctgccccctgccagtggatctgcaggcccttcttaccactgcatgttagtaggcaggcagccacatggcttgcactgtatcaattgacactcaaggttccacacttctttaatctacacttcttgttcattgcacccccttttcatatgagcttctacaatctccatagttgtttacaaagcaagaactgagtgtcatggggaataatgaacaaggattcaggagatctggatgctagctccaattccactgctgt

SEQ ID NO: 675881 - DNA, 368 bp, Homo sapiens
gctttatatccccaatgttaggtgctcatgaaatgctgaatgagcaaggtaggtattatccccatttttcaggtaagaacactgaggctcggaagttacatagctagctaaattataaaacccttgtcccagtactatactagtataggttgtccattccataattactgaaattattaacttcaatatgagttaagaaaaaaatctcagggcatagtggcttgtgcctataatccctgcactttgggaggtcaaggcaggakgatcgcctgtgtccaggagttcaataccagcctgggcaacatagcaagaccctgtctctacaaaaaattgtttaaaaattagctgggcatggtagcatgtgcctg

SEQ ID NO: 675882 - DNA, 630 bp, Homo sapiens
gctttaaatgctgcatctttgcagtagaaagattaggattgagccaggctgtgagtcaggcagaaaaaggcacacagagggggatgaaagaaagcactggagagtcttgtcatgctttgcccttgaaaactatgccaagacctcttttktgtttttaaatgaagaaatccatcatgttttgtgattgctgtaatgactcaggatcttccaccttccttttaactataaaccgtagcgtagttaggtgtttgttttctttgtatcatgcttgcaaaaagtgacgaaataaagttaaaaccctttaactgggactccattacggttctgctgttcagtgaccagcttgttcattattctcacaatattatctactttcttcatttcagtctgtctcttagatcctgggcttctgatgtctttccatggcggatgaatacaatttaaaacacgaaagctgctggaggaaaggtttaacgttccccctccccaaggtgaaatctttgcctggcctcagtcactaagtctctcaggagcggaaactgaatggacattccggagacggtgaataagaatgataaacggtggttggggagaacagcgcgtttcttccagcggaggactaggcccaca

SEQ ID NO: 675883 - DNA, 1555 bp, Homo sapiens
tgttatgttaaagaattacttcatccccacgtgaccatctcaccttataatcaaacaaccctaaatccctcactaacctacccctgccctcactaaacttaataataaatgctggtatatccagtgcattggcagcattgcaggaccagaaggcggtgaccctcctggacccagctttcactatcttgtgtgtgtctattatttatcgacctgccgatctgcctgggaaaagaaagagagccccgctgcattgcgggctgctggccagatcccacaataaatacaataaaccatttataattactttggtgctcaaataaaatgtcttttaagtatagatgtctctatacatcacaaacaagggagcaatgcaattgttatccttggttgtcaatgacaaaaataccagtaatatctctcagttgcattttcttttttcaacagttttcccatctataaaatttatatacaagaccttgcttaaaatttccacatttcacaactgatgatgggtctttcagataaacaaatctggggatggaatgaggttccttctggcttacttcctgccttccatgaataggcaaaactcaagacttcccccagtagtctccatggatagagctgctaaataattagaagggtcaaaacaacaaccgaaatgatataaacactttggaaaatggtatgttttttaccaaatatattatccaggtaaaaagttatcccatctggaaaaaactacaaaaacttttaaaagaggccaggcatgatggctcatgcctgtaatcccagcactttgggaggccgaggtgggtggatcacctgaggtcgggagttcgcgaccagcctgactaacatggagaaaccccgtgtctactaaaaatacaaaattagccaggtgtggtggcgcatgcctgtaatcccagctactcggaaggctgaggcaggagaatcgcttgaacctgggaggcggaggttgcagtgagccgagattgtgccattgcactccagtctgggcaacaagagtgagactctgtctcaaaaacaaacaaacaaacaaacttttcaaagaaaaaggcagacagatctaagagaaaatccagtctactcttccttccacctgatgaaaagcttcactgatttcttaggtacaatgaagtctgagccttacactattttcatgtctgtttgtgccatttaggtattaggaaaagtgaaatatgaccaaaattaaatggccaatcagttgtttggtaatgatatctaagaagaataytctaacagttgagaaaaagtgccacatcaacgtgcataataataactacataatactctttttaagttaaaaaaacatgccattttaatatctgattgttgtactcacagaaaaacaaaacttgtacaatttaaatatgggcatattctttgaaaaaatggtactggtatctcccttctgtttaaagcttcaatcttttcatcaataggagagacaaatttctatctgtttcatcgaagaataaaaagactagacctaagacctaagaatactatg

SEQ ID NO: 675884 - DNA, 649 bp, Homo sapiens
tgaaccccatttctgaggggctctcgactctgttcatccctatgccccagcctcctccaactggagtagcctcagtcctgactccctcccctgcctggtttctcttaggatttatgccaagggctataggtcagctctttaaaccctgtagaaatggagagaggaggctggagtactcctatctcagatctggaaggagtccgggatccccctactyagctcccaggggactgccctaagctagaagaagtggatattgggatctctgactcaagaggaagaatctgaggttccctttggcctttacacctcccagatgtcattctccactctgccccgcatcacgttctccgattacttcagcaggtacacggcgctcttcctcaccatacattggctctacccccagcaataagcctattggatgttgctcttggtccgcctcagcccttgtgcccattggatgttgctctcagccccgcccctgccactcacacccactggctattgcctctggctccgcccacagcacaagtacccattggagggtaccactggccgcccaggcactcacacccactggatgttgttcttggccttcttgcggatgagctggatgccttccagcacgttggtgatgtcatagatg

SEQ ID NO: 675885 - DNA, 649 bp, Homo sapiens
tgaaccccatttctgaggggctctcgactctgttcatccctatgccccagcctcctccaactggagtagcctcagtcctgactccctcccctgcctggtttctcttaggatttatgccaagggctataggtcagctctttaaaccctgtagaaatggagagaggaggctggagtactcctatctcagatctggaaggagtccgggatccccctacttagctcccaggggactgccctaagctagaagaagtggatattgggatctctgactcaagaggaagaatctgrggttccctttggcctttacacctcccagatgtcattctccactctgccccgcatcacgttctccgattacttcagcaggtacacggcgctcttcctcaccatacattggctctacccccagcaataagcctattggatgttgctcttggtccgcctcagcccttgtgcccattggatgttgctctcagccccgcccctgccactcacacccactggctattgcctctggctccgcccacagcacaagtacccattggagggtaccactggccgcccaggcactcacacccactggatgttgttcttggccttcttgcggatgagctggatgccttccagcacgttggtgatgtcatagatg

SEQ ID NO: 675886 - DNA, 2326 bp, Homo sapiens
ggtggactgccatgcccggctcggcccctttttggtccccagagtggacccttctcctccccacagaggggaggcatctgatggtggcttcagcagacaacctggagaagaaccactcagggtttgtcttgctgacgtcctatagccagcaaaacccagggcaggagaaccctggctctttagggcaggtgggggagagggcatcttagcagggaaggagctagggtaatgccagaagcaacccactcagcagggccactcagcaaccccctggcgagcagaaaggtggcaaacaacacatcttctgggcagactcctttgaagagaggtagaacataccagaaaggaatagcattgtgacagcrgggccgggtgggtgtcctgcttctgacagatctagtgctgagggcagacgtggtgcatgtctccaggtttcaaccacacacaaaccggtcgtgaaagtttgaaagatatttatttaaaaacagaacaaaaaagctttggtatttcaaaacctgacaatcatcaatcactagaaagttaaacacctcccctgaagccccaaagtacaaaaccacagatgtccacaggctcctaaaaaagggcgtgcaaacccgaggatgacagcacaacccgcaccctcctacaggcagcagcacagccaccctggggggccccggcccagcctcgggaccgtggggcctccgaacgccgagatggacatcaccgccaacactcaccatctacaggggatgcaaaagccatctagcaaaatctcaacaaaaataaattaaaacttcattaagaaagaacacgttaaattaggaaaaggacacaacttttcctagacaagagtcttttcaaaagatgatctatttcctgggacagaagaaagggggaaagtggaaggagtgagttccatttcaagtatttgccatacaggttcattttattgagtggaaagcttacaaaaggtccactggccccttccctccccacgtgacactcattccttccaatgcaaactctggtgtatccacactcacttctgcgtcaccggtttcccccaacaaggcacaaagggcgggtgcttccaaaggatcccttgctcctggcagcgggactttcagtgctgggtgtcttgtgcaaatggtggctgaaagcaggactgttagttcactcagacactgggatcttcctgttcaattcacaaaacaagtgtgattactgttcactgccaaccccagtggccagctatagaaataggctacggagacaaccctagtggcaccacaccctggctctgacccagccttgcagaattaccacggactcagtggcctgggcccttctggagctgagtgttcactggctccactctggcatggcccagcttgagcctaagtcaaggagagatcggtcagtaccccatgaaggtagtttggctcatttgcccaactgtgggaggaaccgaaggtgcactcaagagcgagggcagagaagccaccaagcagcagggaaaagcagccgcctgccaaacagacggcaaaacccacacgatgcacatttggcacctgtcctagtgcagctagttcagaggcggctcacaaggaaggcctctgtgcagtcctttttgatctgacttttgatttttcttcgaacttgaggaactcagccctgtctcccactcttctgctctttcaggtcaagttctgcttccttttccaagtcctggtcttgggccagaaactagaagccgcaggcatccctgtggatgtgatgggacacttcccatttctccagggtgggatctgggctctctgactacttgggggcacagacgcagagcctaatatacctctctactgtcactacagtttaaaaagagaagataaaggagaaaagaagagaagggaggggaggggaggaagagtagaggggaggagacgggatacaggaggagagaagagaaagggaaacagctcagctctttgggaaacattttcttctacaactgctaacaaaggcctccccctggaatccctgctggtctttctcctgaggaagcacagaaggccgggcggcagggcacagtaggcagcctcaccccgcgacagcaatgctgatgctaagatgctgccccgatgacagtcttgcagcaatgatggccaaaatcaccgcttccaggggcaaacatgtctcaggaaacttgagggcaatgcttctgtcctgtgtcctatgctaacgagatggccactctggtccgaggcctggagcaaggggctgacctctgcatgccatgaacaggcacatggggggaagctgg

SEQ ID NO: 675887 - DNA, 2041 bp, Homo sapiens
tagttttattttttacatcccactgccttcacagagttctgccagagtcttcctcattcagagtgaaatttcaagggatcttgtaactttcctcgtcattttcatgaccagtccagtctaatggcaaagcttccgtcttccgtctaatttaaagcttctttccctccttcagctcagaacacctgcacgggcatagaagcttgaggtatggtggtggtgagctgggaagggtcaggtagggagaagagaagtagggcaaggacaacagagggcttttttgactggtagagttggaatccaccagcatgggtgtgaccagtatacatatgctatcttttttttttttttttctcatgggagtgctttggtggatttcttggagattccccattagtgactttggattggaagcccgggcatgggcgatgtcatatctggctggtggttgggtccccgctcagggtctctgtattcagtggtatgcctgtgggctctttctgctgcggtcggctcagccgctgcatcagaccttatgcatagggcacttttcatggaggctcacagacagctgcggcgtgcttgggtgccaatctaggctacagcaaactcacaatttttctactgttacctagcacactttctgtgtgtgcctgtgtgtgtgttttctcagctgcactgctatagccttttccattttgtctttaccctttagggtttgtcaggtatggatgatggttagtctctaggtccctcaaatccaaggagacacatgcaaagttctccacgtggcttcccaaatccccctacttctttgatgggagagccactgtttcttttccctaggagtgagggaaaggcaattatctaatgataattcttcaaaggggtcatgtttccaagaacatgatgaattcttagtttttaccaatatagcataaaggagagtgatgagaagactggtctcactgtttcacagtctgcccagcctctattctttttagcctttggaacctctactgacaatagataatgaatgtaccacttgacattctactcctattcacatctttagagatagcagtgttacctatgggaaggaaatattaaggcgagcaatccataagacactaaaagtagtgagacccataggagagagggaacttggaagaggatgtgtgctgggtttcaaggatgaagggcatatgtgggaaagaggaactgtgagggcactgagtgcctgactacagagtgagctggtcatgtagaggcccttggtttcctgggcagaggaagctacagggaatcctagaatccctaagcagaataaaagctactgtgtgaacatgagaggatttagagaagatgtattaacgtaggatatgagtgatttgttcacagtgaagattcataagacaaatcccaagttaaaagcagagcatgttcattgctacttgacgtgttggcatctacacagagctgtctgatgataatacttrcaagtacctttgtaatccttcctttgcaccaggtcctcttctgagccctttccctgtaataactgatttaggccttacagtagctctaggaggtaagtactgccaattattcttgctttacacatggcgaagttgaatcagagagagattcaataacttgtccaagatcaccagccagtaaatggtgtagccaggattagtctggctgcagggtctgtgctcttaactcgtctactctttcgataggtgaatagtgtgtgattaagctaactgtatggctatgcttataggacaggaagaggctgcagcttagctagagcccagttttcctctgagaaggaaagcaaaccctggtgactctacagtagctttttgtcactggcctgagaccactgtgttctactttctactaaagagctggcattgcttcttggggaagctctgagcagggaatggccaataaataggcctctgtagaatgcaaaagggtggtgttccttctttcctcgggcactcgctttcctctgaaattcctggaaaagaaa

SEQ ID NO: 675888 - DNA, 673 bp, Homo sapiens
aataatgccaaggaggttgtgacacgaatcagcacaagcaaaacctcatgctttgtaactcacgcatgttggatacactgtgtgcattaagaataccctgctcctggccaggcgcggtggctcatgcctgtaatcccagcactttgggaggccgaggtgggtggatcacgaggtcaggagattgagaccatcctggctaacacagcgaaaccccgtctctactaaaaatacaaaaaaattagccgggaatggtggcgtgtgcctgtagtccccgctacttgggaggctgaggcaggagaatggtgtgaacccgggagatggagcttgcagtgagctgagattgtgccactgcactccagcctgggcgacagagcgagactctgtctcaaaaaacaaaaaaaaaamcaaaaaaaaaaaacaaaagaataccctgctcctgattcaggagagggcatctaaagctttagaaaacattgaattatatttacatacattgtttttcttcttacagcattcctgagggttattccattgttcttgtttagggtgaatttggtagaagactcagttttttatttgcaggctaaattggattatctttgttacttgcatttttacctgatctacccaggcatataaggatagatttgtttgtgatgtaggcagcggtgtc

SEQ ID NO: 675889 - DNA, 673 bp, Homo sapiens
aataatgccaaggaggttgtgacacgaatcagcacaagcaaaacctcatgctttgtaactcacgcatgttggatacactgtgtgcattaagaataccctgctcctggccaggcgcggtggctcatgcctgtaatcccagcactttgggaggccgaggtgggtggatcacgaggtcaggagattgagaccatcctggctaacacagcgaaaccccgtctctactaaaaatacaaaaaaattagccgggaatggtggcgtgtgcctgtagtccccgctacttgggaggctgaggcaggagaatggtgtgaacccgggagatggagcttgcagtgagctgagattgtgccactgcactccagcctgggcgacagagcgagactctgtctcaaaaaacaaaaaaaaaaamaaaaaaaaaaaacaaaagaataccctgctcctgattcaggagagggcatctaaagctttagaaaacattgaattatatttacatacattgtttttcttcttacagcattcctgagggttattccattgttcttgtttagggtgaatttggtagaagactcagttttttatttgcaggctaaattggattatctttgttacttgcatttttacctgatctacccaggcatataaggatagatttgtttgtgatgtaggcagcggtgtc

SEQ ID NO: 675890 - DNA, 2124 bp, Homo sapiens
tcccaatctgcctccatacagctagagattaaaattaatactgtaaaacatctggcttagggcctggtacagaataggagcctaataactgacaccacacatttctatgaatgaaaaattttgggaaataaaaatattactgatggagggaatgaagtcaattagaaagaaaaagaaagaatggggaggacagggtagcatggcactcagagcaattttttgctcaatcagaaattggaaaatgagtagaatgtatagataagacaatgatgaacataagcaatcaattttttggtttaattaaggtcaagttaacaacatatcccaggggactaaaagttacaaggcactcagtaagtgtagttaaacaccatctcaatggacccttgggacaatctccattttcaagaggatttggaagctcctgaatcaagaagtgaagtgcaaaactaaaggtttcaataagactagtggaagggaggagagagcaagtatgttttacagaagatacttcaggatagatgataaatcaggcttggaggacaaacgcctctctcactatcatcttttctcatctttggtaattccatactggcccgagtggctttattctaacttgcttactaatgcttcaattttaaaaaatgtttttgctgatttaacctcattgaaacaggaatcaagtatataaaatacaacgaatatttaatggaatactcatatattttatcaaacaattttacatggtaaatataaacttcctgttactttttcctttaaaaaaactattctcaaatatatcatagtgtatctcatatccccaccaccatgaaattttttgactgagatttgctcttttctcttgcacccgattagtagttttgtttccgaatccactgtactgagtcactcacrtctgtagagccctcatggtttttcctcaccttttcagacaatagaaatatgatcattgcaggcaatgggttattatctgcaactcccaggagacacagttccttagatattccaaatatttcatcacaggccacagcattgtacatttaggaaagaatgggaaagaattgcatatccacctgtgcatgatatttctgtagttgcaaaagttattctagagaaattgcattttcctcctccttcttatcatttaatagcatgctttgaggtgcatacaccctctgggaagatgtgctctctgcccaatggggttgctgctaagaaactctgggaagatgtgctctctgcccaatggggttgctgctaagaaactctgggaagatgtgctctctgcccaatggggttgctgctaagaaactctgggaagatgtgctctctgcccaatgcggttgctgctaagaaaaggccctgactgaccctttccatcaaacccacatcaaccctttttgaagaccgagcttttaatcatgtacgtatttagctctgaattgaaaaataaatggtatccagggctaagtgacttagcaaacaaatgatgcgtggaaattacatagccatgtactctcttgaattgtcccacagaattggtttaatgagatggagatgacaattaactttttccaattaacatgtctctaattcaacattcagttgctgaatgtcaaagaaagctccacaaatcattcaggggtcaacaactaaatgctatgagcagagtttttaatgatcttactttctaattttaatatgaatttcaatattacattaacatcctcttcccatttcaaaacattagaccggtgggcactgcccctcctttgctccaaaaatgcagagaaaacaatagcatttagaaatctgagaacttcaaagaacttctttatttttgtctagataggaataattgcaacagtccaaggccatgacatttggggtcaaaagaattggatttgaatcttgattcttcccttcctagccgagaggcattctgcaaagtgcatagtctctggttcattttctgtaaagtgggagaaatattaaccattttttacagagctgtcatgaggatcaaataggttaacatacataaaatgtctgacaatgtcaattcctcctattttaatgtaaacacaatattgtgagttcaaa

SEQ ID NO: 675891 - DNA, 573 bp, Homo sapiens
tatctggaaaaatgtggcagtcctataaaatattccactcatatatgtaaaagaatcactgttactaatttacagtccttcagtgttctaaatatagagtttcttaaacataggccaaaatgccctcttttttttttgagacggagtctcgctctgttgcccaggttggagtgcaatggcacgatcttggctcactgcaacttccgcctcccagattcaagcaatcctcctgtttcagccytcctaggagctgggattacaggcacgtgccaccatgcccggctaatttttgtatttttagtagaaacagggtttcaccatgttggccaggctggtctcgaactcctgacctcaggtgatccacctgcctcggtctcccaaaatgctgggattacaggcgtgagtcaccgcgcccggcctgaaaatgccctatttctaacatcatcaagcttcccacttaaaaacaggtataactagttacaaggagagaagacaggaagctcctgtggttttaaggtgccttaaatattcattagaagagcttctttaatccaatattttacccaaccaatt

SEQ ID NO: 675892 - DNA, 661 bp, Homo sapiens
caagcagtggggtaattaacttccatttttatgtctgagaaaaacgaattctagaatgatacaactctcaagtttaataataccagcccttcattctaacaacacacacgtatcattactgaatattttttcaagtcttttctcttytgtttaacctaattaccttttttgtttaacctaattgaccggattctcacctgctttcttgccactcttcagcacaggccactttaagcattccttggtagttgtttacacatcttaacgcatctgtagcattgaactcaattccaaagccagacccatgctggattcttaaaacgttgtctccaaacatcatttcagggagagatggcatatgtaattcatcggctaatctatacgtaaccaaaagtcgggtgagataattttatatcgctgttggcatttttgtttcttttccatcccaacagaattcttcctacttgctgaatgagttacacagcacatgatttaatcaatatgatatatttgcaaggtctataaaatgctttcatcatccattctttcatcatcatatggcactgtactaagtagtgggctaaataagataaatatacaaatacgtaatataatagcttattatactactataatatatagcacacagatattactataa

SEQ ID NO: 675893 - DNA, 661 bp, Homo sapiens
caagcagtggggtaattaacttccatttttatgtctgagaaaaacgaattctagaatgatacaactctcaagtttaataataccagcccttcattctaacaacacacacgtatcattactgaatattttttcaagtcttttctcttttgtttaacctaattaccttttttgtttaacctaattgaccggattctcacctgctttcttgccactcttcagcacaggccactttaagcattccttggtagttgtttacacatcttaacgcatctgtagcattgaactcaattccaaagccagacccatgctggattcttaaaacgttgtctccaaacatcatttcagggagagatggcatatgtaattcatcggctaatctatacgtaaccaaaagtcgggtgagataattttatatcgctgttggcawttttgtttcttttccatcccaacagaattcttcctacttgctgaatgagttacacagcacatgatttaatcaatatgatatatttgcaaggtctataaaatgctttcatcatccattctttcatcatcatatggcactgtactaagtagtgggctaaataagataaatatacaaatacgtaatataatagcttattatactactataatatatagcacacagatattactataa

SEQ ID NO: 675894 - DNA, 1375 bp, Homo sapiens
tgaaarcatttatactaaacaatatgtttgttatgaatagtgctatattgtacacatttcagagaaccttttccctgctaaatcttcacgtgactcttggacacattgtctttgtgaccactggagcacattttgaagtcatctagtagacttttccagaacacatatttttcacttatatttatattgtttgaggtgctgcaaacctctttaaattgtgtacaacatttgcaattgttaggttatacccacctgggaataattactaagtctgtgctcatttttgtttaactttctgatatatttgtttcatttaagtaaacctctagaagtatccaaactaggattagtagaggtaattttgggctaatgtatcttccccaaacattgttctgttgttcaaaataaggtaattacgaagacactggtaacatgagtgactttgttaggacttgagtataaatcaggctcctctttcctgaggagtgcttaatcaagaaaaaaaaaggcttttcttcatataaaggcttatgtaatatacaggctaccaatctttggctttgtaacttcgtttgactatagtgcaacctgatatggttgacttattaggttgaattattttataccgctacgaggcactttttgtttaaaataatgtatgcctcttccagaagatccctgcacatcacacattcaaaactaactagattaccaggacatgggaaaatggtgtcatatgtcttagttgctgaaggttcactttatcttgaataataaaattacagatctacctagaattgaacttaattgcacaatattgtatttcctttgccaattaacccaatggaggtttgaagtaatatatttgaaaaatgctttgtaatctgaaaagcaccaggcacttgttaatcgttgtcattactatattggaaaaactacctgtggccacttgcaatggagaaaaaagtcttaacactgagcaaagaacagctcaacccttaggcaagtactttatcatcaaaacattttccgatgaccatgattcacagcagatgtaaactaactccagtgtttttcaaactagtggtcttgacccacgggtaggttatgacatcagtttattggttggacatcagcattttacaaaaatgaacagtgcaatagaacataacagaatatactagaaaatagtaatatcagaggtagtaaggataaatattcttttgagaagatctccatatatatacatatacacaaacacacagatacaaacactggatggaagtagaaaatgttctaattgtgactcattgctcagaaacaaaacagaacaagacaaattcaataacaatgtcattgccctaatccttattta

SEQ ID NO: 675895 - DNA, 599 bp, Homo sapiens
tgagctgaatacctttatggtttttttgtaacttttacttttgacataatttcttattttttattttttattttttaatttttatgggtacatagtaggtttatatatttatggggtacatgacatgttttgatacgggcatacaatgcgtaatgatcacatcatggagaactgggtattcatcctctgaagcatttatcctttgtagtgatataatttcaaacttacaaacaatttgtaagatcaagacaatgaacaactatacatccttcacacaaattcactgattgtttctcatttttttccatctgctacctcattatatctaccaagatatcaatccacttaatttttttttcctgaaccatttcacggtaagttgcagacaggatagcccttcaycttaaataattcagtgcatatactccaagaacaagaacattttttacgtgaccacagtgcataattatcaaaatcataatggtgcatactactatccagttgtggtgtatgattttaatatgttatatagagagaaacaaaaatgaaaatgaatgactactattccaaaatgcgaacgtgtgagttgcattgggaca

SEQ ID NO: 675896 - DNA, 1281 bp, Homo sapiens
ggacacaaatccaaaccatatcaacaaccatatgcgttatatattttaattcccttattacagatgagaaacctgatactttaagaaataaactttcctaaataagaaactcataaatggcagaagtgaaatttgatttcaggtttttaagaccccagagcatgtaggctgtctacaggtgtactaacggaggggtttacattcacctgaagacacagcctgggccacagaggtcgtggaatccccactgcaatggcgggccatggctgggatcttactccttatagagccaactccagatattagtagaaacccttttattccagtcccccacaccccattttaattcaagatatgtcctttgtttagaaataacacaatgggggcaggttccttgacctgctattgcttttccttgactaaccaagaatctttaacacatgggcaacccagtgggagcacccaagacagagtagagacacagggtgttgagaatgctgctgaggaaagagcaaagtctcctgcagtacaatacagaagcctcagcctgctttgcagtgggcatcacaaaaggctctgaggtgctctcagagaagctgctctttcagttgctgcttaagggtctcaatggccagacctagcttaagaagaaagaaaacaataactctaggccagtgcagtgcctcaagcctgtaatctcagtactttgggaggccaaggagggtggattgcttgaggtcaggagtttgtgaccagcctggccaacatgacgagaccctgtctctaccaaaaatacaaaaattagccaggcatgttggccacacttataatcctagctgaggattataagtgtggccaacatgcctggctaatttggaggctgggacataagaattcatttgaacccgggaggcagaagttgcagtgagctgagatcgccccactgcactccagcttgggtgacagagcgagactgtctcaaaacaaacaaaaaaataaacaaacactctagcgttttagaaaaatgaactgattatagattcataatgggatagggaaaatgagggtgtttggaaaacagtacaaattttttgaggtcgatgtyggaggtcactgtcagagtgtagacatgtagaccatgaatctgaaccaaatcccagagtgagaagcccccggcctatccttctccacaatgctcgccttaaatgactttttagttaaaccatctgggggttggggggtgagtgggataagaagggaaaagaaaagacgggggtgggg

SEQ ID NO: 675897 - DNA, 817 bp, Homo sapiens
gggtttcaaacgtacaacaaatatagaaagaaaaatatcccaggttctcatcatacagcttaaaaaatcatcaaaatagtaccaagattgtatcatctacccaccacatatttttagtggaaagacatttatgataactcttgaaagaaagagtagactataaaacaccatattcaatatggtcactttttaaaaaaatgataatcttcagattcaccatttgattatagtgttgcattaaagttaaaccgtggtttatggcagyccagagcctagctgtctggtttttgaggccacacagtgcctttggaggtgggaggaagatctggagccaactctaagtcaaggagcccagctttcagtctccaagctacagcgtggcttctgatatttgcacggacttgtcatagggtggacatcctgacacacttcggaaaggaggcaccacagctcagaaaaagtttccttagaaggcttacactgtagcaaccccaggagtgcacagaacttgacactgaacagcatggcagagtagggaaaatacagaactgtgctatgatgtcatcttgtttgttcattcattcacacattactgagcacctactatgtgacagtcaccttgcttaggcaacagaaatactaaggtgaccatgagctcttccaggagcagacacagacacaggtaatggaaacaatgtgatgagagatgtagcagaagtacatgaagcctgtagaccactagaggaggagaaggtaagtcttcactagaggtggctgggtcctgaatgatggagatgggcaatttcaaaaggaaaac

SEQ ID NO: 675898 - DNA, 817 bp, Homo sapiens
gggtttcaaacgtacaacaaatatagaaagaaaaatatcccaggttctcatcatacagcttaaaaaatcatcaaaatagtaccaagattgtatcatctacccaccacatatttttagtggaaagacatttatgataactcttgaaagaaagagtagactataaaacaccatattcaatatggtcactttttaaaaaaatgataatcttcagattcaccatttgattatagtgttgcattaaagttaaaccgtggtttatggcagcccagagcctagctgtctggtttttgaggccacacagtgcctttggaggtgggaggaagatctggagccarctctaagtcaaggagcccagctttcagtctccaagctacagcgtggcttctgatatttgcacggacttgtcatagggtggacatcctgacacacttcggaaaggaggcaccacagctcagaaaaagtttccttagaaggcttacactgtagcaaccccaggagtgcacagaacttgacactgaacagcatggcagagtagggaaaatacagaactgtgctatgatgtcatcttgtttgttcattcattcacacattactgagcacctactatgtgacagtcaccttgcttaggcaacagaaatactaaggtgaccatgagctcttccaggagcagacacagacacaggtaatggaaacaatgtgatgagagatgtagcagaagtacatgaagcctgtagaccactagaggaggagaaggtaagtcttcactagaggtggctgggtcctgaatgatggagatgggcaatttcaaaaggaaaac

SEQ ID NO: 675899 - DNA, 633 bp, Homo sapiens
tgtagattgtcttaaaccttctattgtacttaaactgtatagtgcytcataaatcagtcacatctgaactatactttgcaagcaagttttaaaatattcttttactagggagcgaagaatggtcaagaaagtggactcgaaattggaactgacacaattcagtttggtgctccagcctcaaatggaaatgaaaatgaagttgttcctgtgctttcggaaaaatctgctgacaaaatacctgaacctaaagaacagcggcagaagcagccacgagcaggacctatcaaagcccagaaggtaaatatactttataatccagataaaattttatgaaggccactgacatgaagagcaaataatacttttaaaagtgaacttaattttaatgaatatctttgatcatggtgcaatgatgaaagatactcatctatcataaacatagttttatcataaacatttgactttagcttccagatttgagtccagtagaaaacaaagaacacaaacctggtcccattggaaaggaacgttcattaaaaaatagaaaagtaaaagatgcccaacaggtggagccagaaggacaagagaaaccaagcccagctacagtcagaagcacagatcctgtcacgacaa

SEQ ID NO: 675900 - DNA, 633 bp, Homo sapiens
tgtagattgtcttaaaccttctattgtacttaaactgtatagtgcttcataaatcagtcacatctgaactatactttgcaagcaagttttaaaatattcttttactagggagcgaagaatggtcaagaaagtggactcgaaattggaactgacacaattcagtttggtgctccagcctcaaatggaaatgaaaatgaagttgttcctgtgctttcggaaaaatctgctgacaaaatacctgaacctaaagaacagcggcagaagcagccacgagcaggacctatcaaagcccagaaggtaaatatacttyataatccagataaaattttatgaaggccactgacatgaagagcaaataatacttttaaaagtgaacttaattttaatgaatatctttgatcatggtgcaatgatgaaagatactcatctatcataaacatagttttatcataaacatttgactttagcttccagatttgagtccagtagaaaacaaagaacacaaacctggtcccattggaaaggaacgttcattaaaaaatagaaaagtaaaagatgcccaacaggtggagccagaaggacaagagaaaccaagcccagctacagtcagaagcacagatcctgtcacgacaa

SEQ ID NO: 675901 - DNA, 878 bp, Homo sapiens
tgtgcataggttgatgtgtcagtcatttcaagcatattaaattggataatatatctttttaaaatagacagtctcagtgggttcactgtgttttaactattcacgacagcatggaattataacccttattctctatgatagagttaagcagttataaccatatataactgatatgtttcacaagtgcatgatagcttattgtgatcaattttgttgtgtattggttattggaatttgacagttaaaaagttctatgaaattatcattgatatgggaagttttttcagaatttctgtgaacatttgaatttactgagtttttcatccttatttttctttcttatgtacatcttaaggactggggttttaaggggtgtggcaggaggttttggactcgatgagtttccaccgaaatgtcggagaagtcaggccagagcacaaaagcaaaggatgggaaaaagtatgcaacactcagtttatttaatacttacaaggggaaatcattagaaacacagaaaaccacaggtgagtaaaatcaagtgacacttatgtttttcatggtttgttttgttactataagtgatacacctgctgctatgagaagctaggatgtacccaagttaatacaatgctatttacatttgcgtttttatgcatgcacacatttttcagaggatatgtgataaacatcttataattgaaaatttatactttcatagagccctttaaaaatatttttgtttttctctgttgtcagcagaaaaaaggtagaactgtrtggctctaaaggggaaactcagtcaatgagattgataggcacagacctatatattagtgggaatttagtatctttttaattatagactagagaaagtctta

SEQ ID NO: 675902 - DNA, 1435 bp, Homo sapiens
ctaccaatgttaaagtagaaaataatgttttagagtgtcgaggatattttcttcctcattaacttttattatacctcagtctttgtaaaaatcctgtgtttgataagtgtcatagatgaatactattacctttcaccttttctttgagcagaggaggaacccgttttcactagacaagacagcaatcgcagtgaaaaggaagccacaccagtggtgcatgaaacagaaccagaatcagggtctcaacctcggccggctgtattatctggctatttcaaacagtttcagaagtctttacctccacgattccagcggcagcaggtaatgataaaaatattttatcatgtatgtgtgattgaagtggtttattatgcagtagtctgggaaattagacataaaactgataatacgtaaagcacacaaagttcccttgaaattatttttccttgtaaataaaagttaacgtgggttttaccttgaccttctgtgtcattccttttgatcttctgcctcatttatagacaccatcttccatttctaggagatagatcatacagtgcttgagtataaggtaaaatgttatagttcatctttcagttttttgtcttgccaactcttaactgttaaataccttttgaactcttacttttccttcaaggattcaaaacaggccattattttgtgatatgattgattatgttaatttgtcatgtggaactaaactctcaagatatgggatcttactttttcaggaacagatgaaacagcagcagtggcagcagcagcaacagcaaggtgtacttccacagactgttccttcacaaccgtccagtagtactgtccctcctccaccacacagacctctttatcagcctatgcagcctcatcctcagcatttggcttctatgggttttgatccaaggtggctcatgatgcagtcctacatggatcctcgaatgatgtcaggaagacctgctatggatattccacccattcatcctggtcagttgaatttgcatttatagttttacaggatcaaaatttttttttccctgcttttagtttcagttcctttgagagttgtaatctaggaaaaacttaaacctccgatttttaatcaaaatgatgtaactttcagcatcgagtaattaaatatctgacactcatattacttatgtggcaagaacaaaatactmgttcatttctgttttgtaagtattatttaaaacttcagatggaaataattatgtgttattaacagtatttgttattggctacattgttgttcttctttaaagtgttttcagcgtttgaattttgtccatatgttatatatattccttttcaagttcttcttccatcatttaccaacctaacacttgaatttccttttaggttagggggaaaaaaagtgaattagcagtcttttatggaa

SEQ ID NO: 675903 - DNA, 472 bp, Homo sapiens
tgtgacttttctgcctaaaatccttgcatagtttcccattgttgttaagaccaattcaaaaatccttaacttggcctatagtgatcatagttcttagtttagacttaatgtagatcaattaacacctgataattccttttttatttttatttatttattttagacggagtcctgctctgtcgcccaggctagagtgcagtggcgctatcttggctcactgcaagctccgcctcccaggttcacgycattctcctgcctcagcctcccgagtagctgggactacaggcgcccgccaccaagcccagctaatttttgcatttttagtagagatggcgtttcaccatgttagccaggctggcctctaactcctgacctcaggtgatcctcccacctcggcctcccaaagtgctgggattacaggcgtgagccaccgcgcccggccaatttatttttagtgccccatccacttacc

SEQ ID NO: 675904 - DNA, 1408 bp, Homo sapiens
ccatcctaggcaggatagctaatgattaattagggtggttgggaccatgactaagccccattgtctcagtaattgttcacagcagtaacccttttaatttttggtccctgacttctgaactctgtcaccaagtttgttgcaaaaagcctaaaagccataaacattcaaatgttgggctactcaggggtaccaacagctaagcctatagccaggagagaatcaaacctatctgaaaatgaccaggaagagtttcactcctttaacaggatgcttgcctatgcccaaactcagcataaagaagctacagaaaatagactttgcccttcagcacccctcaagaatgaggcgtgaacatttaaaaagggaatttgttgcccttgcaatgcctacatgacttagctggacccctattctgcttttgttgcccaatgcaaggcatatgtgatatacgaagtaaattcctactcagcttaactctgcttaattttgggaaacaggatgtctgtgatcatagatttcttcttaggcagcttattcatcccctgaaaaacctctagcttcattctaatccagtttccatgctaaatgacattcgcacttgcaccatgacagttgacaatcaccatgataatgactggaagagactgaaaaaggacaaaaaagaggaggctccttgattccaagaaaatcttcgtcccttctcaagaaaaagcaggaatattccttcccttgctcttaatgcccacccctttactaagtaagataccgtacatctgtgacttcccagttctcaggggctggaaagttatttgcaagctatactcccacttctccaactccacggtcattagataaagcctacactgcttgacacttggttttgtgtattggtttctggacaccacacagaaaagagcccctttaggagtaactgggacccccagtaacaatatagcagaaaggaagactaaagtctgtccagaaatctgaacagatttttgtcaaaaaccattgtccactctgmgggcccaacagactttgccccacaccactgtatgttcttcaaacccattggattctccctagaaattatttattgcccctcaacagaattcctcttcatcctgcttccacaacctgttttgccaggatcctagcccccattctttctgtaacctcaagatgatatacaagtctctatactcattgaggggttgagccttcattctgaaggctcctgtacatacacattaagtaaatttgtatgccttttctccaactaatttgccttttgtgagtcactttttcagtgaaacttcagagggccaaaagaaaagccttggtccccacactcgcaaatagcaagcggcataactccttccagcattactttcataaagtcaaaatg

SEQ ID NO: 675905 - DNA, 503 bp, Homo sapiens
aacctaattatctcccaaaagccgcatctccaaataccatcacattggtatcaattttgggaggacacaattcagtccacagcagagagtaacacaacctcactgtgaaatattcaaaaaatgtaaaagcaccttgtttccttcccttagtcccaaacctatttcccagattaagcattggaaataataayaattaataataataatcttactgtcttgtgtcctctgtgataagccttttggctacattagttcaattaaccctcacattaaccccatgaggtagacatcgttgttattcctacttgaaagatgggtaaactgaggctcagagcagtagactgaccctcccaatactctgttgataactatctgagacttcatctcaggtctgcgtgattccaaagccacactcttttcaccgtggcttatggttttctatgcatatttaaattttctttcttttacaaaataggaacacttggtacacactactttgtaac

SEQ ID NO: 675906 - DNA, 622 bp, Homo sapiens
tctgtgagggcaggagactcacctgtctcgtttgctgtggcgttcctggggtgtgctctggccyggcacatagtaggtgctcagtgcatgaaactggagcctgtcagactccactgcagtagctgggggtctcctctgcacaactggatggattcttactcatgacccttctgccagagacagcagcagaaccatatgacccttaaaaaaggaacaattacatgggattctcaatctctttttttttttcatcatctctgatccatcttgttattgacttcagtggcttagtgtaccagattgtctctgacagagttggtagcaaaatgacagagagtcaaggtcaccatgccctttgccccggcttttatccatccaatttcatgcggctggcatcccagctgccacttggctggggaaatgtcaacattatattaaatcacagacacagacaggagaacacttgtcacccacctcttgtctgtccccccagttcccaagcccccagtagggagggaccacctttgcctgtctcactgtgctctgagggcctggctcaattcccagctcttctccataattactgttgtgccaccggacggacgtggttttctcaagatga

SEQ ID NO: 675907 - DNA, 609 bp, Homo sapiens
ctgcaggcacacctaccttcctgagatataagggaggaatggggaacctacatactcatctgcatccttatctcacaaataacctgtgtttgaccatgaccccaaggagaagcacctcaatcctagccccagccrttattcgaacacaaccttgaatccagatggactcagtcatctgacctagcacaagagaaagggtcaatggtgagtcttttctaactccagttttcagattcactgtagtaaagatcccagtgatttttccattgaaagccatttgggtggagataaaccagggacatgggtgaaagactgagaatgggcaagtttcgggtttgtaaaacattctaatacctccctgcagtagctagcagtcatgtttgattcttgccattccaagcatatgttttcttgttatcttttaattggttttaattctaaatttaacactaaacggtctatgatggtagtgactgcaagcactagcctggtgcatgtcaattccagggacatgtgagacatcgggaccttatcgtgccctccctctcctccccgcatcacaccgcctgcattaagaagctggagattgctcattgtaccctttcctgc

SEQ ID NO: 675908 - DNA, 1182 bp, Homo sapiens
gtggccactgtgaccacctgggcccccagccctgttcgtgccctcggtggggtggggagcaacaagactttggaaactttcccataagcaaacgacttctctcctgctgtctaggaagacagcagaattcaggtcagcgggacttgagtggggagccggggttggggaacaggggccttggaggccgaaagaggcagccacaacacctggcagaggaagcctttctctggaatgaaaggaaatacgggagcaaaggcagcccttgcattccaatttctagccccttgaccacccatcttctccccttaggcccacccccaaatactctctctttacaaacatctgtctgctcaaaagtagccactaggattctgaaacttcctctttacaacaaaactaaactgttgcaacttgttgctaccattctcacaccatcctggaaaaggcaggggcctcagcagagcccaagtctcctgccaatggccttccgactttggaagaccactccaccccactatcctccccctgcccctgccctcagctgcccctgctccactgccaccctcggtagggtctccctcagaagggccgggggctatttcccaagcctccctgttgtcatggtcccttggagacttcttctctccctcacttcctcccagtgggttttctggccaggggccttggaagtgacacaacggcggaggcggggtgaacaggttgaagagcttcctccaaaagcccggacagatctcccagctcccttgtttctaagccttctcaccactactgacaaagtggttttacctgttttccatcggctggaattgactggaattgggcatccaagcagcccccacctcctcagccccttcaatcacaaccacaccagagtgaagtggcatgttcctaggtctacrctgcgagccccctccaggacagggcctgggacctcttgttcatctgcatcctgaccagcgggcagtttctggcctagatctagaatagatgtactggatacatttgctgaatgaatttccaagactcaataaaactcgtggaactttctggcaacatgaaaaatggtccctctcctcagtggacataagagggtcattaaaatatgaattctggcgaccaatgaaacataggaactttgcattatagtagtaactcagaaca

SEQ ID NO: 675909 - DNA, 1182 bp, Homo sapiens
gtggccactgtgaccacctgggcccccagccctgttcgtgccctcggtggggtggggagcaacaagactttggaaactttcccataagcaaacgacttctctcctgctgtctaggaagacagcagaattcaggtcagcgggacttgagtggggagccggggttggggaacaggggccttggaggccgaaagaggcagccacaacacctggcagaggaagcctttctctggaatgaaaggaaatacgggagcaaaggcagcccttgcattccaatttctagccccttgaccacccatcttctccccttaggcccacccccaaatactctctctttacaaacatctgtctgctcaaaagtagccactaggattctgaaacttcctctttacaacaaaactaaactgttgcaacttgttgctaccattctcacaccatcctggaaaaggcaggggcctcagcagagcccaagtctcctgccaatggccttccgactttggaagaccactccaccccactatcctccccctgcccctgccctcagctgcccctgctccactgccaccctcggtagggtctccctcagaagggccgggggctatttcccaagcctccctgttgtcatggtcccttggagacttcttctctccctcacttcctcccagtgggttttctggccaggggccttggaagtgacacaacggcggaggcggggtgaacaggttgaagagcttcctccaaaagcccggacagatctcccagctcccttgtttctaagccttctcaccactactgacaaagtggttttacctgttttccatcggctggaattgactggaattgggcatccaagcagcccccacctcctcagccccttcaatcacaaccacaccagagtgaagtggcatgttcctaggtctacgctgcgagccccctccaggacagggcctgggacctcttgttcatctgcatcctgaccagcgggcagtttctggcctagatctagaatagatgtactggatacatttgctgaatgaatttccaagactcaataaaactcrtggaactttctggcaacatgaaaaatggtccctctcctcagtggacataagagggtcattaaaatatgaattctggcgaccaatgaaacataggaactttgcattatagtagtaactcagaaca

SEQ ID NO: 675910 - DNA, 710 bp, Homo sapiens
tgaaacacatagtgtaatataaatgcattatatattagaaaattatatagaataataaacatctacagcctgacattcatatgttaaaaagattagaataataaaaataattggtatttttttcaggaaaaataatataaaataatcacacaaactaatataaaagcagttaatactttgactcatttaatccttaactccccagttcttctgaagttgggggccagcgaggaccctctgtggtgactctctgtctgaatgcaccaagactgagctcggggcccagccacgcaggatctgagcagtgtggcccagagcggyggcgggcgggccagaggggttactcacggccactaggatccaaaagaacgtcactgagaggtgtgggcctgaaactgagtcatccacgttcagggcaatgatccccccgaggacggcagagatgcctgcgattacctcgacgacctggaggggacaggacagcatcggctcataaggaagtggagacacccccagattcccagaatgcactgtgcagacatggacccccaggagcagggtccagtgggctggccccagatctaaccgtggaggagcccacctggatggacccccagcctcacctggcccagaccccctctgccctcagctgcggcttttcacgtccctcctggagtaaaatagccaaagaggtgtttcccccactgctg

SEQ ID NO: 675911 - DNA, 636 bp, Homo sapiens
ccatgtgacgacgtgcactcctccatctgacatgcactcctccatctgatgacgtgcactcctccatctgacgtgcactcctccatctgatgtgcactcctccatctgatgatgtgtactcctccatctgatgtgcactcctccatctgacgacgtgcactcctccatctgacatgcactcctccatctgatgaygtgcactcctccatctgacgacgtgcactcctccatctgacatgcactcctccatctgatgatgtgcactcctccatctgacgtgcactcctccatctgatgtgcactcctccatctgacgtgcactcctccatctgacgacgtgcactcctccatctgacatgcactcctccatctgacgacgtgcactcctccatctgatatgcactcctccatctgatgacatgcacttctccatctgacgtgcactcctccatctgatgatgtgtactcctccacctgacatgcagtcctccatctgacgtgcactcctccatctgacgacgtgcactcctccatctgacgtgcactcctccatctgatgatgtgcgctccttcatctgacatgcactcctccatctgatgatgtgtactcctccatctgacgacatgcactcctcc

SEQ ID NO: 675912 - DNA, 622 bp, Homo sapiens
gctgccctgtctgaagagtcccgcccacgtgcaggatgagacgtggaaaatattgttgctttaacttaaaaaacaagaccagtggggttggctgggagcaccggccagcaggccctgctgagcataaaccccctccactggagaaggcgtggcccctgcccacctggacccttctggaaatgagggaagtgctaacagcagtgcccatcccacaagcattaaactcgggaggtggagactctccagcagaaagctgggcagcagastggtcctgcccctcggcccacaaagggccttggccgagcatgggcatgcctggtgtgtgcccactggggtccatccctgccagtggggttccagggacctcggggaccgggctgcttgggcccttggactctaggtgagccgtgagagcgggctggggcaggcggagcagctgcctgcagggcagggacacggtcaggggctacctcccagacaccctggcctctccacaggcagctatccatgatgctgatgctggcgcagtcaaacccgcagctgttcgcgcttatgggcacccgggcaggcatcgccagggagctggagcgtgtggagcagcagtctcggctggagcagctga

SEQ ID NO: 675913 - DNA, 650 bp, Homo sapiens
ggggacttctcagaggcaagcacacgcctgtccctgtggtccctgggaggggggtcggccccagacccctctcaccctcctgatcctccaggtgcggcgggtgctgaaactactggagaccccttaccactgcgaggcgggggccgccacagacgccgaggccacggaagccgacggggcggacggcaggcagcgctcctacagcagtaagcccccgctctgggcagcagaactgtgcgtgacatgatcttcgtaacggcctcggcacgctccacacccctggagtctcccgaggcccccatgtgctgctgagtggccaagatgatgccaggctgccctatacactgggggattctgccctggcccatgcacacccgtctttccatgatggcagagacatccagtcaggacctgacccgtctctgtctgaggccggctcagcagtgcagcctggtccctgggggctggacccaggctcctaaataaaccagcaactccctcgagtctgtctctgtggtcattgttcccccaccctgccctgtcctcagcccccrcccaggagagagagctgcagacagggtccgagaacacctttattgtgcacgtcccccgcagagcagcctcaggcgtcctggtagtagttgttgaag

SEQ ID NO: 675914 - DNA, 1134 bp, Homo sapiens
ggagtggacttgtgatggttaatttcatctgtcaacttggctggaccataggatgcccagataattagtcaaacattattctgggtgtttctgtgagggtattttggatgagagtaacatttaaattggtggactttgtgtaaagcagattgccctccgtaatgtgggtgggcctcatttaatcatttgaaggcctgcagagagcaaaaagactgccctccctaatgcaagacagaatttctccatcagcctgcctttggacttcactgagacttttgactcttcctggttctaccacagactgccttcacatgcaaattgggatgctggctctccaaactgctggccttcagactggaacttcagagcatcagctctcctgggtctccagcccaccagccttccctaaagattttgtacttgccagccttcataatcacaggagccaattcctataataaatctctttctctgtgtgtacacattctattggttctgaataactaatattcttcccaataaagccaaaaatgctagtgacctacaaattatatacaggaaaagaaagatattttattaactggattcaaaacactttacaggtactaaaggccatgactcagagctaacagaagtttgcattatatacactttatctgagagatctagtcattcattgggtgttaagtgtgtagacttttctatttccatgctcttgcctgccttataaacgtctacttaatctttataataaacaccatttttgtaggacttttgcttaagaatatttaagttaaatattttatcactgcattttaaaaaactctgtaagctaacataacactgatacacaaatctactttsaactttcatttattaccaataatggtaatttagtttctttttttataaaatgtttttgatgcattcagcactacctaatatatgtaagctgaatacaagctaggaagcaaaataaaaattacattaaatatcttgctactacattcattaaatcaattatatatgatcctgggctacagaaaaaattacaaaattatgaaatatgttttgaaaataatctcagaaacttgtgagatattgaggctctgtagaacagtttacaaaacaaaa

SEQ ID NO: 675915 - DNA, 947 bp, Homo sapiens
attacatagaagacaaatggctatttatgggttccttggctggcccagctgctgggcaccacccgctctgtttgcatgtgttcctcatattctccggccctgtcctcccatccccaccccagcctctccgaatctaattaggaatagtasatggtcactagaactgacaagaatcgcattctaatggttttattacaacttctatggtgtgacacagtatcagggaaaacccaaatttcccacagtagcactccaatagcagagctattattttgcttctcatttctctcattttggacgctcctgttttaccgtaaatattcaagtgaattctgcggcttatgatttaagcactctgtttctatagaacatggtagcataagttactattaggaaaaggatctcaccatctttatcctgtggtctcaagcagccctgcacacttgcaaatccctagaatactgagtctacttttatatttttgctttttcctgtttatttaggtgttatttaaatacattaaaattcacccattttaactgtacagtttaacttttcttatgtatacaaggtgtaactactagcatgatcaaaatgtaagatggttcctttaccttcaaaagcttttccatccccttttgtccgagttcagttatgagacactggattgggtttcacagccttttctagcattgactggggtgatttcagtaaagtcactttacctctctagatgtgtttctgctgttgttaaatggggaatgctggaacagatttgtttgcggggactcttccaatactttcagaaaatgcgagaatagggtgagggtgggaatctcagacttgtgggccccatgattgatataacacacacaggcggcagaccctaatgggtaaaagcatgtggttgcatcagttaaggtttttctctcttctcttgctagcgt

SEQ ID NO: 675916 - DNA, 601 bp, Homo sapiens
tgactatgtgagatgatgaatatgttaacttgcttgactgtagccattatttcactatgtaaatgtacagtcatgcatggcttaacaacggggataagaccggagaaatgcatcacagttgactccatcattgttccaacatcatagagtgtatttacacatacctagctgatagaacctaccacacacctaggctgcatggtataccttccrctcctcggctacaaacctgtgcaacatgttaccatactgaatactgcaggcaattgtaacacaatggcaaatatttgtgtatctaaacatatctaagcatagaaaatgtagagtaaaaatacaatattataatcttataggaccactatcgtatatacggtccatcattgaccaaaacatcattatgctatgcatgactgcatatcaaaaaatcaatttttaaaagatggaaaagtaccagatgagcactggctgatttggggaggctttctgggaaggatgataggaaacagcaaccctaggggaggacacattggtacaccgcataacctggaatcagagggtggaaactggggactggcccaaaagacccttaacaatgaggggc

SEQ ID NO: 675917 - DNA, 910 bp, Homo sapiens
tcagatataggaagttttcttagatttttttttttttggttgttgatgatttcttctctaatttctttttatttcctttgatgatttcttccctttttctttctgaaactccttttattggtatattggaccttctgtgtccccttatttttgcccctattttctatatcttcatcttcatcattgttcaactttctgggaaatgtcttcacttatgtttttcaatccttctattgacattttaatttatcttattttttattttgaaaatctttttttgttgtataagtgtccctttttatcttgttcttgtttcactgttgaaatattttctcttgtctcaggcataagtcaagagaaaaggcagctctggggaggttagtgttaacagtttgtgaatcttattctaaaccttaaacctcccaactatcatgttcttttggtgtcctagttcaaatgagagaaagaggttgactgggattgattagtccctgtgtgttaggtgtttattatccctgacccaatccactatggccaagggcttaggcatactacacaaacatgacttccagatattttccattgatatctgagagaataactctcagagaagagcatacttgtcatggaatagaaagatatcccaaaaagtatgtttttctagtttttattcctaaacttctttaatacatctttttttttttttttttttttctgagacggagtctcattctgttgcccaggctggagtgcagtggcgcgatctccgctcactgcaagctcmacctcctgggttcacgccattctcctgcctcagcctcccgagtagctgggactacaggcgcctgccaccaagccaggctgattttttgtatttttagcagagacggggtttcatcgtgttagccag

SEQ ID NO: 675918 - DNA, 910 bp, Homo sapiens
tcagatataggaagttttcttagatttttttttttttggttgttgatgatttcttctctaatttctttttatttcctttgatgatttcttccctttttctttctgaaactccttttattggtatattggaccttctgtgtccccttatttttgcccctattttctatatcttcatcttcatcattgttcaactttctgggaaatgtcttcacttatgtttttcaatccttctattgacattttaatttatcttattttttattttgaaaatctttttttgttgtataagtgtccctttttatcttgttcttgtttcactgttgaaatattttctcttgtctcaggcataagtcaagagaaaaggcagctctggggaggttagtgttaacagtttgtgaatcttattctaaaccttaaacctcccaactatcatgttcttttggtgtcctagttcaaatgagagaaagaggttgactgggattgattagtccctgtgtgttaggtgtttattatccctgacccaatccactatggccaagggcttaggcatactacacaaacatgacttccagatattttccattgatatctgagagaataactctcagagaagagcatacttgtcatggaatagaaagatatcccaaaaagtatgtttttctagtttttattcctaaacttctttaatacatctttttttttttttttttttttctgagacggagtctcattctgttgcccaggctggagtgcagtggcgcgatctccgctcactgcaagctcaacctccygggttcacgccattctcctgcctcagcctcccgagtagctgggactacaggcgcctgccaccaagccaggctgattttttgtatttttagcagagacggggtttcatcgtgttagccag

SEQ ID NO: 675919 - DNA, 910 bp, Homo sapiens
tcagatataggaagttttcttagatttttttttttttggttgttgatgatttcttctctaatttctttttatttcctttgatgatttcttccctttttctttctgaaactccttttattggtatattggaccttctgtgtccccttatttttgcccctattttctatatcttcatcttcatcattgttcaactttctgggaaatgtcttcacttatgtttttcaatccttctattgacattttaatttatcttattttttattttgaaaatctttttttgttgtataagtgtccctttttatcttgttcttgtttcactgttgaaatattttctcttgtctcaggcataagtcaagagaaaaggcagctctggggaggttagtgttaacagtttgtgaatcttattctaaaccttaaacctcccaactatcatgttcttttggtgtcctagttcaaatgagagaaagaggttgactgggattgattagtccctgtgtgttaggtgtttattatccctgacccaatccactatggccaagggcttaggcatactacacaaacatgacttccagatattttccattgatatctgagagaataactctcagagaagagcatacttgtcatggaatagaaagatatcccaaaaagtatgtttttctagtttttattcctaaacttctttaatacatctttttttttttttttttttttctgagacggagtctcattctgttgcccaggctggagtgcagtggcgcgatctccgctcactgcaagctcaacctcctgggttcacrccattctcctgcctcagcctcccgagtagctgggactacaggcgcctgccaccaagccaggctgattttttgtatttttagcagagacggggtttcatcgtgttagccag

SEQ ID NO: 675920 - DNA, 492 bp, Homo sapiens
gaatggattcatggaggaaaaaatttaaaaacttaatgcattgttgacttagttttcagaatcatttaacattcaatttccttcttttcttaaaaaaattgtaaagacagatcagtagaatattttcttcttgttctgcattcggattcctttatgtatatatatgttatttatatatattatttatatatgttttatatatgtaattattctttaaagaaattgyaacttggatttggctttttttttaaagggaacactcaaaagtacttaccactatttgggtagttaaaccattattttgactttaaccatgcttggcctttattataacaaataaaaatatagttaatttgaactaattagcaaattacattaatgaaggatatgtgtgttagtagcaatttcatttagattatgtacaagaatacaaaataaaaagaccagaaagctgggcgtggtggctcatacctgtaatcccagcactttggg

SEQ ID NO: 675921 - DNA, 1484 bp, Homo sapiens
cttcccctaactcggctctccctcagactcaaccaaggccccactgtgggtgaggagcagggacactggctcccagccctttccatggcacccatgcagctccgagaacagcaaagtccagcatccctagggggtcacacgatctgaagaccagtcacacagacatggagccccgcagggggacccttctcctggctcgagcagtctggacccccatctccagaaggcttcaatctcccactggagaactctggaatgacagcggtagaagtctcacctgcgcctgcctggttgatttttcccagctaacttgctccctgccctctacccacagttgtacagagtaaaacaaaatcatcatgttaaatactagattctagatgacagccctaaaaacgactgccatttaagtcgagcaaaatttaaaatctttttgaaacaaaccaagcaatcacttgaggtaagtttggggaaggtcttttgaaatcaatcactctctccactggagatccagtttccaagttgtttcctgggctcgcgaagcagcagaaggtatgaatagagaatgctaggcagtgaattcctaaaacccgaggatgaaaacacasacggttctgaagatcccacagaaagatatgccaattaatcttattcttaaaattggcctgaagaagaaagggaagcccctgatgcagaaactgcataaggaatcctcccctctggaacacacaggaggcgtcagaaagaagcctgaccttctccctttcccatgaccttagaggaaaggaaggtcagtcacagcagcagtggctcagaagcaggtagggaatctttttctatgggaagagctcaccaggtgtgtgctgtgtgccaaggaccacagcaagcagaggctgtccaaacatgaagaatgcctctgcacaggccaactgcatgttccgcaggaccatttaggttgcaccatctccctctcgacagcctggcacagtggcattccggtgtgtgctacccgtgcctggctggtgaagagcctttctcccactccacctggagctccacgagggaagggcttcaccctttttatctaacccaaagcaagtgctcaagtaacaagagaagacgacaagggaagggaagagaggaggtgctgtttgtgctggatcccgaggtggagaaggtaaaaatgctgtctgtgacaaatttgtattttttaaaaatcctatatgcagattcatatagtaacccttaaaataaccatgttttccccaacatctttataggtcaaaggaaacaagctgatgaccagccatcctggtggcattcagaccgcttgctccagctgacaaccacctgggctatcagaatcagcagcaaaggtaggacaggccccaaggtcacccgtcccagcgcagcccatcagctcttagctcacctatgcaacttaatgaagagctggagctaacagcgtgtaattagatgtgtcc

SEQ ID NO: 675922 - DNA, 1484 bp, Homo sapiens
cttcccctaactcggctctccctcagactcaaccaaggccccactgtgggtgaggagcagggacactggctcccagccctttccatggcacccatgcagctccgagaacagcaaagtccagcatccctagggggtcacacgatctgaagaccagtcacacagacatggagccccgcagggggacccttctcctggctcgagcagtctggacccccatctccagaaggcttcaatctcccactggagaactctggaatgacagcggtagaagtctcacctgcgcctgcctggttgatttttcccagctaacttgctccctgccctctacccacagttgtacagagtaaaacaaaatcatcatgttaaatactagattctagatgacagccctaaaaacgactgccatttaagtcgagcaaaatttaaaatctttttgaaacaaaccaagcaatcacttgaggtaagtttggggaaggtcttttgaaatcaatcactctctccactggagatccagtttccaagttgtttcctgggctcgcgaagcagcagaaggtatgaatagagaatgctaggcagtgaattcctaaaacccgaggatgaaaacacacacggttctgaagatcccacagaaagatatgccaattaatcttattcttaaaattggcctgaagaagaaagggaagcccctgatgcagaaactgcataaggaakcctcccctctggaacacacaggaggcgtcagaaagaagcctgaccttctccctttcccatgaccttagaggaaaggaaggtcagtcacagcagcagtggctcagaagcaggtagggaatctttttctatgggaagagctcaccaggtgtgtgctgtgtgccaaggaccacagcaagcagaggctgtccaaacatgaagaatgcctctgcacaggccaactgcatgttccgcaggaccatttaggttgcaccatctccctctcgacagcctggcacagtggcattccggtgtgtgctacccgtgcctggctggtgaagagcctttctcccactccacctggagctccacgagggaagggcttcaccctttttatctaacccaaagcaagtgctcaagtaacaagagaagacgacaagggaagggaagagaggaggtgctgtttgtgctggatcccgaggtggagaaggtaaaaatgctgtctgtgacaaatttgtattttttaaaaatcctatatgcagattcatatagtaacccttaaaataaccatgttttccccaacatctttataggtcaaaggaaacaagctgatgaccagccatcctggtggcattcagaccgcttgctccagctgacaaccacctgggctatcagaatcagcagcaaaggtaggacaggccccaaggtcacccgtcccagcgcagcccatcagctcttagctcacctatgcaacttaatgaagagctggagctaacagcgtgtaattagatgtgtcc

SEQ ID NO: 675923 - DNA, 951 bp, Homo sapiens
atgacaatgccagttttggtggggctacaggaaaacagaaatgtactctaacattgctaataggcttcatggaaaaatctgaaaatacagaacaaggcagataacagttaccaacctctgacccttaagtcccactctggggaacatgccccaagcaaataaactcaaagaaaaaatagcttggacaaaatgttcatcactgcaatatttataacagcaaaaattggaaacgagtcagctgctcaaagctaagaaaacaatgacgagttgacagaaaggacacaacacatccgttacagagaactagcaggtgagctattttccatccgaaattgggtataagcaaaaaaggcagagtggcacagcgcatccactacacatcaacttataaggtgaggactgtagctgggcgcggtggctcacgcctataatctcagcactttgggaggccaagatgggtggatcacctgaggtcaggagttcaagaccagccrggccaacacagtgaaaccctatgtctactaaaaatacaaaaattagccaggtgtggtggtacgcccctgtagtttcagctactcaggaggctgaggcaggagaatcacttgaacctgggaggcagaggttgcggtgagccaagatcataccactgtactctagcctggacgacagggcaagactcgtctcaaaaaaaaaaaaaaagaggcaagggctgtgtcatctccgtatccccagtgcttagcatgaggtagatgctcaaatgagtctgcacagtgactagatgtacgcaccggcaattaccaagctgacagaagcaaaatcagtgggggacgagggcaagaggagtctttggggagggagctgacactcaccagctcatttctgtagtggctgcagtgtgccttctctcaacctcctctgcctgtttcctggctgctggcgctccccaggttc

SEQ ID NO: 675924 - DNA, 1050 bp, Homo sapiens
tgaagggagagcacaagcagcccttgggccccgtccgacctcaaataaaacttaggccaagggctgctatggaatcacgtcttgtgttaccaaaaatccagtctcgaaataaatcagccctatcagtgcatgccatgccatgccataccacccacccaagtctagggcagctgagcagggatttctcagggaaataaaatgggaagctccaaacgacaaaggggagctaagagcatatggttctgggcttgggagtaaccgccagcttagctgaaaagctctaaggatgaccagaggcttccatgaagcccctgccagaaccttcaccacacacacaaccaacagctcagccagttgccaaggcaacagcaacctagacatgtttaggcatctgtagaaaccagagcaaagtacaatttccacacttgtgataaaaatgcagcccccaaagcatcaagcaaagcatcactctaaaattttgttttactgacagaagaagcaggactgggaggggaagcaggaagctgggcagcgcctggcagagccagtgcagtcagacgagccctgaagtgtgggcacaaaaacctgcctgtgcttgggaagcaagacacttgtatgcctgtgctgtttgtggctgtttcctcttatgtctaccttcctgggtagtcaagtctcttcattttgttgtgaacatcagcttttcttagctgggataagaggaaccaagaaaagtaagcttttgcccacagtaaggcaagagaactaaaagggaaacagcccctgtggggagagggtagacatggtggaggcatcgcaggaattctagggaggggacccaggggtaagcactaaggtcrgctggcctgaccactgctccccacctggagcccctctctgtccctgctaagcaccttgtcctttgcagaccctggcaaatgagccaccaggaaaacaggacaccactcagtctgagagtgaatacctaagggacagtggagggtaggaaagtcagtccatggggaggggacatggtgacaagttccacagcag

SEQ ID NO: 675925 - DNA, 1050 bp, Homo sapiens
tgaagggagagcacaagcagcccttgggccccgtccgacctcaaataaaacttaggccaagggctgctatggaatcacgtcttgtgttaccaaaaatccagtctcgaaataaatcagccctatcagtgcatgccatgccatgccataccacccacccaagtctagggcagctgagcagggatttctcagggaaataaaatgggaagctccaaacgacaaaggggagctaagagcatatggttctgggcttgggagtaaccgccagcttagctgaaaagctctaaggatgaccagaggcttccatgaagcccctgccagaaccttcaccacacacacaaccaacagctcagccagttgccaaggcaacagcaacctagacatgtttaggcatctgtagaaaccagagcaaagtacaatttccacacttgtgataaaaatgcagcccccaaagcatcaagcaaagcatcactctaaaattttgttttactgacagaagaagcaggactgggaggggaagcaggaagctgggcagcgcctggcagagccagtgcagtcagacgagccctgaagtgtgggcacaaaaacctgcctgtgcttgggaagcaagacacttgtatgcctgtgctgtttgtggctgtttcctcttatgtctaccttcctgggtagtcaagtctcttcattttgttgtgaacatcagcttttcttagctgggataagaggaaccaagaaaagtaagcttttgcccacagtaaggcaagagaactaaaagggaaacagcccctgtggggagagggtagacatggtggaggcatcgcaggaattctagggaggggacccaggggtaagcactaaggtcagctggcctgaccactgctccccacctggagcccctctctgtccctgctaagcaccttgtcctttgcagaccctggcaaatgagccaccaggaaaacaggacaccrctcagtctgagagtgaatacctaagggacagtggagggtaggaaagtcagtccatggggaggggacatggtgacaagttccacagcag

SEQ ID NO: 675926 - DNA, 1050 bp, Homo sapiens
tgaagggagagcacaagcagcccttgggccccgtccgacctcaaataaaacttaggccaagggctgctatggaatcacgtcttgtgttaccaaaaatccagtctcgaaataaatcagccctatcagtgcatgccatgccatgccataccacccacccaagtctagggcagctgagcagggatttctcagggaaataaaatgggaagctccaaacgacaaaggggagctaagagcatatggttctgggcttgggagtaaccgccagcttagctgaaaagctctaaggatgaccagaggcttccatgaagcccctgccagaaccttcaccacacacacaaccaacagctcagccagttgccaaggcaacagcaacctagacatgtttaggcatctgtagaaaccagagcaaagtacaatttccacacttgtgataaaaatgcagcccccaaagcatcaagcaaagcatcactctaaaattttgttttactgacagaagaagcaggactgggaggggaagcaggaagctgggcagcgcctggcagagccagtgcagtcagacgagccctgaagtgtgggcacaaaaacctgcctgtgcttgggaagcaagacacttgtatgcctgtgctgtttgtggctgtttcctcttatgtctaccttcctgggtagtcaagtctcttcattttgttgtgaacatcagcttttcttagctgggataagaggaaccaagaaaagtaagcttttgcccacagtaaggcaagagaactaaaagggaaacagcccctgtggggagagggtagacatggtggaggcatcgcaggaattctagggaggggacccaggggtaagcactaaggtcagctggcctgaccactgctccccacctggagcccctctctgtccctgctaagcaccttgtcctttgcagaccctggcaaatgagccaccaggaaaacaggacaccactcagtctgagagtgaatacctaagggacagtggagggtaggaaagtcagtccatggggaggggacatggtgacaagttccamagcag

SEQ ID NO: 675927 - DNA, 1559 bp, Homo sapiens
acaagagcgaaactctgtctcaaaaaacaaacaaacaaacaaaaaacacaaaaccccccaaacccagctgcttatgatgcagattcctgggccctccccagcctgcctggattcaacctctggagacgcaccacagttttacaggctcctcagagacttgtgcaccctatagtcagtgaagcatagagacggggtagggaggtcttgtcacacgatagagggcatcggactccgcttcaacgaaacacttgaagctagaaactctgggaaggagacagcctggaccaccctcctcactcactgagagaaagggaggctcttggctgcctcctcatgtaatttagcggaattacatttaaactaaaagcctggtatcctcatccaggccagtgcccagattactgtcccagaaaatgtctgtaagacaggaagtcattagcctgactgtcattctccaaacccygctctgcctccagccctgagcaggctgcctgcattgcgtagctctcagtgtctctgtccagtctcatgctgcaggtttgggttcctcggggggtctcagagccacctcccgtcctgcaccaggcccctcccatgtgcctgtttccttgtctgcctcactctgaggacaacatgcctggtaaaaaccaggtgatgaaatatttgctaagtgaataaaaactgaataaataaattcctgctcccaaagcctcacagagccttagaaatctatcataacagcttttcagttcaggaaactgaggcccagaaggagtcgttcagaggcacctgccagagggccaggctgaaagaatacaggtttccttgattaaacagctaactttttctcaaagatctaccaaaatgggctggggagggagggagagcaaagggctgcttaatccggcattagaattcacacagtcacgtgtcaaccgatgagcggtatttaacccttcccaatcatgaagtcagtctctgcagagcactgttcacacatacgccgtgacactggtgtcagggtcccagtttcacagatgaggcatctgaggcccagcaagagtgggctcttgagcaaagtcccctgtcgggatatggtggggcctggcatggaatcagatctgaactccacactcgttacctgccacccaagctgcaacccaagccaccaaggtataaggagcttcagtgggacaagagatggggcactcggcccctaagatgtatctccagcagtgaactaggtcccgggttttttctgtcgaatcctctgtgagccaaagacacaaaacgaacccacacactgtgctcacgcaccactttgaaagcaggaagagcttcacttaaagtgcagaaagtcaaggcaccaacccgacataatctcttttttttttttttttttgagatggagttttgctcttgttgcccaggctggagtacaatggcacggtctcggctgactgcaaattccacctcccaggttcaagcgattctcttgcttcagcctcccaaatagctgggatcacaggcatgcgccaccacacccagctaattttgta

SEQ ID NO: 675928 - DNA, 626 bp, Homo sapiens
tcacacagccagagatccaagaccttcctcactgccacagtcaacagtctaaagccttagcttagcaacaggaaggggtgagacagaatggccaacttgttttgagcaccaacaaggcacaagactttgttctaggtcctgtttcatatgtaatcacatgaatcttcatgattctctgtgacacagcctggaattggagcaagaaacacagactccagagtcagactacctaggcttaaatcccagacccattacttatgaggtgggcaacagtgggcaagttacctaccctctctgtgcctcgcttgccttatctggaaaaaagagacaataggccgggcacagtggctcatgcctgtaatcccagcactttgggaggccaaggcgggcggatcacctgaggtcaggagttcaagaccagcctgaccaagacggagaaaccccgtctctactaaaaatacaaaattagccaagcgtggtggcatgtgcctataatcccagctactcaggaggctgaggcaggagaatcgcttgaacctgggaggtggaggttgcggtcagccaagatcrtgccattgcactccagcctgggcaacaagagcgaaactccgtctccaaaaaaaaaa

SEQ ID NO: 675929 - DNA, 593 bp, Homo sapiens
ttttgcctcccgagttcaagtgattctcctgcctcagcctccccagtagctgggattacaggcacgtgccaccatgcctggctaatttttgtgtaggtatgtgtgtatatrtgtgtgtgtgtgtgtgtgtatatatatatatatatatatatatatatttagtagagatggtttcaccatgttggccaggctggtcttaaactcctgacctcaggtgatccacccacctcagcctcccaaagtgctgggattagaggtgtgagccactgtgcctagtctaaaatatttcatctacttctaaatgtccataatagttggaaattactcaccaggtagatggacttccccaagaggacaggaaaactctttttcgctaaatggcaaagctgattatactgtcctcatgggagtaagtctatattattcttcacaacagatggactagacaaaatacacaattttatggttctgatgaactgtctaaaactatgcaaggatcacttttttattttttgagataggtctcactctgtcacccaggctggagtgcagtggcgtaatcttggctcactgcaacctccgcctcccaggct

SEQ ID NO: 675930 - DNA, 593 bp, Homo sapiens
ttttgcctcccgagttcaagtgattctcctgcctcagcctccccagtagctgggattacaggcacgtgccaccatgcctggctaatttttgtgtaggtatgtgtgtatatatgtgtgtgtgtgtgtgtgtatatatatatatatatatatatatatatttagtagagatggtttcaccatgttggccaggctggtcttraactcctgacctcaggtgatccacccacctcagcctcccaaagtgctgggattagaggtgtgagccactgtgcctagtctaaaatatttcatctacttctaaatgtccataatagttggaaattactcaccaggtagatggacttccccaagaggacaggaaaactctttttcgctaaatggcaaagctgattatactgtcctcatgggagtaagtctatattattcttcacaacagatggactagacaaaatacacaattttatggttctgatgaactgtctaaaactatgcaaggatcacttttttattttttgagataggtctcactctgtcacccaggctggagtgcagtggcgtaatcttggctcactgcaacctccgcctcccaggct

SEQ ID NO: 675931 - DNA, 606 bp, Homo sapiens
tagacaaatcagcttacacatctttgtttgccttaaagaagaatataggacagccaatcatgggaaaggtcaaaatacttcctattttacagtctatgaactgtgctgtcttaatggctgtaaaattgagacttcgtgccatttttcagtttgaggtctttctggttcataaacttttcttttgcatgcatagtaaactctcaaaattctaacttgatctgattttgacacacataatatacctagtgtcttaaaatacaaacaaggctrcatattttataaaataatctagtgacctgccatatcagttcttctggcttttctaagtctaataataccacttatatatctttaaaagtatatttagaaaaataagcatacttggagatcacttaatgattctctatttacttttttttttttattaaatataccaattactacacattttgttaaagtccttctaaagagagaattgtacatttgagggttgggcttgtagtatcttataaggctgaacctgtcccattcccttagaaaaaaaacgcataaaataagtagtgcacataaagtaatgaaaaaatatctccattgttctttaaaaat

SEQ ID NO: 675932 - DNA, 1395 bp, Homo sapiens
atgctggtgtgctgcacccattaactcgtcatttagcattaggtgccattatccaaataacaagtaccagaaacactgattctttatgctccaccagattgaaagcctggagatggaggaggtaggggagggtgagaaggggccacgggaggcctcagaagggatgagtcccaagagaaggagcagcacgggtgacaagggtcagatggtgggacccccgagagccacagcgcagtggcggcagagcccagggtgagtgggatgaggcaatgagaacacactctgtttttggacccatgtggcgtgggtgtcagtggacacggggcaatgcacaccaggctgtggtgatgagagccaggaagaggaggacgtgaagatgtggggtccccgcttagcaggcagtaacagaggaggaaaagctacaatactgcctggtatatatacttgacaacacagcatctgagcctctggtgaccctggggaagacctgatggagctccctgtcaggaccaaatcctggagggaggggagggagctgactgagctcccactatgcgtcacgctcccactcaagcctcgccagcccccattaaggccttataggccccccttgcagatgacaaaagtgacaggcctgaggatcccaacagggcatctcagaacatgctagaggacgaagcagaaaacggcagagcttcggacacagcaggactcgagccgggccaggccctgacagctgtgtgcactgggccgtgttactcagcagagcctcagctcccactcccacatatgagctggtagtgggtttttttcaccagaaccggtaaaactgttctcagtttcgggaggtgtaagtaagtggttgcctcttagactcagatgcagttctggactctggctagagttytgaatttgggaccagggtctctagttcccacgctgacatctctccctagcctggaattgtctcttctgactgtggcctctcaaggacaccagtgaagaggaaggggagctgtagcctggctgttctaaaacctacccacgtcccttgggctgctcctatttagattgaactgctgtgctgcagcccatccctgcattttgccagaagcctgccattttcatatggcctccttgctccatctacagctgaggtctgtcatctaccctgagccaaggttgctccctgttctcagcttgcccagccaggagcaaccttgacccctaggctctctcccctgacccactggacctaggcccactgtctagattttctcaggtagctgccaccccacccaccacaattcctgcaatgaaccctattctcctcttcctttcttaagccctggcactaaagatagcacaggctgggctgggcatggctcatgcctg

SEQ ID NO: 675933 - DNA, 1395 bp, Homo sapiens
atgctggtgtgctgcacccattaactcgtcatttagcattaggtgccattatccaaataacaagtaccagaaacactgattctttatgctccaccagattgaaagcctggagatggaggaggtaggggagggtgagaaggggccacgggaggcctcagaagggatgagtcccaagagaaggagcagcacgggtgacaagggtcagatggtgggacccccgagagccacagcgcagtggcggcagagcccagggtgagtgggatgaggcaatgagaacacactctgtttttggacccatgtggcgtgggtgtcagtggacacggggcaatgcacaccaggctgtggtgatgagagccaggaagaggaggacgtgaagatgtggggtccccgcttagcaggcagtaacagaggaggaaaagctacaatactgcctggtatatatacttgacaacacagcatctgagcctctggtgaccctggggaagacctgatggagctccctgtcaggaccaaatcctggagggaggggagggagctgactgagctcccactatgcgtcacgctcccactcaagcctcgccagcccccattaaggccttataggccccccttgcagatgacaaaagtgacaggcctgaggatcccaacagggcatctcagaacatgctagaggacgaagcagaaaacggcagagcttcggacacagcaggactcgagccgggccaggccctgacagctgtgtgcactgggccgtgttactcagcagagcctcagctcccactcccacatatgagctggtagtgggtttttttcaccagaaccggtaaaactgttctcagtttcgggaggtgtaagtaagtggttgcctcttagactcagatgcagttctggactctggctagagttctgaayttgggaccagggtctctagttcccacgctgacatctctccctagcctggaattgtctcttctgactgtggcctctcaaggacaccagtgaagaggaaggggagctgtagcctggctgttctaaaacctacccacgtcccttgggctgctcctatttagattgaactgctgtgctgcagcccatccctgcattttgccagaagcctgccattttcatatggcctccttgctccatctacagctgaggtctgtcatctaccctgagccaaggttgctccctgttctcagcttgcccagccaggagcaaccttgacccctaggctctctcccctgacccactggacctaggcccactgtctagattttctcaggtagctgccaccccacccaccacaattcctgcaatgaaccctattctcctcttcctttcttaagccctggcactaaagatagcacaggctgggctgggcatggctcatgcctg

SEQ ID NO: 675934 - DNA, 1039 bp, Homo sapiens
caccactaggggagagaagcgcaactgaaacccaggagcagccaggcgcggcaggtcacgtctgcaatctcagcaccttgggaggctaaggagcagattgcttgagcccaggagctcgagaccagcctggccaacatggcgaaaccccgtatctactaaaaatacaaaaattagccaggcacggtggtgcacacccatggttccagctactcggcaggctgaagtaggcagatcacctgagcccaggagacagaggctgcagtgagcagagatcatgcccctgcactccagcctgggcaacagagcaagaccctgtctcaaaaacaaacaaacaaaaaacacgaaaaccaggagcttctgcatgaagcagtatggcttggctattccygggacagaatgtaaagccaggaggagcagcacctggcccgccatgtagctacaagacagggagggctctaactcacatagcttcaccttgagggacagggccagaggctggtccacctggcacaatggaggaagcagcaacatccttcatcccagaacagcagagcaaagcctgcggggatcctaacaggtggggtgggaagggggctggctgttcgacaggcagaccacaaattccggagaaacacgggtcacactagatatgaattacacacttctgctgccgaatggtggtggggaagcacagaaaggattggaatttccatccttacagttcccaccccagtgacccaggagagtgagggctcaggaatatggtgggggaggggtggtgtttcaatctttgagagttcctgacccaccttcagggcctagggacgtccttatttgccccaagggttccttttcaaactctaagggaagcacttttcttcacagagacctgctccactactgaaaagccttttttttttttttttttttttgacagagtctcactctgtcacccaggctggagtgcagtgaggtgatctcggctcactgctaactccacctcctgggttcaagtgattctcctgcctcagcctcccga

SEQ ID NO: 675935 - DNA, 2106 bp, Homo sapiens
ccatgtgaattaaggcactaactttagaatcctgaggcttgggtaggtaaattgaattactcaaggaaaaaatggctaataagagatagagctggaacaaagagccattcatacattcattcactcattcacacacagtcacgcaccgcatagcaaggtttggttcaaaaatggaccgcctacatgacagtggtcccataagactatgatggagctgaaaaattcccatcaccagcctccagggccatgaggataagtttctgtcatttaagtcacccagtctacgataatttgttatgatgaatacactcacagtgaggaatgaggatcatgattcagagcgagactctgagacctgacttcattttgggcaaagcctggcccaccatgatctgtggtgggtacaggggagtggtatctctgaggttttcagcttctgtgactgctccattcccactatcacatctttctgggtcctcctaattaaccacctccttacagggagcttagctaaagttggcatctttctgtgcagtggggtggggataggcccccttctctgggctggaggggaaggcagttaatatctacctggaagcccagcagagcctggggcccacattgaaagctgtcagtacccatcagtgacctaacagaattctcactatcttcttttaatgggtagaatttgggacatcttaaaaacaaatgacatttaatctatacacrattttttaaaagcctttattttcactttttatatctgagttctcaactatcttgagggatattctctttaagggaatgcagtggcctttctgggcacacataatttcaaaagaacagcagtttcctttacttttataaatttgtttttctttaatttttataagtccgaacagttttttgcactttcagtcttaaggagaatgcacaataatgaattgtatctttgtgggaagttaaagtctgtagccaatttcttgcggtcattatttggaaaatttcctagaatttagacagtttgatgatattctcatagagccatgaagccagtttcaaacagcttttagccccattaaattgttttaaagcatgtcagttctcctgtgtctatcagatacatgaaggccggggctggcatctatcctgttcactgtcctgtgctctctgccctaggacttattcaatgtttgttgcatgaataatagaaattgttcaacactcaatatcaagccagtaaaataagaccatttcctccttaaacacgatgtctttgagaaactctgggaatcttacatcttctagatggagttactcttggaatcctggaaatggccggagagactgtcatacattttcagagaagtaagcttgacctccacaaagtgcatcaaacaaaacaaaatgaaacaaagaaaacaatagcagaaataaaaggtgtctctgtagctctttgtctgcagagatgctttgagatccaaaacagtttttctccaggaaaacagcatcaaggccaaagtcctccttttaaagccatagaggaaatgcatgattgtcagtaggagagcaaaactctttggagtgggtttagaggcagtcgcagactggggagtttgaattgacaagttttcttgaattgagtcatccaaaggtgacctgtctcatcttgtaacatgagacactcctggtctgtaaatgcaaccctgatgaatttccacaaggatcagtggagagtagaggatatattcagaatgaaatgaggtagtaagtgggttagtggatgcaacacattattctgatcttcataagtaatattctgttgatcttatttttcttatgaaaggaacttcacctctgcccatcacctcctacttctaagagagttgttttgtctgctctataaatgaggtcatggtgtatgacgaaataaccaataattcttaaatacctctgggattttctattaactagttttcctatctggcagggacagcttctgtgggaaatctcttaagttttatgggaatttatttgggatatttttatgtttaatgatgatgtggacaaacccagtatgttctcatggtttttattctcaagtaa

SEQ ID NO: 675936 - DNA, 2106 bp, Homo sapiens
ccatgtgaattaaggcactaactttagaatcctgaggcttgggtaggtaaattgaattactcaaggaaaaaatggctaataagagatagagctggaacaaagagccattcatacattcattcactcattcacacacagtcacgcaccgcatagcaaggtttggttcaaaaatggaccgcctacatgacagtggtcccataagactatgatggagctgaaaaattcccatcaccagcctccagggccatgaggataagtttctgtcatttaagtcacccagtctacgataatttgttatgatgaatacactcacagtgaggaatgaggatcatgattcagagcgagactctgagacctgacttcattttgggcaaagcctggcccaccatgatctgtggtgggtacaggggagtggtatctctgaggttttcagcttctgtgactgctccattcccactatcacatctttctgggtcctcctaattaaccacctccttacagggagcttagctaaagttggcatctttctgtgcagtggggtggggataggcccccttctctgggctggaggggaaggcagttaatatctacctggaagcccagcagagcctggggcccacattgaaagctgtcagtacccatcagtgacctaacagaattctcactatcttcttttaatgggtagaatttgggacatcttaaaaacaaatgacatttaatctatacacaattttttaaaagcctttattttcactttttatatctgagttctcaactatcttgagggatattctctttaagggaatgcagtggcctttctgggcacacayaatttcaaaagaacagcagtttcctttacttttataaatttgtttttctttaatttttataagtccgaacagttttttgcactttcagtcttaaggagaatgcacaataatgaattgtatctttgtgggaagttaaagtctgtagccaatttcttgcggtcattatttggaaaatttcctagaatttagacagtttgatgatattctcatagagccatgaagccagtttcaaacagcttttagccccattaaattgttttaaagcatgtcagttctcctgtgtctatcagatacatgaaggccggggctggcatctatcctgttcactgtcctgtgctctctgccctaggacttattcaatgtttgttgcatgaataatagaaattgttcaacactcaatatcaagccagtaaaataagaccatttcctccttaaacacgatgtctttgagaaactctgggaatcttacatcttctagatggagttactcttggaatcctggaaatggccggagagactgtcatacattttcagagaagtaagcttgacctccacaaagtgcatcaaacaaaacaaaatgaaacaaagaaaacaatagcagaaataaaaggtgtctctgtagctctttgtctgcagagatgctttgagatccaaaacagtttttctccaggaaaacagcatcaaggccaaagtcctccttttaaagccatagaggaaatgcatgattgtcagtaggagagcaaaactctttggagtgggtttagaggcagtcgcagactggggagtttgaattgacaagttttcttgaattgagtcatccaaaggtgacctgtctcatcttgtaacatgagacactcctggtctgtaaatgcaaccctgatgaatttccacaaggatcagtggagagtagaggatatattcagaatgaaatgaggtagtaagtgggttagtggatgcaacacattattctgatcttcataagtaatattctgttgatcttatttttcttatgaaaggaacttcacctctgcccatcacctcctacttctaagagagttgttttgtctgctctataaatgaggtcatggtgtatgacgaaataaccaataattcttaaatacctctgggattttctattaactagttttcctatctggcagggacagcttctgtgggaaatctcttaagttttatgggaatttatttgggatatttttatgtttaatgatgatgtggacaaacccagtatgttctcatggtttttattctcaagtaa

SEQ ID NO: 675937 - DNA, 2106 bp, Homo sapiens
ccatgtgaattaaggcactaactttagaatcctgaggcttgggtaggtaaattgaattactcaaggaaaaaatggctaataagagatagagctggaacaaagagccattcatacattcattcactcattcacacacagtcacgcaccgcatagcaaggtttggttcaaaaatggaccgcctacatgacagtggtcccataagactatgatggagctgaaaaattcccatcaccagcctccagggccatgaggataagtttctgtcatttaagtcacccagtctacgataatttgttatgatgaatacactcacagtgaggaatgaggatcatgattcagagcgagactctgagacctgacttcattttgggcaaagcctggcccaccatgatctgtggtgggtacaggggagtggtatctctgaggttttcagcttctgtgactgctccattcccactatcacatctttctgggtcctcctaattaaccacctccttacagggagcttagctaaagttggcatctttctgtgcagtggggtggggataggcccccttctctgggctggaggggaaggcagttaatatctacctggaagcccagcagagcctggggcccacattgaaagctgtcagtacccatcagtgacctaacagaattctcactatcttcttttaatgggtagaatttgggacatcttaaaaacaaatgacatttaatctatacacaattttttaaaagcctttattttcactttttatatctgagttctcaactatcttgagggatattctctttaagggaatgcagtggcctttctgggcacacataatttcaaaagaacagcagtttcctttacttttataaatttgtttttctttaatttttataagtccgaacagttttttgcactttcagtcttaaggagaatgcacaataatgaattgtatctttgtgggaagttaaagtctgtagccaatttcttgcggtcattatttggaaaatttcctagaatttagacagtttgatgatattctcatagagccatgaagccagtttcaaacagcttttagccccattaaattgttttaaagcatgtcrgttctcctgtgtctatcagatacatgaaggccggggctggcatctatcctgttcactgtcctgtgctctctgccctaggacttattcaatgtttgttgcatgaataatagaaattgttcaacactcaatatcaagccagtaaaataagaccatttcctccttaaacacgatgtctttgagaaactctgggaatcttacatcttctagatggagttactcttggaatcctggaaatggccggagagactgtcatacattttcagagaagtaagcttgacctccacaaagtgcatcaaacaaaacaaaatgaaacaaagaaaacaatagcagaaataaaaggtgtctctgtagctctttgtctgcagagatgctttgagatccaaaacagtttttctccaggaaaacagcatcaaggccaaagtcctccttttaaagccatagaggaaatgcatgattgtcagtaggagagcaaaactctttggagtgggtttagaggcagtcgcagactggggagtttgaattgacaagttttcttgaattgagtcatccaaaggtgacctgtctcatcttgtaacatgagacactcctggtctgtaaatgcaaccctgatgaatttccacaaggatcagtggagagtagaggatatattcagaatgaaatgaggtagtaagtgggttagtggatgcaacacattattctgatcttcataagtaatattctgttgatcttatttttcttatgaaaggaacttcacctctgcccatcacctcctacttctaagagagttgttttgtctgctctataaatgaggtcatggtgtatgacgaaataaccaataattcttaaatacctctgggattttctattaactagttttcctatctggcagggacagcttctgtgggaaatctcttaagttttatgggaatttatttgggatatttttatgtttaatgatgatgtggacaaacccagtatgttctcatggtttttattctcaagtaa

SEQ ID NO: 675938 - DNA, 582 bp, Homo sapiens
ggtgaaaccccgtatctactaaaaatacaaaaactagctgggcatggtggcaggtgcttgtaatctcagctactcgggagactaaggcaggataatcgcttgaacctgagaggcggaggttgcagtgagctgagatcatgcaattgcactccagcctgggcaacaagagtgaaactcactctcaaaaagaaaaaaaaaaaaaaaaaaaaagaatcattcatcaaccaaaagattctgtgtcaaatacatttggtaaatcttgcattcataatcctgtccttttctggagagtcgtggtatatatattaagattgagagatgtcctgcagcaaaaaaagaaaagcaaacaaacataaacaataacaaaggtttaactttaatagtctttgaacttgtttgaaactgttattcatggaacatcgattaacatctaatggacagggtttgagaaatgcgaatcataacaatagggtgacattttatcacagaatcacaaaatcttagtactggagaaagcctcaggaggtcrtcttgtctttgggacagacatacaacttagccatctttttatagaacatagtc

SEQ ID NO: 675939 - DNA, 2001 bp, Homo sapiens
atttatcaatgttggcttttgttggaactgcttttggagatttcatcataacatctttgcccatgcctatgtccagaagggtgttgcctagattttcttctagggtttttatagttttagaagaaggataaattgttgagggtgaagatgagcttgactttcaaaatgccgagtttaagtcgcattttggacacgtagggacccagtagatgggtgaacgtataatctggagctcaggtgaatgatctgtattggtatttgatcatcctctccttttttagaaacratatattttcatttcaatttggtttggttagtttgtttttgataatgcaaatggttgagaacttaaaggttaagcatggagaaagtgcttctaattacacctttgtcacaagtcatggatggcttcataatttcaaaagctattagatccgtacagcattaaagtgggctgctaagaagttccctagggcaattgtgaagctcatcaacgatgagcattacctgacttaacacgttattatcacaaaccaaatctaacttactttgggaaaaggtgcttggtgaaatgagtattagtaaggaagacaagagtttgactgatatcaaagccctgaaggaccaactcacagtaccatttagtaaaaatgcatgtaaagactgtgggctaaatcttgtctgtcacattcaacttaaaaacaaatgtgtttatgtaaaaccttgtgagttttagatatgctcagatacagaggagcttctgtacagaagagaggagataaatagaaccacagaagaagaaaatacccagaaggtgaaatcggaagtgatcaagacagacgtaacgaatttcttcccaaatcaatgtctccataactgtgggtttttgatatttactttattattttactgcccacatgtcaatctttttaaataacaaaataacaaaaaggaatggtcatgtttattaaggagtagtgtctagcatatagctttacacagccccattcgtgcatcaggaatctaacacaaaggccgcaaacatgaatgaaaaaagaatttccttcacaacttgacacttcacaccttatattttcatccatataatctatagaaaagttaggaaggtttgatattacttttctaaaaacagataactcaaacactcactgttaaccttccactttagtcttcctctctcttgactcatatgttaattaacaccaattactgaaagttttaatagcaaattgacttcttttgttttgatttccaatagactttattttagagcagtttctgttcatagcaaaattgagaaaaaaagtatagatccatacaccacctgactccatacatcataacacccctgcaggctcccagtcactcacaccagagtggtgcatttgttacaattgatgaacctatattgacacatcttaatcacccaaaaccctgagtttacattagggttcactgtcagtgctgtatattctatgtgatttcgcagtgtataatgacatttatccacaattagagtgttatacagaatagtttgacacattaaaaatcctctgtgatcctcctattaatccctcattccctccaaactctttttcactgtctccatagttctgccttttacagaatgtcagaccattgtaataatacagtatggggcctttttagattggcttctttcacttagcaatatgcatttaagctactcccatgtcttttcattgcttgatattgcatttcttttagcagcgaataatattcaattgtcttgatgtaccacaatttatttacccattcacctactgcagaatatcttggttgctttcatgttttggaaactatgaaaaaaaagctgctatgcacatcactatgcagattttgtttggatgtaagttttcagctcatttgtgaaaataccaagaagtgtggacttttaaaaaactcagccacaatgaccaaccctacagtttaacaataaat

SEQ ID NO: 675940 - DNA, 2001 bp, Homo sapiens
atttatcaatgttggcttttgttggaactgcttttggagatttcatcataacatctttgcccatgcctatgtccagaagggtgttgcctagattttcttctagggtttttatagttttagaagaaggataaattgttgagggtgaagatgagcttgactttcaaaatgccgagtttaagtcgcattttggacacgtagggacccagtagatgggtgaacgtataatctggagctcaggtgaatgatctgtattggtatttgatcatcctctccttttttagaaacgatatattttcatttcaatttggtttggttagtttgtttttgataatgcaaatggttgagaacttaaaggttaagcatggagaaagtgcttctaattacacctttgtcacaagtcatggatggcttcataatttcaaaagctattagatccgtacagcattaaagtgggctgctaagaagttccctagggcaattgtgaagctcatcaacgatgagcattacctgacttaacacgttattatcacaaaccaaatctaacttactttgggaaaaggtgcttggtgaaatgagtattagtaaggaagacaaragtttgactgatatcaaagccctgaaggaccaactcacagtaccatttagtaaaaatgcatgtaaagactgtgggctaaatcttgtctgtcacattcaacttaaaaacaaatgtgtttatgtaaaaccttgtgagttttagatatgctcagatacagaggagcttctgtacagaagagaggagataaatagaaccacagaagaagaaaatacccagaaggtgaaatcggaagtgatcaagacagacgtaacgaatttcttcccaaatcaatgtctccataactgtgggtttttgatatttactttattattttactgcccacatgtcaatctttttaaataacaaaataacaaaaaggaatggtcatgtttattaaggagtagtgtctagcatatagctttacacagccccattcgtgcatcaggaatctaacacaaaggccgcaaacatgaatgaaaaaagaatttccttcacaacttgacacttcacaccttatattttcatccatataatctatagaaaagttaggaaggtttgatattacttttctaaaaacagataactcaaacactcactgttaaccttccactttagtcttcctctctcttgactcatatgttaattaacaccaattactgaaagttttaatagcaaattgacttcttttgttttgatttccaatagactttattttagagcagtttctgttcatagcaaaattgagaaaaaaagtatagatccatacaccacctgactccatacatcataacacccctgcaggctcccagtcactcacaccagagtggtgcatttgttacaattgatgaacctatattgacacatcttaatcacccaaaaccctgagtttacattagggttcactgtcagtgctgtatattctatgtgatttcgcagtgtataatgacatttatccacaattagagtgttatacagaatagtttgacacattaaaaatcctctgtgatcctcctattaatccctcattccctccaaactctttttcactgtctccatagttctgccttttacagaatgtcagaccattgtaataatacagtatggggcctttttagattggcttctttcacttagcaatatgcatttaagctactcccatgtcttttcattgcttgatattgcatttcttttagcagcgaataatattcaattgtcttgatgtaccacaatttatttacccattcacctactgcagaatatcttggttgctttcatgttttggaaactatgaaaaaaaagctgctatgcacatcactatgcagattttgtttggatgtaagttttcagctcatttgtgaaaataccaagaagtgtggacttttaaaaaactcagccacaatgaccaaccctacagtttaacaataaat

SEQ ID NO: 675941 - DNA, 1499 bp, Homo sapiens
ataaaatctaatttcaattaaatacctacaaataggccaatcctcaaaaagttgtttcacttttgttaggagagcagtgtgtcctcatctttttttctttttttctttttttttttttttttttcagatggagtctagctcttgtcaccaaggctggagtgcaatggcacaaccttggctcactgcaacctctgcctcctggttcaaatgattctcttgcctcagcctcctgagtagctgggattacaggtgcccaccactacacctggctaatttttgtacttttagtagagacggggtttcaccctattggcaaggctggtctcgaactcctgacctcaggtgatccgccaacctcggcctcccaaaatgctggaattacaggtgtaagacaccatgcccggcccctaatcttctttaaattctgttttgctttacatctagtttgttttcacaatttttctcccttaaaatacaatttaattgactatcatcttgcaaatcaatcttgagactttgctaatgtcaaaacaccagagtaaattgtgtgtgatttagagacagctatggaattcagagatcaaattgtagccaaagtattattttagagttcaatgatggtatctaaaagatattattcaagacatatttagaagtgattagtcattttactattttcatggaaaatctctgattcactacttcaaatctctcagccttacctcttatttcagccatctttgcagtaaccagttccccagggactttgacaaacttaatgtaggtgatacctgacagcatctcaccatgagcctgtgctaaatgcctcttgcttcctgccttgtgcttctctgaaaccacagcacaggccatgatgcgaacttgctcactactcggacaaatgcaaactgaaagtgcagaggaagttaatgcttcacagattaagccttgaccgatgagaaatgaaattctatggataaatgctttcttatatcttcccatgaatagatcattctgagaagcatttcctaagccttctcacaaagttaagcaacagcgagcaaccaatcacctctaggagtggccacttttcgtaaggattgtaattggctttccctccttccctgtttcacaaactccatccctcattcctgttccctggatcattgtttaaaataagctattccctctggcttttattttagggaaactgaggcgaagacattatatacatttattaattatgtttagacaaactccaaatgtttatcacagcttggtgattacaatacaataagaaacatttaagcgatgcccactaaaagaaatttctaatttatctacctttttttttraagaaaagatactgtatcagggagagaacacatttattcaagatagataacaatagggattgtatacaaatgacacataaggctgataagcacatagctaaggaagtctttgtttttttattcactcattcattcattcattca

SEQ ID NO: 675942 - DNA, 2024 bp, Homo sapiens
ttttgagtatttgaaactgaagctcagaaagataaaatgaattgtccaagatcacacagctgcatgcttggaaagttgggactaaaatttgtgtgcttaatttccttttttcatgctgcttctactacataatataggaaaatcaaattggagtgatttgaagcccttattgttacawctctcccaatagtcctgtttttgctcttcagggtaagagttaaatgtttctgcttccacaagcaattacttatacgtttaaaaattaatgttatgttcttgtttctgtgttttctcttttctaaatacctcacctccttagtcactccattttggacaatctttggtttgtcaaaatctctctcaaactgcatactcataagcgtagatctggtatgaatctgagcttttgtaaatcctgcccctgttaagttttatccttcgtcctacaataacctttctaagtacatattgttatcatcttcatcttatgtatgaggagatggagattcagggatgttaaggaatttgttcacagtcatgttacatttaagcatatgtgactgttgtatgttgtactagcatatccttatatatctctacaaatctattgacaaaatttagctttttaagcacctactatgtaatagatactattatatttacaaagaaatataagctgacttttcttccctaccttgtttttaagaagattacaatgttggtgaggctatgtaaaatatatgcatttaaaaaatcccttgaaatacaatataatataaatggcaaacattattatggaggtttttaggaaggataaaacaaggaaaaagggaaaataactaacacttaaacattgtttttatatttaccatgtgccagatgtcagtggtttttccatataaaatacaaatacaaatcttcagggatttaagcattattcatctgattttaaagtaacgaaactaacactcagaggcgggaaaaagaaaagcaagaaatgtagagggcgtgcttcttaggcacataattaaacagcataactgcaggaagtcatattggagaatagcaggagacaaggcagcaatccatagtaagtaaatgagttgaatttcagaggtatcattccaaaggtgttggaggaaattattttcaacatcagatactctaatacttcggtatatctgattctaataaggacaagaatcttgcacacctgttctcgataatcattagttttagaaagtaaacagtactgctaaagaggtggtgaagctaatgcagaaagaaagaaagttgagatgtcaataaagagaattgttttaaatgcccaattggagtactggggctctccctccctaagttaacctttctctgacgattattatttattaatactcccaactggagatatcagagcatatacgcattttaaaaatgtaagtgcaatggccaggagcagagttccagcttgtaaagcagatgtaaatatgttgtttttataccttagggaggtaagacctctgacttctcaatgaactgaggctctaaaaagcaacctattctaccaagtttattttgcatgcaagcataaggagctgttacatatgtagtggaattttctgatttccatgaacaatctttatccccagaagtttctgctatgccaatttgttgaaattcctaccattgttatagaatcattctcttttgttaaagccttgtacctttgttacccagttaaaagacagtcatcttgaaaggacatcatagatggggtcaataacttgttaggatgaattatgttttttatgtcatctaacaagctctaaggctgtgttctccaatattatagccactagcaacatatggttatttaaattcaaatttaaatttatcagtaactaccacattaaacagtgaaaacatagaaagttgccataattgaaaaatgttttattggacagtgctggtttaatggtaatattttgtgggcaacagaaaattagaaagtatcagagcctgag

SEQ ID NO: 675943 - DNA, 675 bp, Homo sapiens
tgtatatcacatttctttattatatattataatatcacaaagttccataagaatcatttcaaacttttagcctcaagaattataacaaatgtatgttttaagctattatatttgtgataattagagcaccaataggaaactaaaacaagcaggtattttatttaagaagaaatatttatagctgattaacataacatgatgctcaagcttattaagagaaattaaactaaaattataatatgataatatttcattaccatcagattaggcaaaaatgaaaatttaataatgtcagatttatggagaagaaattgattaattagaattctcacccactttaggtggtataaattttaggaaaataggggccatgggcagtggctcatgtctgtaatcccagcactttgggaggctgaggmgggtggatcacctgaggtcaggagttctagactagcctgaccaacatggtgaaaccccatatctactaaacacaaaaaattagctgggcatggtggtacatgcctgtaatcccagctgcttgggaggctgaggcaagagaatcacttgaacctgggaggcggaggttgcagtgagctgagattttgccattgcactccagcctgggcaacaagagcgaaactccatctcaataaataaataaataaattttaggaa

SEQ ID NO: 675944 - DNA, 631 bp, Homo sapiens
ttttttttttctttcttttttaamcctttcagtccttttgttactcttatatccaaccacccatttgggtaccacacatgtaaaggcactcccaattctcatcctgatctgagttaatagcccaccatctatacaatcatctttcctattaatagtttccacaatgctgagggggaacacatactcagcaagtcaatggtctgggcaacatatcagcaggaaaaggactttaattttataattaaggtaggtttagaatacagtataaatatcctccaacagagacgattcactgacagatactttaacgcagtgctgtttaatagaactttctgatatgatgaagatgttctaaatttagccactaaccacatttgcctatttgaatttaaatctaaattaattcaaattaagtaaaatagaaaaggaaatttgaaaaacaactctatttcctatagcatccaaaggaataaagtacttaggaatgaacttaacaaaggaggctaaagatctgcatactgaaaactagaagatagtgctgaaagaaattaaaggcaacacaaataaatggaaggaagtcctgtgtgcagggattagaagatttaatactgttaggatgtcactactacca

SEQ ID NO: 675945 - DNA, 1015 bp, Homo sapiens
tgtcagcatctacacctgatcccttgctcccagagttggtaacttactctcttgcactctctgcttctgccagtctgaactcaactggaaaagtcagccacttccaaggaaataaccacaaggaaaactccaaggaggctttgctttcctggtacatagcgtaacagtgaacaaaagtaggaacaaaaccttcaagaagccacgctattcggattggatcagaggcttaaaagcaaggtttgttccatatggatacatttaccattcctacccttcttagttttgcaagcctaacctgcatgggttccaggccccagcttctgccaactctgatgggaaagcatcgtgggctgctgaaattgtattccttctctagcaccttctctggataggcaataaagtagtggagcaaaagggtggaagaacacttcctggccaactccatgcccacttcaaagccagaatcaggaagctgttgtgccagggagtacctgagaagagctgaaagctgaagctgctccttctgtgatacaagagacaatgaaaaactggtgaaggtgctgatgatgtctgcagggacagacgacactgactcccaccttgtgaactctgcacagatgctacacaaactggctgggcacggtggctcacacctgtaaccacagcactttggggtgccagggcgagtggatcgctgagctcaggagttcgagaccagcctggccaacatggtgaaaccccgtctctactaaaaaatacaaagattagccgggcgtggtggtgggcgcctgtaaacccrgctactcgggaggctgaggcaggagaaccgcttgaacccgggaggcagaggttgcagtgagacaagatcgcaccactgcactccagcctgggcaacagagcaagactccgtctcaaaaaaaaaaaaaaaaaaagaactcaaacttctagtgactttcacaggtaatttgtgatctgaaaatataattgaatctattaagtaattaaggctatcatc

SEQ ID NO: 675946 - DNA, 1416 bp, Homo sapiens
aaataataaataagtggaaacgacttggcaaaaaatctgccacagaattttgagaactattaaaataaagtctaatgagaaacatgtgtcttggtcaacactgaaacttctgtagaaatgtgaagtcatctgtttctagtgttgaaaatccgctgaaacttgatgagaatttgaactttgggggttaacattttttccagggcatgaattgaggagttttgttgttgttgttgttgttgttgttgtttgagatggagtctcgctcttgtcacccaggctggattgcattggtgtgatctcagcttactgcaacctctgcctcccggggttcaagtgattctcctgcctcagcttcccgagtagctgggattactggtgcccgccaccacgcctggctaatttttttgtatttttagtagatacagggtttcaccatgttggctgggctgttctcgaactcccaacctcaggtgatccacccgcctcggcctcccaaaatgttgggattacaggcgtgagccactgcgcccagcttgaatcgagtttttttttttttcccacttatgtccaaagaggaatcctgtttcaagtacctagtgaaaagctgtggaagggatttgtttgttgcaacactattgtttaggacagaaaagcagagtaattttgtttatatgaaatctaagttgggggcaggtgcagcggctcatatctgtaatcacaacactttgggaggttgaggcaggaggatcacttgagactgggagttcaaggccagcctggaagatataacaagaccctgtgtctaaaaagtaatttttwaaaaaaatagccaggcatgctggcacatgcctgtagtcccagttactcagaaagctgaggtggaaagattatttgagtctaggaggtcgaggctgcagtgagtcatgatcacattactgcactccagcctgggcaacagagtaagaccccatctcaaaagaaaagaaaagaaagaaatctaagttggaaggccaaattgtaaaggccatgtgttacatatcaaaaaaaaaaaaaaaaaagtggggtgaaaaccaagaaaaattagcaagaggcatgaatatccaaatggccaattaaaaataaaaaagtgctccatgtcatcagtaaccaaggaaatgcaatgagatgccactgtagacccactgaaatggccaaaattaaaaagtttaataagactgggatgggaatgtggaataacaggacatctcatcactgctggttagaatacaaactggtaaatatatcttagaaaatgccttggcattgtcaactaaatttgaacatttgtattcttgtcatcaagcagttccactcccggtatataagatatgtgtaagttgattgggcccggtggctcacacctgtaagtccagtgct

SEQ ID NO: 675947 - DNA, 2029 bp, Homo sapiens
atttaccaaatgcctgctgtgttccaggagctgttcttcaagacgcttacatccactggatgaagacagataatatatgagagaacaggttaataaatcagatcaatattatgaaaaaacaatattgggggtgggaggaggagatgtttgtgggggtggtcagggagggcctctctgaggaagtagcagtacaggttaaggaggacccagtaattccaaaagccaagaaatgagtgcttcagatagagggatgagtaagggcaaagaccctgaggccagagtgaaaatgaatattaagagggtagaaagaaagtcactctgggttaaaaagtggtgagaaagaacaaatgcagggaattgtagttcatattaaaaattttatattaacaccaatgggaaacctttggcaggtaaaaagctttaaggagaagagtgccaaaatctgtcctattagtctaaaaggtgactctggttgctgtgtagagactgactagaagtcagggtgtacacggcaggggcgagtgtagagcagtgagcccagttcagtcactgatatcataatctgaggagagagcagatgacgtctggaccagaaatggacataagtagacaactgtgatatactttggaggtagtgccaacagcgttttttaatggattggatgacacctggcagttggctgagtactactacaacagagcggcctcagcgccaaacaagtgtgaggaaaagaatcaagaaagaaaagaagatgcatcaaaaaggtaaaatctgtgacaatgtgatagacaaagatgtaatcacactgtttctctatattttatgtagtttattctataaatattgtcttctatgctgcatgtcaatctaaaacttttttttttttttggtgacagcatcttgttctttcatccaggctggagtgcaatggcacgatctcagctcactgcaatctctccctgggctcaagtgatcctcccacctcagcctcccaagtagccgggaccacgggtgcacaccattatgcttggctaatttttgtattttgggtagagacggggtttcactatgttgcccaggctggtcttgaactcctgacctcaagtgatctgcccacctcagtttcccaaagtgctgggattacacgcatgagccatcatacaaggccaatctaaaatttttataattactttccatgacaataaaagctcttcatagatgtaccaaatatgctaagtatgttggccttctgcacattcaagttatttcaatttttactatgactttatacataaagctttaactgcagattagattgtaaggggaattagtaggtcaaaagtaggaatagctttagggctttaatacctagcacccaraataatttcctgacaggttttaccaatttactctcttaccaacactgtaggtgagttattatctaaatgtattgcatattctcattaaaagcaaacataaatcttggtatagcatttataaaaggtcatgaacataaattatataattgaacatacaggagaattagcatttttggagaatatattatcattttaatacaaattttgccagtagtactgtagattctctaacaaaggcatttctactgaaaatagttatataaactctcagattacagctcttactatgaactactgagagcagatcagccttcttgatgtgttgttgatctttaaactttctttgaaatataataaacatactgctaaacaacatcatgttcaacctcctgtgatttaaataatctgctacaaagttaatatgccagaattttattatcaaaaattataattagttatgaaaggtgtatgagaaggttggtttactttttatttttttttaggatggagcaatcctttacttttatatgctttgataaagaggttttcaatacaccatcttcccaatggagaagagagaacatgaaaatcagcctctagccatcatcagcagctctgctcggggcctaagatcctccttgcgcatgtg

SEQ ID NO: 675948 - DNA, 618 bp, Homo sapiens
agagccttgaccaagtgtaaacgaatccattacggatgaaagttgcagccttggagggtgtcacagcagagaagaaagagcrggagcggagtttggcaggcgaacataagcgtggaccagcagctgcaagctgggaactgtcaggacagcatcttagtttggacagcaggtttccttctaaactggaggccaggagctcacagcagtggcttggctatgacaagcaggttttctagactgagtgaagcacagatgtccctagatatgctcctgacctagaggagagacctgaaggaaacatgagccttctctcgacagagtcaaaaagttaaggagagagtggtaacacgcattatttgcaggaagcctggaagttaacagtaatgctgatgcctttagtaaagaatacagcttccatctctagtacatttctagttttgaaactctgctacatttccatttcattccctcctgttgagaaaacctgagcaagagattatttttccatgagaaagtgggcctttaagattttttggccttgtatttcctatatctccactcctaaaaacattaccttaataaatatcaatatcatagacttaaatatttaaatttgga

SEQ ID NO: 675949 - DNA, 567 bp, Homo sapiens
cttcaatcttgttctgggggtaagttagtatttgaagcacctcaatcaggtggctaggaagatgctttaaacacttatctaaatatacgccagagtgttcatcagcataagggatattagtaatttttcactgatgaatgcagcctgaaaagtaggtggttgtctagacttttagaggcaaaatgcatgaaatgaggtgtaagaatctggcagatcctgcaaaataatgactttttatagtayctcaggtctagagatctccttgcccctgtaccttccccctccagcactccacacacgtttatgactgtggcctgatccaaccaagcaattaggtttcttaattctgctttcagaatatcactgcttctgcttcactgtgaactttttagtcaaggtgtttgtggggttacttaggagcagagaaagaacttctccaagctttccagaagccctgcttgctaataaacttgtcatatagataactgttttagatttgcttttatagtaacacaccacgaggtggtgcggttatgtaggaggacacatatagccttactttcctgt

SEQ ID NO: 675950 - DNA, 414 bp, Homo sapiens
tgcaaatatatgtagscttgttttatctccctgtttttgcacgaaaggtagcatactctgcacatcattctgcaccttggtttttgttttctttttagaaggaagaagacttctttattgctagtaggactaagcagccaatttgtctatacagtctgaaaacattcctaaaactgcaccctacacctccacctctccccaccccacccttatgagcaaagagctatcatagttcaattctgagctgctcacctcccctgaatctatattgacatagggttgaacccaagggaaacctggtgttcagagaactcatttttcaaaatttatctatttttaattgactaataaaattgtatgtatttatcacatacaacatgatgttttgaaatatgcaggcatcgtggaatggct

SEQ ID NO: 675951 - DNA, 414 bp, Homo sapiens
tgcaaatatatgtagccttgttttatctccctgtttttgcacgaaaggtagcatactctgcacatcattctgcaccttggtttttgttttctttttagaaggaagaagacttctttattgctagtaggactaagcagccaatttgtctatacagtctgaaaacattcctaaaactgcaccctacacctccacctctccccaccccacccttatgagcaaagagctatcatagttcaattctgagmtgctcacctcccctgaatctatattgacatagggttgaacccaagggaaacctggtgttcagagaactcatttttcaaaatttatctatttttaattgactaataaaattgtatgtatttatcacatacaacatgatgttttgaaatatgcaggcatcgtggaatggct

SEQ ID NO: 675952 - DNA, 1297 bp, Homo sapiens
ttatcaaagtagttatgtgaagtaagattttaaactaaaaaaaaaaaaaaatcttctatattgtagcctaagggcatttctgtaggacctaaaagccacgtgttttcacagaatcataaaggttcacagcacattcttacatcttactcttggcctgaaaacaatcttttctgatcagcttctggggcgyggctgtttcaaattcagcatggtgctatttagtaaatctgtcggttccccaaaagctgcctctgtgagctcctctcaaagctggggaatcacaagtgatgcgccctctgcctcctccccacccctcagctgacactgctttccctctgggcctgcgccgccaggagcctccctgcccggcatacctggagccagtctctgtgctgtggggcaggtcgggaacgtccacgctggcccgaggaagctgtgcaagcagaaactcggagcttcactctcgtccccagcatctgaagagaaggcaggtggagtgagggtctccccgtgggcccaccccaccccccactggctcacccagctccttgtcctttcacactcctttggttccgtgtgtgcgccccacctcctccacctcccttcgaggcacccacagaggtggctcccagggatgctccccctgactgcctggagctgtccacctgctgtgggctctcggaggctggagaaagaggctgggctgggctaggaggctgaaggggagggtgaggggtggcgaccagaggcacctggtagaccagtttccttctgtcatgtgcctacctagtctctgtcattataatatttacattttgttcccaaatggaatttttaaagagaaaaacaccatgtgacataatctgtgaggatttaatacagagctaaggttgttttcaaggagaaagaaaactgagacatttttaaatatgagaaaaatcagataatggagtgacataaaaacataagcctttctttaaaaaaaataaaagacttttttttactcagtccaggaaaccaagggataaatggaaaaaccatgaaaaatagaaaaagtctatttgaatataaaactaaagccaaagaacgtgggattattctttggcatttttgctctcagaagagaacataacaaaagctagaacagtggaagatgaggtgagaagagtctgttttcatttcctcaactctctgagcagagagttagtagagagcatttcaacttgagaagtcgaatacaaaggtattgaatgggtggaaaaactaagtattataatctaataaaccaaaaatgcaa

SEQ ID NO: 675953 - DNA, 1444 bp, Homo sapiens
agatagatcttgagtggctaattggacctaaattcaaaacagtgccaagcagccatttgctgaccagaagtcacacatgcactctgcgtttctggataacccccacactcactaaactttaggactttcattgccttctattcttgtccacaccacctgaatcagccattagagtgcaacctgcatcaaccaatcagaattcaacaaatgccaaccagtcaccrctaagaaagtggaccagagtgggaacttgggcaggaacccaacacaaaccctctttgttctcttggaacacacctttgttttgtacccaaggctacatctccccaatttgcaaacctcgctggaataaaatttctttctttctttttttttttaaaagaaaatccttttcagatttattggcactaattagaacttgattcatgaatttgggagaaaggacaaatgtgctaacttgaaagactgggtagaatttgtttttgttttttcttgttgaaaaataaaaggtacttaaaaacccaatagccatacatatgattttatatatattttttttttgagagagagagagagatctctcaaaggtgtatatatcacaatttcagagataaatcactgagtcaggattctgagggttcatctaactctacatcatgtaattttttttttaacatgcctttctaaaaaactatggcaaacattgaccaaactaatcagcagactgaagggcagtaatccccaggacagagtttatttggtgctactagttagaaaaacagaagttgatacttctttcaaaactcagaaatatttttataacacttgacgtgaaagtcaaatgaaaattcctgctgttttaaggaaaagtctgagagaactggtgacagctaggatacagggataacaaagggaggggccggtgaaagtggccccaaggtcctgagcttctgtgtattcatttaagaatgcttaccttttctttcctaccaattccaacatggtccaaaggaaagcagtccaagtgagtctgcctctttacaaccccagttactgagcagcataagaaggaaccatttcaggggatgaaattttcttttgtagcgagtcaagaggcatgctttagtctataagctacatctgggggaattatctaaaagtaaactcaaagaaagcttatcaaaatctttgatgcatttttgaagtttaagttgaaatgaaaggcagttctggtaaccaaacttcagtcccagatgagtcaggtccaggatcaatttagacaagtatctgagtctatcatatctggtcaacttggagtctccccattttctaaacaaatgactgtgtagtatcatttaaaaacccacaatttaaacagtttcatttcagtctatcacacaaactttgacatgtttacactatgttggaaaaaggttgtaagcaa

SEQ ID NO: 675954 - DNA, 1668 bp, Homo sapiens
tattcatttgtatatatgtgtktctgacacacacacatataaacaacttagaaaaggaaaaaatatctccaggtgcctggttatcttaagaataccaagccacatgaccgccttctcaaatgaccaaacatcagccatgttaaatgacctgtacaagtggtagtcaaggtcagggtcctggtcaaacaaacgggaaaccattaatagtttttgtacatatgttacgtattccgtaaaattcttccctttttacaagtaaggatactgagtctcaacatttttgcaatttgtttaggtcataaagctaataagtggtagaatcagatcttggaccaggtctgtctaactccaaggtccaagcctgttccccaaatgtctgtgcctcagcatagtccaaagtttcactcatgtccatgtgaagaccactaaacaggttttgtgtgagcaataaagctttttaatcacctgggtgcaggcaggctgagtccaaaaagagtcagcgaagggagagaagggtggggccattttataagatttgggtaggtaaaggaaaattacagtcaaaggggggttgttctctggcaggcaggggtgggggtcacaaggtgctcagtgggggagctttttgagccaagatgagccaggagaaggaatttcacaaggtaatgtcatcagttagggcaaggactggccattttcacttcttttgtggtggaatgtcatcagttaaggcaggaacaggccatttaaatatcacttcttttgtgattcttcagttacttcaggccatctggatgtatacatgcaggtcacaggggatgctatggcttagcttgggctcagaggcctgacacaaaagtttatagttttttgttttaaatcatcttaagatagcaatggacacgctcaagcagtatactgaatatttttcactgggaattgaatattctaacttccagtttataggtgagaaaatgaaagttccaagatataatgtagcttgcccacacagccagccagtgatggtgctgacgtaggatttaggactatcaatccctatgtcatttccactctagagaactgccttctcattgccctgaagcaaaccgcattaactgacatccacacaactaagtgtctgtaggggtcaggattcttttgcaggtgacaagcaagataaaaatccaggaacttctggggaaagcaatgcagagtgattccctattgacataagtgcattcctgaactcccacttctcagcactcaaaagaggttacgctttcctccatgctgatctggtaaatgagtttgcatcagcataaactgaatagaggagaaagaggtatcaattcagggcttctagtcttaatgacaaagctgtaattgtgtccctgggccagacagctgccagcttcctgagaaaggagatatcttttaagctttaaggaggctttggttaaaaataaacacagacaaagtcctggttttactcactctcctccaccttgtccaagggggaaggaaaagccagtggaattgtaattggtgcgggcatctgctaaataaagtaacacagacatgcagtttccacccctgtgcaaggtgagagtaagaattttgtatgagttggtgaaaatacgacaatagaaatagactgcaacacaccaa

SEQ ID NO: 675955 - DNA, 1668 bp, Homo sapiens
tattcatttgtatatatgtgtgtctgacacacacacatataaacaacttagaaaaggaaaaaatatctccaggtgcctggttatcttaagaataccaagccacatgaccgccttctcaaatgaccaaacatcagccatgttaaatgacctgtasaagtggtagtcaaggtcagggtcctggtcaaacaaacgggaaaccattaatagtttttgtacatatgttacgtattccgtaaaattcttccctttttacaagtaaggatactgagtctcaacatttttgcaatttgtttaggtcataaagctaataagtggtagaatcagatcttggaccaggtctgtctaactccaaggtccaagcctgttccccaaatgtctgtgcctcagcatagtccaaagtttcactcatgtccatgtgaagaccactaaacaggttttgtgtgagcaataaagctttttaatcacctgggtgcaggcaggctgagtccaaaaagagtcagcgaagggagagaagggtggggccattttataagatttgggtaggtaaaggaaaattacagtcaaaggggggttgttctctggcaggcaggggtgggggtcacaaggtgctcagtgggggagctttttgagccaagatgagccaggagaaggaatttcacaaggtaatgtcatcagttagggcaaggactggccattttcacttcttttgtggtggaatgtcatcagttaaggcaggaacaggccatttaaatatcacttcttttgtgattcttcagttacttcaggccatctggatgtatacatgcaggtcacaggggatgctatggcttagcttgggctcagaggcctgacacaaaagtttatagttttttgttttaaatcatcttaagatagcaatggacacgctcaagcagtatactgaatatttttcactgggaattgaatattctaacttccagtttataggtgagaaaatgaaagttccaagatataatgtagcttgcccacacagccagccagtgatggtgctgacgtaggatttaggactatcaatccctatgtcatttccactctagagaactgccttctcattgccctgaagcaaaccgcattaactgacatccacacaactaagtgtctgtaggggtcaggattcttttgcaggtgacaagcaagataaaaatccaggaacttctggggaaagcaatgcagagtgattccctattgacataagtgcattcctgaactcccacttctcagcactcaaaagaggttacgctttcctccatgctgatctggtaaatgagtttgcatcagcataaactgaatagaggagaaagaggtatcaattcagggcttctagtcttaatgacaaagctgtaattgtgtccctgggccagacagctgccagcttcctgagaaaggagatatcttttaagctttaaggaggctttggttaaaaataaacacagacaaagtcctggttttactcactctcctccaccttgtccaagggggaaggaaaagccagtggaattgtaattggtgcgggcatctgctaaataaagtaacacagacatgcagtttccacccctgtgcaaggtgagagtaagaattttgtatgagttggtgaaaatacgacaatagaaatagactgcaacacaccaa

SEQ ID NO: 675956 - DNA, 1668 bp, Homo sapiens
tattcatttgtatatatgtgtgtctgacacacacacatataaacaacttagaaaaggaaaaaatatctccaggtgcctggttatcttaagaataccaagccacatgaccgccttctcaaatgaccaaacatcagccatgttaaatgacctgtacaagtggtagtcaaggtcagggtcctggtcaaacaaacgggaaaccattaatagtttttgtacatatgttaygtattccgtaaaattcttccctttttacaagtaaggatactgagtctcaacatttttgcaatttgtttaggtcataaagctaataagtggtagaatcagatcttggaccaggtctgtctaactccaaggtccaagcctgttccccaaatgtctgtgcctcagcatagtccaaagtttcactcatgtccatgtgaagaccactaaacaggttttgtgtgagcaataaagctttttaatcacctgggtgcaggcaggctgagtccaaaaagagtcagcgaagggagagaagggtggggccattttataagatttgggtaggtaaaggaaaattacagtcaaaggggggttgttctctggcaggcaggggtgggggtcacaaggtgctcagtgggggagctttttgagccaagatgagccaggagaaggaatttcacaaggtaatgtcatcagttagggcaaggactggccattttcacttcttttgtggtggaatgtcatcagttaaggcaggaacaggccatttaaatatcacttcttttgtgattcttcagttacttcaggccatctggatgtatacatgcaggtcacaggggatgctatggcttagcttgggctcagaggcctgacacaaaagtttatagttttttgttttaaatcatcttaagatagcaatggacacgctcaagcagtatactgaatatttttcactgggaattgaatattctaacttccagtttataggtgagaaaatgaaagttccaagatataatgtagcttgcccacacagccagccagtgatggtgctgacgtaggatttaggactatcaatccctatgtcatttccactctagagaactgccttctcattgccctgaagcaaaccgcattaactgacatccacacaactaagtgtctgtaggggtcaggattcttttgcaggtgacaagcaagataaaaatccaggaacttctggggaaagcaatgcagagtgattccctattgacataagtgcattcctgaactcccacttctcagcactcaaaagaggttacgctttcctccatgctgatctggtaaatgagtttgcatcagcataaactgaatagaggagaaagaggtatcaattcagggcttctagtcttaatgacaaagctgtaattgtgtccctgggccagacagctgccagcttcctgagaaaggagatatcttttaagctttaaggaggctttggttaaaaataaacacagacaaagtcctggttttactcactctcctccaccttgtccaagggggaaggaaaagccagtggaattgtaattggtgcgggcatctgctaaataaagtaacacagacatgcagtttccacccctgtgcaaggtgagagtaagaattttgtatgagttggtgaaaatacgacaatagaaatagactgcaacacaccaa

SEQ ID NO: 675957 - DNA, 1668 bp, Homo sapiens
tattcatttgtatatatgtgtgtctgacacacacacatataaacaacttagaaaaggaaaaaatatctccaggtgcctggttatcttaagaataccaagccacatgaccgccttctcaaatgaccaaacatcagccatgttaaatgacctgtacaagtggtagtcaaggtcagggtcctggtcaaacaaacgggaaaccattaatagtttttgtacatatgttacgtattccgtaaaattcttccctttttacaagtaaggatactgagtctcaacatttttgcaatttgtttaggtcataaagctaataagtggtagaatcagatcttggaccaggtctgtctaactccaaggtccaagcctgttccccaaatgtctgtgcctsagcatagtccaaagtttcactcatgtccatgtgaagaccactaaacaggttttgtgtgagcaataaagctttttaatcacctgggtgcaggcaggctgagtccaaaaagagtcagcgaagggagagaagggtggggccattttataagatttgggtaggtaaaggaaaattacagtcaaaggggggttgttctctggcaggcaggggtgggggtcacaaggtgctcagtgggggagctttttgagccaagatgagccaggagaaggaatttcacaaggtaatgtcatcagttagggcaaggactggccattttcacttcttttgtggtggaatgtcatcagttaaggcaggaacaggccatttaaatatcacttcttttgtgattcttcagttacttcaggccatctggatgtatacatgcaggtcacaggggatgctatggcttagcttgggctcagaggcctgacacaaaagtttatagttttttgttttaaatcatcttaagatagcaatggacacgctcaagcagtatactgaatatttttcactgggaattgaatattctaacttccagtttataggtgagaaaatgaaagttccaagatataatgtagcttgcccacacagccagccagtgatggtgctgacgtaggatttaggactatcaatccctatgtcatttccactctagagaactgccttctcattgccctgaagcaaaccgcattaactgacatccacacaactaagtgtctgtaggggtcaggattcttttgcaggtgacaagcaagataaaaatccaggaacttctggggaaagcaatgcagagtgattccctattgacataagtgcattcctgaactcccacttctcagcactcaaaagaggttacgctttcctccatgctgatctggtaaatgagtttgcatcagcataaactgaatagaggagaaagaggtatcaattcagggcttctagtcttaatgacaaagctgtaattgtgtccctgggccagacagctgccagcttcctgagaaaggagatatcttttaagctttaaggaggctttggttaaaaataaacacagacaaagtcctggttttactcactctcctccaccttgtccaagggggaaggaaaagccagtggaattgtaattggtgcgggcatctgctaaataaagtaacacagacatgcagtttccacccctgtgcaaggtgagagtaagaattttgtatgagttggtgaaaatacgacaatagaaatagactgcaacacaccaa

SEQ ID NO: 675958 - DNA, 805 bp, Homo sapiens
tgatgagaattctaagctgctgacatcttctgggatcttgactgtctcactcaacacattttcttcactcccaaatccgggtctttcacacatttgatgaaagtgcctcccctawcctcatcccaggcactgatgaaaatactgggtcagacagggcaccatgacattagagtcctctctccaagacggaattgatctattagtcagcaccctctgggtagggcttagtcctgtacaaaaatagaacatgagtcaccttccctttaagatcgtggcttaaatgggaaggaaagtaaattggtaatctccaagaacatttccaagtctaacacttcagaaaaatactagtgtgtactaggttctccatggtctggactttgtgtccctcagaagtcgtaaatcccaccattctcagttcacatgtaactcgccagccagccacaaaacttacacagtcccttaatcacaatctctgctccttcccaccaccatgattgtgtccctgctgctgcttctgccctcatctgtctagttgatgacattctagttattcttcaaaaccagctcagatcaacaaatggttctggaacaactgaccatccatatgcaaaaggagaactttgatccataccttacaccatatgaaaagatgaaatcagaatgaatcacaaccctaaatgtgaaatatataaattctagaagaaaatatagacaaaacatctttgtgaccttgggttaaggaaagctttcttagctacaacaccaaaagcatgatccattttaaaaattgatcaattaaacttta

SEQ ID NO: 675959 - DNA, 2166 bp, Homo sapiens
cctgaaattcttttctcctggatatccacacgatttgcaacttcctttctttcaggtctttgtccaaatgttactttatcactgtgacctcccctggccattctatataaactgggaatttatctgcccaatctctcaggggttctctctatcctctgacagattgtgtttttctccacagtatttgtctctacctgacaaaatattgattggttaattgatgctcttggagggcagatatctgtctgtttttcatagctatattcctggtgcctaaaatagtcctagcatatgacagcattttacaaatacatgttaaataaatgaatgaattgttttgggatgacaggatatttctttctgcctctagggactcacagacaccagagctgggttacaggtattcaagtaacccagcgtgtaccaccatcaaaataacacctgccatttattgaggtgttccttcactggccttcattcatcatgtcttgcataaaaataccaaagaagctcagaaaatcaaaggcagagtcaaagggtctcagaggctggaactgggtggctgtttaaattccaactctggtactygccagttctgttgcctcaagtgagcccctgagtcacagtttcctcatccataaagcaggtataatatgtgcacattttggagttgttatgaagattggagataatgctttcttttttgttttttgttttgttttgttttttgagacaaaaccttgctttgtcactcagactggagtgcagtggtgaaagctcggctcactgcaacctccgcctcctgtgttccagcgattctcatgcctcagcctctggagtagctggaattacaggcgcccgccaccacgcccagctaatttttgtatttttagtagagatgggtcttgccatgttggtcagactggtgtggacctcctgacctcaagtgatctgcccactttggcctcccaaagtgctcggattacaggtgtgagccaccacgcccggcctggagatgatgctttctgagcactaagcacagtgcttagtatcatggcagccatgattaagaggagctcaatgaggaggtgactgtggagagtgcacatcaggttgatggaatcaccaggatggagcatcctccacagcataaacctagtaacaggaatggcaagttgcagatgcagcagggagacccagacaggacccaagatggagacagggcttaaaagatttggtatctgttccaggcactcagctcctgtgtgcagaagtaagagggcccagaatgaggctaaatataatacatttaagatccaaggacctactatacagccagaaacagatgatgtctaacacatgtgaatgaatgtattggcatttggaagacaaactcagacaccagattcctatcaatatacatttatagacacatagatatagacatagaaataggtataaatatagataggtatgttgtctttcattcttctgtggaaagtgtatagccaaaaacaaaaaggaccttttcaccaggacttccaaaatggtctttcttggagtgaaatgactgaaaatccagcccaggttttcatcaagccttccagccctaggaagtagaatcagtgaggtggtggcttccagggagaatggatgttttcaataaaggggcaagctctttccttttgtgggaagttaaaatatattcattatcagctttgaagttcacacagagtcagcaaagatagtatttataagcaaggaaagtttatcagagactagaaactctgcttttcctaatgattgagtagcaaacaatggtatgagtttatctgtagggcttcacaaagaaagttgaactccacttctctatttccatttctagagaaagcctggcattattgtccttccatgggggagatttttcctaagtaaaatatttcctaagtaaaagctctacttcttgttacaggcccacaataaaataataataataaagaaatacttttcctctttccagtgtcctccccccattcactatcaaccactccctaccataagtacacacacataccctccagaatgcctaaaatttcatcattaggaattcagctttttgtgccaggcttgtttttcttccagctatcaccatataaaatgcaaata

SEQ ID NO: 675960 - DNA, 2166 bp, Homo sapiens
cctgaaattcttttctcctggatatccacacgatttgcaacttcctttctttcaggtctttgtccaaatgttactttatcactgtgacctcccctggccattctatataaactgggaatttatctgcccaatctctcaggggttctctctatcctctgacagattgtgtttttctccacagtatttgtctctacctgacaaaatattgattggttaattgatgctcttggagggcagatatctgtctgtttttcatagctatattcctggtgcctaaaatagtcctagcatatgacagcattttacaaatacatgttaaataaatgaatgaattgttttgggatgacaggatatttctttctgcctctagggactcacagacaccagagctgggttacaggtattcaagtaacccagcgtgtaccaccatcaaaataacacctgccatttattgaggtgttccttcactggccttcattcatcatgtcttgcataaaaataccaaagaagctcagaaaatcaaaggcagagtcaaagggtctcagaggctggaactgggtggctgtttaaattccaactctggtactcgccagttctgttgcctcaagtgagcccctgagtcacagtttcctcatccataaagcaggtataatatgtgcacattttggagttgttatgaagattggagataatgctttcttttttgttttttgttttgttttgttttttgagacaaaaccttgctttgtcactcagactggagtgcagtggtgaaagctcggctcactgcaacctccgcctcctgtgttccagcgattctcatgcctcagcctctggagtagctggaattacaggcgcccgccaccacrcccagctaatttttgtatttttagtagagatgggtcttgccatgttggtcagactggtgtggacctcctgacctcaagtgatctgcccactttggcctcccaaagtgctcggattacaggtgtgagccaccacgcccggcctggagatgatgctttctgagcactaagcacagtgcttagtatcatggcagccatgattaagaggagctcaatgaggaggtgactgtggagagtgcacatcaggttgatggaatcaccaggatggagcatcctccacagcataaacctagtaacaggaatggcaagttgcagatgcagcagggagacccagacaggacccaagatggagacagggcttaaaagatttggtatctgttccaggcactcagctcctgtgtgcagaagtaagagggcccagaatgaggctaaatataatacatttaagatccaaggacctactatacagccagaaacagatgatgtctaacacatgtgaatgaatgtattggcatttggaagacaaactcagacaccagattcctatcaatatacatttatagacacatagatatagacatagaaataggtataaatatagataggtatgttgtctttcattcttctgtggaaagtgtatagccaaaaacaaaaaggaccttttcaccaggacttccaaaatggtctttcttggagtgaaatgactgaaaatccagcccaggttttcatcaagccttccagccctaggaagtagaatcagtgaggtggtggcttccagggagaatggatgttttcaataaaggggcaagctctttccttttgtgggaagttaaaatatattcattatcagctttgaagttcacacagagtcagcaaagatagtatttataagcaaggaaagtttatcagagactagaaactctgcttttcctaatgattgagtagcaaacaatggtatgagtttatctgtagggcttcacaaagaaagttgaactccacttctctatttccatttctagagaaagcctggcattattgtccttccatgggggagatttttcctaagtaaaatatttcctaagtaaaagctctacttcttgttacaggcccacaataaaataataataataaagaaatacttttcctctttccagtgtcctccccccattcactatcaaccactccctaccataagtacacacacataccctccagaatgcctaaaatttcatcattaggaattcagctttttgtgccaggcttgtttttcttccagctatcaccatataaaatgcaaata

SEQ ID NO: 675961 - DNA, 1652 bp, Homo sapiens
tgcctttcttccccttccagcctccactaagagtataagcttttagagagcaggatgagcttcaaacacagcccctgctaggtagattctcaatacctttcattgactcgtggactttaagcaacctatccaaggtttctgggctcagtgtgcttatctgcaaaacggggattataatacctaattgtaaagctgctgggaatactccaagcctggcacttaagaaggcctcaataaatgacagctctatggatttctgctcttactgccgtggttgggaggaagccctgtcttaatctctctgacagacacctactgtttttctctcgtggcctctgttactaactctcccatctgactccgcgagcatctctgagtgtctctctgggtcagcccgtgtctaaatcatcttgttttatcttcccaacaacccaataatgcaggtagtagctaatcagagccaagtcaagtgaggctcaaggaggttctgtgacttactccagaaccgggacttgaacccagaactggctccacgaccagtgctccttgccctggctgcttagtcctcaggggcctcccagacccacagctggctgacttggtggtagcttcccctgcagagrtgagaacaggcaggctcttcaggcggatgaagcccgagccccttcctgtgtctttgtcaggccagactcagagcacaaagccttctggtgccaagccctgtggtgggggagcctccacggtcggcatcgcgattggtcctcgccacccccaatttcgcagaagaggaaacggaagctcgcacggctgctgcgcctgccctggttgtccgtgatgatcctctacggacaggcatctggaaggagccagcactgggaccgtgcgcgtgtggggagcggggctctcacccgataggccgccttgagacccccgttgtcggcgatgttctcccccagggtgtgccgcccgttcaccggctccccgttcacgctgtagttgctgtactgctctaccatgcactcggtctgacgcttgaaggcctccacggatgagttcttccaccatggccggaggttcccgtccttgtcatactcccgtcctgtgggtcagagggaggcgtcatgtcaagggagggaggggcacagcagggacctgctgctcctccctgctcctggtgagaagcggttcatccgtccacccccgtcctccagccaccatggggagacgaggtccctgtgagtgccgagggacgtggatgtggtggccagtcagaggcgggagaggatgaaggagagaaatcgggaaaagctccagcgtggcccgaggctcagtggggcttgctttgttttctttcttttttttttttttttgagacagtctcactctgccactcaggctggagtgcagtggcgcaatctcagctcactgcaacctttgcctcctgggttcaaggaattcttgtgctcagcctctggagtagctgggattacaggcacatgccgccatgcctagctgatttctgtttttttttttagtagagatggggtctcaccatgttggccaggctggtcttgaactcctgacctcaagtgatctgcccacctcagcctcccaaagtgctgggattacaggtgtgcgtcaccgtgcctggc

SEQ ID NO: 675962 - DNA, 1652 bp, Homo sapiens
tgcctttcttccccttccagcctccactaagagtataagcttttagagagcaggatgagcttcaaacacagcccctgctaggtagattctcaatacctttcattgactcgtggactttaagcaacctatccaaggtttctgggctcagtgtgcttatctgcaaaacggggattataatacctaattgtaaagctgctgggaatactccaagcctggcacttaagaaggcctcaataaatgacagctctatggatttctgctcttactgccgtggttgggaggaagccctgtcttaatctctctgacagacacctactgtttttctctcgtggcctctgttactaactctcccatctgactccgcgagcatctctgagtgtctctctgggtcagcccgtgtctaaatcatcttgttttatcttcccaacaacccaataatgcaggtagtagctaatcagagccaagtcaagtgaggctcaaggaggttctgtgacttactccagaaccgggacttgaacccagaactggctccacgaccagtgctccttgccctggctgcttagtcctcaggggcctcccagacccacagctggctgacttggtggtagcttcccctgcagagatgagaacaggcaggctcttcaggcggatgaagcccgagccccttcctgtgtctttgtcaggccagactcagagcacaaagccttctggtgccmagccctgtggtgggggagcctccacggtcggcatcgcgattggtcctcgccacccccaatttcgcagaagaggaaacggaagctcgcacggctgctgcgcctgccctggttgtccgtgatgatcctctacggacaggcatctggaaggagccagcactgggaccgtgcgcgtgtggggagcggggctctcacccgataggccgccttgagacccccgttgtcggcgatgttctcccccagggtgtgccgcccgttcaccggctccccgttcacgctgtagttgctgtactgctctaccatgcactcggtctgacgcttgaaggcctccacggatgagttcttccaccatggccggaggttcccgtccttgtcatactcccgtcctgtgggtcagagggaggcgtcatgtcaagggagggaggggcacagcagggacctgctgctcctccctgctcctggtgagaagcggttcatccgtccacccccgtcctccagccaccatggggagacgaggtccctgtgagtgccgagggacgtggatgtggtggccagtcagaggcgggagaggatgaaggagagaaatcgggaaaagctccagcgtggcccgaggctcagtggggcttgctttgttttctttcttttttttttttttttgagacagtctcactctgccactcaggctggagtgcagtggcgcaatctcagctcactgcaacctttgcctcctgggttcaaggaattcttgtgctcagcctctggagtagctgggattacaggcacatgccgccatgcctagctgatttctgtttttttttttagtagagatggggtctcaccatgttggccaggctggtcttgaactcctgacctcaagtgatctgcccacctcagcctcccaaagtgctgggattacaggtgtgcgtcaccgtgcctggc

SEQ ID NO: 675963 - DNA, 1443 bp, Homo sapiens
ctgaaccctgcgccagttcccatgtgtcaggactcgctggtgtgcagagtatttgctgcggctttgatctcattgttttagtttactggctctcctgatttggcattaaatgcgttagaacctaatcagttccaagatggctttcacgatgcggttccttttcctaactatttccaaatcaattcacttagggacattataggttaagagtagttgttgttctcatatgaatcttgagtcagtttttcttttgtaaataacttcattctttttcattgacctcctcaatatttatttctaaatatttttaattttttaaaatacttaagatttcatttgaaatagaattaaatgaaagttaaggaagccttatcatgaatccagttctgcaatgtcattctattaatagctgcagtctaaataccagycccagccatcacagcatgtccatcgggtaaatcctcactacgtgtggcgcatgttgtcctccccagccctgtactagtccaggagggagttattctgctccctgctttacctatgaggaaatgaagaccgggagtggggacagggggagctggtgccagggcagggacagagcttgtgccccccaccttgaccacagcaccactcagtcctcttctgttttttttttctttttcttttttattttattttattttgaggtggagtttcactcttgttgcccaggctggagtgcagtggtgccatctcggctcaccgcaacctccgcctcccaggttcaagtgattctcctgcctcagcctcccgagtagctgggattacaggcatgcaccaccacacttggctaattttgtatttttagtagagactgggttggtcagtttataatgaccacgttagtcagtctggtctcgaactcctgacctcagatgatctgcccacttcggcctcccagagtgctgggattacaggcatgagccaccacgcccggcctcagtcctcttccagttacccactaccctacccagaagtcacggccaatccccaccctgtgccaactccaaattcacttaattatcatacgcacatgtgcgcatgcacgcgcgcgcgcgcacacacacacacacacacacacacacacacacacacacacacacagcaatcactgagtgaccatcttaatggggattgggttacattcataacctattttgtaggagagaattttccaagggaccaaaaacgttgaccagacccaaatctaaaaagtattgctgcccctgcgcctgtgaaaatgcaagggactgagccaatgggaagaaggtggggagaaggggctgagcgccccgcagcctgcccccacccctggacctgcggctgcctccacttactcctgggaacctgggcaaaccacttcacttctccaagcctccattgcctcaactttcagtaaggatg

SEQ ID NO: 675964 - DNA, 1475 bp, Homo sapiens
tataaatataatatattaatatttatattataaaatacattggccttatattttatattaagatctttcatacacttcattgggcaaaatgacctgagttggactctggaattccaaattttgaaaaccttgcaaatatctgtctgcacattatccagctgcatatttttttttaagttttctcaattcttctttgttattccattgtggcttattgttctctggtttcaatttgtttccttaggaaattggtttgattgtctctgattcataactcagtaatctgtcttatatttatgccacatttatgttatactgggttttgtttgtttgttttctgattgtaagctaaccttcaagagtaactttgcttgctccttggccttcacttattttttttatctaaaagctttccttaactatatcaaatctctgccttttttaaagacagaagaaaagaatgtcagagtcagaaaagcatcccaagtacaaaaatctttgacaacacaggaagaattgaatacatttgaacttgaccgtattgccttttcctgcttaactacccagagttcacaaaaatgactagtgggcaatgtcttttgaaaatcaagttaactgagaaatttagaatttgagcctgactagtcaaattaaagaactgggcctataataaaacaaactctgacaacactcttctttattaatatctgagtataataataacaactcatcttaaatttagaggttaaattcaatcatgttctttcgtctttcttgttcattttccaaaaagaggtcttatgaacttaagattaaacaaactcaagtttgacaatgttatgctagaaaggctccaaggcatagcctacaaaatcacatttgtcttgaaaatctatctgtcctgtggtgattttttttccaagaatatgctttgaggccacagcaatgaaaggatggggccagctgwgttagcttatgagtattttatgggtccaggccacataatgagactactttctgttcccctcactcaaagttatagccataatactgctgcctaacaaccaaccataaaaatcagtcacaaaacaagcatttgctaagttgatgagtctatgaactggttctggtctggaccaggctcacctgatctcagtaggcttgttcatgcctgtgtttagctggtggtcagctaggggtgagctggtttagaatagcttcacttttatatctgatagtcaattgaagtgatgcaaaaagtataataactgggccatgtgtctcctcttctggcaagctaggctgagcttgttcacatgatggctgagtaaacttctaactgtgagagcagaagcacacaaggccttgtgacgtctggactcagaacagcatatacttttgacacattctcctagacagaaccaaataacaaggcctccccagattcaagaagatgagaaatacactccgttctt

SEQ ID NO: 675965 - DNA, 1475 bp, Homo sapiens
tataaatataatatattaatatttatattataaaatacattggccttatattttatattaagatctttcatacacttcattgggcaaaatgacctgagttggactctggaattccaaattttgaaaaccttgcaaatatctgtctgcacattatccagctgcatatttttttttaagttttctcaattcttctttgttattccattgtggcttattgttctctggtttcaatttgtttccttaggaaattggtttgattgtctctgattcataactcagtaatctgtcttatatttatgccacatttatgttatactgggttttgtttgtttgttttctgattgtaagctaaccttcaagagtaactttgcttgctccttggccttcacttattttttttatctaaaagctttccttaactatatcaaatctctgccttttttaaagacagaagaaaagaatgtcagagtcagaaaagcatcccaagtacaaaaatctttgacaacacaggaagaattgaatacatttgaacttgaccgtattgccttttcctgcttaactacccagagttcacaaaaatgactagtgggcaatgtcttttgaaaatcaagttaactgagaaatttagaatttgagcctgactagtcaaattaaagaactgggcctataataaaacaaactctgacaacactcttctttattaatatctgagtataataataacaactcatcttaaatttagaggttaaattcaatcatgttctttcgtctttcttgttcattttccaaaaagaggtcttatgaacttaagattaaacaaactcaagtttgacaatgttatgctagaaaggctccaaggcatagcctacaaaatcacatttgtcttgaaaatctatctgtcctgtggtgattttttttccaagaatatgctttgaggccacagcaatgaaaggatggggccagctgtgttagcttatgagtattttatgggtccaggccacataatgagactactttctgttcccctcactcaaagttatagccataatactgctgcctaacaaccaaccataaaaatcagtcacaaaacaagcatttgctaagttratgagtctatgaactggttctggtctggaccaggctcacctgatctcagtaggcttgttcatgcctgtgtttagctggtggtcagctaggggtgagctggtttagaatagcttcacttttatatctgatagtcaattgaagtgatgcaaaaagtataataactgggccatgtgtctcctcttctggcaagctaggctgagcttgttcacatgatggctgagtaaacttctaactgtgagagcagaagcacacaaggccttgtgacgtctggactcagaacagcatatacttttgacacattctcctagacagaaccaaataacaaggcctccccagattcaagaagatgagaaatacactccgttctt

SEQ ID NO: 675966 - DNA, 643 bp, Homo sapiens
aggtcccccagttcaacctataagagaacaacaatctgttgttttcttaaaacaggctcacttgcttttcttccttccctatcttccttggaaacacatgtgttactgaattaaaattgaggtgaattgatgatgaggtctgaatggtagtaaatggacgctgtcaaacaacaggctaagatttcattcatgcaaaagagtacgacattgtaaaagccccacttccttctaaattgttggaacagcagggaaakaactggcaattgtcttcttcctgtttgatgccccagtgactcgtatgtgccaacatggagagtagggccctgtacaaggtgctccatcatagccacatgagtccagggccctgagcgccccctcacagcatgtttcctcctcggcttataagaatttatatgctagcaaatagattcataaataccccacattttatatgtagggagaatagttgactttcaatactcagcctaagccatttttaccagataccatttttatttttattttttcattttctatttttatttatttttatttttctttgatatttcaataatttttataaatttttaaaaatttcaacttttattttagattcagaaggtacatgtacaggtttgttaca

SEQ ID NO: 675967 - DNA, 643 bp, Homo sapiens
aggtcccccagttcaacctataagagaacaacaatctgttgttttcttaaaacaggctcacttgcttttcttccttccctatcttccttggaaacacatgtgttactgaattaaaattgaggtgaattgatgatgaggtctgaatggtagtaaatggacgctgtcaaacaacaggctaagatttcattcatgcaaaagagtacgacattgtaaaagccccacttccttctaaattgttggaacagcagggaaagaactggcaattgtcttcttcctgtttgatgccccagtgactcgtatgtgccaacayggagagtagggccctgtacaaggtgctccatcatagccacatgagtccagggccctgagcgccccctcacagcatgtttcctcctcggcttataagaatttatatgctagcaaatagattcataaataccccacattttatatgtagggagaatagttgactttcaatactcagcctaagccatttttaccagataccatttttatttttattttttcattttctatttttatttatttttatttttctttgatatttcaataatttttataaatttttaaaaatttcaacttttattttagattcagaaggtacatgtacaggtttgttaca

SEQ ID NO: 675968 - DNA, 2036 bp, Homo sapiens
tcccagcactttggaggccaaggcaggtggattacctgaggtcaggagtttgagaccagcctggccaacatggtgaaaccccatctstactaaaaatacaaaaatcagctgggtgtggtggcgggtgcctgtaatcccagatacttgggaggctgaggcaggggaattgcttgaacccaggaggcggaagttgcagtgagccaagattgcgccactgcattccagcctgggtgacaagagcgaaactccgtctcaaaaatcagtcaattaacctacctacgtatcttcctcagcccaagatagtaaaaaaaattcacccatgatttatttagtccattcatagtcgcatttttaaagtctttgatccacctgtaattcatctggaataaggggtaagatggaatacagacccctcctccccagaagggtgactgtttgtcccattaccatttagggaatagtgggaatcagaattttaaatttaaaattgccgaagatatgttttgctctactatctaaccagctcagttttctgaaatgtgctttttacagaacagacaaaacagtcattggatgcagcggttttcatggagactgtcttacgctgacaaagattattgaagcaagactaaaggtagatgcttttgtacatttctacactattttaaattaatagtaattcattaaattcttttaagcctacagcatgactgttggtcagatagctagagagtcactaggttagtagatgaattacaaatgtatgctagaaatgaaatgatatcattaatgcagggtcattaaagtagcataatgtgaaacagcagcacattccatttgttaaagtcttgtatcatatgaagggttctctacccttttagaaggagcctgggaggagttcttcttctgaagatactcttccctcaaaaacaaagcaaatcaatttctgtggcaggagagagcccaggaaagatttgacacaggagcttggtttgcatcaccatcagttgacaagcttttcctctttacagtgctgtgctcttagttggcaggatgcatgagtagaaatacgaaagaatgaataagctgggagcttggatgggaggcacaacatgcaccattaacgtctgtcacctgaccagcttcagttgatagccagctgccagaagtcaggggtgatcacattctgttttgcctattcatgaataacacttgagattatttacacttatgagtggttactggagtatatagtatatttatttaactgacacatgctttttgaatgtgtagaaaggatttcactcagtatttatcaattgttaatgcttttttagaaacttacattgaaagccatagtgacttacatttattggcatatttatatgataattcctaatgcttattttataaatgggagttagaagacaaaagtaaacatgatattgttaataaaacaaggaatggtgaattctacataatacacaccccttcctgaagtttttctctcatactttattaggtggtgaagtaaataaatgttggtgcttggtttcgaaatgaaatggaatgaaatttttttttttttttttgagacagagtttcactcttgttgcccaggctggagtgcaatggcatgatcttggctcactgcaacctctgcctcctgggttcaagtgattatcctgccacagcctcccgagtagctgagattacaggcacctgtcaccacccctgtctaatttttgtattttagtagagacggggtttcaccatgttggccaggctggtctcgaacccctgacttcaggtgatccacccatctcggcctcccaaagtgctgggattacaggccagcagtgagccactgtgcccggcctatgaataattttttatagtttttatcttggaaaggcattcctctataaaaaacttacctgttacttgtagttcatttctaatcatttttcagtgttttgactgtcattatttaattttacggtgctagttagatatctatctgtctatttatttag

SEQ ID NO: 675969 - DNA, 2036 bp, Homo sapiens
tcccagcactttggaggccaaggcaggtggattacctgaggtcaggagtttgagaccagcctggccaacatggtgaaaccccatctgtactaaaaatacaaaaatcagctgggtgtggtggcgggtgcctgtaatcccagatacttgggaggctgaggcaggggaattgcttgaacccaggaggcggaagttgcagtgagccaagattgcgccactgcattccagcctgggtgacaagagcgaaactccgtctcaaaaatcagtcaattaacctacctacgtatcttcctcagcccaagatagtaaaaaaaattcacccatgatttatttagtccattcatagtcgcatttttaaagtctttgatccacctgtaattcatctggaataaggggtaagatggaatacagacccctcctccccagaagggtgactgtttgtcccattaccatttagggaatagtgggaatcagaattttaaatttaaaattgccgaagatatgttttgctctactatctaaccagctcagttttctgaaatgtgctttttacagaacagacaaaacagtcattggatgcagcggttttcatggagactgtcttacgctgacaaagattattgaagcaagactaaaggtagatgcttttgtacatttctacactattttaaattaatagtaattcattaaattcttttaagcctacagcatgactgttggtcagatagctagagagtcactaggttagtagatgaattacaaatgtatgctagaaatgaaatgatatcattaatgcagggtcattaaagtagcataatgtgaaacagcagcacattccatttgttaaagtcttgtatcatatgaagggttctctacccttttagaaggagcctgggaggagttcttcttctgaagatactcttccctcaaaaacaaagcaaatcaatttctgtggcaggagagagcccaggaaagatttgacacaggagcttggtttgcatcaccatcagttgacaagcttttcctctttacagtgctgtgctcttagttggcaggatgcatgagtagaaatacgaaagaatgaataagctgggagcttggatgggaggcacaacatgcaccattaacgtctgtcacctgaccagcttcagttgatagccagctgccagaagtcaggggtgatcacattctgttttgcctattcatgaataacacttgagattatttacacttatgagtggttactggagtatatagtatatttatttaactgacacatgctttttgaatgtgtagaaaggatttcactcagtatttatcaattgttaatgcttttttagaaacttacattgaaagccatagtgacttacatttattggcatatttatatgataattcctaatgcttattttataaatgggagttagaagacaaaagtaaacatgatattgttaataaaacaaggaatggtgaattctacataatacacaccccttcctgaagtttttctctcatactttattaggtggtgaagtaaataaatgttggtgcttggtttcgaaatgaaatggaatgaaatttttttttttttttttgagacagagtttcactcttgttgcccaggstggagtgcaatggcatgatcttggctcactgcaacctctgcctcctgggttcaagtgattatcctgccacagcctcccgagtagctgagattacaggcacctgtcaccacccctgtctaatttttgtattttagtagagacggggtttcaccatgttggccaggctggtctcgaacccctgacttcaggtgatccacccatctcggcctcccaaagtgctgggattacaggccagcagtgagccactgtgcccggcctatgaataattttttatagtttttatcttggaaaggcattcctctataaaaaacttacctgttacttgtagttcatttctaatcatttttcagtgttttgactgtcattatttaattttacggtgctagttagatatctatctgtctatttatttag

SEQ ID NO: 675970 - DNA, 618 bp, Homo sapiens
taccagtctgacaggtgagagagacagacagacaggcatggcttgcacatgtctgagtttctgcatggtgtggtgcaggggaccaatccctcactaatcatgcaaacraggagccttgcaggtggcatcagagctgcagcccaggaacagtgccaagcagcagcagtccaggtgctgaagtcctgtcaccttcctgtcctcatctcccttccaccctccacgagctgggcctggattcatgcagcgtcagcaggacatattagataaaatgactttagttgtttgggtcaagcaaggtaactgcagaaatgctttctgcccacatgaaacgggttggaaatcaacttccgtaacacacgcgcaacttagcaagtcagaacttggcacaatagatgaagtccccaccagctatggtctgcaagctgggggtcacccaaccaatagactgccaggccaggggatggggcaacagccctctgcagagacgcagccaaatgccaggtcagggggtagagggtgtccagttaaacattttgggaacccaggagaatatagacaagggaacttgtccagctgcactgagaccacaagaataccagctcgagtctgtactgccta

SEQ ID NO: 675971 - DNA, 618 bp, Homo sapiens
taccagtctgacaggtgagagagacagacagacaggcatggcttgcacatgtctgagtttctgcatggtgtggtgcaggggaccaatccctcactaatcatgcaaacaaggagccttgcaggtggcatcagagctgcagcccaggaacagtgccaagcagcagcagtccaggtgctgaagtcctgtcaccttcctgtcctcatctcccttccaccctccacgagctgggcctggattcatgcagcgtcagcaggacatattagataaaatgactttagttgttygggtcaagcaaggtaactgcagaaatgctttctgcccacatgaaacgggttggaaatcaacttccgtaacacacgcgcaacttagcaagtcagaacttggcacaatagatgaagtccccaccagctatggtctgcaagctgggggtcacccaaccaatagactgccaggccaggggatggggcaacagccctctgcagagacgcagccaaatgccaggtcagggggtagagggtgtccagttaaacattttgggaacccaggagaatatagacaagggaacttgtccagctgcactgagaccacaagaataccagctcgagtctgtactgccta

SEQ ID NO: 675972 - DNA, 618 bp, Homo sapiens
taccagtctgacaggtgagagagacagacagacaggcatggcttgcacatgtctgagtttctgcatggtgtggtgcaggggaccaatccctcactaatcatgcaaacaaggagccttgcaggtggcatcagagctgcagcccaggaacagtgccaagcagcagcagtccaggtgctgaagtcctgtcaccttcctgtcctcatctcccttccaccctccacgagctgggcctggattcatgcagcgtcagcaggacatattagataaaatgactttagttgtttgggtcaagcaaggtaactgcagaaatgctttctgcccacatgaaacgggttggaaatcaacttccgtaacacacgcgcaacttagcaagtcagaacttggcacaatagatgaagtccccaccagctatggtctgcaagctgggggtcacccaaccaatagactgccaggccaggggatggggcaacagccctctgcagagacgcagccaaatgccaggtcagggggtagagggtgtccagttaaacattttgggaacccaggagaatatagacaagggaacttgtccagctgcactgagaccacaagaataccagctcragtctgtactgccta

SEQ ID NO: 675973 - DNA, 581 bp, Homo sapiens
acaaaaactttgttagacattttaaagtggacctaaatattttaagccaaaaggaaaaatatgagatcagcctctattattgagcaaattttcctacagagtaaaacttatactacttaactatgcattttttttaatttcagacattcatttttgtggacgtataagcagcctttataaagagtatgcttcttattagagttatagccagattagtaaacagagaaggagcgagtgcaatatgaggttagaaataggagctaatcttaaatgccggcagcaaaggagaatccatgttagcaaaatgctcctctgcaaaagccatactataatatcaagacataaaaggactcaaagggacatattccaggccattaggggaggaaagtggtcattgtggaatcaaaatgatattaaatgcatttgggggcaatttggcaatatcgtgcataattttaaatgcatgtatcctttgacacaattacgtatctcagagtctattcyatagaaattgtcatgtgtacaaagatatttatacaaagatgttcattgtcatattgtttgtaaaaacaaagaagtgt

SEQ ID NO: 675974 - DNA, 605 bp, Homo sapiens
cagtgacacagcagcaatagtactcaaaggctgacagcctgatgtgggcaagccagggaagtaattactgctttaaatcaaagaagaactgtttgtgcctctgtagcaggaaaattccatgttaagcaggaactcttccatcctctgaaccatattgtatccatcatctttctgtgggtttacttcccagggctcagaaaaactgkctgcctattcgtgcctccagacataataagcatgttttttgttgtttttgttgtttgtttgtttgtttgttttaagacagggtcttgctctgttgcccaggctagagtgcagtggcccgattacagctcactgtagcctcgacctcctgggttcaggtgatgttcccacctcagcctcctaggtacctgggactacaggtacgcaccatcacacctggctaattttttttgtaattttgaatagattgggttttgctatgttgcccaggctggtcttgaattcctggactcaagtgaacacagaccctggatatgtcagactaagatctcagtatccaatagataaattcgcaatgaaatgaaggggcttctgaaaatgtattttcgccacataacctt

SEQ ID NO: 675975 - DNA, 2832 bp, Homo sapiens
tctgttcatgagatgctttacattataaaaataatttttctcattttggcattcatcattaatattatacaattctatagtaactcaaacagatccattaaatctcattttgataaatttttcaaaacaaaatgataaatatgatttagaatcccatttactgcctctgaacaaatatttaatagaagcccaccattaaccaactgagacttcacctaaaagccataatcaaagattttctttcctagggacaactacaaatagaagaaaaaatcccctgtcttggaagtagcattctttgtaacaaataaatttcataatgcaatattgtaattgtaactattaaaaagatcttatatgtctaggatttgttgagtcagttcccaacaaccttttttgctttgagtaacatcacaggggacaaaacactgatggaagagaaggaaggagtgaggaaaagactgagagcagatttaatcttcaattcacaccctccactccttaacagcaaggaccatgccttcacccctttgtcttcagtgcctgccacaaagtaggtactcaagaaatgtctggtgcatgaataatcaggaggataaaaagatgggaaaagaaaaaaggaatgtaatagaaggaaaggaagaaaaaaaatcatttacagaagaagacagagaaaaagcaatgggttactatagctggagcaatgactttgtggggggaactccagttcccttgcagtatgatttctgacactgacccaggcacagaaggaatctcaaggcgagatcatcatggggaaattaaaaacctctagtcagctggatgcagtggctcacacctgtaatcccagcactttgggaggcagaggcaggatgatcacttgaggtcaggagttcaagaccagcctggccaacatgatgaaaccccgtctctactaaaaacagaaaaactagctgggcatggtggcaggtgtctgtaattccagctatttggaaggcagaagcacaagaatggcttgaacccaggaggtagaggttgcagtgggccaagatcgcaccactgcactacagcctgggtgatagggcaagaccctgtctcaaaaagataaaataaaaataatgaaaacctctagtcatttaattttaccaaaagaacatgtacactgggtctaaaaatgctttgtttggaggaatccaaccaccaccaccaccacttgaaccagctcttcccacgaatcttagtgtcactaacagatgatgatcagacgttgtatgcctcctgcctcaatgcaacaggaagcactcagcagcccctctggcatgttcttaccaagctgaactgaatctgatggggtctctagagctaacatccacttgttaaaatagaggataaaagaagtcaaacagtcaaacaagaaaacagacaaacctaaaatgtgggacactctacaaggcactaatccagtttctgtaacaagtcaataggcggtggggttggaggggggcagatacactataattaaaagagatttaaaagacatgacagcaaatgtaacatggaaccttacctggatcctgattcaaaaatattcatgcatcaggctgggcacagtggctcatgcctgtaatcccagcactttgggaggccaaggcaggccgatcacttgaggccaggagtttgagaccagcctgggcaacatggtgaaaccccatctcaactaaaaacacaaagattagcagggtgtggtggcacacatctgtagtcccagctactcgagggactgaggcaggagaatagctcgaacccaggaggcagaggctgcagtgagccaagatcatgccattgcactccagcctgggcaacagagcaagactccttcgaaaagaaggaaagaaaggaaaggaaggaaagggaaggaaaggaaaggaagggaagggaggggaggggagaggaggagaggagaggagaggagaggagaggagaggaaaggaaaggaaaggaaaggaaaggaaaggaaaggaaaggaaaggaaaggaaaggaaaggaagaaagaaattcatgcatcattttatttaattctccttattttgtaaatgagaaaactttggcttacaaaagcacagtattctactgaattatagagaccaacagaatagaaagacaagaagtttcttaaaccattcattcctctacaatccaccaataaaagggcatttttgagacaatcagagaatctgattatggactggtgttagaaaataccaaggaattcttgttagttggacgtgacaatgcattgtggtatgtccattgtttttttagaaataaatactgacgtatgtagagtgaaatgatatatctggaatttgctttaaaatacttcagcaggcaacgcgcagtggctcactcctgtaatcccagcactttgggagactgaggcaggcagaccacttgaggtcaggagtttgagaccagcctgaccaacatgattaaactccatctctactaaaactacaaaattagatgggcatggcggcgcgcacctgtaatcccagctactcaggagactgaggcaggagaatygcttgaacccaggaggcagaggttgcagtgagccaagatcccgccactgcactccagcctgggcgacagagcgagactccgtctcaaaaaaaaaaaataaataaataaataaataaataaataaatacataaaataaaatacttcagcaaagaagaaaaggcataaagtaaatgtgatgaattataggactgggcaaatgggggttcattatactgtttctctgtgatgtatctgaattttttcacaat

SEQ ID NO: 675976 - DNA, 637 bp, Homo sapiens
gatcgaaccctggtcttctaacttgagcctctattttttttttgttttaaaattactttttaaaaattggggtataacttataacatgtctacattaaawtgcacaaatcttaagtgcacagtctaatggattttacatatagttacctctgtgtaactgccatgcaggtcaagattaaaagcatttccatcaccctaaaaggttctctcaggtccctcctagtctgtagctccccaagggtagctgctgttctttttttacttttcttttccttctttttttaaatatagacagggtctagctctgttgtccagactggagtgcagtggtgtgaccatagctcactgcagcctctaactcctgggctcaaacaatcctcccacctcagcctctgggtagctaggactacaagcacgggacaccacgcctggctaattttttaaattttttgtagagatgaggtcttgctatgttacccaggctggtctcaaactcctggcctcaaggggtcctcctgcctcagcctcccacagtgttgggattacaggcgtgagccaccatgcctgactgagtggccactattctgacttctatcaccatagattagttttgtctgctttaaaattctgtattata

SEQ ID NO: 675977 - DNA, 601 bp, Homo sapiens
ctaagataatacatgtaaagaacttgcaacagtgcttggcatacagtacatgcttagtacatgttaattattagtcttyaacaagtaatggtaactttaaagtcaatataaggaattttaaaacagcaattccaaacttcttagaaaggaactcataacactttttatctccaagataattacagtacagtcagccctccatgtacacagaggcagaacccacagatacagatggataactgtactatgtaattttatataagaaacttgagcattccaggattgttgtatccttggagagttctggaatcaatcccctgcaatatcaagggaagattatactaattgttctcagcacaaatgtagtcaaatgtagagttaccattacaaagatggtcatttcagagtcaagttctaattaagactattctgcaaagcatttggcatgtattaataattgtttcatgtgttaaataaaaactataggaggctaccgttgtggactaatctcctgcactaggccccaagtgaccagactaaaaatcaaaacggagttactcatgctaaagtttcacatcactaaacttaaatttagttgtta

SEQ ID NO: 675978 - DNA, 1157 bp, Homo sapiens
gaaaatcgcttgaacccaggaagcgraggttgcagtgagccaagatcgcgccattgtactccagcctcacaacagagagagcctctgtctctaaaaaaaaaaaaaaaaaaaaaaaaaaaaaaaagccaggcgcattggctcacacctgtaatcccagcactttgggaggccgaggtgggtgaatcacgaggtcaggagatcgagaccatcctggctaacacggtgaaactccgtctctaataaaaacacaaaaaattagccaggcgtggtggcgagtgcctgtagtcccagctactcgggaggctgaggcagaagaatggcatgaacctgggaggcggagcttgcagtgagccgagatcgtgccactgcactccagcctgggtgacagagcgagattctgtctcaaaaaaaaaaaaaaaaaaaaaggaacaaccatgtctcccatgtctcccacaaaagtcaaagtgctccttgaggatcccccaggtgcaggccctgtgttcaatgcaaagaacatagaaagtctccctcttcatggagctcacaatctgcctgggacacaaacaagatgctgcactgcagtgtgatgcttagaatggggcatggcacgtaacatctatttgctgcatgagcaagtaccaagaactaaagctaaggtgttgtaggagctcacaggggggcttcaagtgctagttcaaagcagaaatcaaagaaggcttcatgaaggtgaccgtgtctatctgcatcataaagaatgaacagtttgggaggccgaggtaggcaggtcacttgagcctaggagtctgagaccagcctgggcaacatggtgaaactccttctctactaaaaatacaaaaaattagccaggcatgatggcgcacatctgtactcccagctacttgggaggctgaggtgggaggatcacctgagcctgggaagtcaagaccactgcactcgagcttgggtaacaggaatgagatcctgtctcaaaataaataaataaataaagaaagaacgaacaaacaggagtaggctggcaaagattcagggaggggcattccaggctgagggaaaatgtccaattgtctaatacatgcgtagcagtgggtggaaagagaatgcttagcaaaagagtcaagtcattgtcaagcgcattg

SEQ ID NO: 675979 - DNA, 1157 bp, Homo sapiens
gaaaatcgcttgaacccaggaagcgaaggttgcagtgagccaagatcgcgccattgtactccagcctcacaacagagagagcctctgtctctaaaaaaaaaaaaaaaaaaaaaaaaaaaaaaaagccaggcgcattggctcacacctgtaatcccagcactttgggaggcygaggtgggtgaatcacgaggtcaggagatcgagaccatcctggctaacacggtgaaactccgtctctaataaaaacacaaaaaattagccaggcgtggtggcgagtgcctgtagtcccagctactcgggaggctgaggcagaagaatggcatgaacctgggaggcggagcttgcagtgagccgagatcgtgccactgcactccagcctgggtgacagagcgagattctgtctcaaaaaaaaaaaaaaaaaaaaaggaacaaccatgtctcccatgtctcccacaaaagtcaaagtgctccttgaggatcccccaggtgcaggccctgtgttcaatgcaaagaacatagaaagtctccctcttcatggagctcacaatctgcctgggacacaaacaagatgctgcactgcagtgtgatgcttagaatggggcatggcacgtaacatctatttgctgcatgagcaagtaccaagaactaaagctaaggtgttgtaggagctcacaggggggcttcaagtgctagttcaaagcagaaatcaaagaaggcttcatgaaggtgaccgtgtctatctgcatcataaagaatgaacagtttgggaggccgaggtaggcaggtcacttgagcctaggagtctgagaccagcctgggcaacatggtgaaactccttctctactaaaaatacaaaaaattagccaggcatgatggcgcacatctgtactcccagctacttgggaggctgaggtgggaggatcacctgagcctgggaagtcaagaccactgcactcgagcttgggtaacaggaatgagatcctgtctcaaaataaataaataaataaagaaagaacgaacaaacaggagtaggctggcaaagattcagggaggggcattccaggctgagggaaaatgtccaattgtctaatacatgcgtagcagtgggtggaaagagaatgcttagcaaaagagtcaagtcattgtcaagcgcattg

SEQ ID NO: 675980 - DNA, 1157 bp, Homo sapiens
gaaaatcgcttgaacccaggaagcgaaggttgcagtgagccaagatcgcgccattgtactccagcctcacaacagagagagcctctgtctctaaaaaaaaaaaaaaaaaaaaaaaaaaaaaaaagccaggcgcattggctcacacctgtaatcccagcactttgggaggccgaggtgggtgaatcacgaggtcaggagatcgagaccatcctggctaacacggtgaaactccgtctctaataaaaacacaaaaaattagccaggcgtggtggcgagtgcctgtagtcccagctactcgggaggctgaggcagaaraatggcatgaacctgggaggcggagcttgcagtgagccgagatcgtgccactgcactccagcctgggtgacagagcgagattctgtctcaaaaaaaaaaaaaaaaaaaaaggaacaaccatgtctcccatgtctcccacaaaagtcaaagtgctccttgaggatcccccaggtgcaggccctgtgttcaatgcaaagaacatagaaagtctccctcttcatggagctcacaatctgcctgggacacaaacaagatgctgcactgcagtgtgatgcttagaatggggcatggcacgtaacatctatttgctgcatgagcaagtaccaagaactaaagctaaggtgttgtaggagctcacaggggggcttcaagtgctagttcaaagcagaaatcaaagaaggcttcatgaaggtgaccgtgtctatctgcatcataaagaatgaacagtttgggaggccgaggtaggcaggtcacttgagcctaggagtctgagaccagcctgggcaacatggtgaaactccttctctactaaaaatacaaaaaattagccaggcatgatggcgcacatctgtactcccagctacttgggaggctgaggtgggaggatcacctgagcctgggaagtcaagaccactgcactcgagcttgggtaacaggaatgagatcctgtctcaaaataaataaataaataaagaaagaacgaacaaacaggagtaggctggcaaagattcagggaggggcattccaggctgagggaaaatgtccaattgtctaatacatgcgtagcagtgggtggaaagagaatgcttagcaaaagagtcaagtcattgtcaagcgcattg

SEQ ID NO: 675981 - DNA, 1083 bp, Homo sapiens
agtgtggtggtgtgatctcggctcactgcaacctctgcttccgaggttcaagggattcttgggcctcagccacccgagtagctgggattacaggcatccaaaaccacgcccagctaatctttgtattttcaggagacaggatttcaccatgttggccaggctggtctcaaactcctggcctcaagtgatccacctgctttgtccccccaaagtgctgagattacaggcatgagccaccacacccaaccaattttttaaataaagtaaatctctgtatgttgatagcaaaaggcctctaagacttattgagtaatgaaaaaatatgcactaaacatgcatatttttatgtaacttctaaaggaatatatatgtgtatctgctcacataatttgtattttctgctcacatatatataatttgtattttctggaaggatacataagaaactgttaataatgagaagagggcctttaagttttctttttatatccttctattctcctggacttttctatccatatgcaaatatatatttttatatatattacatatatatacatttatataaactaaacatttaaatttatatataaatatgtaaatgtatatatgtatattctttttttgagacagggtctcactcagccacctaagttggagtgcaatggcacaatcacagctcactgcagccttgacctcctgggctcaaaggatcctcccgcctcagcctcctgagaagctgggaactacaggcatacaccaccacacccagctaatttttttgtagagacaggtcttgctatgttgcycaggctggtcgtgcactcctggcctcaagtgatcctcccattctggcctcccaaactgctgggattacaggcatggcctctactgacattttgttttgcgacagtctcactctgtcacccaggctggagtgcagtggcatgatctccgctcactgcaagctccgcctcccgggttcacgccattctcctgcctcagtctcccaagtagctgggactacaggcgcccgccaccaaaccgggctaattttttttgtatttttagtagagacggggt

SEQ ID NO: 675982 - DNA, 1083 bp, Homo sapiens
agtgtggtggtgtgatctcggctcactgcaacctctgcttccgaggttcaagggattcttgggcctcagccacccgagtagctgggattacaggcatccaaaaccacgcccagctaatctttgtattttcaggagacaggatttcaccatgttggccaggctggtctcaaactcctggcctcaagtgatccacctgctttgtccccccaaagtgctgagattacaggcatgagccaccacacccaaccaattttttaaataaagtaaatctctgtatgttgatagcaaaaggcctctaagacttattgagtaatgaaaaaatatgcactaaacatgcatatttttatgtaacttctaaaggaatatatatgtgtatctgctcacataatttgtattttctgctcacatatatataatttgtattttctggaaggatacataagaaactgttaataatgagaagagggcctttaagttttctttttatatccttctattctcctggacttttctatccatatgcaaatatatatttttatatatattacatatatatacatttatataaactaaacatttaaatttatatataaatatgtaaatgtatatatgtatattctttttttgagacagggtctcactcagccacctaagttggagtgcaatggcacaatcacagctcactgcagccttgacctcctgggctcaaaggatcctcccgcctcagcctcctgagaagctgggaactacaggcatacaccaccacacccagctaatttttttgtagagacaggtcttgctatgttgctcaggctggtcgtgcactcctggcctcaagtgatcctcccattctggcctcccaaactgctgggattacaggcatggcctctactgacattttgttttgmgacagtctcactctgtcacccaggctggagtgcagtggcatgatctccgctcactgcaagctccgcctcccgggttcacgccattctcctgcctcagtctcccaagtagctgggactacaggcgcccgccaccaaaccgggctaattttttttgtatttttagtagagacggggt

SEQ ID NO: 675983 - DNA, 1083 bp, Homo sapiens
agtgtggtggtgtgatctcggctcactgcaacctctgcttccgaggttcaagggattcttgggcctcagccacccgagtagctgggattacaggcatccaaaaccacgcccagctaatctttgtattttcaggagacaggatttcaccatgttggccaggctggtctcaaactcctggcctcaagtgatccacctgctttgtccccccaaagtgctgagattacaggcatgagccaccacacccaaccaattttttaaataaagtaaatctctgtatgttgatagcaaaaggcctctaagacttattgagtaatgaaaaaatatgcactaaacatgcatatttttatgtaacttctaaaggaatatatatgtgtatctgctcacataatttgtattttctgctcacatatatataatttgtattttctggaaggatacataagaaactgttaataatgagaagagggcctttaagttttctttttatatccttctattctcctggacttttctatccatatgcaaatatatatttttatatatattacatatatatacatttatataaactaaacatttaaatttatatataaatatgtaaatgtatatatgtatattctttttttgagacagggtctcactcagccacctaagttggagtgcaatggcacaatcacagctcactgcagccttgacctcctgggctcaaaggatcctcccgcctcagcctcctgagaagctgggaactacaggcatacaccaccacacccagctaatttttttgtagagacaggtcttgctatgttgctcaggctggtcgtgcactcctggcctcaagtgatcctcccattctggcctcccaaactgctgggattacaggcatggcctctactgacattttgttttgcgacagtctcactctgtcacccaggctggagtgcagtggcatgatctccgctcactgcaagctccgcctccygggttcacgccattctcctgcctcagtctcccaagtagctgggactacaggcgcccgccaccaaaccgggctaattttttttgtatttttagtagagacggggt

SEQ ID NO: 675984 - DNA, 1083 bp, Homo sapiens
agtgtggtggtgtgatctcggctcactgcaacctctgcttccgaggttcaagggattcttgggcctcagccacccgagtagctgggattacaggcatccaaaaccacgcccagctaatctttgtattttcaggagacaggatttcaccatgttggccaggctggtctcaaactcctggcctcaagtgatccacctgctttgtccccccaaagtgctgagattacaggcatgagccaccacacccaaccaattttttaaataaagtaaatctctgtatgttgatagcaaaaggcctctaagacttattgagtaatgaaaaaatatgcactaaacatgcatatttttatgtaacttctaaaggaatatatatgtgtatctgctcacataatttgtattttctgctcacatatatataatttgtattttctggaaggatacataagaaactgttaataatgagaagagggcctttaagttttctttttatatccttctattctcctggacttttctatccatatgcaaatatatatttttatatatattacatatatatacatttatataaactaaacatttaaatttatatataaatatgtaaatgtatatatgtatattctttttttgagacagggtctcactcagccacctaagttggagtgcaatggcacaatcacagctcactgcagccttgacctcctgggctcaaaggatcctcccgcctcagcctcctgagaagctgggaactacaggcatacaccaccacacccagctaatttttttgtagagacaggtcttgctatgttgctcaggctggtcgtgcactcctggcctcaagtgatcctcccattctggcctcccaaactgctgggattacaggcatggcctctactgacattttgttttgcgacagtctcactctgtcacccaggctggagtgcagtggcatgatctccgctcactgcaagctccgcctcccgggttcacgccattctcctgcctcagtctcccaagtagctgggactacaggcgccygccaccaaaccgggctaattttttttgtatttttagtagagacggggt

SEQ ID NO: 675985 - DNA, 1083 bp, Homo sapiens
agtgtggtggtgtgatctcggctcactgcaacctctgcttccgaggttcaagggattcttgggcctcagccacccgagtagctgggattacaggcatccaaaaccacgcccagctaatctttgtattttcaggagacaggatttcaccatgttggccaggctggtctcaaactcctggcctcaagtgatccacctgctttgtccccccaaagtgctgagattacaggcatgagccaccacacccaaccaattttttaaataaagtaaatctctgtatgttgatagcaaaaggcctctaagacttattgagtaatgaaaaaatatgcactaaacatgcatatttttatgtaacttctaaaggaatatatatgtgtatctgctcacataatttgtattttctgctcacatatatataatttgtattttctggaaggatacataagaaactgttaataatgagaagagggcctttaagttttctttttatatccttctattctcctggacttttctatccatatgcaaatatatatttttatatatattacatatatatacatttatataaactaaacatttaaatttatatataaatatgtaaatgtatatatgtatattctttttttgagacagggtctcactcagccacctaagttggagtgcaatggcacaatcacagctcactgcagccttgacctcctgggctcaaaggatcctcccgcctcagcctcctgagaagctgggaactacaggcatacaccaccacacccagctaatttttttgtagagacaggtcttgctatgttgctcaggctggtcgtgcactcctggcctcaagtgatcctcccattctggcctcccaaactgctgggattacaggcatggcctctactgacattttgttttgcgacagtctcactctgtcacccaggctggagtgcagtggcatgatctccgctcactgcaagctccgcctcccgggttcacgccattctcctgcctcagtctcccaagtagctgggactacaggcgcccgccaccamaccgggctaattttttttgtatttttagtagagacggggt

SEQ ID NO: 675986 - DNA, 651 bp, Homo sapiens
gaagagctggctttagtggatgtggggtggggtctaagagcatttctaacaaggtcccaggtgatgccaatgctgctcrtctacggaccacactatgagtagcaagggtctagtgtaggcactattcacaatttcagctgataattccttgtgatgggggctgccctgtgcactgtaggatgttaagcatcattcctggtctctccccacgagctgccagtagcagccctcaccccactgtgtcaaccaagaacgcctccagacattgtcagatgtcccctggggggtgaccaagacccactggtctagcccaaatttaagcaccatcccaaagacaacacagctggttagaaagaaagcatgaggccacacctctagatccctactcagtaatccttcctccccatcactcagcctcccacacagccatgagccagcagatgtggacacatatgcaaattcagtcaggctggttccttccttaggatccccattagtcttcagaataaaaatccaggtcgggcacggtggctcatgcctgtaatcccagcactttgggaggccaacgtgggtggatcacctgaagtcaagagttcaagaccagcatggccaacatggcgaaaccccgtctctactaaaaacacaaaaaat

SEQ ID NO: 675987 - DNA, 627 bp, Homo sapiens
ttagacaaggagagtaaacagttaaaaagccacactaacaaatgtactgttacaaactgaaataagaggtctagagaaaaagaacactgctttatggaaaatttgcaataaatgaggccaaccagaatatggaatcargatgggcttccttgaggaaataatgcttgagctgaggagttacataggttagagggtaaggcaatataacaggggggacctcattccagagagagagaagagtgaggacaaaggcctttggctgaagggcatgtgcacattcacagaacaagaaagctgaaaggactgaaagccagagaatgaggtggagacgaataggattagagagcacagtggaggtgggagtcttctggacaacattaaggacctctgtcctttgtcctaacaggaacaggaagtcactgtggagttttaagcatgaaagaaacataatagaatttctgttttgaaaagattttcctggatgaaatgtgggccattcttagaagaagatcaaagtagaaactggacaggaggtaatttcagcaatcaagtgaggtgctcagaataagataatggggatgaagaaatgggtttgacaaatatttaggaagcaaaatcaaaaggtta

SEQ ID NO: 675988 - DNA, 1928 bp, Homo sapiens
agactgtgtctttttcatctctgtgcctagatgcaaagtctctaatttagacttggcatttgataaatatttgattaatttaactcagcaggcatacatgtcttggcttccacctaagaaacttaccatttacttagattttaataagtcttgaatgtttttatacataagcttctctaatcctcaaaacaaacaaaaaccctgtgaagtactaaatatctctaatgttcagatgaagagctgaagcttttatctggaaaatcacttgccaaggttaatcagttagtaaagccaacatgagattaggaactcaggtttgtctcagtttaaagtcaataacattgtaccccataaatatataatatgtacaattatgatttgtcaattaaaaatttaaaaaacaaaatgcaaatcaataagcaaataaaagttgatactcatatatgttatctattggcttctatacactacttaaagtgtcctttaggaaagtttgtctttaacataaacccaaggattcataatcacatactaaaaaaatctaaaattattaaaatctacattattatttgaaaaacagtagtttcccatctctcgcttgaagcttccttgacaatcccatttctcccttgaagttcctggagtcttatattgcctgtatcttctaataactgctatttccttcaatttgggatccctgtagcttgcaggtctgtggcttttggacctcatgagctccattcaagaaggagatgttcttctggtttcccaaaaatcatgagagtaagtaatgtgtttttttccctttggagttgaaatgttatcctatcagattggatggacttggcaggcttgatttaaagaaaaccacccatctctcccaggctttctttctgtgatgatttaaatggaagtgtaatacaatctcttaaactttcataacttagtcccaccccaaactttccagaaatcagtcaggaattcttgtgggaatatcaagtgagaggcagtacaggataatgcaacaaagggaaacatataaagggaaatgatggaaagttgggaaagagaacagagacatatgaattgaatagtgactgagcatctaacacactcatgctaatgagtggcttctgaaattatgtggtcaaaataaaagagctggactccacgttcttgagcttggcattcagtgactatgattcatattttaggtctggagcagactaatgagttatggacaaactacaagcactcattctgttttagaatggctatgatctttttgtcaactcttcatttatcacttaataatattaatcaccacttcccagtcttcatccataatatggtaagtgctactctgagccacaagcgagagttatctctacccagagaacattccatttaaattaatcaagcgtgtgcgcgtgcgcacacacacacacacacacacacasacacacacacacgataaagctaaagctaagagctccctcaaagagaaggaatgccagggtggggcaaaagtcaatgccttaaagtagttaaagtaaacacgctaatatcaataacaagaataccaacaaaaaacttaatactatttatttaatgtctactgtgtggcaagcactgtgctaggagctttatattgattctatacagactctgtgagttgaatattcttatccctgttttacagatggaaaatcaagtctcagagaaactaacattttcaggctccagacctagtaaatgatagaaacaaagttaaaactcagttcttcctgactttaaaatttctgttctttccatattaatcagagaatatggtggagaaaattctgttctgtgaaggaagcggattgaaaatagagaaaaaaagattaaaaacttacagagtcctggaaatattcctgagctagaaa

SEQ ID NO: 675989 - DNA, 1928 bp, Homo sapiens
agactgtgtctttttcatctctgtgcctagatgcaaagtctctaatttagacttggcatttgataaatatttgattaatttaactcagcaggcatacatgtcttggcttccacctaagaaacttaccatttacttagattttaataagtcttgaatgtttttatacataagcttctctaatcctcaaaacaaacaaaaaccctgtgaagtactaaatatctctaatgttcagatgaagagctgaagcttttatctggaaaatcacttgccaaggttaatcagttagtaaagccaacatgagattaggaactcaggtttgtctcagtttaaagtcaataacattgtaccccataaatatataatatgtacaattatgatttgtcaattaaaaatttaaaaaacaaaatgcaaatcaataagcaaataaaagttgatactcatatatgttatctattggcttctatacactacttaaagtgtcctttaggaaagtttgtctttaacataaacccaaggattcataatcacatactaaaaaaatctaaaattattaaaatctacattattatttgaaaaacagtagtttcccatctctcgcttgaagcttccttgacaatcccatttctcccttgaagttcctggagtcttatattgcctgtatcttctaataactgctatttccttcaatttgggatccctgtagcttgcaggtctgtggcttttggacctcatgagctccattcaagaaggagatgttcttctggtttcccaaaaatcatgagagtaagtaatgtgtttttttccctttggagttgaaatgttatcctatcagattggatggacttggcaggcttgatttaaagaaaaccacccatctctcccaggctttctttctgtgatgatttaaatggaagtgtaatacaatctcttaaactttcataacttagtcccaccccaaactttccagaaatcagtcaggaattcttgtgggaatatcaagtgagaggcagtacaggataatgcaacaaagggaaacatataaagggaaatgatggaaagttgggaaagagaacagagacatatgaattgaatagtgactgagcatctaacacactcatgctaatgagtggcttctgaaattatgtggtcaaaataaaagagctggactccacgttcttgagcttggcattcagtgactatgattcatattttaggtctggagcagactaatgagttatggacaaactacaagcactcattctgttttagaatggctatgatctttttgtcaactcttcatttatcacttaataatattaatcaccacttcccagtcttcatccataatatggtaagtgctactctgagccacaagcgagagttatctctacccagagaacattccatttaaattaatcaagcgtgtgcgcgtgcgcacacacacacacacacacacacacacacacacacacgataaagctaaagctaagagctccctcaaagagaaggaatgccagggtggggcaaaagtcaatgccttaaagtagttaaagtaaacacgctaatatcaataacaagaataccaacaaaaaacttaatactatttatttaatgtctactgtgtggcaagcactgtgctaggagcttyatattgattctatacagactctgtgagttgaatattcttatccctgttttacagatggaaaatcaagtctcagagaaactaacattttcaggctccagacctagtaaatgatagaaacaaagttaaaactcagttcttcctgactttaaaatttctgttctttccatattaatcagagaatatggtggagaaaattctgttctgtgaaggaagcggattgaaaatagagaaaaaaagattaaaaacttacagagtcctggaaatattcctgagctagaaa

SEQ ID NO: 675990 - DNA, 638 bp, Homo sapiens
tgggagacaggtttgtggttagaaataaacatttgagagagaaaaaaagcattttctttatggtttacaaagtgctttcatatgatttatggctacccacaggttaggcagagcaaggacagttttgttttgtttcttttcattttacagatgaagaaactgagtgtctgtgaggttataggaaaatttaagttcacatatctaagtgcaggttggggtgggaatccaagatctctgtcctcaaatgtaatcttttctactgcacagtgttcagcctgctaggcccaagagtgaacccagatccatttgcagtgggaaagtttaatgtctttttaccggtttatgtttcaaggtgctcattgctttccttatggctttcttagtagctaagcctattttctctcctgcctgttgtacatagcaaatggtaggaaaactgagggcaaaccttcttgagcacccttccagggccctctcctcatgccaggccctgagtataagcagatgcccttgcacataccagttaggccagctggacagaaatgtctggcaaggcagctttttccttaatagcttccctggggagagtcctggacagagactttggagctctggttyccattgactgacaaacttaa

SEQ ID NO: 675991 - DNA, 606 bp, Homo sapiens
gttttccaggctcttcagggggcctccagatctccttcctcattggcctcctggccagcagctgatctcactgttacactcttatcagagtttctaggaatctcctggctagtgaacgctttgttcaaccactgggctctgacacccgactctgccttgacctcaggcttttttgtactccctaaatccagttgcctgtgccatgccagccccagtccttccatgtatttatggtcttgtcytttctggatccagcatatttccagacctgcctcttcaacttactgtcatctacagtcccactgctaacatatgtcttctgtttgatcaaactgtgaggtctctgagaccccagggccattgccacagtgaaaataccatcttagaggaggacagggagcaaagagaaagccagaagtaaacttctgcaaggaagaactttcaaagtcccttctcataccctgaagaatgtgagtgtcagagtttttagggaaaaaaataatttgtagatcaagtctcttttggctctttgaggagttttccaaatttcttctgggaggccccaatttctgtggctggagtatggaaacccacacctgggaggcc

SEQ ID NO: 675992 - DNA, 591 bp, Homo sapiens
agctccgggcttggagctggaagccagttgatgccctcccctctccctgcttccccgagccgctggcaggcactggtacttcccctgtgccaggctctgtgtcgagggctttacacgtattatctcatttaatcctctcacccacccagactacatagtctctcctyaatgactaccttccattcattcgccctgttctccgcttcctagccctgatgacaaatcatgatatgcttttgcttgtttacttgttgtctgtcttcccacttagactgtaaattccttttgttctctgcagcatcccgagcacttgtagaaggcctggctcactacattttttctttttaaataaatgagggacttaatcaagtgactaggctcagagtcattttctcaggatcacccagcttgtgtctgtagagctggaatccacacccatgttgctgagggaacctgctcccctgtgatgacaggagctgctgggaggagtttgagtttcaggcccagcacagaagccaagaataactgaaaccccagtgcctttacattcacctctgcacaatgaatcgagcttcccagtggtgctgggag

SEQ ID NO: 675993 - DNA, 1936 bp, Homo sapiens
tgttccccaaccagaagggacaccctcattgagaaaaatgccaaatgcaagatgagaagggaaacattcaaagactcagagaaagcctgagatagacccattaggacccgatcaaggtcttccatcctccaccagattaaatttttttgtcatcttagaaagagcaccaatttcttctttctctacctccttaagtctcctgcagcccagagatgctgcctgctgtcttggaatctttgtcttcaaaatcagaacaatttcatatccttgatctcatctctccttggaacattctttacaggagtttggggcagtatytctacccctttattaggcatttatttttattatttatttatttttgagacagtctccctctgtcacccaggctggagtgcaatggcacggtcttggctcactgcaacctccgcctcccgggttcaagcaattctcctgcctcagccacacgagtagctaggattagaggcacctgccaccaggcctggctaatttttgtatttttagtagagacggggtttcaccatgttggtcaggctggtctcaaactcatgacctcaggtgatttgcccgccttggcctcccaaagtgctgggattacaggtgtaagccacctcgcccaggcctatcctagactcttgttccccaaccaaaagggacaccctcattgagaaaaatgccaagtgcaagatgagaagggaaatattcaaagactcagagaaagtctgatttagactcattaggacccgatcaaggttttccatcctccaccacattaaatatttttgtcatcttagaaatattagccattccttctttctctacctccttgagtatcctgcaacccagagatgctgcctactgtcttggcatctttgttttcaaaaccagaacaattttatatccttgatctcatctctccttggaacatgcttttacaggagttcggggcagtacttctacccctttattaggcatttaaaaaaattctttcttcctcggggccctccttctctgtgatagcatattgttcatatggcaatgatcacagcgaatcattctgggtgggattcctgctcaccccgcaccctcctcccacactggggatggcgggaagggtaagatcacatggatgggtgtcccgaatttgggcagatccagtcatcgtgagctcaactgaacatgggaacacctgtgggatgaggagctgggacatgtggtctcgatgtctccctgttccccttaccctcctttctcagtaaattgacattttccagcctcaaagttaattcctgcttctgtttgggggaggggaagagaactgtttccatttagtaatctctgaacaattgaaaatgcatgtttctctcttaacatcagaggcctgtttctttttaaggcctaacgtgtttgaaaattcaatttcctaactttgaccactttttgtatgatggctattaagaatgacaaatgggactttggagatattttgctagtttctttgttaaactccaggctaaatttgtttctccagcccccaatcccattcccactcttcctcccagggctgccgtggtgtatggccctggggaagatattcacacatagtctaactgatggctcaaagaattgtacagccacagaaccacccgtgttccttatcttagcaaatagtatcacctccttacagtttctcgaaacagccatcccccttgccctcatccctcatagtcaatcaacaacccagttacactgattctacctgttgagtatttcatatatccctggcattatccgttctctatcacagcatcctggtccaagctaccatcctccttcttgcctggctacatacattagcttcaaaatgagattccccattgactgttgaccatcctatcagttctccacactgtag

SEQ ID NO: 675994 - DNA, 610 bp, Homo sapiens
cacacggcaggtgcctgatgagcacttgtggactggatggcattggccagtgtgcatctcccaggaactctgctgtgaactccgcttgggcagggacatgtctgttttgttcaccattgtgtccccaaaattcaaagtcttgcacctagaacactcttgttggatatttgataatgagtgagtttgctgcaaaaggaaaaaaagcaagaacaataacaattaccaccataaaataagaaaacggacccagaatagaatttgaggcaagagaccctctgaatgaggagattctaagtcctttcattccagaagaattatcctgtgtgcttcagtgagccaaatccccagggaacaaatgacatcagggaaagctgcctgagcccaggacaaaatcaactaaattgctccaactggtaaacctcctggctctcatttcagcccactgagtcttagagagttggtggcggggggyggtgggggggttgggggtagagcatagaatagcaggagtgtgactctaatgtaacccaggacaggaaatgtttccaatattctaaattttgtggacaaagtaaaatgtcaggaaacaggaagcaaaagagtggctaca

SEQ ID NO: 675995 - DNA, 610 bp, Homo sapiens
cacacggcaggtgcctgatgagcacttgtggactggatggcattggccagtgtgcatctcccaggaactctgctgtgaactccgcttgggcagggacatgtctgttttgttcaccattgtgtccccaaaattcaaagtcttgcacctagaacactcttgttggatatttgataatgagtgagtttgctgcaaaaggaaaaaaagcaagaacaataacaattaccaccataaaataagaaaacggacccagaatagaatttgaggcaagagaccctctgaatgaggagattctaagtcctttcattccagaagaattatcctgtgtgcttcagtgagccaaatccccagggaacaaatgacatcagggaaagctgcctgagcccaggacaaaatcaactaaattgctccaactggtaaacctcctggctctcatttcagcccactgagtcttagagagttggtggcggggggtggtgggggggttgggggtagagcatagaatagcaggagtgtgactctaatgtaacccaggacaggaaatgtttccaatrttctaaattttgtggacaaagtaaaatgtcaggaaacaggaagcaaaagagtggctaca

SEQ ID NO: 675996 - DNA, 1561 bp, Homo sapiens
tgcttccacacttaacttgggccatgtctaacgtgtaccttcatgggttcttgctcagttcagatgttctaccacaaagacatctttctggttattctgtccatattgatctctttcttccctgaatttaccttttgtgtactttgtatatagcatgtaatcctttctgtgctgtttattccaaattctttgccatgggatataaggcccttcacaatctttctgcagcctaccttcagcctcatttaccatttaggtttttctggggagtgctgggaaacggaatttctctctgtcacccaggctggagtgcagtggtgcgatctcggcttactgcaacctctgcctccctggttcaagtgatcttcccacctcagcctcctgagtagctgggaccacaggtgcacaccaccacacctggttaattttttatatttttggtagagatgggattttgctrtgttgccaaggctggtctcaaattcctgacctcaggttatctgcccaccttagcctcccaaagtgctgggattacagatatgagccaccgagcctggcctcactcaagagttcttgagctatagtctggttacatcttgttccatgcagttcagctgtgttcccacatatgccttcttccttcacactcttcttctttgtaggccattctgttgctggaatgcatttcttcccattggcttctggaaaatgtgaactcatctaagatctggctttaatctcctttctgtgactccttcccctaggcattcccctgcccaacaaaattagtcaccccagtgcttccagggcacttagcacgtttatggagattcttagtttacattctaggttatgagcacctgattgggggcagaaactttattgcattcatcttgtattcctagtgtcctaaatgatgttcgggacatataggctcttcaaaaatagtcttcgaaactagcaaattaatatgcttattctgtggatgttggttttgtctccataactaaggttctcaactttctaatctcgtgtggtagcaagacttaagattcatttggtttagtgagattaatgacagatttgttctgtgctagaaaagccttcttattgttaatatctaagcaggaaaagaaagaagtgttctaatttccatataaggaaatcagatgcacagatgcctctgaacagcagagcgtgtctgttaaaccagatgaaggggagaggaaaaggaactaccatttattactgtgccttgtgctgtgccaggtactttatttgcatttttaaaattagaagcattttaaatttgtgcatctaatatgcggcattgatttgaaggtttaattggtgctgtttgcattgctcattgcttatgtaacctgatgtaagagattagttcaccaaacatatgtatgaatcattttctttaatttatttctctgtctagtttctgaggagtattcagtcaataagagacccagcatctatccctcctgaagagatggtaagatgatatacttcacatataatgaaggtgcctttgtgtaattgagtatga

SEQ ID NO: 675997 - DNA, 968 bp, Homo sapiens
tggctgtagcctcctggacttccttccttttccattatcctcttcagcagtgtctgaaaataatgttgggggaatatgcccactatgcaagttgtacaattttctcagtctgcttctcttctcctatgtggaataatagaagcctgtggttgcttcaattctcaaaatgtcaaaggatttttattatttttgtgtgtgtgtcaatgcttgcttccggtttttttggcaaaatagtatacttttctactcagaaagtatatagggttatgatctataatacttgtatcctgtcttgtttcatgggtcagtaagtgtacacaaagttctttttgaaaaataattcttaaacttttccccctttcttgcttgcttaggtgtcaacttctcttaactgagtttctttttggatgcctcatgtaccccttcaaaaccttggcacatttgatgccaactaaagttgcttactcagttccatataagctttgaccactttcctgtgagtataaccaggcagtacctttccacagaatcaagtgtcttctgcttcctttcgtgggattataggatttggcatacccagggactcctcagcattcacacacatagaagccagaagtgaaatcacagagaaatgagtggaaatagatcaacacttggccagtggatgatgggagccaatggataaagcttctgccttcttttgcttgggtgcacagttctgagatgaattctacaaatgtcttcagaaaatcatgcaaacttgaaagtcatttgccctagcaatggtcaactccaaaatgcatttttctactggttcttcctatctctgaatcattwctcatgcctcattcttttctcaagtcacctacaaataaactgcatgtacaccttctgcttaagctcagctttggggaaatatgtagaatgagatagtagctaccttgagactctctgatggaaaatagact

SEQ ID NO: 675998 - DNA, 915 bp, Homo sapiens
ttctccaattttctttgatactttcaatgaaaaattactaataaatatatgcattttatgatttaaaagacagcatgatgaacttgaaaaatatttttattcctcattccatctagggacactggaatacactgcaaagaaatgttgtttaacattcccttttccatttatcattttttttaaaaaaataaacattttcagaaatttggcctgaatattaaataacagatttgattattcaatctcaagaatctatgaagtagcttgcaaagaaaacggttttaaaaagttgagagtggtaaaacgtaagatgaaagagagagatgaatatgtaccctcagaacagtattgtgtgttatagaaattaagtattagttgtcaatcatcatagataattaaagttattgacaagtttcattaacataaagatataaactcgaggaatttttctgaaaaggtacattgataaacttaaaagagaaacttcaatccaaaaatttatcactaaaatgctactttaycaatccatactactgatttagcttttacaactgattagtttttcggccttaatggttttcctttatgtattaactccctcttttgttattccaactttattattctttttttttttttttggtaggcccttgtagaaaagctattccaacttcagaagaaataactcaactatcaaattatgagatatttgaagacaagataccattaaatggatatgttaacactcattcacaaagatattaatgccctccaagagcaaacataatttgtctagagtgaatattaaatacttaaatattaatcatatattgaaatgcagtacatgattatatgtatacatatgtgcttatatacatgtatatataaatacatgcaagtatatatatgtgtttg

SEQ ID NO: 675999 - DNA, 1550 bp, Homo sapiens
catcaagagaagtggtaaaggctttggacttctcaatgtgtgactttaatatttaagactctaaattttattttaattagtcagccataatacttttaaggccatgttttaagctttccttaaaaacggggaaactcgttaattgccatattcacttattagcagagtttttatttttaatatatgaaaagggtcacagagattggaggtagtgtagccaaatggtcacgtgcctaggcttcaagtgtaaagagatgggtctaaatgctcaatagctttttcctagggcctttaatatcctttcaatttctgtagaatgggaatatgaaaaaccatatatcggccggatgcggtggctcacgcctgtaattcaagcactttgggaggccgaggcgggcggataacctgaggtcaggtgtttgaggccagcctggccaacatggtgaagctccatctctactaaaaatacaaaaattagcctggcgtagtggcatgtgccagtaatcccagctactcgggaggctgaggcaagataatcgcttgaacccgggaggaggaggttgcagtgagctgagattgcacccttgtactctagcctgggcaacagggaaagactccatctcaaaaaaagaaaaaacaaaaacaaaaaccaccatgtatcataaggctattgtgagaactaaatgagaaaatgcatatctgacaattaaaagggtacctgagcctctgtaaccaaatactattaccaatattattattcattttgttgtattactaaatcatcttctgctgcttggttaccctgttagagaataaagctattacaatagttgtaaaaatgatatgatttggtacgtctgttggagatgttgcctggtttgctaaccatctttcaaatcattactgtgagtagaaaatatagtgctatatgattatcaagaatgaaagatgccttttgaagtgatggaaataatttattacttatttgaatgcaaactcacactctgaaattagggatgggatctagcaaatctcttttaaatattcataggcaataaaagtctggctgtttgactgatttaacaggcaattgaatgttaccttagttctgcataattgcagctataagaaacattaggtaggtgatataaaaacctcacaaacctctgacataggcacttaattgattttaaaaaataggttaaggctcatcttcaaattaaaaggcactttgtttattaatagcaaatctggctgaggcaggagaattgcttgaacccaggaggcagaggttgcagtgagccaagatcgtgccattgcactccagcctgggcttcagggagagactctgtctcaaaaaaataaaataaaataaaaatagaaaataaccacaaaataaaaacttttttgtttaaccaaccaaaaatcaagaraatcatggcctaaaacaaattcagaattcttgattataacacattaatgtacaacaagaattttttaaattgatttaaaaactcagttactgtaatcattttgtttcttcagcctct

SEQ ID NO: 676000 - DNA, 590 bp, Homo sapiens
caagggtcttatggaatggcaactaattagccttgaataaaatatatctagtgtgtcctttcacattcttcaaaaactcccttgagtgtgactttcattgaccataaacagccctaaatgtaggagaaggcagtgcaggtaaatgaaatcagggggctagaatgtttccagatgcacacacacacacacacacacacaaacacactctctacaaaaaggaaataagaaacataggaggaacattaactagacatacagacatatggacaaccaaccaaagttatttctcctttcttgggagtgagttcagttatgatgtctagccttttgccttcttcctccccttgcttctacttctactgctccataatcccttccttttactctcctcactttttctcttacactccatcctccaaaacccttttccttttaccttttttcttgaggtatccttgttcccatattcagtaaaacataggaatagtaatcatcactgcaaatgaatttacaataaaatgaagacagaactttatgtttcaagggttataaaaagttctccttccttaatgatttttaacrtgtgtcca

SEQ ID NO: 676001 - DNA, 2356 bp, Homo sapiens
aatagaacctgattcaaatcccaagtatttttttcctgaaccccttaccaatctctctccatattctattaataccatgcttaaattcagcattttgcccagtgatctgctgtggacagcgttaatagtaaagtgtttaaaagcacaagtctggagcccatctgactagatttaaattctgactctggcttgtacctgtgttattccacggctcatgtgtaaaatggagacaagtagcagaatgacaacaaaccacacaaggttactgggagggttaaagaagtatgtaaatgtaaaacacttgccatagtgcctggtacgtaagtactcgataaatattagcaattgtaatttatataatactttaccattcataaagcatggttttctcttgattcctatcactgaaatttcatcaattcaggtgctctaatttcccaaacatataaaactctcaaaagcttcccaaaattgattataacataaacttatttatgtcccaagatcattaatggaactagactgaaaccaagctacagtctgtaataaggtaatacagttactgtccttgcccagtagagaagtatggtatttgcatagcattttcaaagttagtcttttctcccttaacaaggatccaactgtataaataattaaatctgaaatgcagtcagtctgaagaacattatctggccaacttaaagaagtgtccctaccaagatagaagagcaaagaggaaagagtcccccactgcaaggagtactgcaataatacagggaagtagctacatttcatcttcattctagaaatagggagacttggcaaaaggacagacaaaactctagacactataaatttggttctggaagggattaccatccatttattgcattttttcaagcatcaagttccctagaatattaattgccttttaaccattattcatcaagacagactgaagatggcaaggatcctgatatcaccagaagacagcctcacaagtgccttcttatcccctgaaaaaccttatggtctacagctaaacrgtttggttgtagccttgtaaaggataataaacatccaggaatcataaactgaaataattaacatctctctcaattactgtctggatacttaacatacatactcattgccttattttattcataccatcctgcgaagtacagtttacaaataaggaccagggatcccgaagcagcacccaaagcagacctccccaaaaatgaggccatgttagtcttgactaaaatggctttttaagactttcatgtctagcttccaaattataagctgactacactccaaattggttttcttttatgaaactagtttggatttgaaaagcaaatagctgttgacagtgcacatatggaaaactacagatcacttgagttatattttaggttcacaacaaagccttcaaaagcataaattttctattttcaacttctcacgtttgattggagagggcaaagaaaaggtataccagctaaaattaccctgatgctcatcaaattagaagcttcctctcatagatcataccttacccaagaaatcaactttatagtcatactatacccagaagcaggtgtgagtcacaaaagaacccacagagaagcaagacattgatctaaaagttccttccaaaggtgaccagaacaaatgctaagtgttgccatctctgtgtgataggattgtgggatttttttttttttttttagggacgggagtctcactatgttgcccaggctgaaatgtagtgactactctcaattgtaattatagcgcactgcagcctcgaactcctggcctcagcctcctgagtagctgagattacatgtgaatgccaccatgcctggcttagattctgctgtttttctttgtattcttttgtgtttcattaacttcacacaacacacatcccattttgaatcaaatacttttttttttaatttaaagcttctttttgcaaaaacaccttaccatattttatgaaaacccaatgttctgactccttgtgaatgggacctagtagcaagtaggcaagtattaaatattgatgctgcttttaacaaatagtctgaaaattactgaatgcctattgagtaggggatttttcttttcccttaccaggtagcagccatatttctaggattctgctttttaaagatcatggttccatgttgggaggctgaggcaggaagactgtttgaggccaggagttcaagacaagcttgggcaacaaagcaagacctcatttctacaaaaattaaaaaattagcgggtgcaagagcatgcacgtgtagtcccagctacttgcgaggctgaggcagga

SEQ ID NO: 676002 - DNA, 1177 bp, Homo sapiens
cagataagtgctatataaaaccattggatagtgtacaaatgtacaagactattaatgttagtaattacagtgatagggacctgggatagagtctgagaaggtctaggagcagtagcagtgcatcattgtccttcagggtatggggatgaatgtttgaccagagtggacctgatagcttagaaagggcaggagactcattgtctgccagtgtaatcatcagatggctcctagagaattctatgcaggagcgggtatctgtgggggaggctgccagagcagctcatgtaagaaacagctgttcctattcactctccacccaaggattttggccatattttattactttggttccagaaacagctggcttgcttgaggattgctgtcatagcaaagcaataacctccagcttgcttgggggaaaggaattgcatgcaaagggctctgggctctatgaggtcccgggttcccctgcttccttccccagttttcattaaaactaaagaagatccttttgtccctttggagcagcaggccagagcagaagaacagccaaacaggagagggacctgtaggttagattaactggaaggcagttctagggattttggctgtggcagtgagacagggtcctragcctgagaacatggccaagagagcaaaatctaagctggataacaacagcttaagaaaccaaggtctgtgagcgttggtggttctagaaccttgagatgagtgagagatgaataaaggggtcttattgaatgggacagattggggggtgctcaaaagctactttaccccattaacacaaagcagaaattgcttctttggaattatctgtcattgtattatttgagtctccactatccatccttcccctcattgccacctcccatatccccaattaacgtaaactgtcaagagtcaacaattctgagtacatagggcaagaggtaaaagataaaagatatctgtggtataactggtctttaggaagatgaagtaactgcatctttcccaccattgtgtgtattcttaataccaagatttgggtccttgatctgacatttattttctgtgtgactaacttctctgagctgtagtttgctcatatacaaaatgggaataataatgcctactttatatagtgattgtgttgctagtagatgaagaaaat

SEQ ID NO: 676003 - DNA, 645 bp, Homo sapiens
tgtcaattcctcattcccaaatttaactattaatatgtcagcaatccgtatgccaaatcaccctcttaagtggtctatttgtccatacagatcattatttcaatagggtgaaaacaattcattctttttgtaacatataatttggaattcatgtattttaattaatttatttattttgagacagcatcttgctctgtcacgcaggctggagtacagtggtgtaatcttggctcactgtagcctcacctctgaggttccagcgattctcctgcctcagcttcccaagtagctgggattacaggtgcctgccaccacacccggctagttgtgtagttttagtagagaggggtttcaccatgttggccaggctgatctcgaacctctgacctgaagtgacccacctgcttcggcctcccaaagtgctgggattacaggcatgagccaccgcactcagctacatttatgtattttaatctctttcttctyttatgcggataatgtctaggactataaaatatcttttctgccttttgttcaagactaagtatatactatgtttgttgatattcatccttatgttcatagggctttttaaaaaatccttgaattaagggtagggatgaggaaaaaaaattcacaaaagaa

SEQ ID NO: 676004 - DNA, 458 bp, Homo sapiens
gctggtgggataactgatgaaatgcaattttctggaggcagtttttttttaatttttttttttgagacaggctctcactctgtcgcccaggctggagtgcagtggckcagtcttggctcactgcaacctctgcctcctgggttcaagcgattctcctgccttagcctccttagtagctgggattaacaggcatgcgccaccacacccggctaatttttgtatttttttggtagagactggggttttaccatgttggccaggctggtctcaaactcctgacctcaagtgatacaccggcctctgcctcccaaagtgttgggattacaggcgtgagccgctgcaccctgccaggggccgcatttttatgtgatcatccccgcgtggctttcctgtttgagactgaataattcactgttacatttccaacacttaccaggatacttagcacatagagttat

SEQ ID NO: 676005 - DNA, 458 bp, Homo sapiens
gctggtgggataactgatgaaatgcaattttctggaggcagtttttttttaatttttttttttgagacaggctctcactctgtcgcccaggctggagtgcagtggcgyagtcttggctcactgcaacctctgcctcctgggttcaagcgattctcctgccttagcctccttagtagctgggattaacaggcatgcgccaccacacccggctaatttttgtatttttttggtagagactggggttttaccatgttggccaggctggtctcaaactcctgacctcaagtgatacaccggcctctgcctcccaaagtgttgggattacaggcgtgagccgctgcaccctgccaggggccgcatttttatgtgatcatccccgcgtggctttcctgtttgagactgaataattcactgttacatttccaacacttaccaggatacttagcacatagagttat

SEQ ID NO: 676006 - DNA, 1223 bp, Homo sapiens
attacttcccccacttcctttctgggacttaacttccttctccttgcttgcacagagcaaaacttaacagctcatgacggagtggccatatctttattgcccctgaactgactggaatggcctctgtgtgccagattttggggtagactctgccttcagagtttacagtccagtgaattgattataaataagtaccaatgactggtcaaactattgtaaaaattcattctgcaagtgggagggtatttcagggatcacacctctgtgcgtggggtgagtgatcaggtaatggttgaatgaactaataagtcgtgtaagcaagcttcacgagagttgaagtggtctttagctttttcattgaatccacttrtccttggatcagatttacctgattttggattaattcagtggatttcatttactattaacatttgtaaaaaggctagacccagcacagtttgctaaatgaagagcagcaaaatttgagattttcttgagcttggtgaacctttcctaggtcagagggcaaggaacagtactggttttcaaaccttggctcttctctatcctcgctgtcctagccccacgtgatcagcagttcagtgcaaattgaagacagatggaagcacctctgtgagggcagcccaaatccccgctagctccaaccgactgctttctcctgtgcctagttgatttttaccttttgtgcttggaaagttgagcatcactgcaactctggctggggcattggatttttataaaactttatttcaagccctgaatgactgtgttctccaatctggtagaatacagctggagaaaggcagctggctgggtgcccaagagaagggaatttcttcctagcactgtgacggagtggagcatcggaaggctgaactagaaaagggcgcataagtaggaaatagaaactgaaaagccatcccaggatatttgagttgttcaaaagcaggctggtagtttgggcatgtctcaggcacaaagtgactcgtgaacatttgatagatgagctgtacctgtgtgtgtgcttgagaagagacttcgagctgcttttatctgcatgctgggtttggttccattatactcactggaccctctgtgctctcttgggttcctcttgtcatctgcctttgtgaacaggcaacacaagtgatggccacaggccctgcctgtctctactgcctcatcacttgcccttctcacca

SEQ ID NO: 676007 - DNA, 1361 bp, Homo sapiens
gcagggaagggcaaggcctgggatacctctgccctgggtgccaggcctagggcacacttgcttcatggaccaccctgggatcacttgggcctaggattttgaggccagcctggcaacataggcagaccccatctctaccaacaacaacaacaaaaaattagccaggcgtgactagtcccagttactcagtaggctggggcaggagaatcccttgaatccaggaggctgaggttgcagtgagccaagatggcaccattgcactccagcctggtgaacaagagcaaaactccatctgtgcttggtgtgaggtagggatctagctctatgtgtatgtgacggacagaaagtcatccccatggtgtggtcactgtggggtctgtcccctcctccaccgagccccagtgcgccarctgccccatctgcttggtccattactgaactctctgttctgttccatcaactcaaatcaacctacaaaaatggctgtaatcagcctgggtatgcgtgaccccaaaacagctggttaattccctgaaaagaattgagtgccagatgtgggggatcgtgtaacctgagggctgcttctctactttcagttttggccggggtgggagttctaataatcactcatttgctgctttgcaggcagacactcactgcatgcctccagggtgtcaggcaccaggatgggccatggtgggtggagcttaagagcagtacacactggaaggcagggagggattgacaatgcggcaaaaacacacgccaggtcatttttgtgagggacaggcactactgagaaaaccacacgatgtaggcacaggtggctgtcagggagggcttcttggaggaagtgatctttttgtctgggtctgatggatgagatggagttcacgagcgaagatctagggtggaggaattccaggaatagcaactaaaacggtcccgcagcaggaatgggcattgcgtggacactaccggtggcgctggagctgggagggaggtgggggctgcagagaagcaggcagggccagcccaccaaggagaaagccttcaaggggtggggcgggtggcgtggacactaggacctcgccacgtggctgcctcgagccagagcactgtggggaggaccctcccttctgcatcgacggtgccacagtgggaggaaggtttatccactgaagtccaggccggcccatccccatcccgccccttcccggtgctgctccagctccagagcctgcagctccccagtcagcacttgggggtcagaccctggcccaggccacgtttgcccccacggccccaggatgcccggtccttgcctccctggaaagcccaaccctctgcccgcccctcgg

SEQ ID NO: 676008 - DNA, 1361 bp, Homo sapiens
gcagggaagggcaaggcctgggatacctctgccctgggtgccaggcctagggcacacttgcttcatggaccaccctgggatcacttgggcctaggattttgaggccagcctggcaacataggcagaccccatctctaccaacaacaacaacaaaaaattagccaggcgtgactagtcccagttactcagtaggctggggcaggagaatcccttgaatccaggaggctgaggttgcagtgagccaagatggcaccattgcactccagcctggtgaacaagagcaaaactccatctgtgcttggtgtgaggtagggatctagctctatgtgtatgtgacggacagaaagtcatccccatggtgtggtcactgtggggtctgtcccctcctccaccgagccccagtgcgccagctgccccatctgcttggtccattactgaactctctgttctgttccatcaactcaaatcaacctacaaaaatggctgtaatcagcctgggtatgcgtgaccccaaaacagctggttaattccctgaaaagaattgagtgccagatgtgggggatcgtgtaacctgagggctgcttctctactttcagttttggccggggtgggagttctaataatcactcatttgctgctttgcaggcagacactcactgcatgcctccagggtgtcaggcaccaggatgggccatggtgggtggagcttaagagcagtacacactggaaggcagggagggattgacaatgcggcaaaaacacacgccaggtcatttttgtgagggacaggcactactgagaaaaccacacgatgtaggcacaggtggctgtcagggagggcttcttggaggaagtgatctttttgtctgggtctgatggatgagatggagttcacgagcgaagatctagggtggaggaattccaggaatagcaactaaaacggtcccgcagcaggaatgggcattgcgtggacactaccggtggygctggagctgggagggaggtgggggctgcagagaagcaggcagggccagcccaccaaggagaaagccttcaaggggtggggcgggtggcgtggacactaggacctcgccacgtggctgcctcgagccagagcactgtggggaggaccctcccttctgcatcgacggtgccacagtgggaggaaggtttatccactgaagtccaggccggcccatccccatcccgccccttcccggtgctgctccagctccagagcctgcagctccccagtcagcacttgggggtcagaccctggcccaggccacgtttgcccccacggccccaggatgcccggtccttgcctccctggaaagcccaaccctctgcccgcccctcgg

SEQ ID NO: 676009 - DNA, 1361 bp, Homo sapiens
gcagggaagggcaaggcctgggatacctctgccctgggtgccaggcctagggcacacttgcttcatggaccaccctgggatcacttgggcctaggattttgaggccagcctggcaacataggcagaccccatctctaccaacaacaacaacaaaaaattagccaggcgtgactagtcccagttactcagtaggctggggcaggagaatcccttgaatccaggaggctgaggttgcagtgagccaagatggcaccattgcactccagcctggtgaacaagagcaaaactccatctgtgcttggtgtgaggtagggatctagctctatgtgtatgtgacggacagaaagtcatccccatggtgtggtcactgtggggtctgtcccctcctccaccgagccccagtgcgccagctgccccatctgcttggtccattactgaactctctgttctgttccatcaactcaaatcaacctacaaaaatggctgtaatcagcctgggtatgcgtgaccccaaaacagctggttaattccctgaaaagaattgagtgccagatgtgggggatcgtgtaacctgagggctgcttctctactttcagttttggccggggtgggagttctaataatcactcatttgctgctttgcaggcagacactcactgcatgcctccagggtgtcaggcaccaggatgggccatggtgggtggagcttaagagcagtacacactggaaggcagggagggattgacaatgcggcaaaaacacacgccaggtcatttttgtgagggacaggcactactgagaaaaccacacgatgtaggcacaggtggctgtcagggagggcttcttggaggaagtgatctttttgtctgggtctgatggatgagatggagttcacgagcgaagatctagggtggaggaattccaggaatagcaactaaaacggtcccgcagcaggaatgggcattgcgtggacactaccggtggcgctggagctgggagggaggtgggggctgcagagaagcaggcagggccagcccaccaaggagaaagccttcaasgggtggggcgggtggcgtggacactaggacctcgccacgtggctgcctcgagccagagcactgtggggaggaccctcccttctgcatcgacggtgccacagtgggaggaaggtttatccactgaagtccaggccggcccatccccatcccgccccttcccggtgctgctccagctccagagcctgcagctccccagtcagcacttgggggtcagaccctggcccaggccacgtttgcccccacggccccaggatgcccggtccttgcctccctggaaagcccaaccctctgcccgcccctcgg

SEQ ID NO: 676010 - DNA, 1361 bp, Homo sapiens
gcagggaagggcaaggcctgggatacctctgccctgggtgccaggcctagggcacacttgcttcatggaccaccctgggatcacttgggcctaggattttgaggccagcctggcaacataggcagaccccatctctaccaacaacaacaacaaaaaattagccaggcgtgactagtcccagttactcagtaggctggggcaggagaatcccttgaatccaggaggctgaggttgcagtgagccaagatggcaccattgcactccagcctggtgaacaagagcaaaactccatctgtgcttggtgtgaggtagggatctagctctatgtgtatgtgacggacagaaagtcatccccatggtgtggtcactgtggggtctgtcccctcctccaccgagccccagtgcgccagctgccccatctgcttggtccattactgaactctctgttctgttccatcaactcaaatcaacctacaaaaatggctgtaatcagcctgggtatgcgtgaccccaaaacagctggttaattccctgaaaagaattgagtgccagatgtgggggatcgtgtaacctgagggctgcttctctactttcagttttggccggggtgggagttctaataatcactcatttgctgctttgcaggcagacactcactgcatgcctccagggtgtcaggcaccaggatgggccatggtgggtggagcttaagagcagtacacactggaaggcagggagggattgacaatgcggcaaaaacacacgccaggtcatttttgtgagggacaggcactactgagaaaaccacacgatgtaggcacaggtggctgtcagggagggcttcttggaggaagtgatctttttgtctgggtctgatggatgagatggagttcacgagcgaagatctagggtggaggaattccaggaatagcaactaaaacggtcccgcagcaggaatgggcattgcgtggacactaccggtggcgctggagctgggagggaggtgggggctgcagagaagcaggcagggccagcccaccaaggagaaagccttcaaggggtggggcgggtggcgtggacactaggacctcgccacgtggctgcctcgagccagagcactgtggggaggaccctcccttctgcatcgmcggtgccacagtgggaggaaggtttatccactgaagtccaggccggcccatccccatcccgccccttcccggtgctgctccagctccagagcctgcagctccccagtcagcacttgggggtcagaccctggcccaggccacgtttgcccccacggccccaggatgcccggtccttgcctccctggaaagcccaaccctctgcccgcccctcgg

SEQ ID NO: 676011 - DNA, 1361 bp, Homo sapiens
gcagggaagggcaaggcctgggatacctctgccctgggtgccaggcctagggcacacttgcttcatggaccaccctgggatcacttgggcctaggattttgaggccagcctggcaacataggcagaccccatctctaccaacaacaacaacaaaaaattagccaggcgtgactagtcccagttactcagtaggctggggcaggagaatcccttgaatccaggaggctgaggttgcagtgagccaagatggcaccattgcactccagcctggtgaacaagagcaaaactccatctgtgcttggtgtgaggtagggatctagctctatgtgtatgtgacggacagaaagtcatccccatggtgtggtcactgtggggtctgtcccctcctccaccgagccccagtgcgccagctgccccatctgcttggtccattactgaactctctgttctgttccatcaactcaaatcaacctacaaaaatggctgtaatcagcctgggtatgcgtgaccccaaaacagctggttaattccctgaaaagaattgagtgccagatgtgggggatcgtgtaacctgagggctgcttctctactttcagttttggccggggtgggagttctaataatcactcatttgctgctttgcaggcagacactcactgcatgcctccagggtgtcaggcaccaggatgggccatggtgggtggagcttaagagcagtacacactggaaggcagggagggattgacaatgcggcaaaaacacacgccaggtcatttttgtgagggacaggcactactgagaaaaccacacgatgtaggcacaggtggctgtcagggagggcttcttggaggaagtgatctttttgtctgggtctgatggatgagatggagttcacgagcgaagatctagggtggaggaattccaggaatagcaactaaaacggtcccgcagcaggaatgggcattgcgtggacactaccggtggcgctggagctgggagggaggtgggggctgcagagaagcaggcagggccagcccaccaaggagaaagccttcaaggggtggggcgggtggcgtggacactaggacctcgccacgtggctgcctcgagccagagcactgtggggaggaccctcccttctgcatcgacggtgccacagtgggaggaaggtttatccacygaagtccaggccggcccatccccatcccgccccttcccggtgctgctccagctccagagcctgcagctccccagtcagcacttgggggtcagaccctggcccaggccacgtttgcccccacggccccaggatgcccggtccttgcctccctggaaagcccaaccctctgcccgcccctcgg

SEQ ID NO: 676012 - DNA, 953 bp, Homo sapiens
ttcggggaggctgggatgcaagtccctgctccatcacattcctggccgacacacgtgaaggaactccctctgggtcccacagctgctaagtgatcagctgggcttcaaacccaatctgcacggctggggtgagccacttcgttctctggtctcagtttctacccctataacaggcacagagaccaccctcattttccagagtgatacagggcctcagtatcacaggggtttccgggcagcttgctccccctccaacctccccagccagagggccagctccgccctggccccaccagcaggacccagcagaactcagcaagacactggggcttgcagttttcagttcattcctgtgcctttgaccaggaatcacattcaatataacaggtgtgcacagagcccctactgcgtgccaggcactgggaccacaagcagaaggagacccagcccccacccagggaggagcagacccctcccagatagggattatgccgtgcagttcacaagagctagggaggcaagggagtgccggggtgcttcccacaggagaggacatcagacctccttggtcagcaaagacagagggctgagatcaaacacagggcagggcagaaagagccctagcaaaagctcagaggagggcagactgtggagatggtcagttctccatcgtggctgcaacctgggacgcagaggggacaatgctgggaggcaggcagkacagggctaggctgggctgaggtctctgtagttaactgagtggccacagtgagccactgaggactatggactgggagggcgatgaattgaatagtggggaggaaggcagcggagagagcagagaggacctgagcaaggttcccaagcctctgagctggctttgctgcagaaggcagggggtagagatggtatgaagggccgggttcaccaaagtagggcctgtctgccaggtc

SEQ ID NO: 676013 - DNA, 953 bp, Homo sapiens
ttcggggaggctgggatgcaagtccctgctccatcacattcctggccgacacacgtgaaggaactccctctgggtcccacagctgctaagtgatcagctgggcttcaaacccaatctgcacggctggggtgagccacttcgttctctggtctcagtttctacccctataacaggcacagagaccaccctcattttccagagtgatacagggcctcagtatcacaggggtttccgggcagcttgctccccctccaacctccccagccagagggccagctccgccctggccccaccagcaggacccagcagaactcagcaagacactggggcttgcagttttcagttcattcctgtgcctttgaccaggaatcacattcaatataacaggtgtgcacagagcccctactgcgtgccaggcactgggaccacaagcagaaggagacccagcccccacccagggaggagcagacccctcccagatagggattatgccgtgcagttcacaagagctagggaggcaagggagtgccggggtgcttcccacaggagaggacatcagacctccttggtcagcaaagacagagggctgagatcaaacacagggcagggcagaaagagccctagcaaaagctcagaggagggcagactgtggagatggtcagttctccatcgtggctgcaacctgggacgcagaggggacaatgctgggaggcaggcaggacagggctaggctgggctgaggtctctgtagttaactgagtggccacagtgagccactgaggactatggactgggagggcgatgaattgaatagtggggaggaaggcagcggagagagcagagaggacctgagcaaggttcccragcctctgagctggctttgctgcagaaggcagggggtagagatggtatgaagggccgggttcaccaaagtagggcctgtctgccaggtc

SEQ ID NO: 676014 - DNA, 2080 bp, Homo sapiens
ttctcttataattatacgtttcataatcctatgggttttaagtgtgttatcacattgaggttatttctagttatactaagattatatctcctgccattatacctagagctaaccagaaaggtccgcttttaaaaatatttgctgtaagtgagttcttattcaagagtcgactttgcttaaagtcacatattagagaagcactattttattagaacattttaaacctaaagtgcagtgtgttaaaagtaaaaccaggctgtgggttggaaagagtaaaccatgagaagctaatgaaagtcctatgaagaaaaccaattttagtaaagtttaagttcgtgacatttggttgttacaatccctttggatttagaaaaaaaaagaaaaaagaaaaatgatcaaggttgcaaaacctatatgacaaagagaagaaaaggtttagttctttcttaaatagaataatcaggaaggaatttcatcaacgatcactccacacaatatatatttcacatttattcctccaagagctctaacttgtaaagatgaaaaaaaaagttcctctgcttttaaaagagataatcatctaagtataacctcattatgtaaaaatcagttaagataacttttcctcttgcataaacaatagaaataaaccaaatcttagttttacttcatattgtcagtgaaaataaactatctttaattggaaaatatggtacctaacactagcagcaacaaaatctagcaaatctcttatatggtttggtctataatattaaaagaagttaatatctgcataaaataaacttaaagttaagaaatgatagaaaaatacagataatcttttaagaagagttttttgtttgttggttggttggtttttttggtttgttttttggtgagttgggattttgctctgtcacctaggtgatcatggctcacttcagtcttgacctcccaggttcaagcaaatctcctcagcttccctagtagctggggccacaggtgcacaccaccatactccagttaatttttttcttacatttttttgtggagacaaagtatccctgtgttgcccaggctggtcttgaactcctggactcaagcaatcctcctgcctcggcctcccaaagtgctgggaaaagaagagtttttcaaactcttaaaagatgaaggaataaagaacaaaaaaaaattaaaggttctgagttctgggctgggcagggtggctcacgcctgtaatcccagcactttgggaggccgaggtgggcggatcacaaggtcaggagatcgagactatcctggctaacacagtgaaaccccgtctactaaaaatacaaaaaataaattagctgggcatggtggccggcacctgtagtcccagcttcttgggaggctgaggcagragaatggcgtgaacccgggagacggagcttgcagtgagccaagatcgcaccactgcactcccgcctgggcgacaaagcgaaactccgtctcagaacaaaacaaaacaaaaaaagttctgagttctaattctgggcatgctacttactgactctacaatctaaacaacaggcacactgtcctttaattttctctcatataaatgaatgagcagaaagttcaatcaattgaccctacactgatacccacccattccttctccaaaggcttagctggctggggtcataaggtcatctctctgcaagctcaaaatcaagataaagtcaagatgaagtaaaactttatcttttccagcgggggcatggcattttaggtagtgggatctgaaaggaatcttgctgtttaggtctggattgcactagtcagtgttagtcctgagaacacatgtgcacgtgagagtgttgatttattttcttcaatatacccttttctcccaatttgtatatttgagattcgccagtggtttatagtctggtactctgtatttcctatctgaaaatggattacttccaggacaaaaagtccatatgtctgggttctgaccactgtctatttctcacaggactctcttccaaggcattaaaatcgattcccattcttataccaccagcccagatta

SEQ ID NO: 676015 - DNA, 1117 bp, Homo sapiens
taaatgcagatagaattctcagtctattgttttcttaagaatatttgagtttgctgacattccacatttgcttcctaaagtaatgtttttactttctactctatacatgctgctatattttactctatgagacttacaaaaatgaaaaatagatcttgctctgatatagtatatagattagtaagggagagtgtgtatatagtaactaaaacataagaaaggcataagtgccacaggagaggtataaatgatgtgtggaagtttagagaaaggagagatgacttttagccagattgtttagtgagagttttatagaggagatggtatttgaaatgaaccctgaaaaatatgtaagacatacatattaaaaagagtccaagtagagaaaccaccatgagcaaacttttgcaagttgcaagaggtgtacatgtatgagtatgaatgagcattctattcagttgagtgtaggggccatggagaggcaaatgtgacaggttgagaagtaggtaggctcctgattatagaagagcatgaatgaccaatatgaaagaattagacttgattctgcagacacttagtataatgatagattgtacattgttggtgtcttaattgcaaatggtaaatgattctcattcattcagttaactgacttttttggaatacctgtatgccaggcccttaataatacagcaataaataagaatcatctctgctttgcaaatgacttatggctttgtaggagggaaataattgtccttttaatttagcctagggggctttgaaacagtctgttcagcatgcctttggtgtattgaggagggagccgctgatggcctggggacactggggaaaggttcacagtggaggtgacatctgggggtaggtcgtgcttgctaaaccgtcgtctttggggacagggttactgctttaatacttcttttgatccggagggataggcatagtgctgattttacagtttcagtttagtaaatatataccatttgacagaacaatctgctgattttattattaaagttcagtattaatagtcagtggacagttttaatgactgtttgtcctgctgcaggtgaaygtgtcaggaaatgagctttgc

SEQ ID NO: 676016 - DNA, 1874 bp, Homo sapiens
aggaatgccctggctaccttttctgctcatgatattatccctagatgctttcgcatctttattaaaacagtaaaaatgcaagagtcttccacccaagttttctgtggtttagattatcacgttcctcaagatgcaaatgtcaaactatactgggcatccagttaacctgcaaggcctggaggtgatgggagcccctcctagcacaggttcccagtctcagtcagaaagcacctgctcaaaatagaaagataattacagagtaggggccaaagagactcccactggaagaatggaacttgtgtagctggggtgacacaagctggggacaagctgggggacacattcgcgaagggtgtttgacccaggcagtgcacccacggctcccttgagccaccctggcccgggtgtttatttggaaggagtgttcatcccccagactgtttagggccacggtgacagggaagggcttggtgaaggaaagcaggtagggtatgaaggccgctcaggttcacgaaagacttttgcttggtcccctgcggggtgggagtgtgtcgccccggtgcgggtacttagagcgcaaccggggagctgagcaggggagctgagcaggggagctgggcaggggcggctgccgcgccccacatccctgagggcgtgtgtgcgcgtgcgcgcgcgtcgccgtggtaaccgcggcggcggaaaggcgctgaatcactggcgcgcgctttccccgagcctgcagaagctgccgcgggcggtgggcggggatcccccgggggtgcaaccttgctccacctgtgctgccctcggcgggcctggctggccccgcgcagagcggcggcggcgctcgctgtcactgccggaggtgagagcgcagcagtagcttcagcctgtcttgggcttggtccagattcgctcctctggggctacgtcccggggaagaggaagcgaggattttgctggggtggggctgtacctcttaacagcaggtgcgcgcgcgagggtgtgaacgtgtgtgtgtgtgtgtgtgtgtgtgtgtgtgtgtgtgtgtgtgtgtgtaagacctgcgatgacgacgaggaggaacaagtgggacggcgagtgatgctcagggccagcagcaacgcatggggcgagcttcagtgtcgccagcagtgaccmcaggtacggtatctacttcccagagcgcctggccgagaaataggaaagagggcagccagtaggcaggccaatacccaacaaaagtagaatcgagacgccctgagttcagaaggtgagtttcttaagattcttctgggcattcaggaaagggcattttttgattgctgcactgattgttgactagtagggtggagtcggggaaatttgagtgtcttttcccaacctcacgaattgcatttttttagaagtaaggaatcgttttctttaaacttcattcagaactatttatgtgatctttcctattatttgctaaatgcattttgtctctgttccttaccataacctgaagcttaaaatctttctcttcttccctttgaattccctccaaggaatgtcacaaattaatcgggaggataaacctgaaattttgagagttatcatcttaaggtcatttgttaattaaatacaaggaggaaaaatatgatatacatactcatgtgcacttttattgctggtttgttcatcaaaacatttttgtttgtcggtgaaatgttagtattttttccactgcttgaattgaaaagttgaatgatgtttttgatagtaacagaaaaaataaattgtagacaatgttcccccccacacacaagaattttggaagtaaatgttggtatttatttctttattcctgaaatacatgctcactttccaaa

SEQ ID NO: 676017 - DNA, 1874 bp, Homo sapiens
aggaatgccctggctaccttttctgctcatgatattatccctagatgctttcgcatctttattaaaacagtaaaaatgcaagagtcttccacccaagttttctgtggtttagattatcacgttcctcaagatgcaaatgtcaaactatactgggcatccagttaacctgcaaggcctggaggtgatgggagcccctcctagcacaggttcccagtctcagtcagaaagcacctgctcaaaatagaaagataattacagagtaggggccaaagagactcccactggaagaatggaacttgtgtagctggggtgacacaagctggggacaagctgggggacacattcgcgaagggtgtttgacccaggcagtgcacccacggctcccttgagccaccctggcccgggtgtttatttggaaggagtgttcatcccccagactgtttagggccacggtgacagggaagggcttggtgaaggaaagcaggtagggtatgaaggccgctcaggttcacgaaagacttttgcttggtcccctgcggggtgggagtgtgtcgccccggtgcgggtacttagagcgcaaccggggagctgagcaggggagctgagcaggggagctgggcaggggcggctgccgcgccccacatccctgagggcgtgtgtgcgcgtgcgcgcgcgtcgccgtggtaaccgcggcggcggaaaggcgctgaatcactggcgcgcgctttccccgagcctgcagaagctgccgcgggcggtgggcggggatcccccgggggtgcaaccttgctccacctgtgctgccctcggcgggcctggctggccccgcgcagagcggcggcggcgctcgctgtcactgccggaggtgagagcgcagcagtagcttcagcctgtcttgggcttggtccagattcgctcctctggggctacgtcccggggaagaggaagcgaggattttgctggggtggggctgtacctcttaacagcaggtgcgcgcgcgagggtgtgaacgtgtgtgtgtgtgtgtgtgtgtgtgtgtgtgtgtgtgtgtgtgtgtgtaagacctgcgatgacgacgaggaggaacaagtgggacggcgagtgatgctcagggccagcagcaacgcatggggcgagcttcagtgtcgccagcagtgaccacaggtacggtatctacttcscagagcgcctggccgagaaataggaaagagggcagccagtaggcaggccaatacccaacaaaagtagaatcgagacgccctgagttcagaaggtgagtttcttaagattcttctgggcattcaggaaagggcattttttgattgctgcactgattgttgactagtagggtggagtcggggaaatttgagtgtcttttcccaacctcacgaattgcatttttttagaagtaaggaatcgttttctttaaacttcattcagaactatttatgtgatctttcctattatttgctaaatgcattttgtctctgttccttaccataacctgaagcttaaaatctttctcttcttccctttgaattccctccaaggaatgtcacaaattaatcgggaggataaacctgaaattttgagagttatcatcttaaggtcatttgttaattaaatacaaggaggaaaaatatgatatacatactcatgtgcacttttattgctggtttgttcatcaaaacatttttgtttgtcggtgaaatgttagtattttttccactgcttgaattgaaaagttgaatgatgtttttgatagtaacagaaaaaataaattgtagacaatgttcccccccacacacaagaattttggaagtaaatgttggtatttatttctttattcctgaaatacatgctcactttccaaa

SEQ ID NO: 676018 - DNA, 1874 bp, Homo sapiens
aggaatgccctggctaccttttctgctcatgatattatccctagatgctttcgcatctttattaaaacagtaaaaatgcaagagtcttccacccaagttttctgtggtttagattatcacgttcctcaagatgcaaatgtcaaactatactgggcatccagttaacctgcaaggcctggaggtgatgggagcccctcctagcacaggttcccagtctcagtcagaaagcacctgctcaaaatagaaagataattacagagtaggggccaaagagactcccactggaagaatggaacttgtgtagctggggtgacacaagctggggacaagctgggggacacattcgcgaagggtgtttgacccaggcagtgcacccacggctcccttgagccaccctggcccgggtgtttatttggaaggagtgttcatcccccagactgtttagggccacggtgacagggaagggcttggtgaaggaaagcaggtagggtatgaaggccgctcaggttcacgaaagacttttgcttggtcccctgcggggtgggagtgtgtcgccccggtgcgggtacttagagcgcaaccggggagctgagcaggggagctgagcaggggagctgggcaggggcggctgccgcgccccacatccctgagggcgtgtgtgcgcgtgcgcgcgcgtcgccgtggtaaccgcggcggcggaaaggcgctgaatcactggcgcgcgctttccccgagcctgcagaagctgccgcgggcggtgggcggggatcccccgggggtgcaaccttgctccacctgtgctgccctcggcgggcctggctggccccgcgcagagcggcggcggcgctcgctgtcactgccggaggtgagagcgcagcagtagcttcagcctgtcttgggcttggtccagattcgctcctctggggctacgtcccggggaagaggaagcgaggattttgctggggtggggctgtacctcttaacagcaggtgcgcgcgcgagggtgtgaacgtgtgtgtgtgtgtgtgtgtgtgtgtgtgtgtgtgtgtgtgtgtgtgtaagacctgcgatgacgacgaggaggaacaagtgggacggcgagtgatgctcagggccagcagcaacgcatggggcgagcttcagtgtcgccagcagtgaccacaggtacggtatctacttcccagmgcgcctggccgagaaataggaaagagggcagccagtaggcaggccaatacccaacaaaagtagaatcgagacgccctgagttcagaaggtgagtttcttaagattcttctgggcattcaggaaagggcattttttgattgctgcactgattgttgactagtagggtggagtcggggaaatttgagtgtcttttcccaacctcacgaattgcatttttttagaagtaaggaatcgttttctttaaacttcattcagaactatttatgtgatctttcctattatttgctaaatgcattttgtctctgttccttaccataacctgaagcttaaaatctttctcttcttccctttgaattccctccaaggaatgtcacaaattaatcgggaggataaacctgaaattttgagagttatcatcttaaggtcatttgttaattaaatacaaggaggaaaaatatgatatacatactcatgtgcacttttattgctggtttgttcatcaaaacatttttgtttgtcggtgaaatgttagtattttttccactgcttgaattgaaaagttgaatgatgtttttgatagtaacagaaaaaataaattgtagacaatgttcccccccacacacaagaattttggaagtaaatgttggtatttatttctttattcctgaaatacatgctcactttccaaa

SEQ ID NO: 676019 - DNA, 1874 bp, Homo sapiens
aggaatgccctggctaccttttctgctcatgatattatccctagatgctttcgcatctttattaaaacagtaaaaatgcaagagtcttccacccaagttttctgtggtttagattatcacgttcctcaagatgcaaatgtcaaactatactgggcatccagttaacctgcaaggcctggaggtgatgggagcccctcctagcacaggttcccagtctcagtcagaaagcacctgctcaaaatagaaagataattacagagtaggggccaaagagactcccactggaagaatggaacttgtgtagctggggtgacacaagctggggacaagctgggggacacattcgcgaagggtgtttgacccaggcagtgcacccacggctcccttgagccaccctggcccgggtgtttatttggaaggagtgttcatcccccagactgtttagggccacggtgacagggaagggcttggtgaaggaaagcaggtagggtatgaaggccgctcaggttcacgaaagacttttgcttggtcccctgcggggtgggagtgtgtcgccccggtgcgggtacttagagcgcaaccggggagctgagcaggggagctgagcaggggagctgggcaggggcggctgccgcgccccacatccctgagggcgtgtgtgcgcgtgcgcgcgcgtcgccgtggtaaccgcggcggcggaaaggcgctgaatcactggcgcgcgctttccccgagcctgcagaagctgccgcgggcggtgggcggggatcccccgggggtgcaaccttgctccacctgtgctgccctcggcgggcctggctggccccgcgcagagcggcggcggcgctcgctgtcactgccggaggtgagagcgcagcagtagcttcagcctgtcttgggcttggtccagattcgctcctctggggctacgtcccggggaagaggaagcgaggattttgctggggtggggctgtacctcttaacagcaggtgcgcgcgcgagggtgtgaacgtgtgtgtgtgtgtgtgtgtgtgtgtgtgtgtgtgtgtgtgtgtgtgtaagacctgcgatgacgacgaggaggaacaagtgggacggcgagtgatgctcagggccagcagcaacgcatggggcgagcttcagtgtcgccagcagtgaccacaggtacggtatctacttcccagagcgcctggccgagaaataggaaagagggcagccagtaggcaggccaatacccaacaaaagtagaatcgagacgccctgagttcagaaggtgagtttcttaagattcttctgggcattcaggaaagggcattttttgattgctgcactgattgttgactagtagggtggagtcggggaaatttgagtgtcttttcccaacctcacgaattgcatttttttagaagtaaggaatcgttttctttaaacttcattcagaactatttatgtgatctttcctattatttgctaaatgcattttgtctctgttccttaccataacctgaagcttaaaatctttctcttcttccctttgaattccctccaaggaatgtcacaaattaatcgggaggataaacctgaaattttgagagttatcatcttaaggtcatttgttaattaaatacaaggaggaaaaatatgatatacatactcatgtrcacttttattgctggtttgttcatcaaaacatttttgtttgtcggtgaaatgttagtattttttccactgcttgaattgaaaagttgaatgatgtttttgatagtaacagaaaaaataaattgtagacaatgttcccccccacacacaagaattttggaagtaaatgttggtatttatttctttattcctgaaatacatgctcactttccaaa

SEQ ID NO: 676020 - DNA, 1874 bp, Homo sapiens
aggaatgccctggctaccttttctgctcatgatattatccctagatgctttcgcatctttattaaaacagtaaaaatgcaagagtcttccacccaagttttctgtggtttagattatcacgttcctcaagatgcaaatgtcaaactatactgggcatccagttaacctgcaaggcctggaggtgatgggagcccctcctagcacaggttcccagtctcagtcagaaagcacctgctcaaaatagaaagataattacagagtaggggccaaagagactcccactggaagaatggaacttgtgtagctggggtgacacaagctggggacaagctgggggacacattcgcgaagggtgtttgacccaggcagtgcacccacggctcccttgagccaccctggcccgggtgtttatttggaaggagtgttcatcccccagactgtttagggccacggtgacagggaagggcttggtgaaggaaagcaggtagggtatgaaggccgctcaggttcacgaaagacttttgcttggtcccctgcggggtgggagtgtgtcgccccggtgcgggtacttagagcgcaaccggggagctgagcaggggagctgagcaggggagctgggcaggggcggctgccgcgccccacatccctgagggcgtgtgtgcgcgtgcgcgcgcgtcgccgtggtaaccgcggcggcggaaaggcgctgaatcactggcgcgcgctttccccgagcctgcagaagctgccgcgggcggtgggcggggatcccccgggggtgcaaccttgctccacctgtgctgccctcggcgggcctggctggccccgcgcagagcggcggcggcgctcgctgtcactgccggaggtgagagcgcagcagtagcttcagcctgtcttgggcttggtccagattcgctcctctggggctacgtcccggggaagaggaagcgaggattttgctggggtggggctgtacctcttaacagcaggtgcgcgcgcgagggtgtgaacgtgtgtgtgtgtgtgtgtgtgtgtgtgtgtgtgtgtgtgtgtgtgtgtaagacctgcgatgacgacgaggaggaacaagtgggacggcgagtgatgctcagggccagcagcaacgcatggggcgagcttcagtgtcgccagcagtgaccacaggtacggtatctacttcccagagcgcctggccgagaaataggaaagagggcagccagtaggcaggccaatacccaacaaaagtagaatcgagacgccctgagttcagaaggtgagtttcttaagattcttctgggcattcaggaaagggcattttttgattgctgcactgattgttgactagtagggtggagtcggggaaatttgagtgtcttttcccaacctcacgaattgcatttttttagaagtaaggaatcgttttctttaaacttcattcagaactatttatgtgatctttcctattatttgctaaatgcattttgtctctgttccttaccataacctgaagcttaaaatctttctcttcttccctttgaattccctccaaggaatgtcacaaattaatcgggaggataaacctgaaattttgagagttatcatcttaaggtcatttgttaattaaatacaaggaggaaaaatatgatatacatactcatgtgcacttttattgctggtttgttcatcaaaacatttttgtttgtcggtkaaatgttagtattttttccactgcttgaattgaaaagttgaatgatgtttttgatagtaacagaaaaaataaattgtagacaatgttcccccccacacacaagaattttggaagtaaatgttggtatttatttctttattcctgaaatacatgctcactttccaaa

SEQ ID NO: 676021 - DNA, 1441 bp, Homo sapiens
ttcaaaggcagatctgccaggggccagagacatcttgcacaactgtcaagtatgggtgaaaagtgctcaaaaaagttttccctgcagtgttggccctggcatggcattgtgtggtagccatggggctgttcagcaaatcgttctgtctctcctcaatctgttttctggacacgtgtagagattgcatttccatgcctctccttgtcactttttttttttgagatggagtcttgctctgttgcccaggctggagtgcaatggcacaatctcggctcactgcaacctctgcctcccaggttcaagtgattctcctgcctcagtctcccgagtagctgggattacaggcacgcaccaccgcacccagctaatttttgtatttttagtagagacagagtttcaccttgttccccaggctggtcttgaactcctgacctcaggtgatacacctgcctcgtccttccaaagtgcctgttacttttaaagttaggcatgggatgtataaatggaaataaatgagagagaagtgacattagtcacttgaagataaaagtttgaagagccagggttgagtttaccacattctttttctagtgctatcgtgatcatagaagcataagacagagtgaagcctttgtcagacaaggtccttgagtgactatgaacagccccctcgctccctgcctgttgctgacctatgctagacacagcatgaacgagaaacacaactttgtagttatcgggccactgagatttcccttaagtcagcttccatatatttcagtcagaatagtcccttgtctatataaatcaggacacgtgtgcagaaggagaataaagagacaaataaacaatttccaccgaaataccaaagcaggaaataatggataatttacagagtaagttcaatagatccttattgatagtgggcaaragtgaatgaaaaatggagcagccgagtccactgcaataagatatatttgctgttgctgaattcatagatatttaaaagttaaatacagaatgaattactttatgtccattgttgaagaatgattatctttaacaccaagttgagaaacatatagaacttgaagggtccttgacaaatcagttaatctttcacacttggcaaatatttcagtctgaggccacaactcctttcttccgaagtgcactttattgatgtgatcttggcactctggaccactggctcaaaggggtttcagaatcctttatgtaaagggctgcatgcagtcgctgtcaatggatgggaactggaatatagtagagaaatctgtttgccccctgaacctgaggtaggagaacatttaaagcatccttgagagacaaagatgtatactctttgtaaagactttttagggaaagaattttccctcttctttagaagctttcaaaaaggtagaacaaattttatttcaca

SEQ ID NO: 676022 - DNA, 632 bp, Homo sapiens
tggccttgaaaagctgctgtccttccccagctgtatgactttgtggcagggcacaaagtctccctctccaacctctgtatctgttttgtctcctcctccctgtgtgccttgccccaagtccctgccccaccrcaacttctccttcaagtttcctccatgtcttttcatggattgatagctcatttcagtcccatgatctctgtagtcctcaaggagaaagaccacagccttgtgctgagaatggaatggaggaaacccagaattgctcccaggtgactgatgaacaggccactgaagcgggaggggtgaggtggggctcaggaaaaataaatctagatcaaataagagaggaaaaacaatgtatctctaaagaaaaatatttttaattaagatgtgtttggcatgtacggttctgagatggcgttttttttcctctctggggtattatccagtgctaggatattgagcctctccaatcctgacttagatgtccaaactactggcacaagtaatcccattttttccaaaagtgtgatattgactgcatcatattatcttttggaggtttttcatttgtgactagctgcttgcatttatatattttttccggtattctccctataaacttatcc

SEQ ID NO: 676023 - DNA, 632 bp, Homo sapiens
tggccttgaaaagctgctgtccttccccagctgtatgactttgtggcagggcacaaagtctccctctccaacctctgtatctgttttgtctcctcctccctgtgtgccttgccccaagtccctgccccaccacaacytctccttcaagtttcctccatgtcttttcatggattgatagctcatttcagtcccatgatctctgtagtcctcaaggagaaagaccacagccttgtgctgagaatggaatggaggaaacccagaattgctcccaggtgactgatgaacaggccactgaagcgggaggggtgaggtggggctcaggaaaaataaatctagatcaaataagagaggaaaaacaatgtatctctaaagaaaaatatttttaattaagatgtgtttggcatgtacggttctgagatggcgttttttttcctctctggggtattatccagtgctaggatattgagcctctccaatcctgacttagatgtccaaactactggcacaagtaatcccattttttccaaaagtgtgatattgactgcatcatattatcttttggaggtttttcatttgtgactagctgcttgcatttatatattttttccggtattctccctataaacttatcc

SEQ ID NO: 676024 - DNA, 632 bp, Homo sapiens
tggccttgaaaagctgctgtccttccccagctgtatgactttgtggcagggcacaaagtctccctctccaacctctgtatctgttttgtctcctcctccctgtgtgccttgccccaagtccctgccccaccacaacttctccttcaagtttcctccatgtcttttcatggattgatagctcatttcagycccatgatctctgtagtcctcaaggagaaagaccacagccttgtgctgagaatggaatggaggaaacccagaattgctcccaggtgactgatgaacaggccactgaagcgggaggggtgaggtggggctcaggaaaaataaatctagatcaaataagagaggaaaaacaatgtatctctaaagaaaaatatttttaattaagatgtgtttggcatgtacggttctgagatggcgttttttttcctctctggggtattatccagtgctaggatattgagcctctccaatcctgacttagatgtccaaactactggcacaagtaatcccattttttccaaaagtgtgatattgactgcatcatattatcttttggaggtttttcatttgtgactagctgcttgcatttatatattttttccggtattctccctataaacttatcc

SEQ ID NO: 676025 - DNA, 632 bp, Homo sapiens
tggccttgaaaagctgctgtccttccccagctgtatgactttgtggcagggcacaaagtctccctctccaacctctgtatctgttttgtctcctcctccctgtgtgccttgccccaagtccctgccccaccacaacttctccttcaagtttcctccatgtcttttcatggattgatagctcatttcagtcccatgatctctgtagtcctcaaggagaaagaccacagccttgtgctgagaatggaatggaggaaacccagaattgctcccaggtgactgatgaacaggccactgaagcgggaggggtgagrtggggctcaggaaaaataaatctagatcaaataagagaggaaaaacaatgtatctctaaagaaaaatatttttaattaagatgtgtttggcatgtacggttctgagatggcgttttttttcctctctggggtattatccagtgctaggatattgagcctctccaatcctgacttagatgtccaaactactggcacaagtaatcccattttttccaaaagtgtgatattgactgcatcatattatcttttggaggtttttcatttgtgactagctgcttgcatttatatattttttccggtattctccctataaacttatcc

SEQ ID NO: 676026 - DNA, 632 bp, Homo sapiens
tggccttgaaaagctgctgtccttccccagctgtatgactttgtggcagggcacaaagtctccctctccaacctctgtatctgttttgtctcctcctccctgtgtgccttgccccaagtccctgccccaccacaacttctccttcaagtttcctccatgtcttttcatggattgatagctcatttcagtcccatgatctctgtagtcctcaaggagaaagaccacagccttgtgctgagaatggaatggaggaaacccagaattgctcccaggtgactgatgaacaggccactgaagcgggaggggtgaggtggggctcaggaaaaataaatctagatcaaataagagaggaaaaacaatgtatctctaaagaaaaatatttttaattaagatgtgtttggcatgtacggttctgagatggcgttttttttcctctctggggtattatccagtgctaggatattgagcctctccaatcctgacttagatgtccaaactactggcayaagtaatcccattttttccaaaagtgtgatattgactgcatcatattatcttttggaggtttttcatttgtgactagctgcttgcatttatatattttttccggtattctccctataaacttatcc

SEQ ID NO: 676027 - DNA, 1595 bp, Homo sapiens
tcttttcccccctaagggacagggtcttattctgtcacccaggctggcgtacagtggtgctatcatatagctcaacttcttggcctcagcgatccttccacattagcctcccaagtagctgggactataggcatgtgccaccaggcccagctactttttaaattttttgtataaaggggtcttgctatgttgcccaggctggtctcgaactcctgacctcaaatgatcctcccaccacagcatcccaaagtgttgggattataggcatgagtcaccatgcttggccatgttccaatctcatagatgagaaaatgaagacagttaaaagtcacaaagctgggattcaaaaaccaggaagtgagttctcaaaaatatgatgtattctgtctcccacatttatttaagtaaaaacccaaatcatttgatgcttcaggaaaattcagttattttatgcatttctatagtgaagatgaaggaactgattttaccttatgacaagattcaatcatttatttttcaatttactatgttattgctatgtgctgggctctatgctaaacactagaaataaaaatggtaagcaagacaagagattacaggtgactgggtaaatagaaaatttaaaagacgctaacaatatccagttgatcctcaaacaacaagggagggctcggttgtcagggacacagactgcatcaaagatccttgtgtaactttcaactctcccaaaatgtgacgaatagcccactgtcgtctggaagcctgacagttgatcaacatatattttgtatgttttatatgttatataccgtattcttacaataaagtaagctacagaaaagaaaatgttattaaagcagtaaaagtcgatgttaaataactttttctgatcatgacactaattgcccagtatactttcgaaaatctccttttctatacagtttttcaataccacacaattaaggaaaatgagaaagattccatggtttaatagtacacaaatatagattttagtttatatttaacctgatcattaaaaaaaataaaatctaccaacagaatttacataaaactcttttattccaaggaattaatttcatcaagttaatgggaaatgtttatgatttgtgagtttacttgttgaataaactatcagggtaataaagaataggctatctgggaaataaaaagcagcaggaaccataactcatttatgtaaatgccaatgctttttgttggacacaatactaacagtattcctagttttttcttttcttttttgagacagggtctcactctgtcacccaggctggagtatagtggcgcaatctcagctcactgcaacctctgcctcccaggctcaggcgattctcatgcctyagcctcccaagtagctgggattacaggtgcctgccatcacgcccgacttattttttgtatttttagtagagatggggtttcaccatgttggccaggctgggctcaaactcctgacctcaggtgatccaaccgcctcagcctcccaaagtgctgggattacaggcatgagccaccgcacccagccctagtttttccaatagcaaattagggtccac

SEQ ID NO: 676028 - DNA, 748 bp, Homo sapiens
tgcatggaacggggttctccctcctccccgtaagatgattgcctttcattttagagtttcaagtagctacagttcacttagttttgattacatagcaattagatatgcaaatgcataagatccagaaaaatacttttcaaacatcagattgtgagcaatcaggcccattctcttctcttgtatrtacaagcagctcattaaacaactattgtctaaaaaaatctctgcctcaaatgctttgggttttttttttttaatgttaaaacattcaaaacacatccataaacgaaatctcttttggccacctagtgagcagtccatgccagtgttgggtggggagcactttgagtggccaaagaacacgccttaattcacattatccatctgagtatttcacagcttgccataaaacttttaaaaatttcttttaatatataatttaaaagtcattgtattaaatgacacctgttattaacaaaataaaaaatactgccaagtattactaaatattccaaccatttgactgagaaactattttcatcttattttgtgggtttctatcagaagctacatgtgggtgttactatggagaatcacgcatacattggaggggagaatttgtacttcataagtatcaaaaattgtcagttatgtgtgtgggcgtggcttgaaaacctaatatggccaccaaagtctttgcaaaatatgctcacatattgcctctagcttagcaattaattttactttt

SEQ ID NO: 676029 - DNA, 748 bp, Homo sapiens
tgcatggaacggggttctccctcctccccgtaagatgattgcctttcattttagagtttcaagtagctacagttcacttagttttgattacatagcaattagatatgcaaatgcataagatccagaaaaatacttttcaaacatcagattgtgagcaatcaggcccattctcttctcttgtatgtacaagcagctcattaaacaactattgtctaaaaaaatctctgcctcaaatgctttgggttttttttttttaatgttaaaacattcaaaacacatccataaacgaaatctcttttggccacctagtgagcagtccatgccagtgttgggtggggagcactttgagtggccaaagaacacgccttaattcacattatccatctgagtatttcacagcttgccataaaacttttaaaaatttcttttaatatataatttaaaagtcattgtattaaatgacacctgttattaacaaaataaaaaatactgccaagtattactaaatattccaaccatttgactgagaaactattttcatcttaytttgtgggtttctatcagaagctacatgtgggtgttactatggagaatcacgcatacattggaggggagaatttgtacttcataagtatcaaaaattgtcagttatgtgtgtgggcgtggcttgaaaacctaatatggccaccaaagtctttgcaaaatatgctcacatattgcctctagcttagcaattaattttactttt

SEQ ID NO: 676030 - DNA, 1102 bp, Homo sapiens
cttggacagtcccatcacattcacaactgagagcttttgctctaacttcacccagaaacattcagtctgcagacctccccatgtcaaccacccatcagagtctctgtttagatgtaacttcctcagagtccttcattggccctcctagttaaaagccttccacccagcccatacttacattgcctggcattattataattttcatggcacttatccctatctgaaattacctttgttcgtttaattgtttagcttctatcttcctaaattatgctccatgagagcaagaacctcccagttttgtgtctagtccagagtaggaaataaaaaatacttactaaactatttaacaaactttgaaaagtagaagaaagaatagtctagggggtggcgggtgggtagaacatgtgaaaggaataaagatagcttgattttttagaaggtgaggacaggattgacaacacagaagatactggaaacattgtatgagggagacaaaggacttggttgaattatttccattaaatgttaaactaaacgtacactgtcagtgatgctaacraaacaaattcacgttttagcatatatttaatcaagcctagcacttaatgtcacaaagtgtcctagtcttccttgccaacttgataaaatgttcttcttttacatttaatcatatcatcaaaggagaattcctcaaaagtgatgagtcaatgactatcttcatctctttatcgtcaaaaaaactcacttgctgtgtctagattagctttggtttatcagtggcctatctaaatattacaaattggtccaagatatgtcatacatgtaggtaaacacgaatagaagtcaaataagttcaatcatcactattcctgaattatttttaatactgcaagagtttttcagcaaaacacgttgaaaccagtgtaattgagcccagattgagcatccttaatccaaaaaaacaaaacgcttcaaaatgacacattttgagcactgacatgatgccgcagtgtagaactgcatacctgtgtcgacacccttgccctttgatagttcaatatacacaaactttgtttcgtgcacaaaatttaaaatactg

SEQ ID NO: 676031 - DNA, 632 bp, Homo sapiens
atagctctaagttcggcatcttctgtttctgaaccaacaccaatagcaaataatgttatcttactatctcttgctgcttgagctgcatccttgacgtcatcttgggayttgccatccgtaagtaccactgctatcttagtcagaaatcgtgaggacttggcaaaaaggtaatcgagcgcaaactggatggccttccctgtctttgtgtttcctcctaagtagagtatggattccactgctgccgtcaaatgttctcctgaatcatagcttccgagaggaatctccagcacagggtagtcactatattgaaccactccaacttgaataaacttcggccctatgtcaaagttttttgtgatattgacaagccactttttcactatttcaaagttttctgggccaacactataagagccatctaagatgaaaactaaatctgtcggagcagtacgacaacctaagtgcaaaagaaaaccatcatagcacatcttttatataaaaagcaaaaagggagagattttaaatatatgagtttcagctatacactaatatcattgcttattttaaattgtctgtgaaatatgtttagcttaatgctaacgtgaaatattacaaaaatataagccagtgaa

SEQ ID NO: 676032 - DNA, 632 bp, Homo sapiens
atagctctaagttcggcatcttctgtttctgaaccaacaccaatagcaaataatgttatcttactatctcttgctgcttgagctgcatccttgacgtcatcttgggatttgccatccgtaagtaccactgctatcttagtcagaaatcgtgaggacttggcaaaaaggtaatcgagcgcaaactggatggccttccctgtctttgtgtttcctcctaagtagagtatggattccactgctgccgtcaaatgttctcctgaatcatagcttccgagaggaatctccagcacagggtagtcactatattgaaccactccaacttgaataaacttcggccctatgtcaaagttttttgtgatattgacaagccactttttcactatttcaaagttttctgggccaacactataagagccatctaagatgaaaactaaatctgtcggagcagtacgacaacctaagtgcaaaagaaaaccatcatagcacatcttttatataaaaagcaaaaagggagagattttaaatatatgagtttcagctatacactaatatcattgcttattttaaattgtmtgtgaaatatgtttagcttaatgctaacgtgaaatattacaaaaatataagccagtgaa

SEQ ID NO: 676033 - DNA, 606 bp, Homo sapiens
ttttgcatttttctgttttctttttatctttcttagcttagacctagaaagcagaggatgcttcaaataaaaccagttgcttgtgctgttacaatgaacgtacatgattagatatttatttatgtcttttctttgttttccctcatcatgacccaatttgcttagtatacagtaaggaccaataaatgttttttatctgtatgaatgctcagaggggtgtaakataagcattgctacagctcatttccagaaaagaggccacagttgtatagatttttttaaaaattaccaacgactggcccaactctactctgactttggccacacaactctcaatactgaataatatcaagctgtagttcagacatatcacctagtaggatgtttattgttattttatgtctgtgttacactgataaaattaaacaatactatgctgcatcactttatttatgcataggaatacaaacaattctaccaggagttttaatgttagttgtgtgtatcagggcataaacccatgaaaaacacttcctttacctgtgggaagctgatacctcataaatatgtggccttctcctgctgagtgtaaagactggtaaataa

SEQ ID NO: 676034 - DNA, 606 bp, Homo sapiens
ttttgcatttttctgttttctttttatctttcttagcttagacctagaaagcagaggatgcttcaaataaaaccagttgcttgtgctgttacaatgaacgtacatgattagatatttatttatgtcttttctttgttttccctcatcatgacccaatttgcttagtatacagtaaggaccaataaatgttttttatctgtatgaatgctcagaggggtgtaatataagcattgctacagctcatttccagaaaagrggccacagttgtatagatttttttaaaaattaccaacgactggcccaactctactctgactttggccacacaactctcaatactgaataatatcaagctgtagttcagacatatcacctagtaggatgtttattgttattttatgtctgtgttacactgataaaattaaacaatactatgctgcatcactttatttatgcataggaatacaaacaattctaccaggagttttaatgttagttgtgtgtatcagggcataaacccatgaaaaacacttcctttacctgtgggaagctgatacctcataaatatgtggccttctcctgctgagtgtaaagactggtaaataa

SEQ ID NO: 676035 - DNA, 650 bp, Homo sapiens
tattttctattaaagtggctaacacctggctactcttactgtacgaggctttgttttttttaaggactggcatgtgaagaaaagctttgtcctcacgaattagttgctgtaccaacagttacgttggtctttattaggcttagaagaaaagatgtcctttatttccacttttcttcccttagttgtgctgttttgccgcagtgagattcaggggttggctgtcactgaactctgtgtagaatttctccagatccagagtctggggatcaactttgccagcaaatgccgttttctgatggggaataggtagtgtsaacttgaattccatcacaaccatgacaccagctgcgcccaaagcacactgtagaccagtttcctttgttttgactcacacctcacttgcctgatcgaaaatagttgaggcacaggggctgactggggtcgtggagagtttcaagccgtgatttaagttcataagagtccggaaacaggaggttggtctcgtctcagccaatgccagttacacaacaccttcacgcccttccctcgagtgtgctggtacagctgaggaaatgaggtttgttgatgtcactaagtgctacgaactagtcacttctaaaggcttcatgttttccctccaaaaagcctct

SEQ ID NO: 676036 - DNA, 620 bp, Homo sapiens
attgctcggaaaagaactccactctgtcaaggcagagttcgtcacttctttctcttcttccttctttgttgtttcccttgctcattttaaaatattttaatttaaaaagtttttctatttttttttacttttaaagacaggatcttgctctgtcatccaagctggagtgcagtggcatgatcatagctcactgcaaccttgaactcccaggctcaagcaatcctcccaccttagctaggwctacagcagcaagccaccattctctgctaattttttaaaaagtttgtagagacaatgcctcgctatgttgcccaggctggtctcaaactcctggcctcaagcgatcctccctccttggcctcctaaagctctaagattacaggtgtgagccaccacacgcggcgcctcctcctcatttttgatgggaaaggattattttagcatgatgtgtaatgatctcgaccacaattgatagatattaacaacaatgaaatttttatgtctgggtactcccatctgaagaatctgaaagttctaagactacgtttgcagatggagtcaggcatgacgttttccatggtcctgaccaccatggactctatggcagacattgtccgggg

SEQ ID NO: 676037 - DNA, 1919 bp, Homo sapiens
tcaaaactctgccttcctattttttaatctctgttttcttccccttttcaatctatattattagaaacaaatgctccatcaccctcaaccccaattctcctcagctttgatctggaagtgtctttgggaatgagattttcctcaaggctcaggcaaatctgggctgagcactcctaaaatcattattcacccaaacaggcttcctctggcctctctggggttggattatacacattctcagctccaggaatggaaaggtggacaagcacaaagcaaccttatccaaaaataagaaattatgtagcatccttttccttatattatagtatattccctcaggacagctatatactggacgctcaggtcaaataagcctaggctcaaattctgaccccagagtcaaactgctggggttggaaccctgactgtactatttctgggtgaccttgagccaggtttgaagttccctgaacctgtgttttctcatcagagaaagggaactagttaataataacagcacttcctagagctatttgattaaaaaattagataatgaatgtaaagcctttaacaccgtcccttgcagacagcaagaggacagtacatgttacctccatgtgccacacagccagtggggctggggaagccctgcatggcctgttggaaaagctgcaattatcaggttggtgcaaaagtagttgcaggttttgccattaaagactactttttcaccagcctatagaaagaaggggtcctcttggactctattttctgccttgctctaaggctcacctcagtggctcctactgcccagaaagttccaggcattgcctagaatatttcataggccaggagcatccatccattggcaaaaggccacctccacaatgataggaaacgtgagctcgtggggagtggacagtggtttggtgctcaatgcctgaagtccattgagattgacagagggatcgcttgctaacttgctcccaatgcacagaacacaaagaggatgcaatgcccggtggaaattactacaccccatgtctaggaccctgtgactacagctaatgccaacttgaaagcaaagtcacttcaaggcaatcaggagtcgctgagccttcattgctcagcccacttactgtgttttggtgactcggtgtctctctccccgtgctggcttctcagctcagaatatctgggactccagcgttcctctcaaggcaactaatttgtacataactttggaatgtttgtgagtgttcacaaaataaaactgaatagtactcgagtgcctggctcaaaccttgctccacagtccctccctcaagtccccattacctacgcaaaagctgctctagttgattaatcaagttgaaaatccaagtgtggaaaactctggtagctgtgttccagagtaaaatccagctctagctggaaaactgtgagtgtatttgaccaagagagttcaagttcaggcacttctctttgatagactggctataactgagtctaaccaagaggcaatactaattcacacgattccaggggaatttcaaaggtgatcttgtccatttaattgcartgaaatacctggcacattacgtggaaaatattaggtactcaataagtatttggtgaaggttgaatattcgtaagtgggtccttatcatattatatggtcagcattcacaaccactagtaagaacaactgcttgactattttttgtcaggatggaaaaagaggttgggatttgtgccttaacaaggaaccagaaaataaggtctttaatatcatttgcttcaggcttttaatcggtggaaagaacaaagttgttacaaatgacttgcactcccagcgaataaacagcaacgttcctgcaacaaccatttaatctattagaatagtagaatcttcaaac

SEQ ID NO: 676038 - DNA, 640 bp, Homo sapiens
cagtcacagatttctactgcatagttagaaaaagattatataaaattaacaagtctaaagaaaattaaatatggatcaattaagaggaggagaaaaaagatatttttagttttacatagattaaatgtattagcttcctataatgatatttacctgttaaaagaatgttgttctgctggggataatcatgtaataggaattagggtaattcaaattctgctgaaaaggggatttaagagattcttatgtcacagggaaactcaagaatatgcttgaaatcctggctatttatgctgtcattaaagtacttatgcaggtaccagcctaaatttatggatcaaagtgatcaacgattacagatgaaccactaaaatgatctaacatccatttattgagaagtttccacttgctgtacacttarattgcagccttagattttatatttggatcaaagttccatcacattgcatcattttcagaatatttgaacttttatttcaatacaaactgaggtaaataaatatcccccccaaatagacgctgatgttccatatctaacaagtaaccaaattgtcatgataatctgggatcactatctagactccatttatgaaagaaaatcttttatagatttcacaat

SEQ ID NO: 676039 - DNA, 660 bp, Homo sapiens
tgtcactcaggctgaagtacagtggtgcaatctcggctcactgcaacctctgcctcctgggtcaagcaatcctcccacgtcaccctcccaagtagctgggattacaagcatgtgccaccaccacaaccggctaattttcatgcttttttttgtttgttttcatttttgttttttggtagagatgaggttaagccatgttgtgcaggctatctactattttcttcttatgccccaaatttggagacataaagtgaacagtcaaaggggaaacagttaaagtttcaaatttacatttttaaaaagtattgaataaaactctgggccgggcgcggtggctcacgcctgtaatcccagcattttgggaggctgaggctggtggatcacgaggtcaggagatcgagaccatcctggctaatacagtgaaaccccgtctctactacaaatacaaaaaattagctgggcgcggtggcgggcgcctgtagtcccagctactcgggaggctgaggcaggagaatggcatgaacctgggaggcggagcttgcagtgagtygagatcgcgccactgcactccagcctgggcaacagaccgagactccgtctcaaacaaacaaaaaaaaagggacatggatgaagctggaaaccatcattctcagcaaacta

SEQ ID NO: 676040 - DNA, 660 bp, Homo sapiens
tgtcactcaggctgaagtacagtggtgcaatctcggctcactgcaacctctgcctcctgggtcaagcaatcctcccacgtcaccctcccaagtagctgggattacaagcatgtgccaccaccacaaccggctaattttcatgcttttttttgtttgttttcatttttgttttttggtagagatgaggttaagccatgttgtgcaggctatctactattttcttcttatgccccaaatttggagacataaagtgaacagtcaaaggggaaacagttaaagtttcaaatttacatttttaaaaagtattgaataaaactctgggccgggcgcggtggctcacgcctgtaatcccagcattttgggaggctgaggctggtggatcacgaggtcaggagatcgagaccatcctggctaatacagtgaaaccccgtctctactacaaatacaaaaaattagctgggcgcggtggcgggcgcctgtagtcccagctactcgggaggctgaggcaggagaatggcatgaacctgggaggcggagcttgcagtgagtcgagatcgcgccactgcactccagcctgggcracagaccgagactccgtctcaaacaaacaaaaaaaaagggacatggatgaagctggaaaccatcattctcagcaaacta

SEQ ID NO: 676041 - DNA, 1771 bp, Homo sapiens
cagcatgttccttgttgactagatttacgtttgataggaaggttgtcaagctgtctcatgtagaaaactcaactactcacagataaaaaggattcattctccttacattggactcgttgctaagcccaaaaaggagctgacttagaagccaaataaagggctgtaactcaacaggtaatctgataaacacccttaaaaacaccctactggagcaaatcttcattttaagacttctgctgaaaatccatgtgcttgtacaatcaaacacaatcagatacaaattgaaatcaaaagtcaaaataagcatttccaattaattcattcctacatatgatcaaaaagcaaaagagtcaagcaaacacatcactaatatttattttattatttaaaaggtagttgtgccaatgaggatacaaacttagaaatccaaatatgaatttttaaagttctaaaatgtgtggaaataaataattgatttagaaaggctcacatagagaaggaaggtatacgcatccaatcagtagctctagtctggctgtgtcacttgtaaaaatgcagaacatggatcatctcaatacagcatgtgctttaaagtttttaaagatttattttgcattcattcactttttaaacaaatatttattgagtgtctactatatgccagattctgctctaagctgtgtttggacagatgttctgaaaaaaagtaaaagttcacaatcaagtaagtttgtgaaatattaggggttaaacacactgcaatatttcctagtaaatacacatgtacacattgtgactccttgggtatgggctatgtatgcagtatttctcaaacctattgatcaggtttgstcagtcagtttattggtcggttggttgttcattggttggtttttaccctcagagagagacagaagacaaacagaaagcaagagagagagctagaaagactccatatgaagaagcactttgttctaaagtcagaactgtctgtagatgaaatgactttcatggaagatagacaatccctttcctatcattaatagcattcaaacaaaggccaagctgctctgtggtaaagaaaagagaggaaaatcaagcatatagttgactggaatagattatcttttagaataagatttaatggtatattctcagcaacagtaagtgattctaggaaaagaaagcaaaaaaaatctatatactcatgaatttgggaggggtcagtaagggaggcaggaggaacttagtttttatgttccaaatttgaaattaatagaattctgagtcatattcatttgttttgggatttgtttatattttttaccttaagaatatgtaaaagttcatcttcaatgtccaagagtcctctataagaaggaagagattggggacttaagtgaatattgttccttcagtaaattaaattggattaagcaatgtgggttttttttttccccataatgaatgatttccttgtgaaattattttcagcatggaaatcagtgtatggagatacgttgttaaatgctccagaaagattatagaaaatctatgtaacatcctattgtctcattatgtgacaacacagaaattaagttcacaaatataaaataaaaatttcctgacaagcagttattaacaaggaaactttctttggtaacagttcaagaaacttgaaatttaagatacattatgagtagttacaaatagagggtcaaaattctttaagcctaccctgtcagagtgaagcctctgctaaaaaaagatg

SEQ ID NO: 676042 - DNA, 1383 bp, Homo sapiens
cctgtatttatagaaaattggaagttatatatatatatgttatatatatatataacagttatatatataaaaaacagttatatatataacagttatatatatatataagcatatatatgtatgcttacttagatccagattaaacttgtatttcaagactaccttaggtgatgctgtaccctttgtactgcattacaaagaactaagaattaaccactagattttgcaccatggatgtagctattggtcttatgtggggccaaaaacctgatttgagggggtagttcaagaaagagggggaagagtggaattggagacaccaagtatagaccagttgggagctttgtactgaaaggagaacagagaaatggagtgttaactggatggggatatagtactgagttggacagctatagcgtatttatgtgctgataggaatgattcatctgagagggaaagcctgacaatgcaggagagagagaggagaattattaaagcactgttctgcaataggcaagggtgagtgagtgggtctgggctagtggacatgttggccatggagaggggcccagaggctctgcctacaataatagatgggatggcagagcataagctggtaagaagggacatgggacttctctatttatttcatgtcatactgtccaagactgtacagtactgtagtggccttcattataaggccccagaccttcatgttttgtgtgcccttttatgacctatgtatagctcttcttcctttgctgtcatttctgtctcagtttgcctgactctacagccttcctcccyaccccatttctaacttgcttctatttatgccatagattcaaacatccacaactaaggccattaaattacaaaagaaaaaaaaaagactgccatgtaagttaccctaacttggaagtagctaatcctgaaactagcatggcctggaacttggctactttggagacttttttggtctctctcctagtgtctttgcatctgtcctgtcttcctcttcgcttctcctctctctgcttacgcatggcttttgcgcctctgtcactctgggctgcacgtggtcatgatggcccactgacctcagtttacatcaccagcctttgggtcttgcttcagctgcaaatactggatcttgtcaagatgttctggattgaattcatgagaaaaggaatctggttggccagttcacaggcgtttttctgacgtgtcccggggttggctgggccatgcagtctgtttcctgctcttgcctagtcagctgcagctgggagagtagagtcctccagtaggaaacacaactgcctgggttcacaactccctaggctgggccgaggcagttctggggaggggtggtgagtgggt

SEQ ID NO: 676043 - DNA, 1297 bp, Homo sapiens
tccatagagtagacctatccccatttattcaaccatcctcagccaatggacatttactttgcttacatcttttccacagagaccaatagaacaatgctactaaatattctttaggaagttaattcttggaaattttataacatatgcaaatacacattcattggaacaaataaagtggagatttcaccacgctaggtggacatttttcttatttcagagctgtggcatatccccccaaggattccctcaggtactgtaagagctgggccccagcatgacactccacccaaccgtccgtgtcacaccccgaagcctcacgtccttcctgtctctctcttttaaacatctcctggtttgctcagctctaagcttcctcctttactcctctgatcccaaggatttgctttatgaattctaaaaaaagtatttatttccaaaaagcatctggagcagttattttggaaagcaattgtggaactctgggaaagtgtgtgttttttacaaaccagacccttgaggaaggggtaggggctttgtcagaatccttgagggatgagggggcaaagacagcatgtactgatcgtgaaatcactcttgtttgaaactgactatccaagaacaactaaagaaagtcacaattaaagttctgctccttggttcctctgtctcctggccatcccagaaaagggaactggcttcaggagagcccttctttcccctgggggctgtacttaccttaatgcacaggccttccccgcccatctgtaatgagcttcagctggaaatcaccacgagaaaccacagatcacttcacagaggggtttttctatgtgattctattcctggaactattaacacctttcacttggctatgggcccttctcttctgaatccaccttaaacattgctgatgagacagctcctttctgattccactgaaaccagcaaatgtacccctcrtaagtcttcattggttcctatttgctgagtgaaattcctactgacaccaacatactctatctcatctccaaaattagttgttttctaagtggaaacaatcaaaatgagcatcaagatgaaaggcataactacagaagtaaatggcagctgcggaggctttataaagaggtgcaagagccttgtgtgattgctgtggggggaaagggagagagactaccgtgttatttctatgcatggctgccctaaatgtgggaagaaactttgaaatgtttgaaaaacagaaaaaagttatgtggagtgggcaagggacagaataatacaatatgagctgaagatg

SEQ ID NO: 676044 - DNA, 2576 bp, Homo sapiens
ccactgataaaggatataatttttttctatttataaccttttggatataaacaacaaaatcacatactttcactgacactatcttacaaccagaacataaatgagttctaggatgaaatggattctataaccatcaaagtagaaaattagaaagaatttgagtcctttgtgataccactgagctgctaacacaacccactccaaaacttgcccaactccaagacttcctgctacgtgagatgatgacttagcgttcctgcctccataagcaaggatttctgttgcttgcagcctaaagcatcctacctgatactcttcattctctttcactgtgggttaaaaattcaacaagccactttggatttgggaggtatgaatctttcaccaactcagacaacaactaaaatccctcttcagccttctcaaaacctaatgcttctcaaccctgtaagctttcatcataagtgccctcctttgtccctttaatcagtcacagttctcttctgtatcacgcaaggttccaggtccttccccaggatgctgaattccagacatggatgcattatctagcacggtttggatactgccaaactttataagaatttcctccaatctgtcgcatatgtatactaatgctatggccagatttcaggggctacagagtttagcaataatgtgactgtgtctgaaacggaaaaagtcaacatatctacaaatgggtgccacttaaatttgagtggctcatgtcgaaatggagacagtcaggtgctgtggaaagcatagcaagcgactgtggctgtaacagaatggtgggtatttcaggggtgactgcctaggaaaagaagagcccaagagtcagacatggtcactgtgtatcaacactctctctttctgaacaaccagcatctagagtggagaagggcaatgggggaggctctctggtcctctgatgtcctttgaatgtcccaatggcatttcttagggcctttgcatgtcctgctccctctgcctctgaccttcccatagctagctcctctccattctcaagtctcagaccaatgtcttcccagagaaggctttcctgatcacccccaatgtccatttgtctatcacatcaccctcatttaccatgatcatggactgactttcttgcttaggtactgccgtccccataccacttctctctatctgaaagcttttgcatatttgcttgttgtctatccaatcccccaaatttaagctttgaaagtggagaccttgactgttttctctgaatgtttccccagcacttagaccagtgcctggccaagtaggcgcttaaaaaatatttgtgggactaaggaattggatgataaaatgagaactcctgggcctaggtcagccccagcctccaaaaatgttgtcagtaccccgtgtctgtgtcctctgctccctcctgtacactggccccagtgtcttccattgtacatgagcttcacctagaaaccagaggagtgatgatgtggccatgcacagttccaagtgtgtatccttaatgctcataatcccagagggaaaagagtgagcctctctctcattgcctttactaacaatcccagggaaacactctatgtgacagagggtgaccctgtgcctagacttggccaagtactgtggccagaggacaggtagaatagacatgcataggtcacatgactctctacgtctagggtgtcatagcagtgtggctacactaggacaacactgaatgggagaaacagagttctctctaaggatacgaagatgctctcaccagtagaaagaagaaatgtcaggcaaaccaaagaaccaaacatctgcaaaattctccagatgtagcaagatatttacattcatatcctatcttccagcatactgccctctttccaaattccccatgattaatgacaatgtcaaactgcattggccttagggttgactttcaatcttccatgactccacttttctcagttccaaagagcaagggtgacttctacctcttcctctttaaaagattaataggagatttgccaagttgtttatgttttctagaaaaaacagtgaatagcaagtaaacgctgtgcaggttatcacataaaaagaaaaataaatttagaatctttaaaaataaattaaattctcaaagtaatatttaaaactttaaaaactagttaatatttatgatattttgttacataagaaaaataggctaaggaaagatggggaaagaatcctacttttgtaatgtgattatatttatataaagaaaaacaaaaaataaatcatggcttcatgatgactctcatggaccaaggcacttatgccttcatgggtcacttcatccccaaaatattaaaaatcgcatatttttgaaggtgttactataaagacaaawatattaatcttacttaaaaaaaaaaagaagtcatttaaatggcagtcttgaaggtaacttgaatgatgcatatgaactccttggcattatttgagtaaccttatttcctctattttcatcaattgaaattccacttttaactcaaggtataaaagtgaattgc

SEQ ID NO: 676045 - DNA, 1521 bp, Homo sapiens
gagaggcccacactcaaaacatcctaaacttttctcaccacccaccttctcaattacctctgatctaattgtctcttgtttgatcgtcatgacagagccccaggtgacacatatgtactttaaggtttgggaaacactgatttagttgtccttacccaattgtcttggcgaggctgtagacccacatgacacagggcacgccgatatctgcataataaattatctgaagctacctttttcaggtgacagtataacctgcaggcattggatgctttgtagtcattcagttgagacagttgaaaactgagccccagactaatagtgtaaagcaagaataccatggacagcgctccagcactcactgttcttggtgtgagacccttgtaggtcaaaaccttgtccaacctggcggcccaggacgactttgaatgtggcccaacacaaatttgtaaaccttcttaaaacattatgaattttttgcgattttttttaaagctcatcagccgtccttagcgtagtttaggtgtggcccaagacagttcttctaatgtggcccagggaagccaaaagattggacaccsctgatggaggtggtggagcgcccacagggccactggtgtaagacatgcttggatccatcatcacctcactctgggaattgaacttgttaattgtcccctctgggccttagtttctttcagttgtaaaattgaaatgacaatacttatctaacatagcttgttactggaaaaaaaatcactatacaacacaaacaggtgttcaatcaatattagttccttcttttttcttgtcttataacaactcaattaaagttagttaacaaaaagtccttgaaaaagaaaaagaaattgcctctagtttggagctaatgtccatgcgtacggcaccaaagctgtcaaaattagtggtggtggtggtagaaggggtgaagtagagatgcctagcctagtgcccagagtcttcaaattttctcactaactataggagcctcaggaggagagctggggtgcagacatgctcagctcctgcaccttcagcctcagtagggaggccctgcatagctgctgtggcttcagcctgtgacttggctctacactagggattctgaggagccattctttgcagaatcagcctccttagcaactcttgttaaccaagctgtgtttggttcctttctactgagtttatcccaccaccaccactcctctggggctgagtcccttgcccctgagcctgagtctcccatctttctacagctggcttgcacccctttgtggagcagcttttccctctgaaactcagtctgtctttggatgaagatttggctgaggattgcatcagtcggtgcctttacagctagagctgctttccttgctccccaaaggtttgttctgaggttcttcttttttatttcagatggagtctcactctgtcacccaggctagagtgcagtggcgcgatctcagctcactgcgacctctgcttcccaggttcaagtga

SEQ ID NO: 676046 - DNA, 1521 bp, Homo sapiens
gagaggcccacactcaaaacatcctaaacttttctcaccacccaccttctcaattacctctgatctaattgtctcttgtttgatcgtcatgacagagccccaggtgacacatatgtactttaaggtttgggaaacactgatttagttgtccttacccaattgtcttggcgaggctgtagacccacatgacacagggcacgccgatatctgcataataaattatctgaagctacctttttcaggtgacagtataacctgcaggcattggatgctttgtagtcattcagttgagacagttgaaaactgagccccagactaatagtgtaaagcaagaataccatggacagcgctccagcactcactgttcttggtgtgagacccttgtaggtcaaaaccttgtccaacctggcggcccaggacgactttgaatgtggcccaacacaaatttgtaaaccttcttaaaacattatgaattttttgcgattttttttaaagctcatcagccgtccttagcgtagtttaggtgtggcccaagacagttcttctaatgtggcccagggaagccaaaagattggacaccgctgatggaggtggtggagcgcccacagggccactggtgtaagacatgcttggatccatcatcacctcactctgggaattgaacttgttaattgtcccctctgggccttagtttctttcagttgtaaaattgaaatgacaatacttatctaacatagcttgttactggaaaaaaaatcactatacaacacaaacaggtgttcaatcaatattagttccttcttttttcttgtcttataacaactcaattaaagttagttaacaaaaagtccttgaaaaagaaaaagaaattgcctctagtttggagctaatgtccatgcgtacggcaccaaagctgtcaaaattagtggtggtggtggtagaaggggtgaagtagagatgcctagcctagtgcccagagtcttcaaattttctcactaactataggagcctcaggaggagagctggggtgcagacatgctcagctcctgcaccttcagcctcagtagggaggccctgcatagctgctgtggcttcagcctgtgacttggctctacactagggattctgaggagccattctttgcagaatcagcctccttagcaactcttgttaaccaagctgtgtttggttcctttctactgagtttatcccaccaccaccactcctctggggctgagtcccttgcycctgagcctgagtctcccatctttctacagctggcttgcacccctttgtggagcagcttttccctctgaaactcagtctgtctttggatgaagatttggctgaggattgcatcagtcggtgcctttacagctagagctgctttccttgctccccaaaggtttgttctgaggttcttcttttttatttcagatggagtctcactctgtcacccaggctagagtgcagtggcgcgatctcagctcactgcgacctctgcttcccaggttcaagtga

SEQ ID NO: 676047 - DNA, 589 bp, Homo sapiens
gaaaatcatgagaaaaagaatcccaagtgagtggcatttgggaatcatggttgaaatgaagattaaaagatagtttggggccatcttataaaggacagtaattatcatgctaaaagatgtatactttataatacagaaacatggtgatgttgcagattgctgagaataagagagaaggagccgcatgtgtgatctagaaaagcggctctgttgatgttgtgggggatgaattaggcctggtgggaggtggtaaagagagacaggagacaggcatagtgaatagctatggatatagttttaaaaattgtaacttaattcaaactaaaataaatgaaattcaaactacataaaacagttaaacaaaatkagctaatttttattttcatatctgaaaaatactctgcagtcaaatcaggtagagttagaatagaaaatatgattttatgatataaaatacattaataatatttatcatgaattgctaggaggacagtcataattatctcagtactgggaagacatttgatgatgaagtttagtattcattcctgataaacactcttagtaaaataggactcaaagactagtt

SEQ ID NO: 676048 - DNA, 653 bp, Homo sapiens
caacatcctccccttccctattccttagcactcctacactcttcctccttcacasaagcactttgtactccaccaatacagattgtagttcaccagcacacagcaatgtacatgagacagcccatactagcttgggagagtcaactgttagatattcaaaaagtttgcaatctagtttaaatagggctattattaaaactgaattatgactgggcatcatggctcatgctcgtaatcccaactctttgggaggccatggcaagagaattgcttgagcccagaaatttgagactagcctgggcaacatagtgagacttctgtctccaaaaaaattaaaaaataaaacattagccaggcatggtggcgtgtgcctgtagtcccagctactcgggaggctgcggtgggagggccacttgagcccaggagttcaaggttatagtgggctgtgatacaccactgcactgcagcctgggtaacagagtgacaccctgtctaaaataaaataaaataaaatagataaattatattaaaataaaggtaaatgctcaactcaccaacttcctaattattttgatacatgtcacggtccatgctcttgagttatgtacgtccattatatattatatcttcatgatggaaatactgcactaaac

SEQ ID NO: 676049 - DNA, 659 bp, Homo sapiens
taaaaaaaggtcaagcagtatctatccaagagacaggaacaaaaaagaaatcagctattttaaaactattccaaaaggttgctagtctggaagcctaaatactgtaatgtatagatagcaaagagaaagggatgaattaaaaaaaataaaatgaacatctaaaaagctattaatgctacactgagaccttaatctcttcgtttactccktgttgttttgggtttttactttaaaaactgaccactacagccttaccacagagcactaaagcaagcaaccagtgttgttaagtggacataagcttgcttttaaatactgtcctgtctacaaaaagtaccttacagatatgttcatttgataaaaagaccaaaaccagcccacctggtgaagttcacatgtgaaggtgacacacatagagcctgtggcataaaacacagaatttatttaggcagaaggaaacaggaggcaatggctgctgaagcaagaaggaaaaatgtttttataactaagtagtatataaagtacttttagtactatatatataaagtataactaactactactactactactgctactgctactgctactgctactacgagattactttttcactgtcaccaaaagttttgaaaaatacgtttttatattttgaaata

SEQ ID NO: 676050 - DNA, 589 bp, Homo sapiens
gtccatggggcctcaagagaccatccatgagaaaataaagatggctcaaccaggcagaaagggctacagaccgctcagatggaattatcagagagtaggtctgtcctcatagcctttattcactgcctctgacctctagcaagtaacatcaccctttcctgttggcccaagaattgctcagcttctccagcctcagttctcctatctacaaatggggagaagagcaccatctccctcacagaatttttgtgacatttcaatgagatctagtaagtaaaaggcctaatacagggctcggcacagagtcaaagctcaacgaacacttacttccttctttcctctggcctcttaatcagtgacgttattctgcgacttcagatgtctccggtgaaagtacagtgctgtggaggatgcggctgtcacagcctgctggtgaacgggcccattagatagaggtgcagagtgggcattgctttccagatggataaaaaagcaaaggctaaaatgtaacataaaygaggaggatcttatttgcacagccactttctgttcgtcattggccacgatttcagcagcaatcacagccgcc

SEQ ID NO: 676051 - DNA, 1506 bp, Homo sapiens
ggttaagagttgcattgaaaacataaaatttgccaataccaggccccgattcccacacggtaacaattatgtagatgacagaaggcacttcagtctccagagtgggcccaggctctctacctgactgcagcctgttctatcatttacttaccagcccagagtctgcaaccctctgtcctaaagtaacccctgatcttcccctgatgttaagatgatccaggaaactccactactggtccttctgtaacaattgactggtccttctgtaactcagcctcctaaaacacctttggaataggcaaagctctttagaaataaagatatgaactactccacaatctttatcctgggctagaaagtgtgtgaagcagaaaatttagcaagacagcaaaggtggtctagcrtgatggaaggcgtgtgggttttgatttcttttcattacttttacataattctgcaattggctgcgggctgttttgaccattatattttcatgcaacggaaaaactgcgccccggggtatgattattaaaatatgttactcttccatatttaaatagtggaatggcttttctgagctctaaaatgagccaagggaaatacccagggtttaagatgtaagtaaaatgtcggcctattgttggaaccaataactgcctggactcggtcttcctctgccaagtcatgagtatggggtaacatgggtgtggagagaggatatggagaaggtaagggcttcccccatccacgtgctggagcagaagctcctttgcacaggctcacatgccctggggaaccctgtcctcaggcatctcagcttacaccgtgctaattctttggcagttgtcacaaagaggcaagggagagagacagaaagcaaaggggtctctgagaaaggaaacaactaatgggaaattatttagttgtaaataattgaaacatactcagactagccagtgattctcaaccagtgacgccttgttcctatggacatggagccatgtctggagacatttttgtttctcataactgcaggctgggggacactgctgacatctggtgggtagaggccagggatgctataagccccctacaaggcataggacagccccacaatagagaatcatccagctgcaaatgtcagcagtgccagggtttgagaaaccctgccatagcccaacaaaggggataccttggtaaatgaggtacagatgattatccagttacccccagcttccctcactatcaccatgcttcttttctgccatagtaatcatttatttgttttgttctgtttttgagacagtcttgttctgttgcccaggctagagggcagtggcacaaccatggctcaactgcagctttgacctcctagactcaagtgatcctcctgcctcagcctcccaaagtattgggattacaggcatgagccacgatacccagcctaggaacagagctttttatggtaaagctgatgttttttgagatgtataaatccatgaattt

SEQ ID NO: 676052 - DNA, 1252 bp, Homo sapiens
tggcatgtttaatgccaggccatcaggtaagacattccaggtcttctttcctggagtataaggactatgcctcttgtatctctttaatccaagtgcccatgaaaggttctgtaagtcattgacttccttaaatattttaaaaaataaatggaggaacaaagagggagaagttamaccaccaactggggaatgtccaggtgttcatgtctaagaaaagagtaatcactagcttttctcactgtctctacctggatatagggacccaatccaagtagatactaagaaagataattctactggctgatattagataggattggggggaagaaaagatgaggaaagaagagaacatggggaaaaaactgaacttgtgaaatgaaataatgagtggagttggagggagggtccttggtgagtatcagtgcagcccaaaaggatcaggtagtctgaagggataatgtcatcatggctggagactggacactcataggaaccccctcctctgactgtatttttctctgtgacttctcctgcggtggtagattgggattttattcccaattcttcactccgtataaaagaataatacggccaggtgtggtgactcatgcctgtaatcgcagcactttgggagactgaggtgggagaacagtttgagcccaggaatttgaggctgcaaagagctatgatgtaacactgcactccagcttgggcaacagagtaagaccctgtctcaaagaaaagaaatcatatgtccacttttttgtggtaagtacctgcctctagatttggaagagtttacttcccccacaccactgttgttgggctcaggcatgggacttgatttggccaataggatctaagcagacatgataggagcagaggctttcattcctgcacttctgccatccaccgtaagataaacatgctccgttggcactggtcccaacatgagaaacaactggaggaaacctgaacctttcccttagcctgaagcagagccaacacagtcaacccacagatctatgagcaagaaaaaaaatggttgttatcgtgagggttgcttgtcatgcagtattatcacagcaatattgcactactacacttgctttcttttttgagaatttcattccactctcccttttctgcttaactttcatgtatctcaaatgatgttataatttctttttatatttctgatgaggctcagggatctccttttcccctcatccacatacctaaaaaccacctt

SEQ ID NO: 676053 - DNA, 1462 bp, Homo sapiens
taaaaagtacctaattataattgtgaaatatgccgtgaaggaggagtagagaatacaatgaaaatgcaggacagaaagacttaatgttgatgggtggtggaggtgggctggtcaggaaaggattccttgaggaagttgacatttgagttgagacttgaagaaacacatacgttaggcccctaagaggtgggcgggtcaatgagccaggtagacagaagggcatgtgcaaagactctgagactgaggaagagctttgtgccttcgaggagctgcaaagccaagtcagagtgtccactctctacagatgagttaattccctggggagctgatgtgtgtgtgtctttatctcagtctacagcagagaactgggcgcacggtaagggggataaattcccttaagcttctactaggcaccagggcttttatcccttacaaacctcaaaactgtgaggtagtgaggtagtgtttaccggtccctacttcacaggtggggaaactgaggttcagaaaggtgtcttgctcaaggaaacaaaataggagttaacatttacaaagcacttagtatatgccaagggctttacagaaattaacttaaccccccaataactctacagggtagatgttattcctatcatccctctctacagaggagacatccaaggcaaaggagtattctaaagaacccaagccagcatggtggctcgtgcttgtaatcccagcactttgggaggctgaggcaggaagatcacttgagctcaggagttcaagaccagcctaagcaacataccaagaccttgtctctactaacaattaaaaaaaaaaaattagccaggtgtggtggcgcacacctgtagtcccagctactcaggaggctgaggtcagcggggggattgcttgagcccaggagatcgaggctgcagtgagctattatcacaccattgcactccagcctgggcaactgagcaagactgcatctcagaaagaaaaaaagaattcacccaagcttacatagctagtaagtaccagagtaaggattcaaaccaaagcattctgggatctagagtctgtatcctaaccacaggctcaatttccattcaataacaagcagcagagtaagattctaaacctggagctgtctgatgtccaagcccctgcctctccactatgccatattgccatagtaatgcttactgaatgaatacatggctgaaggcaygcatgcaggcgtgcacatatgtaggggcaaggagacagcctagggaagagttaagagcacacagttttagaattaacaggcctggattccaatttgggctctgccaaggccagggacagaatgagatgaccgaggcactcgcctcaggggcaaaatttatggggttgccaaaaaactcagtgatcaagaggaatcacattttaatgcaatattttaaaagtctaaattaatgcaaaaataaatcct

SEQ ID NO: 676054 - DNA, 1462 bp, Homo sapiens
taaaaagtacctaattataattgtgaaatatgccgtgaaggaggagtagagaatacaatgaaaatgcaggacagaaagacttaatgttgatgggtggtggaggtgggctggtcaggaaaggattccttgaggaagttgacatttgagttgagacttgaagaaacacatacgttaggcccctaagaggtgggcgggtcaatgagccaggtagacagaagggcatgtgcaaagactctgagactgaggaagagctttgtgccttcgaggagctgcaaagccaagtcagagtgtccactctctacagatgagttaattccctggggagctgatgtgtgtgtgtctttatctcagtctacagcagagaactgggcgcacggtaagggggataaattcccttaagcttctactaggcaccagggcttttatcccttacaaacctcaaaactgtgaggtagtgaggtagtgtttaccggtccctacttcacaggtggggaaactgaggttcagaaaggtgtcttgctcaaggaaacaaaataggagttaacatttacaaagcacttagtatatgccaagggctttacagaaattaacttaaccccccaataactctacagggtagatgttattcctatcatccctctctacagaggagacatccaaggcaaaggagtattctaaagaacccaagccagcatggtggctcgtgcttgtaatcccagcactttgggaggctgaggcaggaagatcacttgagctcaggagttcaagaccagcctaagcaacataccaagaccttgtctctactaacaattaaaaaaaaaaaattagccaggtgtggtggcgcacacctgtagtcccagctactcaggaggctgaggtcagcggggggattgcttgagcccaggagatcgaggctgcagtgagctattatcacaccattgcactccagcctgggcaactgagcaagactgcatctcagaaagaaaaaaagaattcacccaagcttacatagctagtaagtaccagagtaaggattcaaaccaaagcattctgggatctagagtctgtatcctaaccacaggctcaatttccattcaataacaagcagcagagtaagattctaaacctggagctgtctgatgtccaagcccctgcctctccactatgccatattgccatagtaatgcttactgaatgaatacatggctgaaggcacgcatgcaggcgtgcacatatgtaggggcaaggagacagcctagggaagagttaagagcacacagttttagaattaacagscctggattccaatttgggctctgccaaggccagggacagaatgagatgaccgaggcactcgcctcaggggcaaaatttatggggttgccaaaaaactcagtgatcaagaggaatcacattttaatgcaatattttaaaagtctaaattaatgcaaaaataaatcct

SEQ ID NO: 676055 - DNA, 1462 bp, Homo sapiens
taaaaagtacctaattataattgtgaaatatgccgtgaaggaggagtagagaatacaatgaaaatgcaggacagaaagacttaatgttgatgggtggtggaggtgggctggtcaggaaaggattccttgaggaagttgacatttgagttgagacttgaagaaacacatacgttaggcccctaagaggtgggcgggtcaatgagccaggtagacagaagggcatgtgcaaagactctgagactgaggaagagctttgtgccttcgaggagctgcaaagccaagtcagagtgtccactctctacagatgagttaattccctggggagctgatgtgtgtgtgtctttatctcagtctacagcagagaactgggcgcacggtaagggggataaattcccttaagcttctactaggcaccagggcttttatcccttacaaacctcaaaactgtgaggtagtgaggtagtgtttaccggtccctacttcacaggtggggaaactgaggttcagaaaggtgtcttgctcaaggaaacaaaataggagttaacatttacaaagcacttagtatatgccaagggctttacagaaattaacttaaccccccaataactctacagggtagatgttattcctatcatccctctctacagaggagacatccaaggcaaaggagtattctaaagaacccaagccagcatggtggctcgtgcttgtaatcccagcactttgggaggctgaggcaggaagatcacttgagctcaggagttcaagaccagcctaagcaacataccaagaccttgtctctactaacaattaaaaaaaaaaaattagccaggtgtggtggcgcacacctgtagtcccagctactcaggaggctgaggtcagcggggggattgcttgagcccaggagatcgaggctgcagtgagctattatcacaccattgcactccagcctgggcaactgagcaagactgcatctcagaaagaaaaaaagaattcacccaagcttacatagctagtaagtaccagagtaaggattcaaaccaaagcattctgggatctagagtctgtatcctaaccacaggctcaatttccattcaataacaagcagcagagtaagattctaaacctggagctgtctgatgtccaagcccctgcctctccactatgccatattgccatagtaatgcttactgaatgaatacatggctgaaggcacgcatgcaggcgtgcacatatgtaggggcaaggagacagcctagggaagagttaagagcacacagttttagaattaacaggcctggattccaatttgggctctgccaaggccagggacagaatgagatgaccgaggcactcgcctcaggggcaaaatttayggggttgccaaaaaactcagtgatcaagaggaatcacattttaatgcaatattttaaaagtctaaattaatgcaaaaataaatcct

SEQ ID NO: 676056 - DNA, 1131 bp, Homo sapiens
taaattccagaacatagcaaagcaaggagacccagtctttgctcccctccccatccctttctctttctaccatggcctccagcacttgtgtggagactacaaagtccacaagtccaagctccatttacacctcccaccaacagtcttttttcaacccccactgggcccaggagccccatgagcagtgaattccaaggtcccagctatgcagagcaaggctcagaaggaggcaaagagctcaaggggtctttgttgcagaggagcagtgctgtccaggtgctgagaagttggagtgcagagtagcagagccctctaatatacagtgaccaggacagggacctgtcttgctaatttaagattattttctctgtcctgttttwagcacaagtgaagaacaattacctcttttttctcttccacttacaagtcatctttcttcacagaaaagtttataaagagttataaaagcaacaacatgattgttaagttacctggacagccacagacatttcctatttatcatgagaactgcagtaagaatatgcactgatctaagtatgatcttttaatatttagttaataataactttatcaaccaaagttaattgaaccaagaggctggtattcatggtgaactaaactcaaacatgactgttgggcttgctgaatgtaagatcattcagaaaagaaggctagacctgtgttggtgcctgatctatttccatattatacctcttgcttctgcttcattgtttctttcagattatacctttctaggattttctcttacctgagaaaatgggacctttctttcaaaattcctgccggtatataaggatcaggctgaaaatccacactcttcccaacatgtcactactggctccaagaggaaaatgtaccttctgtgtggggcacccacattgcaccttcaatgatgcacatcacagtgaacattagaccatgaaccttaagttaaactcccatgtcatagcaaatgtttcctatgggatgcaaagagagggatgagtggtattcaaccctgtttacccctaagtcctagggtaatgggcatttctgttgtctttttttggtttggtttggtttggttttggctttttagcacccatcaca

SEQ ID NO: 676057 - DNA, 2446 bp, Homo sapiens
tatcattaaagggagaagggtatagagaatctgagaaaaaaaggttgtcttctcttataaaaagttgttttcttcataattttacctagcaagggacttgaatagggtcttcctaatagttgcaacaaagtggtgagcattatttaaaacagatcagatacttaatctgttacttaaggaacccagactttttccacatgtgttccctgtctaggtccttgaaatccactcattcagtcagtggatggcaaaaataggatgagtatcaggaatgccatattttttatgagtgaggcatccgtagcctctactcacatctcattgatcagaactcatcacatgagtgcagctagctgaaagggaggctggaagatataacgtggctatgagtcaaaaaaaaaaaaatgaagaaatggacataggtgagtacttgctgttttggccactagtaccatttgataagcatttaccctcccgaatgaagggaccatttccagagcaggatcatcacaggaagtagcaagtagcaagctcatgcacatgtttatgagcattgccacattctccataatggaccctcctcctctcactactcgtacagggccacatggggttcaggggtacaaaggatcaaggagcataggaacatgccacttttattagtcaacagatgatcacaaaaggccctttatatgtatgcactaggctaagaaatactaggaaaaatagccaggtctacgtaaaacaaaggtttctgagagtttacytgagtaacaagtattcagtagaacaacatgaaataattaatatctgctttctttttctcactcaacattcttggacagagctccctcaaaatagtcaactatttttaactttcactgcctaacatatttagagctgtctttgtgtcccaaactgatgaaaaaacattcaacaataatgtaaaccacataataatattttaatattagtatatttaaagctaaattccaaatacaaatgtataactgacttggcttgctttttgaatcatgacataaaagaaaaatatttcaaatagcattatttttatacacagaataataattaacacaaataacacttaatatgatccagacactgttacaagtactgtacatgtatcatcacacttcgttttcttaattactctgtgatttcatctagctctggtttcctactcaaatctcatctcaaattgtaatccccacatgttgagggagggacctggtgggaggtgattggatcatgggggggtggtttcccccacgtttttctcatgatagtgaatgagttctcctgcgttctggttgtttgataagtacctggcatttcccctgcatcctctctctcttctgttaccttgtaagacatgccttgcttccctttcaccttcctccatgattgtaagtttccagaggcctctccagccgtgaggaactgaatcaattaaacctcttttatttataaattacccagcctcaagtagtatctttatagcagtgtgaaaaatagactctgtgaggtaggtgttatctccattttaaagatgtggaatcatctctcagagatgctgggcaatttgcccaaggtcacacaggcagtaactggcaggatagttattatatctcagatgatcttgttccagagtctgtgcacttgaccaattcaaatattagctctctcctcgacccccaccaagatttgaaattaattacacataacagagaactctaggttcaatggaatcactttacatattccttttagtttttttgaaatatcccataaactcataatatttgagcataaaatgtattaggcaaaatattctgataaaaataaaatacaaactctgtttggactaataaaaatgcttgtatcatccacatgggacattctatgaaaaaatatacttagatttttcctttattctgggtaaacaaattaacatctgttatactaaataggcaagcttaaccagccatgacgcttctcaacaaatatgttctggaaggttttaaaaatatatttattctggaggcttcagagaactagattgagcagctggcaatgcctaacaaggctcctatttcccctattcattctcatgaaaacattctctttcaaagaatcattcagacgagtataaaaggaaaatattaaaatatggaaaagtcaggagaaacagagggttgtagttctgcaaatagtaagatcaaatacataagattttattttcctagaaaaatggatgatttgaacaatttcattaattattttacccagtaccagggaaggtcattggaaatagatcttgagtccttaagcaagctcagtccttctctcagcccactgggctaagacattaaaataattatatcataagacaccaaaggacctgattgagctattctgtatttgg

SEQ ID NO: 676058 - DNA, 1903 bp, Homo sapiens
tgaaatatctttatttttccagtttgctttttgccccttttaaaatgttttctctcttcttacaagcccccatgttgtcagctgtaccacagatgagaaattttcctaatgggagaagcatttatttatacaaaaaatagttttaaaatacttttaatttctaagccagtgaaatactgtgagtatcatggttattgtggcagtattcgttgtataggaactcttgtagaggtcaagtgtttgtgtcaagcaactgtcaaatcaccatctccatttgttttgtgagttagaaatgccttcaaaagtggatgattctttttcttttttctttttctgttttgatgaatgagtgcctgaaaagctaaggaaaacatttatttgggatctcagagtacatggaaaaccttcaaaataacataatgaagtcctactattttggtaaattggctgcccaggtagaagagaaagcaggtgagacataaaagagataggcagccctttaggatggcactgccacaggcatcagccagcaggtggtaaaggtgctgccccccaggtctccagatagcaaatagctggttaggaagctgattgatgagcctcctgaaaagatgaaagagaagggaaagagaaaggaggtgatgacagtttctgatgttataatttttatccctaaaagcagaacaaagactaaatttatagttcttttaaaaatatgcctctttcttcttttattttactactagggattgggtagaatttatttgactctatttgagatcagagaaggccatgcatagaaaatggtagtggatgaacccacagttgctccaacatttttttcaacaaatgcttattcaacaaatattgaatgagcaggtacgctgtgtgccattcttctaggccctaaaaatatgatggtagaaaacagtccaaactgttaaagcacaaccttattgaaggtaaaattatgactcttcaagaaatataaaatgagactgggtctaagattttatttaactgatttattaatgagagaaccaataacatactaccactggttcaaaagagaattacaagaacttaatgtatataagtagtaaggaatgctgaaaagaattttcagatggatgcagaattgatctgtctatagggaatagctaattacattccacagaacataaatcatttgcacttctatggacaaaaatcatttgttttattrtcagttttctacaacttacagagttataaactacctcaaagtcaataaaaggcaggcaattccagaagcaggctctgaaaggacaccgggaatctgcatttctcctatttcaaagtatgacatgattttctcaagtaacactcagtaaatatttgatcaatgaataaatagtgaaccagaaacaaaggaagagcatatttcaagaagaaaagtgtgatcaactgtgtcaaatgctgctaagagggcaggaacgatgagaattaagaactgatcaccgatttggtaacatggaggcttcagtggaattcggggaggcaaaagctcaattagagtgggctcaagtgccattggaaactgaggaagcagagagaactaggccgttgtttgggagtagctttaccagaaaagggaacagagaaatgagggtttagctagcggaaaacatgaagtcaagggaaaacatttgatttattaatttattttcttttttaaaattttttttattgtactttaagttctagggtacatgtgcacaatgtgcaggtttgttacatatgtatacatgtgccatgttggtgtgctgcacccattaactcgtcatttacattaggtatatctcctaatgctatccctcccccctcccctcaccccacaacaggccctggtgtgtgatgttcc

SEQ ID NO: 676059 - DNA, 602 bp, Homo sapiens
ttagtgcaggataaagtcacagctttgctgaaatatgagttccatctccttgggcatgtcacaaacttctccacttggatggggtgattttttttttttcctccaggggacattcagcaatgctggggacattcagcgattttggagacatattctgtcatcacaacttggagtagtgacatgctgctggcatctagatggtagaagccagggattctgctaaacatcccacaacgcccaggacagcccccacaacagggaattatgtgaccccaaacgtccaccttgctgaagtggagagccctgccctaaacatgtctattgggcctgcttcctggcttttgctatcacaagccacactgtcgtggtctgtagggcacacaactctgtggacgtgtgcgagtatttctgcaagatgtttttctgggggatggaattactatagcattcccgttcactcttagatgcgatagcctctcgaatgctgctgagatgccctttccagcttgtcccaggcactgcactaggaggttgggaatgcatctgtctgcacccaggggagcygtgagaagtgcttactgtgttctgcttaacacgttgtg

SEQ ID NO: 676060 - DNA, 1083 bp, Homo sapiens
gctggaggcttcaaacccagcctcagacatacaggcacttgaaatagaaagtagcttagtgggcacagagtccccaaacctccaacctcacagcggacaaagcagctctgtgtgtgtgtgtgtgtgtgtgygcgcgcgcgcgcgcgcgcgcgtgtgtgtgtatgtgtgtccgcgcgagcgcgcgcgcatgcgcgcaggcatgcccgcgcttgaactgcgttatcttacttcctcacttgctgcccaaaagcctgctgaggaacagagattttctctaattttcctccaatgccctagataatctctaccatggtaggtagcagacccatgtggctagaagtgactgagagaacacatgcctaaatagaataagacagaacaacctcttctccccaaactgatttccattgcctgatggggaagatgctccagcagagcaatctttggctccaagatgtaatgagcttacatttcagaatttgtggaaatcatacattgaaaggaataactaatatatttttatagtaataatacaatcaaaagtcagtgtttaatttatcccagtgcactaataactgctactctgcttgggaaaagagctgagtggtctggagatgaatggagctttgcctgatgttctactccaacccgatgtcatatttcccacctgtgaatgtccctgacacttcatatttggggaaacttattatcttctacctagtatcattattattattattattttcgtacatgtctcttttcccctcctagatggcctgtgaatggggaactttgctgaacaaatccaaatgatttagaaggaagaatggttacattaacagagcacactggactgatccaaagtatccatgcttctctgatggcccagttccctcaccagaatgctacaaaggtgattaggcctattttctagcatgttgtggcaataattcaaaatatgaccgtaaattaacatattaattgtaccgtgattatttaatgaacttacaaagtttctcctgccttctgtgtataccacctgtgtcctgccttttatcagtgatatgatcctatattcatgca

SEQ ID NO: 676061 - DNA, 2349 bp, Homo sapiens
tgtattttttctctaactctaattcataaacacacatatatagttaataaaatgtgctcatatacatgcataattttatcttttaatctctaaatatattaatattataaagttcttatgctatcatatttttcataacataagttttaattatggaagagtatccatatttatcaactrtattttatttaataaaattcttattgttaaacattacagttttcacaatttttgtttttataaaaaatattggaatgaacatcctggtagttaaatttaattatttatatgtatttatttacatatgtggaatattattttgttagaaataaattcttgagctatttttcagtacagggtgtattacatgagttatcttaattccagttctccactctccatcatcctataggaattgtcctttctgaaataaagttttttgttttaaagtcttaaataaattatttgcaagcacgtgttaataatgcattgacatatttaggatatatttgtaagagatgcaacataatcctgaacatgcttcatggttctgtttcgttttgtgttttaccgttagtccaaaactctgtaacatcaactaaagatcactctcttttttaaaagaaaaggaggctttattctctttgcttactgtacttacttcctagccatcaaatcattctctagatttttgaaggttggaagtgtattaaaaatcccattgaaataaacatcaacccatgtggtttggaggaaactggtaaaggctattgtgagttctatatcaaagatgaaactcccataagcaaacaaagaacagtatcattcatgagaactacatgctcctgttttcagctgtttaagggaaatctattctctggaccagaaagtaagttcatgtttgcctacaattttacaatttttcaaaaaattaagccaaagtttatatctttattatccaatgacaaagtatctaaaaaacagaaatgaaactgtattgacaatttcatttcaggtaccttaatttcatgataaaggtaatccttaacttcatgtatctcttcagagatataaaatgttaattttcttaaataatgaggggaatttacattataatttctttgaaaatattttcaaatgcatcaaaattaccttgagcccagaagccccaggcatcccttgaattccaggttcacctttgcttccctgtcaacacatcaaaaacattggagttttttaaaaacaattctgtcataatatatctgatatagacacttaagggaatatatgtaaaataacttttacatttttaactttccgattgtttgatagactctgtacattagacctatgtattaagaaaaatgaaaaaatcttttaggcaaggaaggggttccacatattcataagcctctctaaaaacctgtgttaaagctggtagcttcaagtataagggaggagagtcaaatctttagtggccagcactaataagtccagccaccacattgcacaggtgggagacatgtactttaacagcatcctccgggctgagatcctcatcattatcctgtctcactttctcagtaggactcatcttcagtatgcaactgaaggaaagaaaagtagcttcaaatgcacaatggctttttttgaagaagtgtgaatcagaaaatgtttagtttgtgctttttcaggattccagtgcagttctttctaacagatggaaacttggagtacaaggctgagttgacagggcaaagaatgtaatacagaaaaggaaaagtggatagagaaagagaaaacaagtcttctggctaataaggagagattgtcaaatgtagttctggttttcaaatactttgatacctgatatcacaacccaatgtctggcaaaagcccataattaagcaggttggtgtgacacctagaaggggaacacaataattacccacaaccaacttgggtttactaatcagtgaggcaaaccaatgccattttcagcttttaaaaaagttttgtaggctgctcatggtaagaaacatgtgaagatcacattagatttaattaaagcatttagcacataacagtgttattgaaccacagaatgattccttaaaatttctaattttataagttattaaactgaaattcacagacatgagatttgttgaaagttatctgactcgataaagctaatatattttaatattatttagataattattatctttttaagttctgggttatatgtgcaggatgtgcaggtttgttacataggtaaacatgtgccacggtggtttgctgcacctatcaacccatcacctaggtattaagcccagcatgcattag

SEQ ID NO: 676062 - DNA, 2349 bp, Homo sapiens
tgtattttttctctaactctaattcataaacacacatatatagttaataaaatgtgctcatatacatgcataattttatcttttaatctctaaatatattaatattataaagttcttatgctatcatatttttcataacataagttttaattatggaagagtatccatatttatcaactgtattttatttaataaaattcttattgttaaacattacagttttcacaatttttgtttttataaaaaatattggaatgaacatcctggtagttaaatttaattatttatatgtatttatttacatatgtggaatattattttgttagaaataaattcttgagctatttttcagtacagggtgtattacatgagttatcttaattccagttctccactctccatcatcctataggaattgtcctttctgaaataaagttttttgttttaaagtcttraataaattatttgcaagcacgtgttaataatgcattgacatatttaggatatatttgtaagagatgcaacataatcctgaacatgcttcatggttctgtttcgttttgtgttttaccgttagtccaaaactctgtaacatcaactaaagatcactctcttttttaaaagaaaaggaggctttattctctttgcttactgtacttacttcctagccatcaaatcattctctagatttttgaaggttggaagtgtattaaaaatcccattgaaataaacatcaacccatgtggtttggaggaaactggtaaaggctattgtgagttctatatcaaagatgaaactcccataagcaaacaaagaacagtatcattcatgagaactacatgctcctgttttcagctgtttaagggaaatctattctctggaccagaaagtaagttcatgtttgcctacaattttacaatttttcaaaaaattaagccaaagtttatatctttattatccaatgacaaagtatctaaaaaacagaaatgaaactgtattgacaatttcatttcaggtaccttaatttcatgataaaggtaatccttaacttcatgtatctcttcagagatataaaatgttaattttcttaaataatgaggggaatttacattataatttctttgaaaatattttcaaatgcatcaaaattaccttgagcccagaagccccaggcatcccttgaattccaggttcacctttgcttccctgtcaacacatcaaaaacattggagttttttaaaaacaattctgtcataatatatctgatatagacacttaagggaatatatgtaaaataacttttacatttttaactttccgattgtttgatagactctgtacattagacctatgtattaagaaaaatgaaaaaatcttttaggcaaggaaggggttccacatattcataagcctctctaaaaacctgtgttaaagctggtagcttcaagtataagggaggagagtcaaatctttagtggccagcactaataagtccagccaccacattgcacaggtgggagacatgtactttaacagcatcctccgggctgagatcctcatcattatcctgtctcactttctcagtaggactcatcttcagtatgcaactgaaggaaagaaaagtagcttcaaatgcacaatggctttttttgaagaagtgtgaatcagaaaatgtttagtttgtgctttttcaggattccagtgcagttctttctaacagatggaaacttggagtacaaggctgagttgacagggcaaagaatgtaatacagaaaaggaaaagtggatagagaaagagaaaacaagtcttctggctaataaggagagattgtcaaatgtagttctggttttcaaatactttgatacctgatatcacaacccaatgtctggcaaaagcccataattaagcaggttggtgtgacacctagaaggggaacacaataattacccacaaccaacttgggtttactaatcagtgaggcaaaccaatgccattttcagcttttaaaaaagttttgtaggctgctcatggtaagaaacatgtgaagatcacattagatttaattaaagcatttagcacataacagtgttattgaaccacagaatgattccttaaaatttctaattttataagttattaaactgaaattcacagacatgagatttgttgaaagttatctgactcgataaagctaatatattttaatattatttagataattattatctttttaagttctgggttatatgtgcaggatgtgcaggtttgttacataggtaaacatgtgccacggtggtttgctgcacctatcaacccatcacctaggtattaagcccagcatgcattag

SEQ ID NO: 676063 - DNA, 1714 bp, Homo sapiens
gtccccatggcgaccgagcggctctagcgccccaaccaattgctggcctcccggctgcccgggggcgggtccaggctgcccatcatgcagccaggccgggcagagggggatgggaggccacgkcggcgcagtgcacccctccccctcggctgcagcaggtcccctgggccaggcgtcctgtcctccttcgggcagcctagctccaccactccctccatcctcccgcagggcagctccgggctctgctcaaagcccgcccatagctgcccctcactggctgcatcctcggagtcccggcccgcgctggctgtccccgggaccccacagcctactcgcgcccagtctggagccaacacattccccagcatttttactgagcacctactgagtgctggcctggaaacaaagtaatgactgcaaccaaggtgccagacctcctgggggacagatgtgccttactcagcctcgtgggtaacagggaaggtgaattgtgagaatgggggtgcccactttcctccacccgggaaccagaccagctcctcatgcagctcccactggctgctctccagcgcccaggccacccacatcccacctgtgagagccaggcctaatcctcactcccctgtcccatgctttcctgtagctgagtaagagtccggcccacagccactggcactctcagtcctgtgacctctgcagtcccccagcccagcctcactatcctgtgctggagctctgcaatctgcctgccatgacacctccagctgagcagatggcagccagccttcaaggtctggttccacactgccacttcaggctggcacttttctccactgtccctaggaaggaggcactcacgcctccaaccccagcttgctgcccggccctgccagggatcctcatgctcccttcccctggcccagggtcatcgtgagggccatctgccccaccaggacagaccctgtcaccagagaagcccctgcacctgaggtccaggagcctccacgggggacagggatgacacccatactggctggttacccacgctcccatgagctgcagggggcccatccttcacccaccttgcaggtgcgacttcacataccgacaccaccctcacaggccacttgcttgaccttggagggccttagattcctcctctggaatgaggggctgctcctcagtgggcatcgtgcctggcacacagtgagcaagtggtcactgccttcatcacaggcaccaggcccaaggctggctgcagtgccacaccctacataggcccagaagtgacatcccatcatcccaccacccacctcccaatcaggttttcccgagaagatggacttgccctccgccactgtgagctccagagacacgctgctcagggtgctcctggagcctctaccaggtcagatgcccggcacgggggcccagactctccagctaccaagacctttgcctcggggctgtgcccccggctgcctggctggggatcgacaggcactagtgccggggcagaacctcccctaactgcactcagatgccaccctggtctggccagggaagtggttgggcgggtaagacccgtaaggcaccaggtgctaggacctcgtatggccaagtgttccaagctgttagaagaaactggaaatctgcaccattatgtaaacagattttaaaatattggcgactcagttacatggtttactttttt

SEQ ID NO: 676064 - DNA, 531 bp, Homo sapiens
ttttttttgagatggagtctcgctctgtcatccaggctggagcgcagtggcacaatctcggctcactgcagcctctgcctcccgggttcaagcgattcttgtgtctcagcctccccagtagctgggattacaggcataaaccaccaygcctggtgaatttttgtatttttagtagagatgggatcttgccatgttggccaggttggtcacgaactcctgacctcaggtgatccaccctcctcggcctcccaaagtgttggtattacaggcgtgagccaccacgcccagcctgtttcacttttaaaataaggattcaatatgcaactttgtatattctgctaaatatacgtggacactcttgtgaacaggtagagatcttctttatttttgacagctgtagaatattccattgtgtgtatggatgtattacaatttctttaagtatatttccaactgcatgggcatttttatagagtgtcctgctacaaatactgcaaagaacaaactcccacataaatccgtctgcatgtg

SEQ ID NO: 676065 - DNA, 1400 bp, Homo sapiens
ggatcccccaggaccttcaaggggagaggctacatagcacagtagttgagtgtgcagcctctaaacccgcacgatctgggttctaatcccagctccagacggcctgaattctaatcccgrctccagacggcctgaattctaatcccggctccagacggcctgaattctaatcccggctccagacggcctgaattctaatcccggctccagacggcctgaattctaatcccggctccagacggcctgaattctaatcccggcccagacggcctgaattctaatcccgactccagacggcctgaattctaatcctgactccagacggcctgaattctaatcccgccccagacggcctgaattctaatcccgactccagacggcctgaattctaatcccgactccagacggcctgaattctaatcccgactccagacggcctgaattctaatcccggctccagacggcctgaattctaatcccaccccagacggcctgaattctaatcccggccccagacggcctgaattataatcctaactccagacggcctgagttctaatcctgccccagacggcctgaattataatcctggctccagatggcctgaattctaatcccgccccagacggcctgaattctaatcccggctccagacggcctgaattctaatcctggttccagacggcctgaattctaatcccgactccagacggcctgagttctaatcctggctccagatggcctgaattctaatcccgccccagatggcctgaattctaatcctgactccagacggcctgagttctaatcctggctccagatggcctgaattctaatcccgactccagacggcctgagttctaatcctggctccagatggcctgcgttctaatcccgatttctacttgccatgtaaccttgagaaagtttcttaactatctgagcttctataccctcatctataaaatggggctgatgttaatactcacatcaaagggctgctgtattaaactaataaatatatgtgaagtgtctagaaagagcccaggcacactgaacactaacttttgttgtaatttaaaccggtgtccatggagccacttcgtcctccttcttgccatcttcctgcctcaggaacatctcagaactcaccccccaatacctgcctctctcccaatggaaagaaaagtcacttatctgagggaggaggccggggaaagaggcagacatcccaggaagggcttcctgcctctcacattcacaacccacctgcccactgtcccacagggcacagctcctccttcctcacggaggccttcgggccaggcctgcctcatctggccttgctgcctaccctggaaggccacatcccccccaggaagaagggcacaggaaaccca

SEQ ID NO: 676066 - DNA, 1324 bp, Homo sapiens
tgcactcattaaaatgacgtggtagaagaaaacacaataaggaaggaggttagaaatacgctgtctaaactctcacaaacaatatatgagataccctgtttccccacatcaatctaaaagtgtaaaacactaatacaatttgacccagcaatcctacattttagaatttaaccttctgatcagttgttcccaacaaggggcaattttacccaccaccccgccacacacacaggatatgcggcaattgtcaagggacatttttggttgtcacaaattgggaggaaaaggggtgtttcgtagacagaggccagggatgctgttaacccttcctgcaatgtacaggacagaccccgcaatgagcaattattattattactttgcctctctgagtcttttatgattgtattttttaaattattattattattttcttttttagagacggaatctcgctctgtcgcccaggctggagtgtgaagtacagtggcacaaacttggctcagtgcaacctccgtctccagggttcaagcaattctcctgcctcagcctcccgagtagctgggaatacagatgcatgccgccatgcctggctaactttttttgtattttagtagagacagggtttcaccgtgttgcccaggctggtttcgaactcctgagctcaggcaatctgcctgcctcagcctcccaaagtgctaggattacaggcgtgagccacctcgcctggccctcatgattgtatgttttttaagaatagttgttaacagccaaaaactggaaataactaaaatatccatccacaggagaatgggtaagtaaactgtgttgcattcctacaatggaacaccacacagcaatgaaaaagagtgaaccacagctacacacaacatcatgggcaaatcccagaggcaggcagggacacgaaagagctcactttaatgtaaatttcaagaacaggcaaaaccaatccatggtactaggaaccagggattacctttagggagggaggactgactgaggggggcccagagtgggcagttggggctgggaaatgctctctgccttcatttggtttcatggtacactggtgcattcgtacgtagacacgcactgcattcagcactaaggtttgcaccctttactgtatgagacttctacctcattaaaaaaaaargtaattttttataaactgtaataagtcgcagcttaaaattataataaataatttgtaaactataacaaacagtgtaataaataagtggaataaacaggaggtgctcagccatatttgctgaatgaatgagtgaataaatgaatgcaggca

SEQ ID NO: 676067 - DNA, 629 bp, Homo sapiens
cagccagcaggactccaaggcccaaactctcctctccatggaagctcagagctggagttcctgatctttgaggaaaatagggcaccaaggcccttgagggcaacagggcaatagagtccatggcgccctgcaggtttgaacccttctacttgctgcccctccaccacaagcctcaggccatgagtgccagctgtccccaagtccacactaagcctccgtggcctgcccaacatccatactgcaccctgaatgtctatcagcatttcagccyccaccgggctcctgctccttcccagggacctgctcctgcctccccgcctcttcctccccttggcttccggaggagtgccaccttctcgccagcagctccactcagaggtctctgccccctcctccttccaatgccatcatcgggccccagggcccaggcctgcctcttctatcccttcaggttcccctgcacagttcaggccgtctcatggctttaaagaccatttaacaccatctcccatgtgtaggtccccaatgcagacctttctccccaagtcaagattttgcaaccaaccaacaagcccacatctccatgtgggtgtctaccagcctgacataacccgtccacaactgcactc

SEQ ID NO: 676068 - DNA, 629 bp, Homo sapiens
cagccagcaggactccaaggcccaaactctcctctccatggaagctcagagctggagttcctgatctttgaggaaaatagggcaccaaggcccttgagggcaacagggcaatagagtccatggcgccctgcaggtttgaacccttctacttgctgcccctccaccacaagcctcaggccatgagtgccagctgtccccaagtccacactaagcctccgtggcctgcccaacatccatactgcaccctgaatgtctatcagcatttcagcctccaccgggctcctgctccttcccagggacctgctcctgcctccccgcctcttcctccccttggcttccggaggagtgccaccttctcgccagcagctccactcagaggtctctgccccctcctccttccaatgccatcatcgggccccagggcccaggcctgcctcttctrtcccttcaggttcccctgcacagttcaggccgtctcatggctttaaagaccatttaacaccatctcccatgtgtaggtccccaatgcagacctttctccccaagtcaagattttgcaaccaaccaacaagcccacatctccatgtgggtgtctaccagcctgacataacccgtccacaactgcactc

SEQ ID NO: 676069 - DNA, 629 bp, Homo sapiens
tgggcatggtggtacacgcctgtagtctcagctactcgggaggctgagacaggagaattgcttgaacccgggagacagaggttgcagtgagccgagaytgtgccactgcactccagcctgggtaacagagtaagactccgtctccaaaaaaaaaaaaaaaaagctttaaatatgcagttacttctttaagtctgagctagcatctttctactaagtcagtatcttcaagccgatattggtaccctgtcagggtgactgtgactcctggtccactggaccagcattgtgtccactcttcactgtgctctcctttccatttctcccatcttcctgttgtggaagaagcttgaactacttgtgcactaattggagagaaggtgttggggctcagaaagcagtaccccaaaatgaaggtctctgcagcagcctcagaagcaaaagttttcctttgacctttgtctgccctcttgtctgagtctcattctccacccaaggccagccatagaagctagaatccctcttccccaaggtgggtcatagaaaccagaaccccctttctccaaaccagccatagaacctaaaaatattactctaattttccctctgcctttctgggtaaaacttggcca

SEQ ID NO: 676070 - DNA, 629 bp, Homo sapiens
tgggcatggtggtacacgcctgtagtctcagctactcgggaggctgagacaggagaattgcttgaacccgggagacagaggttgcagtgagccgagacygtgccactgcactccagcctgggtaacagagtaagactccgtctccaaaaaaaaaaaaaaaaagctttaaatatgcagttacttctttaagtctgagctagcatctttctactaagtcagtatcttcaagccgatattggtaccctgtcagggtgactgtgactcctggtccactggaccagcattgtgtccactcttcactgtgctctcctttccatttctcccatcttcctgttgtggaagaagcttgaactacttgtgcactaattggagagaaggtgttggggctcagaaagcagtaccccaaaatgaaggtctctgcagcagcctcagaagcaaaagttttcctttgacctttgtctgccctcttgtctgagtctcattctccacccaaggccagccatagaagctagaatccctcttccccaaggtgggtcatagaaaccagaaccccctttctccaaaccagccatagaacctaaaaatattactctaattttccctctgcctttctgggtaaaacttggcca

SEQ ID NO: 676071 - DNA, 640 bp, Homo sapiens
agcagagatgctcagaggactgcccgggacaccgcatggtgaaggtggccgagcccacggcctgggtcttaggctggccggccacgtggagcggcacccacccagccctgctgccgtgagtcagtgccgtggggagcaatcgcatgcatgggcttcagacctgcattgggcctctttatttgggcacttcagccttatcctaattaatatgacacttcacaagcagcatataagggacattttattcacccagcaggtgcagcacacacattcttctccagtrccatggaaaacttgcaaaaagttacaaagagggatacaaagctcatgtcaacaacctccacagagtggatatcagagatgacactccctggcccacagctcaatcaagtgagaattcactgattaaaaggtaaatttagaaattaattcaaaaatttaaaaatgtttcttttttaatctttttttaaagtttattagcaatctaaaaaaatactggttatttttttgacttaaagaaaccactaacttgctaatctctaggacatacaagttccatttatggtcatgaacttcatagtaggccaaatgtaggatttaaaatccaagaaacaaaaaaaaaattatagaattttaacct

SEQ ID NO: 676072 - DNA, 1281 bp, Homo sapiens
ttgggtctggggaccttctcaggccctgtacagcgaggtggaacccaggcctcctggctcccttttcggggctctgaatcggcggggagcaggctaggagcaagcgacgggagccaggagactgggttcccagcccagcgcacgttccccgccctccgttcctggtgaggccccaggccttgtagttctcctggcttttcctctgcaggcccttccagccgccttggatagagtggagagtgaggacaagcacgagagcccagccagcaaggagagagcccgagaggagcggccagaggagacggagaaggccccgccctccccggagcagctgccgagaggttggggcttcttgcaggccacccaccccagtgccatgtctggcctcagcaggcctgggttcagagaagggcaggtggctgtacttccgctcatttctccctggcagagaggtagactccaaccctctgcaggccccctggtgaggggaggccaggagctcaggcctctatacatggacttaatggactttttttttttttggagaaagggtttcgctctgtcacccaggctggaatgcagtggtaccatctcggatcactgcaacatccgcctcccgggttcaagtgattcttgtgcctcagtctccctagtagctgggactacaggcgtgtaccaccacacccagctaatttttgtatttttagtagagacgagatttcatcatgttggtcaggatggtctcgatctcttgtagctgggactataggtgcataccaccacacccaactaatttttgtatttttaatagagactgggttttgccatgttggccaggctggtctcgatctcttgacctcgtgatccgcctgcctcggcctcccaaagtgctgggattacaggtgtgagccactgcgcccggccatttttttttttttttttttaatttttagtagagactgttggctgggctggtctcgacctcctgacctcaagtgatccacccacctyggcctcccacagtgttgggattgcaggcatgagccaccttgcccgttggtctttaacttttcttaccatacagagattgggggtgattgggctacttttttattagtgatttctgactcaattgcattgtggtctgaaaacatgagtctatatgaggttgttgaaacctgctctctggcctgatacggtcagattttgtaaatgatgtatgtgtgcttgaagaaaatgtctgttccctaattgctgggtttaaggttctaactatatgca

SEQ ID NO: 676073 - DNA, 653 bp, Homo sapiens
tgagatctcagggaggcagagttgagaaatatctctcatcctttccagttggctgctttgcaataagaaaacactttctttactacaacaccactgtctcagggtattggcttttctgtgccacaggtaagaagaacctttccactggggagtcacacacatgcaaaagaatgtaagtatttcacaaataaaccagtggcttccaaaagcatttaaattacccaactctagatattacaagaatctgtgattattcaaaacttgcagaaactataatgtcacattattataaaataaaaggaatcagtgtatttggagagtacctttaaacaaccagctgcttaaataagagagatttttaaaaaaatacagcaaactaaggcaattcagtaaccatgtatagataaaggcttctaacaaacagaaaaaaagaatgcttaaacatctgaaaaattgaatttgaaactgccaagttcaattttggctctatccattccytagaaaatctgttcagtaagagaaaatcctaggtgaattaatgaggacagagatgcttgaacaaacaaatgttattgagtatctattaggcaacgcacccagctggaagtagaaaggagaagggataagagtggaggcagggtgtgatagggaga

SEQ ID NO: 676074 - DNA, 653 bp, Homo sapiens
tgagatctcagggaggcagagttgagaaatatctctcatcctttccagttggctgctttgcaataagaaaacactttctttactacaacaccactgtctcagggtattggcttttctgtgccacaggtaagaagaacctttccactggggagtcacacacatgcaaaagaatgtaagtatttcacaaataaaccagtggcttccaaaagcatttaaattacccaactctagatattacaagaatctgtgattattcaaaacttgcagaaactataatgtcacattattataaaataaaaggaatcagtgtatttggagagtacctttaaacaaccagctgcttaaataagagagatttttaaaaaaatacagcaaactaaggcaattcagtaaccatgtatagataaaggcttctaacaaacagaaaaaaagaatgcttaaacatctgaaaaattgaatttgaaactgccaagttcaattttggctctatccattccttagaaaatctgttcagtaagagaaaatcctaggtgaattaatgaggacagagatgcttgaacaaacaaatgttattgagtatctattaggcamcgcacccagctggaagtagaaaggagaagggataagagtggaggcagggtgtgatagggaga

SEQ ID NO: 676075 - DNA, 1604 bp, Homo sapiens
aaatgtaccttcctctcaattatgctgtgaacttaaaactgtttccccaaaatagtcttttaaaaaaaatcaagaatacaataggcatggtctagaagaaaaatgtacaggttgcaggcaggagacaccaagcaaatcatttcatatctggaggccttcatttattgctccacaaggttaagagttcaactcacaccggggtctatgagctaacctttcaccagggcattctgttcaaaccttgggcctcacttcgtaaaagtccaggaaattactctccctttctgtttgcactcggcctcatgccatgggcctcctgggcaggtgcactgctgctccaccggtgctcaacacatttttgctaaaggaatggatgaccccagaaaacacatacaagctgggcacaatggcatgtgtctgtaatcccagctacttgggaggctggggtgggggatcgctcaacgccaggagttgaggctgcagtgggctgggatcgcacctatgaatagcccctgccctccaacctgggcaatgcagcaagaccctgtctctaaaaattaaaaaaagacaaaataataacaataaacatacgaataactatggccgggcacggtgaaaccccgtctctactacaaataccaaaaattagccacgtgtggtggcggctgcctgtagtcccagctactctggaggctgaagcaggagaatggcgtgaacccaggaggcagaactggagtgagccgagatggcgccactgcactctagcctgggcgacagagcaagactcccatcccagcactttggcaggccgaggcgggcagatcaccagctcagaagatcgagaccatcctggttaacacggtaaaaccccgtctctactaaaaaaaacaaaaaattagctgtgcatggtggcgggcgcctgtagtcccagctactccggaggctgaggcaggagaatggcatgaacccgggaggcggagcttgtagtgagccgagatcgcaccactgcactccagcctggccaacagagcaagactctgtctcaaaaaaataaaacaaacaaacaaaaaaaaagaaattgtaccagcttctgagaatcatcaaaggtagcagaggagggccaagtcaaagccacagagtgtagaagcctcaagatgaagttcaaagccatacagtcctaaggaatgctaggagtcggtaacacagcaagttaatatctttgggtagacacgtgcagctacagctgtggaataaatttcctcctgagagtgaaactctacagtgcacaccacctacagtrcattgaagcagacattatgcaaacacttcaagagaaaggacacttggtctcggaccagcgaagcccgtgggccctcggtgtgatagtctcaatgtatctgtaagaagagtaggtcagtggctggtcagcatcagataaaacagtcaacaaagccagctctggctgtgcccatagctcacggcaactcacttcctccagctgctcaggccaacacccgtgcgtcatccctgactcctcccactctcacaacacccagcagcaaatcctgttggctccacttcaaaatggattctgggcccagtgc

SEQ ID NO: 676076 - DNA, 1604 bp, Homo sapiens
aaatgtaccttcctctcaattatgctgtgaacttaaaactgtttccccaaaatagtcttttaaaaaaaatcaagaatacaataggcatggtctagaagaaaaatgtacaggttgcaggcaggagacaccaagcaaatcatttcatatctggaggccttcatttattgctccacaaggttaagagttcaactcacaccggggtctatgagctaacctttcaccagggcattctgttcaaaccttgggcctcacttcgtaaaagtccaggaaattactctccctttctgtttgcactcggcctcatgccatgggcctcctgggcaggtgcactgctgctccaccggtgctcaacacatttttgctaaaggaatggatgaccccagaaaacacatacaagctgggcacaatggcatgtgtctgtaatcccagctacttgggaggctggggtgggggatcgctcaacgccaggagttgaggctgcagtgggctgggatcgcacctatgaatagcccctgccctccaacctgggcaatgcagcaagaccctgtctctaaaaattaaaaaaagacaaaataataacaataaacatacgaataactatggccgggcacggtgaaaccccgtctctactacaaataccaaaaattagccacgtgtggtggcggctgcctgtagtcccagctactctggaggctgaagcaggagaatggcgtgaacccaggaggcagaactggagtgagccgagatggcgccactgcactctagcctgggcgacagagcaagactcccatcccagcactttggcaggccgaggcgggcagatcaccagctcagaagatcgagaccatcctggttaacacggtaaaaccccgtctctactaaaaaaaacaaaaaattagctgtgcatggtggcgggcgcctgtagtcccagctactccggaggctgaggcaggagaatggcatgaacccgggaggcggagcttgtagtgagccgagatcgcaccactgcactccagcctggccaacagagcaagactctgtctcaaaaaaataaaacaaacaaacaaaaaaaaagaaattgtaccagcttctgagaatcatcaaaggtagcagaggagggccaagtcaaagccacagagtgtagaagcctcaagatgaagttcaaagccatacagtcctaaggaatgctaggagtcggtaacacagcaagttaatatctttgggtagacacgtgcagctacagctgtggaataaatttcctcctgagagtgaaactctacagtgcacaccacctacagtgcattgaagcagacattatgcaaacacttcaagagaaaggacacttggtctcggaccagcgaagcccgtgggccctcggtgtgatagtctcaatgtatctgtaagaagagtaggtcagtggstggtcagcatcagataaaacagtcaacaaagccagctctggctgtgcccatagctcacggcaactcacttcctccagctgctcaggccaacacccgtgcgtcatccctgactcctcccactctcacaacacccagcagcaaatcctgttggctccacttcaaaatggattctgggcccagtgc

SEQ ID NO: 676077 - DNA, 1265 bp, Homo sapiens
acatatacaaaaaggttcagaaaacattactgtaattttcctaatgttatttttatttggatgtcaacagctgaaaataataaaagaaaacactgaactacaacaactcttttgatttataattagtttcttatctaatacaggtgtgcctcatttttataattgataaaattctgaagttatgtgtatgccaatttttcaaacatcaaaccctaaatgtaaaaaacgaaaagtccaataattcacttttaagcaagaaattttcctgtaattggctgggtgtggtggctcacgcctgtaatcccagcactttgggaggccgaggcaggtggatcacctgaggtcaggagttcaagaccagcctgaccaacatggagaaaccccatctctactaaaaatacaaaattagccgggtgtggtggcacatgcctgtaatcccagctacttgggaggctgaggcaggagaatcccttgaactcgggaggcaaaggttgcggtgagccgagatcgtgccattgcactccagcctgggcaacaagagcgaaactccatctcaaaaaaaaaaaaaaaaaaagaaattttcctgtaatacaattaaccactcctgtaaattatttgttggaaactaagaatgccttgtcttgattgaattagagagttttttcctgtactatctcattgggaagtagtaatggccaatatttattgactacttatgtcccatgcactgtaccaagtgcttttatttagataacattatttaatctcataacacctctttgaggtagctactactattgcccccattttacagacagaaagtaaagtttgccaaaggtcacccagctaggcaggtgcggaggcaggatttgaaccagtctgtctccaaaggctatgttactttaacatttgtctacaatatttagtaactctacaaagtgagcagatcaaactaaatataaaaacagtgaatctttgaggattaactgatttaccttaataaacccattaaacccagctagcaggaataataaacctaggtcttctttttttttttttttktttttttgtgtgtgtgtgtgtgagatggagtatcgctctgtcacctagactggagtgcagtggtgcaatcccagcccactgcaacccctgcctcccgggttcaagcgattctcctgcctcagcctcatgagtagctggggttacaggtgtgtgccaccatgcctggctaatttttgtatttttagtagagatcaggtttcacc

SEQ ID NO: 676078 - DNA, 1265 bp, Homo sapiens
acatatacaaaaaggttcagaaaacattactgtaattttcctaatgttatttttatttggatgtcaacagctgaaaataataaaagaaaacactgaactacaacaactcttttgatttataattagtttcttatctaatacaggtgtgcctcatttttataattgataaaattctgaagttatgtgtatgccaatttttcaaacatcaaaccctaaatgtaaaaaacgaaaagtccaataattcacttttaagcaagaaattttcctgtaattggctgggtgtggtggctcacgcctgtaatcccagcactttgggaggccgaggcaggtggatcacctgaggtcaggagttcaagaccagcctgaccaacatggagaaaccccatctctactaaaaatacaaaattagccgggtgtggtggcacatgcctgtaatcccagctacttgggaggctgaggcaggagaatcccttgaactcgggaggcaaaggttgcggtgagccgagatcgtgccattgcactccagcctgggcaacaagagcgaaactccatctcaaaaaaaaaaaaaaaaaaagaaattttcctgtaatacaattaaccactcctgtaaattatttgttggaaactaagaatgccttgtcttgattgaattagagagttttttcctgtactatctcattgggaagtagtaatggccaatatttattgactacttatgtcccatgcactgtaccaagtgcttttatttagataacattatttaatctcataacacctctttgaggtagctactactattgcccccattttacagacagaaagtaaagtttgccaaaggtcacccagctaggcaggtgcggaggcaggatttgaaccagtctgtctccaaaggctatgttactttaacatttgtctacaatatttagtaactctacaaagtgagcagatcaaactaaatataaaaacagtgaatctttgaggattaactgatttaccttaataaacccattaaacccagctagcaggaataataaacctaggtcttctttttttttttttttttktttttgtgtgtgtgtgtgtgagatggagtatcgctctgtcacctagactggagtgcagtggtgcaatcccagcccactgcaacccctgcctcccgggttcaagcgattctcctgcctcagcctcatgagtagctggggttacaggtgtgtgccaccatgcctggctaatttttgtatttttagtagagatcaggtttcacc

SEQ ID NO: 676079 - DNA, 1265 bp, Homo sapiens
acatatacaaaaaggttcagaaaacattactgtaattttcctaatgttatttttatttggatgtcaacagctgaaaataataaaagaaaacactgaactacaacaactcttttgatttataattagtttcttatctaatacaggtgtgcctcatttttataattgataaaattctgaagttatgtgtatgccaatttttcaaacatcaaaccctaaatgtaaaaaacgaaaagtccaataattcacttttaagcaagaaattttcctgtaattggctgggtgtggtggctcacgcctgtaatcccagcactttgggaggccgaggcaggtggatcacctgaggtcaggagttcaagaccagcctgaccaacatggagaaaccccatctctactaaaaatacaaaattagccgggtgtggtggcacatgcctgtaatcccagctacttgggaggctgaggcaggagaatcccttgaactcgggaggcaaaggttgcggtgagccgagatcgtgccattgcactccagcctgggcaacaagagcgaaactccatctcaaaaaaaaaaaaaaaaaaagaaattttcctgtaatacaattaaccactcctgtaaattatttgttggaaactaagaatgccttgtcttgattgaattagagagttttttcctgtactatctcattgggaagtagtaatggccaatatttattgactacttatgtcccatgcactgtaccaagtgcttttatttagataacattatttaatctcataacacctctttgaggtagctactactattgcccccattttacagacagaaagtaaagtttgccaaaggtcacccagctaggcaggtgcggaggcaggatttgaaccagtctgtctccaaaggctatgttactttaacatttgtctacaatatttagtaactctacaaagtgagcagatcaaactaaatataaaaacagtgaatctttgaggattaactgatttaccttaataaacccattaaacccagctagcaggaataataaacctaggtcttctttttttttttttttttttktttgtgtgtgtgtgtgtgagatggagtatcgctctgtcacctagactggagtgcagtggtgcaatcccagcccactgcaacccctgcctcccgggttcaagcgattctcctgcctcagcctcatgagtagctggggttacaggtgtgtgccaccatgcctggctaatttttgtatttttagtagagatcaggtttcacc

SEQ ID NO: 676080 - DNA, 1265 bp, Homo sapiens
acatatacaaaaaggttcagaaaacattactgtaattttcctaatgttatttttatttggatgtcaacagctgaaaataataaaagaaaacactgaactacaacaactcttttgatttataattagtttcttatctaatacaggtgtgcctcatttttataattgataaaattctgaagttatgtgtatgccaatttttcaaacatcaaaccctaaatgtaaaaaacgaaaagtccaataattcacttttaagcaagaaattttcctgtaattggctgggtgtggtggctcacgcctgtaatcccagcactttgggaggccgaggcaggtggatcacctgaggtcaggagttcaagaccagcctgaccaacatggagaaaccccatctctactaaaaatacaaaattagccgggtgtggtggcacatgcctgtaatcccagctacttgggaggctgaggcaggagaatcccttgaactcgggaggcaaaggttgcggtgagccgagatcgtgccattgcactccagcctgggcaacaagagcgaaactccatctcaaaaaaaaaaaaaaaaaaagaaattttcctgtaatacaattaaccactcctgtaaattatttgttggaaactaagaatgccttgtcttgattgaattagagagttttttcctgtactatctcattgggaagtagtaatggccaatatttattgactacttatgtcccatgcactgtaccaagtgcttttatttagataacattatttaatctcataacacctctttgaggtagctactactattgcccccattttacagacagaaagtaaagtttgccaaaggtcacccagctaggcaggtgcggaggcaggatttgaaccagtctgtctccaaaggctatgttactttaacatttgtctacaatatttagtaactctacaaagtgagcagatcaaactaaatataaaaacagtgaatctttgaggattaactgatttaccttaataaacccattaaacccagctagcaggaataataaacctaggtcttctttttttttttttttttttttktgtgtgtgtgtgtgtgagatggagtatcgctctgtcacctagactggagtgcagtggtgcaatcccagcccactgcaacccctgcctcccgggttcaagcgattctcctgcctcagcctcatgagtagctggggttacaggtgtgtgccaccatgcctggctaatttttgtatttttagtagagatcaggtttcacc

SEQ ID NO: 676081 - DNA, 1725 bp, Homo sapiens
cagcctgaccaacatgtagaaaccccatctctactaaaaatgcaaaattagccaggcgcggtggcgcatgcccataatcccagctactcgggaggctgaggcaggagaatcgcttgaacccggaaggcaaaggttgcggtgagccaagatcgcaccattgcactccagcctgggcaacaagagaaaaactccgtctcaaaaaaaaaaaatttatttaggaaaagttaacatacttaaaactttttggtcttattgctaatttggtaaaataataaaatgactgcttgttttgtttaaattaatatttctaagtgcatacttaaaagtttttggtcttattgctaatttagtaaaataatgactgttttgtttaaattaatatttctaagctcaattttaatggcacttaaactcttgattaatttcaaaataacacctgttcaaattcaatgcttaaaaaagtgaactactactcaagttcacacaatatatttgtgaggcatttagatgaaacatgtacgtgcttattttgaactatacagtctctcccacaaagaaaagcccgacatgagttagaaacagataacctagatgagggtcaaatcctacagcattccactggaaacactctgtaaaatgtgtgagcacaaatatacaagtacaacgttttcaactgtaagatgaggttaataatacatctcatatgggtgcagggagaacaggtacaaaacggtatcaaacactatacacagtggctgttggcatgtcactggcattcagtaaatgttgcttctcttccctcctcttcctttccccttcaataagattagttatttgaaggaaaaaaaaaaggcatcacttgcttactatttacttaagttaccctcaaagatctagcaacttaaaatcattttttaaaaagtccaataaccttttctttatgtaaactatagaggttcatcaaacatttaatatcatttaaacatttcacattattgaatataattattacattcattagagaggttgtaccaaacaacttgctctgccacagtattataagcaagcatgtgtaattctgatgcaagacaacaactttggcaagtcatttttattaaacacaggtaaatattaggtattaagttaccatttcataacagttgtagtgggggaaactgaggtttcctccatcatgactttcacagttgaggttctgttacaaaggtggcagctagaaaaaaaattagaagcttatggaatgttatatcatcatacactaatatgtatggtaccagctttctgcaattttctaaaaacctgtctagatgaaatagagatgtttyattatcaaatgaaggagctaggctaaaatcaggacccaagaacctcacctaagatattttacagagataaaaccattatctattcatttttcaaaatccccctttaatccaaattcttaatgtcaaatctcatcatttacaactataacatttaggttagttccccatgatatattcttaaaatgtattagtatctgggattgatttttcctaacactatgcttacacgagataaacataaaataaagtacttacaccactcccagcatatcgaacaataaataatagattcccctgacaggactttgatgacctggcaaagcccaagtactttcagctcaaatcatatgaaaccataaatcactctttattttatagaaca

SEQ ID NO: 676082 - DNA, 1725 bp, Homo sapiens
cagcctgaccaacatgtagaaaccccatctctactaaaaatgcaaaattagccaggcgcggtggcgcatgcccataatcccagctactcgggaggctgaggcaggagaatcgcttgaacccggaaggcaaaggttgcggtgagccaagatcgcaccattgcactccagcctgggcaacaagagaaaaactccgtctcaaaaaaaaaaaatttatttaggaaaagttaacatacttaaaactttttggtcttattgctaatttggtaaaataataaaatgactgcttgttttgtttaaattaatatttctaagtgcatacttaaaagtttttggtcttattgctaatttagtaaaataatgactgttttgtttaaattaatatttctaagctcaattttaatggcacttaaactcttgattaatttcaaaataacacctgttcaaattcaatgcttaaaaaagtgaactactactcaagttcacacaatatatttgtgaggcatttagatgaaacatgtacgtgcttattttgaactatacagtctctcccacaaagaaaagcccgacatgagttagaaacagataacctagatgagggtcaaatcctacagcattccactggaaacactctgtaaaatgtgtgagcacaaatatacaagtacaacgttttcaactgtaagatgaggttaataatacatctcatatgggtgcagggagaacaggtacaaaacggtatcaaacactatacacagtggctgttggcatgtcactggcattcagtaaatgttgcttctcttccctcctcttcctttccccttcaataagattagttatttgaaggaaaaaaaaaaggcatcacttgcttactatttacttaagttaccctcaaagatctagcaacttaaaatcattttttaaaaagtccaataaccttttctttatgtaaactatagaggttcatcaaacatttaatatcatttaaacatttcacattattgaatataattattacattcattagagaggttgtaccaaacaacttgctctgccacagtattataagcaagcatgtgtaattctgatgcaagacaacaactttggcaagtcatttttattaaacacaggtaaatattaggtattaagttaccatttcataacagttgtagtgggggaaactgaggtttcctccatcatgactttcacagttgaggttctgttacaaaggtggcagctagaaaaaaaattagaagcttatggaatgttatatcatcatacactaatatgtatggtaccagctttctgcaattttctaaaaacctgtctagatgaaatagagatgtttcattatcaaatgaaggagctaggctaaaatcaggacccaagaacctcacctaagatattttacagrgataaaaccattatctattcatttttcaaaatccccctttaatccaaattcttaatgtcaaatctcatcatttacaactataacatttaggttagttccccatgatatattcttaaaatgtattagtatctgggattgatttttcctaacactatgcttacacgagataaacataaaataaagtacttacaccactcccagcatatcgaacaataaataatagattcccctgacaggactttgatgacctggcaaagcccaagtactttcagctcaaatcatatgaaaccataaatcactctttattttatagaaca

SEQ ID NO: 676083 - DNA, 804 bp, Homo sapiens
cagttcccggaggccctggggccttctgccgcagtgactcaccagctgttcttagggaacatgactgtctggatgcatctggcttgcagcaggttgacagattcaaagtgaaaggtgctataagtgggttccaggatacagaccttcctaaaggcaccctggagaatcttcccaaggtgaagctttaaatgtacagtgtgtggtaagaggagtggcgaggaaagtttgttgtcttgcaagtatgctctgaccctgtataccccatgcccttgtctcccaccccacccccctccaccatgaaccagctgcactgagctctttctctgcctacaccctcaggcctctgctcttgctgttttctgtaacctagaagaatcttcccagagacctccaggaggctgggccattcttgtcattcaattgcaatgtcayctcctgagaaaggccctttctgactatatagtttggtagggggccacagagtggcttaagtaacagaaatgtattgcccacattctggaggctggaagtccaagttcaaggtgctggcagggttggtttcttctgaggtctcattcaacagagagaggtgccgtcttctctctgtgtcttcgtgtggtctcgcctctgtgcatgtctgtgtcctgatctcctctccttataagaacaacagtcttattcgattagtggtccatcctagtgacgctattttaatccaattacctctttaaaggcccagtctccaaatacagtcacattctggggtcctgggggttaggacttcaacacatgaattttggaagg

SEQ ID NO: 676084 - DNA, 941 bp, Homo sapiens
ggtatcagaattctgccagcctcactggctttgatagatatttgccagtgcctggttgggctgctttgattttgtgtttctgagttcctggtgaggagctggcttgcaggaaacacatcattaagaggagctgtcagaacaaactgctttgtggccccagattgcttgtaggtggcaggtgctgaagccttgggtccaggctctacctgagtgggtaaatgtttacygagtgccatcggggggtcctgactcaagtcacctctcttctcccacagtcccactgtggggcaggtgttctgtttcaaagaaaaaagggacttgttccgtaaaatggggacattgaaactttggcattttccttcctcattacgactttatatttgttatgaaaaggtctggctgtgaataacagagacccagataacagtagctgaaataaggtagaagtttatctcactctcttgtaacagtccagagggaggcagtgtagggctggcagggcagttctgctccacaaagtctccaggtggcctgttgcttccctgtgcatatcttccatttcccaaggtcacctcattgtccaagagggctgttacagctcctgccatcatggctgcattccagccatcaggaaggagaaaggacaaagacagatcactcacttgaaggactcttcccagaagttgcaggcatctcttccactcacatccctattggccagcattgagtcacatgaccactcctagctacaaagaaagctgagaaatgcagtctttattcctagtggccatgtgctcagccacaacgcatagctgctaggaatgtgagctctgtcactaagaaagaaagaaaaatggtcgctggtggagaactagcaggttgtttggaaagagtgatgatgctgtggaaaacattgccgaatggaatcagaggacctataa

SEQ ID NO: 676085 - DNA, 2096 bp, Homo sapiens
agaaagacgaagtagcccttccagcacacaggtacgcaaataatcaaatagacacaaataaccttaggagcatagaaggagtgaaatgtagtaaaatgattaggaagtgctgggttgtaattatgtactatctttcttttaaatataccttatttaattctgtttatataatttgatggttaatagtggttctgtttatcaactggttcacacaattcctaaaaatgtaacattaggctttcccaagccagcacaagtcagattcagcacattgagcaaggggacactggtttgattctaaaacaattgtatgattcctgggggcagggccccggcagcttagatcgaagtgctccccaggtgatgccaatatttagtcagggctgagaaccactaacctaaaccctcactactcaatgtgtggccccggaatctgctgcatcaacagaatttcaggcccaggcccagccccagccctgctgaaccagaatctccatttcagtaagaactccaggtgattcctgcgtagcaccaatgaggtaaaggactcagtggttcccaaacgccagtgtatgtgcacctgctggggcagagtccttgatgtgagttaaaatgcagattcctgggctcaccttgaggtccccactcagtggatctggggctccagggatccgtattggggtgtgatggggttccccgtgtgctctgaggcacttcctggtctgggaaagtgctggagagggttggattcaaacagatttatgggatggaagggaaaatctaacacaaggaagacgaattcttaaatctgcacctagtgagtgtcactaggtaaaggagaatgcaaggatactgggaagaatgcagaatgatttcggggccaggaggagctactgttaagggagacctcgtgcttggccactggggatgctcaggcgtgcatgtgcccaggtgtggatggaacagcatggggagtggagtggcatggacttgagagtcagggtcctggatttgtttcccacccatcactcacgagcagtttcctaatggctctgagctttggttcgttcttctgtgaaatggggattataatctttcccctcataggggttgttctgagaaaacaatgagatgatgcgtgtagacagccaggcactcagtaggctcagcccatggttgctgcgactgataggatctctctgcgcgtgcctgtgcacatgtggtcctcactatggtggtgcaagaagatcagtaggaggcgagcaagatgccacacgggctaaccccagaacttgatgctgagttcaagggcaaaccagaatgccaggggaagtggacagaaacctggcttttgttagaaatgctcctaactaaatagcactcctctgggagggtaaattagaaaggccaaagctacaacctgcaaaggacagaaagaacacaaaagcacattgttccacgatgctgggtggaggaacagagggaagtgggaggaaagactgctcctctgtgtctggaaggggaaaccactaagtgaagagtctgaaggagtctattttcttttctttagtcttttcagcaaagataagccacaaatagctggctggagcacttcccagctagacggctggctgataatgggatctggttaaagatacaggaggttgaaagcatgaagtccatggcgtctccaggttgctcaatgaattgggcagatcatcatgtggctttcacttttttttttttttttttttaaattgagacagagtcttgctctgtcactctggctggagtgcaacagcacaatcactgctcactgcagcctctgcctccctggactcaggtgatcctccccactcagcttttcaagtagctaggactacaggcctgcaccaccacgcctggctaatttttgagtgtgtgtgtgtgtgtgtgtgtgtgygcgcgcgcatatacgtatatgtatgtgtgtatatatatacacacacatatatgtacatatatgtatgtgcatatatataagtataaatgtgtgtgtacatatatgtgtgtatatacatatgtatatgtgtgtgtatatgtgtgtgtgtatatat

SEQ ID NO: 676086 - DNA, 615 bp, Homo sapiens
cctactaacaacacattcctaagctagtcttccaatgcaatgataactttctaaaagataatgaaagcccatagataaaagttatatgaacaaagcccggtatatagaaaagatagtgctcggccgggcgcggtggctcacgcctgtaatcccagcactttgggaggccgaggcgggcggatcaggaggtcaggagatcgagaccatcctggctaacacggtgaaaccccgtctctactaaaaatacaaaaaattagccgggcgtggtagcgggcgcctgtagtcccagctactcgrgaggctgaggcaggagaatggcgtgaacctgggaggcggagcttgcagtgagccgagatcgcgccactgcactccagcctgggcgacagagcgagactccgtctcaaaaaaaaaaaaaaaaaaagatagtgctcagctttggtttcttctcggttcttttggtcagtccggatcttgctcatcaacaattttaagttccattttttccttcagtttcatgtcctttgatactgaatcaattcaatttgatttaatgaacaacttcaacatgcaaagcaatatgtacttaagagaataaacgtgaagaagagacgattc

SEQ ID NO: 676087 - DNA, 1222 bp, Homo sapiens
tgttttaatgaccctctttagaacatacactcatgcatgcacacaggaagaaaaagtgcccgaaaagaaaactataaaattgttactggaattacaagtgattttttttggttatttttacctggctgtatttactaaaatttctacagaaaattaaaggtcattcttaaaagaattaatgtcacttgctgattttacacctccaagtgacagaaaaacaatgtttcatttaattaatgaaccttggaaaaaatgcttttcttactctacttttatactaaatttcacagctaattaaaaacaaatgttctcccttggcatataccaatttattgtgcaatatatgtagttggttttgagatctaaattacatctgcttctggaatcttcaaattattttcatcattaacatttgtatgatttttgtatatttggactgtaatattgcatactgttaattagtcatttcaaagtggtgcttttcttagacagttgatataagactgcttatctaaaaggctaaacaaaacaaaaactataaattgccagaatggaatgtccataaaatgcttccaaactggagctatttgctttgcatcttactgtccacactcttacccataacagagttccacatactccctgaataggagatgtttgccgaaacctttaagatatttggaaattcaaaagtaaagtagcagcctgaatcataaaaagagctgatgcataaacattacattttatttaaaataaagtgatgattttttwaaaaatttgcaaatgtgtgtgtttatatgatgtaatatatataagtggataagtaatatgtactcattgtagactttctaaaagatacagacagacaggaaaaagaaagcaacatgtatatgcacatactcatatctgagtgcatgagaaacatgccagaagtgaaaggcagccactttgggcttgagtgagggtggtgaagactttttcccctagatgattttgcaagggacttgtaaatgttatgtccaacatcgagatgtggaatccaggcccctgttttctctttcaccctcttcttcaggattcatgccaggtggaattctctgcatctctttgtagaagttcagcagggatactttattttaataccttaatgcttctttcaggtactgcctagttgtgtttattttgaactctctgttctttcaaaactggacatgtcaacgaa

SEQ ID NO: 676088 - DNA, 575 bp, Homo sapiens
ataacactagcaatagtattgaaccatatgaaactgttgatatccagccatttttgacctagaaaaatggcaatatcatacggatcaacccatactaatgtagattatatgagatcacgtcactttggatttatatcagaaaataacattaaaaggcaataaaaataaattcacctaaaataatctacattatttgacacttgcctttgaaaatccttcctaggcctctgaaatccatttgatctgagcaattgaacacgaccacatattttcccaaacaccttcccatgtcttttgtggtttctgttttgccagtgccagcaggtcctgcgggagcacctcccatgttcatgcccaaggcctgagctaacgtgatatagcatctgcaaatgttcatccaataaagcattgtgagtatgggatgacacgttacaggatggcgcaagcaaaaatccaatgtgattggaatgggcctatttattttagagtctgagtagcccacataaaagaagtgaacaaacaaggttagggtacttgatattcattaaaagtactacagtgagyccaaagatttc

SEQ ID NO: 676089 - DNA, 1936 bp, Homo sapiens
acaaaaacaactttgtcagctaaatgtcacttccattcagagactgaatgacacacaggaaatactaaaaactacaacattctggtaataaaatgaattgacatcagcatactacaggtaaaaagagagagagagagacagaaagagagagacagagagaaatagagagacagagacagaagtcgccaagaaaatggtacctgccatctgtgcagtactgtcacatgtcaaaattatgttatttctgttttgactttttttacaatggtctcaccaggtctccatcattacagccgtggaaccatgcaaagccagacccaacactagatccgctggctctcagggaagagttccacaagcgtccctgacacaggtcttgagccctycctgtgctgaaagggaaaggcttctagtcccgctcagccctctaatctgggattcctcgccctttgagagagtagtgctgttaggatagagggaaaggaagctaaaggagagaagatttcagctgttcataccacaaaaaaatgtgggggacagataactcggtgagatgatgaatgtgttatctggcttggttgtagcaaccatttcactacatatttaaaaatatcatgttatacaccttaagtatacacaatttcttttaaggtgcaggagccctcaggagggaaaatggaaagttttggaatctattattcttagataatctcactttcagaaattctttcagtatgtagaagtaaacattatttgttccctttccaacaatacctataaaattaaccccaaacatatgacatggctgggggcagggaggggaaacatgagaaataatttcattttcttgttgaaagactttctgctaccaaaacaatgcaattagaacatatcattctttatttcaaatctttaccagtctatttagtggtaattgaaaagtttatgtttgtaagttttaaggtttatgtaggacagatttccaacaacatcctaatttgaaattgtatttttagatttaaagttattccccccagaaactactctgcttaaagtgttatgaatacctttgaagtagctgaagagcctgctgagaagataagattttcccaaaactactgttcataaatgcctgtatttgtacctaaaataaaatattaatatttaaatgatttttggtgttaaagagattggttttgtttaacaacagttaatgcttttcctacagaattaagatagcctcaagcctcaaacacatctaccatctaagcatcaagaactgcatcgtccagtatgatggactttggccacatgtggctactgagcacttgaaatgtcactacttagaagcaagatgtctataaatgtaaaatacatgccagatttcaaagacttagtacaaaaaagagaatgcaatatatctcattaaagatttcatattaatgacattaaaatatttaacatattgggttgaatagagtctttattaaaattaatttcacctgcttctttttacttttattcaatggctactagaaaaattaaagtgacatgtggtttgcctttgcaggtcattaccaattggatatttctgatctagagaatttacaaaaggagtgaaggtcccttacaagcatttttctttgggatatatagaacttcaggtagagtagtgtagtgacgctatagacaccagggccagcagatgtcattttctgacattgctgctctcagaaacctctttgccactgctaaggacgtacaagaagtagaaaatgttctttcaagagtcccaccattggcccagagtggtggctcatgcctgtaatctcagccttttgtggggggagatgggaggatagcttgaggacagcagttcaagaccagcttgggcaacatagcaagaacccgtctctataaaaataaaaataaataa

SEQ ID NO: 676090 - DNA, 1936 bp, Homo sapiens
acaaaaacaactttgtcagctaaatgtcacttccattcagagactgaatgacacacaggaaatactaaaaactacaacattctggtaataaaatgaattgacatcagcatactacaggtaaaaagagagagagagagacagaaagagagagacagagagaaatagagagacagagacagaagtcgccaagaaaatggtacctgccatctgtgcagtactgtcacatgtcaaaattatgttatttctgttttgactttttttacaatggtctcaccaggtctccatcattacagccgtggaaccatgcaaagccagacccaacactagatccgctggctctcagggaagagttccacaagcgtccctgacacaggtcttgagccctccctgtgctgaaagggaaaggcttctagtcccgctcagccctctaatctgggattcctcgccctttgagagagtagtgctgttrggatagagggaaaggaagctaaaggagagaagatttcagctgttcataccacaaaaaaatgtgggggacagataactcggtgagatgatgaatgtgttatctggcttggttgtagcaaccatttcactacatatttaaaaatatcatgttatacaccttaagtatacacaatttcttttaaggtgcaggagccctcaggagggaaaatggaaagttttggaatctattattcttagataatctcactttcagaaattctttcagtatgtagaagtaaacattatttgttccctttccaacaatacctataaaattaaccccaaacatatgacatggctgggggcagggaggggaaacatgagaaataatttcattttcttgttgaaagactttctgctaccaaaacaatgcaattagaacatatcattctttatttcaaatctttaccagtctatttagtggtaattgaaaagtttatgtttgtaagttttaaggtttatgtaggacagatttccaacaacatcctaatttgaaattgtatttttagatttaaagttattccccccagaaactactctgcttaaagtgttatgaatacctttgaagtagctgaagagcctgctgagaagataagattttcccaaaactactgttcataaatgcctgtatttgtacctaaaataaaatattaatatttaaatgatttttggtgttaaagagattggttttgtttaacaacagttaatgcttttcctacagaattaagatagcctcaagcctcaaacacatctaccatctaagcatcaagaactgcatcgtccagtatgatggactttggccacatgtggctactgagcacttgaaatgtcactacttagaagcaagatgtctataaatgtaaaatacatgccagatttcaaagacttagtacaaaaaagagaatgcaatatatctcattaaagatttcatattaatgacattaaaatatttaacatattgggttgaatagagtctttattaaaattaatttcacctgcttctttttacttttattcaatggctactagaaaaattaaagtgacatgtggtttgcctttgcaggtcattaccaattggatatttctgatctagagaatttacaaaaggagtgaaggtcccttacaagcatttttctttgggatatatagaacttcaggtagagtagtgtagtgacgctatagacaccagggccagcagatgtcattttctgacattgctgctctcagaaacctctttgccactgctaaggacgtacaagaagtagaaaatgttctttcaagagtcccaccattggcccagagtggtggctcatgcctgtaatctcagccttttgtggggggagatgggaggatagcttgaggacagcagttcaagaccagcttgggcaacatagcaagaacccgtctctataaaaataaaaataaataa

SEQ ID NO: 676091 - DNA, 1936 bp, Homo sapiens
acaaaaacaactttgtcagctaaatgtcacttccattcagagactgaatgacacacaggaaatactaaaaactacaacattctggtaataaaatgaattgacatcagcatactacaggtaaaaagagagagagagagacagaaagagagagacagagagaaatagagagacagagacagaagtcgccaagaaaatggtacctgccatctgtgcagtactgtcacatgtcaaaattatgttatttctgttttgactttttttacaatggtctcaccaggtctccatcattacagccgtggaaccatgcaaagccagacccaacactagatccgctggctctcagggaagagttccacaagcgtccctgacacaggtcttgagccctccctgtgctgaaagggaaaggcttctagtcccgctcagccctctaatctgggattcctcgccctttgagagagtagtgctgttaggatagagggaaaggaagctaaaggagagaagatttcagctgttcataccacaaaaaaatgtgggggacagataactcggtgagatgatgaatgtgttatctggcttgrttgtagcaaccatttcactacatatttaaaaatatcatgttatacaccttaagtatacacaatttcttttaaggtgcaggagccctcaggagggaaaatggaaagttttggaatctattattcttagataatctcactttcagaaattctttcagtatgtagaagtaaacattatttgttccctttccaacaatacctataaaattaaccccaaacatatgacatggctgggggcagggaggggaaacatgagaaataatttcattttcttgttgaaagactttctgctaccaaaacaatgcaattagaacatatcattctttatttcaaatctttaccagtctatttagtggtaattgaaaagtttatgtttgtaagttttaaggtttatgtaggacagatttccaacaacatcctaatttgaaattgtatttttagatttaaagttattccccccagaaactactctgcttaaagtgttatgaatacctttgaagtagctgaagagcctgctgagaagataagattttcccaaaactactgttcataaatgcctgtatttgtacctaaaataaaatattaatatttaaatgatttttggtgttaaagagattggttttgtttaacaacagttaatgcttttcctacagaattaagatagcctcaagcctcaaacacatctaccatctaagcatcaagaactgcatcgtccagtatgatggactttggccacatgtggctactgagcacttgaaatgtcactacttagaagcaagatgtctataaatgtaaaatacatgccagatttcaaagacttagtacaaaaaagagaatgcaatatatctcattaaagatttcatattaatgacattaaaatatttaacatattgggttgaatagagtctttattaaaattaatttcacctgcttctttttacttttattcaatggctactagaaaaattaaagtgacatgtggtttgcctttgcaggtcattaccaattggatatttctgatctagagaatttacaaaaggagtgaaggtcccttacaagcatttttctttgggatatatagaacttcaggtagagtagtgtagtgacgctatagacaccagggccagcagatgtcattttctgacattgctgctctcagaaacctctttgccactgctaaggacgtacaagaagtagaaaatgttctttcaagagtcccaccattggcccagagtggtggctcatgcctgtaatctcagccttttgtggggggagatgggaggatagcttgaggacagcagttcaagaccagcttgggcaacatagcaagaacccgtctctataaaaataaaaataaataa

SEQ ID NO: 676092 - DNA, 1936 bp, Homo sapiens
acaaaaacaactttgtcagctaaatgtcacttccattcagagactgaatgacacacaggaaatactaaaaactacaacattctggtaataaaatgaattgacatcagcatactacaggtaaaaagagagagagagagacagaaagagagagacagagagaaatagagagacagagacagaagtcgccaagaaaatggtacctgccatctgtgcagtactgtcacatgtcaaaattatgttatttctgttttgactttttttacaatggtctcaccaggtctccatcattacagccgtggaaccatgcaaagccagacccaacactagatccgctggctctcagggaagagttccacaagcgtccctgacacaggtcttgagccctccctgtgctgaaagggaaaggcttctagtcccgctcagccctctaatctgggattcctcgccctttgagagagtagtgctgttaggatagagggaaaggaagctaaaggagagaagatttcagctgttcataccacaaaaaaatgtgggggacagataactcggtgagatgatgaatgtgttatctggcttggttgtagcaaccatttcactacatatttaaaaatatcatgttatacaccttaagtatacacaatttcttttaaggtgcaggagccctcaggagggaaaatggaaagttttggaatctattattcttagataatctcactttcagaaattctttcagtatgtagaagtaaacattatttgttccctttccaacaatacctataaaattaaccccaaacatatgacatggctgggggcagggaggggaaacatgagaaataatttcattttcttgttgaaagactttctgctaccaaaacaatgcaattagaacatatcattctttatttcaaatctttaccagtctatttagtggtaattgaaaagtttatgtttgtaagttttaaggtttatgtaggacagatttccaacaacatcctaatttgaaattgtatttttagatttaaagttattccccccagaaactactctgcttaaagtgttatgaatacctttgaagtagctgaagagcctgctgagaagataagattttcccaaaactactgttcataaatgcctgtatttgtacctaaaataaaatattaatatttaaatgatttttggtgttaaagagattggttttgtttaacaacagttaatgcttttcctacagaattaagatagcctcaagcctcaaacacatctaccatctaagcatcaagaactgcatcgtccagtatgatggactttggccacatgtggctactgagcacttgaaatgtcactacttagaagcaagatgtctataaatgtaaaatacatgccagatttcaaagacttagtacaaaaaagagaatgcaatatatctcattaaagatttcatattaatgacattaaaatatttaacatattgggttgaatagagtctttattaaaattaatttcacctgcttctttttacttttattcaatggctactagaaaaattaaagtgacatgtggtttgcctttgcaggtcattaccaattggatatttctgatctagagaatttacaaaaggagtgaaggtcccttacaagcatttttctttgggatatatagaacttcaggtagagtagtgtrgtgacgctatagacaccagggccagcagatgtcattttctgacattgctgctctcagaaacctctttgccactgctaaggacgtacaagaagtagaaaatgttctttcaagagtcccaccattggcccagagtggtggctcatgcctgtaatctcagccttttgtggggggagatgggaggatagcttgaggacagcagttcaagaccagcttgggcaacatagcaagaacccgtctctataaaaataaaaataaataa

SEQ ID NO: 676093 - DNA, 1936 bp, Homo sapiens
acaaaaacaactttgtcagctaaatgtcacttccattcagagactgaatgacacacaggaaatactaaaaactacaacattctggtaataaaatgaattgacatcagcatactacaggtaaaaagagagagagagagacagaaagagagagacagagagaaatagagagacagagacagaagtcgccaagaaaatggtacctgccatctgtgcagtactgtcacatgtcaaaattatgttatttctgttttgactttttttacaatggtctcaccaggtctccatcattacagccgtggaaccatgcaaagccagacccaacactagatccgctggctctcagggaagagttccacaagcgtccctgacacaggtcttgagccctccctgtgctgaaagggaaaggcttctagtcccgctcagccctctaatctgggattcctcgccctttgagagagtagtgctgttaggatagagggaaaggaagctaaaggagagaagatttcagctgttcataccacaaaaaaatgtgggggacagataactcggtgagatgatgaatgtgttatctggcttggttgtagcaaccatttcactacatatttaaaaatatcatgttatacaccttaagtatacacaatttcttttaaggtgcaggagccctcaggagggaaaatggaaagttttggaatctattattcttagataatctcactttcagaaattctttcagtatgtagaagtaaacattatttgttccctttccaacaatacctataaaattaaccccaaacatatgacatggctgggggcagggaggggaaacatgagaaataatttcattttcttgttgaaagactttctgctaccaaaacaatgcaattagaacatatcattctttatttcaaatctttaccagtctatttagtggtaattgaaaagtttatgtttgtaagttttaaggtttatgtaggacagatttccaacaacatcctaatttgaaattgtatttttagatttaaagttattccccccagaaactactctgcttaaagtgttatgaatacctttgaagtagctgaagagcctgctgagaagataagattttcccaaaactactgttcataaatgcctgtatttgtacctaaaataaaatattaatatttaaatgatttttggtgttaaagagattggttttgtttaacaacagttaatgcttttcctacagaattaagatagcctcaagcctcaaacacatctaccatctaagcatcaagaactgcatcgtccagtatgatggactttggccacatgtggctactgagcacttgaaatgtcactacttagaagcaagatgtctataaatgtaaaatacatgccagatttcaaagacttagtacaaaaaagagaatgcaatatatctcattaaagatttcatattaatgacattaaaatatttaacatattgggttgaatagagtctttattaaaattaatttcacctgcttctttttacttttattcaatggctactagaaaaattaaagtgacatgtggtttgcctttgcaggtcattaccaattggatatttctgatctagagaatttacaaaaggagtgaaggtcccttacaagcatttttctttgggatatatagaacttcaggtagagtagtgtagtgacgctataracaccagggccagcagatgtcattttctgacattgctgctctcagaaacctctttgccactgctaaggacgtacaagaagtagaaaatgttctttcaagagtcccaccattggcccagagtggtggctcatgcctgtaatctcagccttttgtggggggagatgggaggatagcttgaggacagcagttcaagaccagcttgggcaacatagcaagaacccgtctctataaaaataaaaataaataa

SEQ ID NO: 676094 - DNA, 1936 bp, Homo sapiens
acaaaaacaactttgtcagctaaatgtcacttccattcagagactgaatgacacacaggaaatactaaaaactacaacattctggtaataaaatgaattgacatcagcatactacaggtaaaaagagagagagagagacagaaagagagagacagagagaaatagagagacagagacagaagtcgccaagaaaatggtacctgccatctgtgcagtactgtcacatgtcaaaattatgttatttctgttttgactttttttacaatggtctcaccaggtctccatcattacagccgtggaaccatgcaaagccagacccaacactagatccgctggctctcagggaagagttccacaagcgtccctgacacaggtcttgagccctccctgtgctgaaagggaaaggcttctagtcccgctcagccctctaatctgggattcctcgccctttgagagagtagtgctgttaggatagagggaaaggaagctaaaggagagaagatttcagctgttcataccacaaaaaaatgtgggggacagataactcggtgagatgatgaatgtgttatctggcttggttgtagcaaccatttcactacatatttaaaaatatcatgttatacaccttaagtatacacaatttcttttaaggtgcaggagccctcaggagggaaaatggaaagttttggaatctattattcttagataatctcactttcagaaattctttcagtatgtagaagtaaacattatttgttccctttccaacaatacctataaaattaaccccaaacatatgacatggctgggggcagggaggggaaacatgagaaataatttcattttcttgttgaaagactttctgctaccaaaacaatgcaattagaacatatcattctttatttcaaatctttaccagtctatttagtggtaattgaaaagtttatgtttgtaagttttaaggtttatgtaggacagatttccaacaacatcctaatttgaaattgtatttttagatttaaagttattccccccagaaactactctgcttaaagtgttatgaatacctttgaagtagctgaagagcctgctgagaagataagattttcccaaaactactgttcataaatgcctgtatttgtacctaaaataaaatattaatatttaaatgatttttggtgttaaagagattggttttgtttaacaacagttaatgcttttcctacagaattaagatagcctcaagcctcaaacacatctaccatctaagcatcaagaactgcatcgtccagtatgatggactttggccacatgtggctactgagcacttgaaatgtcactacttagaagcaagatgtctataaatgtaaaatacatgccagatttcaaagacttagtacaaaaaagagaatgcaatatatctcattaaagatttcatattaatgacattaaaatatttaacatattgggttgaatagagtctttattaaaattaatttcacctgcttctttttacttttattcaatggctactagaaaaattaaagtgacatgtggtttgcctttgcaggtcattaccaattggatatttctgatctagagaatttacaaaaggagtgaaggtcccttacaagcatttttctttgggatatatagaacttcaggtagagtagtgtagtgacgctatagacaccagggccagcagatgtcattttctgacattgctgctctcagaaacctctttgccactgctaaggacgtacaagaagtagaaaatgttctttcaagagtcccaccattggcccagagtggtggctcatgcctgtaatctcagccttttgtggggggagatgggaggatagcttgaggmcagcagttcaagaccagcttgggcaacatagcaagaacccgtctctataaaaataaaaataaataa

SEQ ID NO: 676095 - DNA, 683 bp, Homo sapiens
tctcaagattactaacaaatgttcctgtattttcttctgctacctttatagttacaatttatgcatctggctgttaatttgttgcatgtagcttcatggttatatcttacaaggcaagaaccctgtcatgctcttcataaaaagaaattggctgacttactctacttattatatgctttcttaaaattacactggtattttatggattaatttagtaagaattgagaaatatacaatatagaaacatagtataggttttcacttactcagayttctattggtgacatttaataaggattcataagtttttgtgtaaatctttcacatttgtcattatatttgttaggtattttacagttttgtggtcatggaatcctatttggtattacattgtctaatttattattgctgatgtttaagtcttttgactttttaatgttgattttatattagacgcctttttagcaatctaagttctaataatttgtcacttgatttccttagattttctaaattatcatatcatcttcaaatatctccttttcacctctgttattgcactggcctttagcataatgttgaatggcagtgatgattgtgatatcttttttccaggtttgacagtaacgctatagtgtttggtagacactttgtatcgacatgttatcttagatgtatgtgtc

SEQ ID NO: 676096 - DNA, 683 bp, Homo sapiens
tctcaagattactaacaaatgttcctgtattttcttctgctacctttatagttacaatttatgcatctggctgttaatttgttgcatgtagcttcatggttatatcttacaaggcaagaaccctgtcatgctcttcataaaaagaaattggctgacttactctacttattatatgctttcttaaaattacactggtattttatggattaatttagtaagaattgagaaatatacaatatagaaacatagtataggttttcacttactcagacttctattggtgacatttaataaggattcataagtttttgtgtaaatctttcacatttgtcattatatttgttaggtattttacagttttgtggtcatggaatcctatttggtattacattgtctaatttattattgctgatgtttaagtcttttractttttaatgttgattttatattagacgcctttttagcaatctaagttctaataatttgtcacttgatttccttagattttctaaattatcatatcatcttcaaatatctccttttcacctctgttattgcactggcctttagcataatgttgaatggcagtgatgattgtgatatcttttttccaggtttgacagtaacgctatagtgtttggtagacactttgtatcgacatgttatcttagatgtatgtgtc

SEQ ID NO: 676097 - DNA, 683 bp, Homo sapiens
tctcaagattactaacaaatgttcctgtattttcttctgctacctttatagttacaatttatgcatctggctgttaatttgttgcatgtagcttcatggttatatcttacaaggcaagaaccctgtcatgctcttcataaaaagaaattggctgacttactctacttattatatgctttcttaaaattacactggtattttatggattaatttagtaagaattgagaaatatacaatatagaaacatagtataggttttcacttactcagacttctattggtgacatttaataaggattcataagtttttgtgtaaatctttcacatttgtcattatatttgttaggtattttacagttttgtggtcatggaatcctatttggtattacattgtctaatttattattgctgatgtttaagtcttttgactttttaatgttgattttatattagacgcctttttagcaatctaagttctaataatttgtcacttgatttycttagattttctaaattatcatatcatcttcaaatatctccttttcacctctgttattgcactggcctttagcataatgttgaatggcagtgatgattgtgatatcttttttccaggtttgacagtaacgctatagtgtttggtagacactttgtatcgacatgttatcttagatgtatgtgtc

SEQ ID NO: 676098 - DNA, 640 bp, Homo sapiens
ctcttatttcaaacaattttagtgtcacacacacaccttccatagaaaatcaattgatattttaacttacatttattcttagaattagctatgcttgattatagaaacattattttggttttggaaagcatcaataataaagccctcccttttctccatgaaattgatactggctctctgaagcatgaagattattcttaaataatattcctgtgagtttaaataaatttcatgataatgtggcttaataaaccatgatttccccttctagaaaacacaattcctcctggagggtgaataatttagcattgcttaacacacattctcactttaaaaaggaaaaactgagtacacattcactgtgcatcttatttcagtctttcaacaatgagagagaaaacatgatgatggatttaactggccagcactacaaatccacaggattcaaaatgtaccataacyaagaaagtcacaagccaggaggcttagcaaatccagtgggttccatgactcttcaaatattttcagagagcttatcgcttaagctcataaccctgatatgtaaaatagaagaaaaattcttggcccttctttccagagcccattcaaaagtgtggagaagagtagtctagaagttacg

SEQ ID NO: 676099 - DNA, 622 bp, Homo sapiens
tataaagttggaattcccacctaagttcagtgtattatgcctgttctcttttccatctccactttacttttgattgtctatcatattctgtagattcaaatgagttgagaaaagtactggtttaaggaaagaatcatttgttcttgtccacacctcatatcttctcttttcccgtacccaaatgctctgatgccccatgtatggttataaggcatatgcttcttagaagtcaatgtggttacaagttaagaatgaaatgacacrtggctaaccctgcttttgcattttgccttcaacatatccattctctccttctcctttgtcagtaaacctcatcagacaaaaatatttccaatctcagaaaattaaatcagtcaagataatgctttctctttccagaaactatgaaatgtgcccatctctcttgctctgtgacttagttatagacaataagagtaacaggtaagtctgctgaagaactgtggggctggctttaccttccctaatgaagggaaccttgatatacaccccactgacttctcccttctcgttttgatacctatagttgtagtcaccatcttgtgatcataaagaaaggccaagagaaaaatagatgtaaaga

SEQ ID NO: 676100 - DNA, 895 bp, Homo sapiens
agcctcccgagtagctgggattacaggtatgcatcaccatgcctggctaattttgtatttttagtagagatggggtttctccatgttggtcaggctagtctcgaactcctgacctcaggtgatctgcccgcctcggcctcccaaattgctgggattacaggcgtgagccatggcacccagcctttttttttttttttttttttttttttgagatggagtcttgctctgtcgcccaggctgaagtatgcagtggtgtgatctcggctcactgcaacctgtgcctcccaggttcaagcaattctcctgcctcagcctccccagtagctggtactataggcacaagccaccatgcctggctaatttttgtatttttagtagagatgaggtttcaccatgttggccagactgggctcgaactcctgacctcaggtgatccacctgcctcagcctcccaaagtgctgggattataggtatgagccactgcatcctgctggccattttttttttcttttttttttaagatggagtctcatcagttttccattggtctacagaccattctgccttggatgcctttgcttcctgctgctcgckgagaagcttcatcaggaggcctgttcgtgacatgagcttggcacaggtcccttgcacatgtgtttctgaacattccattttcaaggtccagataacatgagacatgaaccttctcacatcctcattggggatgagggaccatagctgctgggttagctgaatttcaaactgatcacctggggacgagagcaatgggtaattgaagcttttgggcttgggggacaggtcagtgcccatgctgttgtattcccattttgtctcagtttgtttaacagtttgctctaagttgaatgcagtccc

SEQ ID NO: 676101 - DNA, 1172 bp, Homo sapiens
gggcacgcggtacattatttgaatgaataactttcttatcctggcctttctctaactctctcacttctacttgggtcacccgccccctccccaggagtcttataaaacaaccaggggaagaggaaacagaagtggctcatatgggtaaaagccctcgtcctgcaaatcagtgacacaagggagttagtccatccaatgtacagttttaaaaagattgctacgtagaaaaataataggatagggtaagaggagaacccagctaggagcttcagtgggatccagggtgttgatatgatggtggtctggatttaagtgatggcagtagggataaaaagaagtaaaaattccagcctgggcaacataatgagaccctgtctctacaaaaaaaaaaaaaaaaagttttttttttttttttaattatccgtgtgattgtcactcctgtagtcccagctactggggcggggtttgggggttggctgacgtgtgaggctccaccaggaggtggaggctgcagtgagtcgtgatcgtgccactgcactctagcctgggcgacagagggagacccagtctcaaaaaaataaatagaagtaaaaaatatttgaggtagcttttggagaataaacgggatttgctgatggattgaacaataagggatggagagggagaaatcaagaggaaatcactgaatggttggtagtgctatgyattaaaatgcaaaaactgccgggcgcggtggctcacgcctgtaatcccagcactttgggaggtcgaggcaggtggatcactaggtcaggagttcaagaccagcctggccaacatggtgaaaccctgtctctaataaaaatgcagcaattagcctggcatggtggtgcacgtctgtagtcccagctactcgggaggctgagggaggagaatcgcttgaacttgggaagcagaggtttcagtgagccaagatcatgccactgcactctagcttgggcgacagtcagtttcaaaaataaataaataaaataaataataagtgtgcagtactgggcacagtatatggtagttatgatcatcctattagacactgggatggtagcaaccggttgagaaaaataacctttattagttgcttaatcttttattaatactttaggggcacagccatacatttcacagagaatctg

SEQ ID NO: 676102 - DNA, 3450 bp, Homo sapiens
aaaccattttgatttcagttgaaactaatgacagcaagcagtttatggtcaggttcacaaagtacatttctacccctgctgtggggaagggatcacaagaaaatagcttccagtaggttacgactcatctagctcccaaagtggggactcctccaccagagcctgcattttccactttttgccacactcagagaaggacttcgacctcaacatgtgatccagataaagagcatcctcctacacaacctcaaggtaataataacattttattggtatcttgtacatccgttggcattggcatttatatttttattcctatatcttcttatgtcaaagagagcatgctatacatcctgttcccaccttgcttttctcttaatgatttatttgaaaatggtttgtcattcatttctacagctgaataatagtttgctggatggctataccccatgtatataacccgagacagggtgaccttttgtggcccactgcctggcacttggcttggtctaacaaacagaaccttcatgcaccaagctggtcatgccaccaagtcagcgcagtcattgggagtgagtggtatgtgagtcctggctccctgaatgccctgatggaccccatggtccagccacactggctgggtccctgtaagcttagcctaccttgcctgagagccaaggaaatcccatcttctgcctcaccatcctcaaccacatttcagcaccaatgcaagatccagtacagctgctggaatccttgtttcatccagggtggacatggcagaggagtcagcaaccattttgtgccccagtgttcttcagataagttcccactcatgacaaactctagcccatactgcaactgaggtcccaaacatgcaattgcattgtttcccacggtgggctgggtcacttgctactgcaacaaggcagaggaaggacagcatcccagcatttacagacacattgcccagcatggggtctggctctgccagaatccaccgaaaggtatgagccctttatgaactagctgcactctgccctttggtcataagataaactcatatcttgacccaaggcagagccctgacatcagcatcagatcaaacttttgtctcaccacagagcaagccctgaccctggtcagactcaactctgacccttgcacggcctgagccctgacttgggccacggactgcaacccgaccctcagactcacgctgagtcatgacccagatcacagacacagctccaagccccagacttatcctgagccctaaccctgggcccagactcagccctcaccttggctgtgactgagcccagctggctatcttcaaatgcggtcacacaggaggtacttggcacagtaggcagatggctctgtgtgagccctgcctcggctctggatggtgcttatgatctactgcctatcacgagcatctagtatcttgccatggggaagaaatctcagtcccacagacctgagttcaaattctgccactgtttagctgggtgactttgggcaaattacttctagtccatcaaattagatgccttctgaagaaaccatttataaaatgggcacaaaatacctgctgtcatgatggtcatgattaaattatatgattgtaaagtacccagctcacagtagatagagttcatccctttccccagtaggcatcttgtcagctgcagctgaattattggtataggaacaagccctccagagctgtgctgtcctatactgtggccaccaaccatatggggctattttaaacaattgaaatgtggctggtacagccgggcacagtggctcatgcctgtaatcccagcactgtgggaggctaaggtgggtggatcacttgaggttaggagcttaagaccagtctggtcaacacggtgaaatgccgtctctactaaaaatacaaaaattagccaggcgtggtggtgcacgccagtaatcccagctactcaggaggctgaggcaggagaatcacctgaacctgggaggtgaaggttgcagtcagctgagactgttttgtgccactatacccagcctgggcaacagagccaaactgtccccaaaaaaaaagcaaataaatcaaccaaccagaaaaatgaaatgtggctggtgcaaactgagctctgctataaggaacacaccatatttcaaagacaaaaaaattcagaataagaaaaagaatgtaaaatgtatcattaataagtttttaatgattatgcatttaaataatatttgaaatatattagatcaaataaaatatactactagaattaattgcacctggttcctatttttaaaaatatagctactagaaaattttaaattacatatatggtttgcaggtccagaggtctgggaagagcagttcatgggtaataaagacagttaaaacagaaacaagagcaacagtaaaattaatacctaactaagtrtttattgtgtgctgggcacggcactaaacacttaagtcctcacagcaacctctgaaggtaggccctactactgtccccattattgagatggcacaactgaggcaccaagacgtaaagttatatggtccaaggtaaagagccagtaaaaggcagaaataggatttgagtccacaacacctggatccagaacctatgtcctagaggaaatgacacattcattaaaggctgcctcagtaaagtgcttcctacaaatgagtcacccacagggaagaaacatgccctggatcaattaaatgctgtcattgagacatgggcagcagcgaaccccactctccaagctcttacctacccacattgctaggcacttcactgcccatcagactggttggcactcaacagggtctttatggaggtgggggagttctctcatttaatcttgtgcatttctcagacatatgccaagttatctttatctggagaatcaaagaggacagctccttcaaacctttttagctttctccattagcaagaggtacctctgagagcaaaaatgataaactcaattgttcaaaaagcaagttccgttcttcaatttgtgtgccagtcataaacacagcaacttccatttgagcagaaatcccacatttcagcagaaatacttaatgtgtcatttctcctgcatccatcttcttcaaagcacttactttagaaagtagagaaggaaaaacaaactctaataacctgtactttgaatgggagatgggaactttatgataaagaactcaaaatgctttattgacatggctgcacacatcccccttcagctcctgaaactgctcctgagatgagaaaactttcctaggagccttgcaactcgacttcacacccagctaggctctgggggtaggatgcacactcactccagctcctgatctgttttgatcagccagaagtcctagttcaagtctaaacccagaatataaccatctttttt

SEQ ID NO: 676103 - DNA, 1475 bp, Homo sapiens
actgtgctgacctggagggaggaagacccttccaaacccctatccagactcctataagactcagatttttaaaacaaagcaaaacacaaaagcaactctttgcttgcggatgactcaacttcctttttggkaggctcaactctgcttcccaggaatcagcagtgattagtgatagaaagagtagccctcatgaccccaggtgaccatcaggacgctagggcaggaaggagcctgttgattgagtgctgacctgcaaaattaccagcacaggtgtccaacaatttcattcttgagaagccagagttgagtttctggggttgctttggagggttcaggacatgctgcagggtaataggaaggacatggggtgagaaaaaggttcctgccaagttgctgaaagacacatgatagctcaacagggaaccaagagtcaggtttaatattgtttctgcaccacacttaataattgaggtcaatggtttatcaagtcctcactgagggccacagagaggacaggcttctaagtgcagagaggcagcagtaaaggctgaggctgcgggaaacataatcagagtttaaaacactaacacttacctgctggtatggttgagaggcattccaataacccttggcccctgacttttcactgtgccaaaatctaaactattacactaggtcttgaataacttttgaaaatgtgtgctttcccacctagttaaggcaaagttgcctcaaagacaaatatcacattagcacagatgctcttataagagcaattaccatcaatggtcactgcctggaagttggacctggaaatgacatgctggatggtcatagtcttgttagatgaggtgtgcgtgtgatgataagtgggaaacagcttgatttaagggacactttagtccatggccagcacagtaatgatcttgggaagcctgaagctatgtcttctgttgagcaataaggtacagggcgcagaaggggcaaaataagtcagggagtccagttaacatgtgagatggaaacttaaggatagggacagagcacgcacaaagcccagggacacagctttttgctggacattttgcctgtactaactggtaaattagactgcacaacaggaaagaagcttgtgatagcaaaaggggtcgaaaacgggaaggacactcagagggcaggaactatgacggggctctgcggccttgtgggcagcagggagagtgtatttttggcctgcgggtctcgtgagctggaagaaatcaggaaagggaagctgagcatttaatcctacatagatcacaggctaatcgtgcccatttagtgtttgaaagtgagaagttgtcaaggctttgtgacagccttgaaaccgcaggcattagaggatagaaatcctgagcccagagggaggcaggcactcccatctgcccaatttggtcttcaacagcttccaactcttcaatattcccaagcagaat

SEQ ID NO: 676104 - DNA, 1475 bp, Homo sapiens
actgtgctgacctggagggaggaagacccttccaaacccctatccagactcctataagactcagatttttaaaacaaagcaaaacacaaaagcaactctttgcttgcggatgactcaacttcctttttggtaggctcaactctgcttcccaggaatcagcagtgattagtgatagaaagagtagccctcatgaccccaggtgaccatcaggacgctagggcaggaaggagcctgttgattgagtgctgacctgcaaaattaccagcacaggtgtccaacaatttcattcttgagaagccagagttgagtttctggggttgctttggagggttcaggacatgctgcagggtaataggaaggacatggggtgagaaaaaggttcctgccaagttgctgaaagacacatgatagctcaacagggaaccaagagtcaggtttaatattgtttctgcaccacacttaataattgaggtcaatggtttatcaagtcctcactgagggccacagagaggacaggcttctaagtgcagagaggcagcagtaaaggctgaggctgcgggaaacataatcagagtttaaaacactaacacttacctgctggtatggttgagaggcattccaataacccttggcccctgacttttcactgtgccaaaatctaaactattacactaggtcttgaataacttttgaaaatgtgtgctttcccacctagttaaggcaaagttgcctcaaagacaaatatcacattagcacagatgctcttataagagcaattaccatcaatggtcactgcctggaagttggacctggaaatgacatgctggatggtcatagtcttgttagatgaggtgtgcgtgtgatgataagtgggaaacagcttgatttaagggacaytttagtccatggccagcacagtaatgatcttgggaagcctgaagctatgtcttctgttgagcaataaggtacagggcgcagaaggggcaaaataagtcagggagtccagttaacatgtgagatggaaacttaaggatagggacagagcacgcacaaagcccagggacacagctttttgctggacattttgcctgtactaactggtaaattagactgcacaacaggaaagaagcttgtgatagcaaaaggggtcgaaaacgggaaggacactcagagggcaggaactatgacggggctctgcggccttgtgggcagcagggagagtgtatttttggcctgcgggtctcgtgagctggaagaaatcaggaaagggaagctgagcatttaatcctacatagatcacaggctaatcgtgcccatttagtgtttgaaagtgagaagttgtcaaggctttgtgacagccttgaaaccgcaggcattagaggatagaaatcctgagcccagagggaggcaggcactcccatctgcccaatttggtcttcaacagcttccaactcttcaatattcccaagcagaat

SEQ ID NO: 676105 - DNA, 1475 bp, Homo sapiens
actgtgctgacctggagggaggaagacccttccaaacccctatccagactcctataagactcagatttttaaaacaaagcaaaacacaaaagcaactctttgcttgcggatgactcaacttcctttttggtaggctcaactctgcttcccaggaatcagcagtgattagtgatagaaagagtagccctcatgaccccaggtgaccatcaggacgctagggcaggaaggagcctgttgattgagtgctgacctgcaaaattaccagcacaggtgtccaacaatttcattcttgagaagccagagttgagtttctggggttgctttggagggttcaggacatgctgcagggtaataggaaggacatggggtgagaaaaaggttcctgccaagttgctgaaagacacatgatagctcaacagggaaccaagagtcaggtttaatattgtttctgcaccacacttaataattgaggtcaatggtttatcaagtcctcactgagggccacagagaggacaggcttctaagtgcagagaggcagcagtaaaggctgaggctgcgggaaacataatcagagtttaaaacactaacacttacctgctggtatggttgagaggcattccaataacccttggcccctgacttttcactgtgccaaaatctaaactattacactaggtcttgaataacttttgaaaatgtgtgctttcccacctagttaaggcaaagttgcctcaaagacaaatatcacattagcacagatgctcttataagagcaattaccatcaatggtcactgcctggaagttggacctggaaatgacatgctggatggtcatagtcttgttagatgaggtgtgcgtgtgatgataagtgggaaacagcttgatttaagggacactttagtccatggccagcacagtaatgatcttgggaagcctgaagctatgtcttctkttgagcaataaggtacagggcgcagaaggggcaaaataagtcagggagtccagttaacatgtgagatggaaacttaaggatagggacagagcacgcacaaagcccagggacacagctttttgctggacattttgcctgtactaactggtaaattagactgcacaacaggaaagaagcttgtgatagcaaaaggggtcgaaaacgggaaggacactcagagggcaggaactatgacggggctctgcggccttgtgggcagcagggagagtgtatttttggcctgcgggtctcgtgagctggaagaaatcaggaaagggaagctgagcatttaatcctacatagatcacaggctaatcgtgcccatttagtgtttgaaagtgagaagttgtcaaggctttgtgacagccttgaaaccgcaggcattagaggatagaaatcctgagcccagagggaggcaggcactcccatctgcccaatttggtcttcaacagcttccaactcttcaatattcccaagcagaat

SEQ ID NO: 676106 - DNA, 1405 bp, Homo sapiens
tgacatacataatttccactcatatcccattggccaaagcaagtcccatagccaagcctgaagtcagtggagtgaggaggcatggtaacgacaagggaataaaatattatgaacaaatatygcactcagcacagtgaggacggagggaattgtgtgtgtagaccagatcatacacttaatttcccattgcgggggaaagagaaaccaaagaaggaagaaagaaaatagcataaaggtaatcagagaggtaaagaagagaactaaaactataagttataatgcaagttttaaaagacaggaatccgagagaagagaaggtaggttcattgtccaacactgccaatgtcaatgaaaacaagaacagcatgtgactatgaggaggaaaatggagccacttaagagaaaggattcattagctatcctgagcccatttctgcacagatttctggtctttcagatacttggctaatgtcgatttaaaataactttcgctggagattgtttagaataggttttcacagcaattcctacagcagctgagttgtgtggattagaaggtaagctaagagcacacaatacagaacttctaactctcatcaaatatcaggagaattgtcacaaggggcaagagacccctccaggctctgggcttgtctagagaggaagattactgacagtagctgcatgatcctagccaacagacttgctaagaggagaatcttttacaactgagaaagtaaaaaaatggagtggtagccttcatcaaaaatggagttgtcgccctcatgaaacaatcatctcaatgccgttggagttttcaagcagaatctagtccaccatacaacaaacatgcggaaaagtgcatgcactggacaaaaagaccaacagatatatctatacatctatctatctatctatctatctatctatctatctatctatctatctatctatctatctatcatcagacacacaagggaagaatgccatgtgatgacagaggcagagactgaggtgctgcagctgcaagccaagaaatgccaaaaattgccagcaaaggggcggcacaagaagctaggaaggggaggaagaaggtttttccctgatagatttcagagggagcaaagcccttccaacaccttgattacggacttctagctccaaaactataaaagaataaatttctgggccgggtgcggtggctcacgcctgtaatcccagcactttgggaggccgaggcgggcggatcacgaggtcaggagatcgagaccatcccggctaaaacggtgaaaccccgtctctactaaaaatacaaaaaattagccgggcgtggtggcgggcgcctgtagtcccagctacttgggaggctgaggcaggagaatggcgtgaacccgggaggcggagc

SEQ ID NO: 676107 - DNA, 1405 bp, Homo sapiens
tgacatacataatttccactcatatcccattggccaaagcaagtcccatagccaagcctgaagtcagtggagtgaggaggcatggtaacgacaagggaataaaatattatgaacaaatatcgcactcagcacagtgaggacggagggaattgtgtgtgtagaccagatcatacacttaatttcccattgcgggggaaagagaaaccaaagaaggaagaaagaaaatagcataaaggtaatcagagaggtaaagaagagaactaaaactataagttataatgcaagttttaaaagacaggaatccgagagaagagaaggtaggttcattgtccaacactgccaatgtcaatgaaaacaagaacagcatgtgactatgaggaggaaaatggagccacttaagagaaaggattcattagctatcctgagcccatttctgcacagatttctggtctttcagatacttggctaatgtcgatttaaaataactttcgctggagattgtttagaataggttttcacagcaattcctacagcagctgagttgtgtggattagaaggtaagctaagagcacacaatacagaacttctaactctcatcaaatatcaggagaattgtcacaaggggcaagagacccctccaggctctgggcttgtctagagaggaagattactgacagtagctgcatgatcctagccaacagacttgctaagaggagaatcttttacaactgagaaagtaaaaaaatggagtggtagccttcatcaaaaatggagttgtcgccctcatgaaacaatcatctcaatgccgttggagttttcaagcagaatctagtccaccatacaacaaacatgcggaaaagtgcatgcactggacaaaaagaccaacagatatatctatacatctatctatctatctatctatctatctatctatctatctatctatctatctatctatctatcatcagacacacaagggaagaatgccatgtgatgacagaggcagagactgaggtgctgcagctgcaagccaagaaatgccaaaaattgccagcaaaggggcggcacaagaagctaggaaggggaggaagaaggtttttccctgatagatttcagagggagcaaagcccttccaacaccttgattacggacttctagctccaaaactataaaagaataaatttctgggccgggtgcggtggctcacgcctgtaatcccagcactttgggaggccgaggcgggcggatcacgaggtcaggagatcgagaccatcccggctaaaacggtgaaaccccgtctctactaaaaatacaaaaaattagccrggcgtggtggcgggcgcctgtagtcccagctacttgggaggctgaggcaggagaatggcgtgaacccgggaggcggagc

SEQ ID NO: 676108 - DNA, 1405 bp, Homo sapiens
tgacatacataatttccactcatatcccattggccaaagcaagtcccatagccaagcctgaagtcagtggagtgaggaggcatggtaacgacaagggaataaaatattatgaacaaatatcgcactcagcacagtgaggacggagggaattgtgtgtgtagaccagatcatacacttaatttcccattgcgggggaaagagaaaccaaagaaggaagaaagaaaatagcataaaggtaatcagagaggtaaagaagagaactaaaactataagttataatgcaagttttaaaagacaggaatccgagagaagagaaggtaggttcattgtccaacactgccaatgtcaatgaaaacaagaacagcatgtgactatgaggaggaaaatggagccacttaagagaaaggattcattagctatcctgagcccatttctgcacagatttctggtctttcagatacttggctaatgtcgatttaaaataactttcgctggagattgtttagaataggttttcacagcaattcctacagcagctgagttgtgtggattagaaggtaagctaagagcacacaatacagaacttctaactctcatcaaatatcaggagaattgtcacaaggggcaagagacccctccaggctctgggcttgtctagagaggaagattactgacagtagctgcatgatcctagccaacagacttgctaagaggagaatcttttacaactgagaaagtaaaaaaatggagtggtagccttcatcaaaaatggagttgtcgccctcatgaaacaatcatctcaatgccgttggagttttcaagcagaatctagtccaccatacaacaaacatgcggaaaagtgcatgcactggacaaaaagaccaacagatatatctatacatctatctatctatctatctatctatctatctatctatctatctatctatctatctatctatcatcagacacacaagggaagaatgccatgtgatgacagaggcagagactgaggtgctgcagctgcaagccaagaaatgccaaaaattgccagcaaaggggcggcacaagaagctaggaaggggaggaagaaggtttttccctgatagatttcagagggagcaaagcccttccaacaccttgattacggacttctagctccaaaactataaaagaataaatttctgggccgggtgcggtggctcacgcctgtaatcccagcactttgggaggccgaggcgggcggatcacgaggtcaggagatcgagaccatcccggctaaaacggtgaaaccccgtctctactaaaaatacaaaaaattagccgggcgtrgtggcgggcgcctgtagtcccagctacttgggaggctgaggcaggagaatggcgtgaacccgggaggcggagc

SEQ ID NO: 676109 - DNA, 1405 bp, Homo sapiens
tgacatacataatttccactcatatcccattggccaaagcaagtcccatagccaagcctgaagtcagtggagtgaggaggcatggtaacgacaagggaataaaatattatgaacaaatatcgcactcagcacagtgaggacggagggaattgtgtgtgtagaccagatcatacacttaatttcccattgcgggggaaagagaaaccaaagaaggaagaaagaaaatagcataaaggtaatcagagaggtaaagaagagaactaaaactataagttataatgcaagttttaaaagacaggaatccgagagaagagaaggtaggttcattgtccaacactgccaatgtcaatgaaaacaagaacagcatgtgactatgaggaggaaaatggagccacttaagagaaaggattcattagctatcctgagcccatttctgcacagatttctggtctttcagatacttggctaatgtcgatttaaaataactttcgctggagattgtttagaataggttttcacagcaattcctacagcagctgagttgtgtggattagaaggtaagctaagagcacacaatacagaacttctaactctcatcaaatatcaggagaattgtcacaaggggcaagagacccctccaggctctgggcttgtctagagaggaagattactgacagtagctgcatgatcctagccaacagacttgctaagaggagaatcttttacaactgagaaagtaaaaaaatggagtggtagccttcatcaaaaatggagttgtcgccctcatgaaacaatcatctcaatgccgttggagttttcaagcagaatctagtccaccatacaacaaacatgcggaaaagtgcatgcactggacaaaaagaccaacagatatatctatacatctatctatctatctatctatctatctatctatctatctatctatctatctatctatctatcatcagacacacaagggaagaatgccatgtgatgacagaggcagagactgaggtgctgcagctgcaagccaagaaatgccaaaaattgccagcaaaggggcggcacaagaagctaggaaggggaggaagaaggtttttccctgatagatttcagagggagcaaagcccttccaacaccttgattacggacttctagctccaaaactataaaagaataaatttctgggccgggtgcggtggctcacgcctgtaatcccagcactttgggaggccgaggcgggcggatcacgaggtcaggagatcgagaccatcccggctaaaacggtgaaaccccgtctctactaaaaatacaaaaaattagccgggcgtggtggcgggygcctgtagtcccagctacttgggaggctgaggcaggagaatggcgtgaacccgggaggcggagc

SEQ ID NO: 676110 - DNA, 597 bp, Homo sapiens
ctggtagttccaaggacagctgccctgcccgtgcctggggtggaggggcagaagggcagggtgccaagtggccagtcccctgtgcctgcctccctgcctcacctccacgtatggtcagagttgtcctggtatccagaccatggcagggagaagggggatggtttgggggaacccaccccaggtgcctcctcagaatgtccctgaagcccccagggccctgggcagaccaccaccagggacccccgggcacgcagcctgcagagtcccctgtgcctgcctgttggacactgaatcctttaccctgacggagcggcaccaccacccaagggtgcctttctccccttgtggcttctgagtacaaacccgaagccagcattctctctttggcttcataagacgtggctgtcagccaaccgggtgccactggccccaggcgcaaagcatcacagagggcaggaaggctgggctggggacamgaggacacagccctgcccttgggacccttgggagctcgtcaggcatgaggcggattctgagctgaaaacaggagggaaacagtagctgctggcagccgagtccgtggtgcccaggggtgtg

SEQ ID NO: 676111 - DNA, 2414 bp, Homo sapiens
acagccagagaaaattaaaaaaaaaaaaattttttttttcaaagtctgaagactttggagaactgtggaagctactatgacttgaagagacacaatccggaagggtaaaccctttaggagcaagccaatatgccacaactgctttgcccctcagggaatctgccaatgctaggtgccaggaaggaggctgaggaaacagaaaagcagcctgggaacatgaccagagccactattcacaggcagagaaaccagcagagctcatggtaatgtctcaggcctgaagaaagaaaaatagagacaagggcctaggattcctgtgaaaagaactgagtgttttaccctgaagacattttacaaaatcccaaagatgcacaggtcagaaggctgaaaccaagcagaaagcctctgaatagcacagcaggtttcttcaccaatcccatgtactaagaagacaaagattaaagttcaggacacaccgtgggggacaaagattaaagttcaggacacaccatgggggaagggccccagttcttagccagaactcctgcagggtacttccaaagagtagaggcaaaccaaaaagagatggagcctgaccaaaaccacgcccttgctgtggtcagctcagacaagataaatggaatcagcccccattctatttgcctagcaaatggtgtaagccatctagatattagaaaatcatctagggtcgctacaatttttttatatacaatgcccacttttcaataaaaattaacaggcatgccaaaagataggacaaaatgagtgtcaaggccgggtgcagtggctcacgcctgtaatcccaacactttgggaggccaagccaggcagatcacctaaggtcaggagttcgagaccagcctgaccaacgtggagaaaccccatctctactaaaattacaaaattgccaggcttggtggcgcgtgcctgtaatcccagctactcaggaggctgaggcaggagaattgcttaagtccgggaggcagaggtggcagtgagccgagatcgtgccattccacttcagcctgggtaacaagagtgaaactccatctcaaaaaaaaaaaaaaaaaacagggtgtaatattttaatattgggtaagacagagcaaaaaaagagaatgattgatccaaaagctatgccatcagaaaacatctagactgaaagctggaggagaaggaaggagaatagaaaaatacagatttgtattgagtgctagcctgagaaaatgtctcagcaaaacagtgtttaggtatccattggatgatacatgcagaaataaacacagatgtcacctctttgacaattatacaggatttatgttacttgatttccaagtaacaaagacagcaaaataatcagaaaaaaaatatttagactcaatgagaaagataagagagatccttaacatactgaggatgaagaacctgataattcttagctcactctcttatcaatctcaaagttaaaatgatcacgggagtggtgtgattcaatggatccgtttctgccccgtgggaactacaatttcacagatacaaatttgtaacatcttttttgatatctaatcaccgatgtgaaaatttttaacatttttaaaccgttttattatgaaaaatttcaaatatacagcaaagttgaaaggattttacagtgaactcccatatactcaccatcttgattccactattaacttgcttatcacaaatatatccattaatccatcttactttgtgacctatttccaagtaaactgcggagatcagtatacttcctgctaaacacttcaacatgcatgttaattaattagattttttttcccttcttggtgtaaaagttcatgcaatgaataggtgtgcatttgcggagtttgacaaatgcacatacctgtgtaatctaaatccctatcaagatatgaaacattacaatcactcctgaaaggtttcccaagcccctttccagtcaatccctacccttatttccctctctcagaataaatgtttttttgtttgtttggagacggggtctcgctaygttgcccaggctgtcctggaactcctggcctcaggttctgaggagctaggtctctaggcatacatagcacaagtgtttttgttgttgttatttgtttgtttgtttttgagacagtctccctctgtcacccaggctggagtgcagtggcatgatctcagctttctgcaacctctgcctcctggcctcaagcaattctcctgcctcaatctcccaagtagctgggattagaagcacacaccactacacctggctacttcttttgtatttttagtagagacagggtttcgccatgttggtcaggctggtctcgaactcctgacctcaagtgatctacctacttccgcctcccaaagtgcgggga

SEQ ID NO: 676112 - DNA, 2414 bp, Homo sapiens
acagccagagaaaattaaaaaaaaaaaaattttttttttcaaagtctgaagactttggagaactgtggaagctactatgacttgaagagacacaatccggaagggtaaaccctttaggagcaagccaatatgccacaactgctttgcccctcagggaatctgccaatgctaggtgccaggaaggaggctgaggaaacagaaaagcagcctgggaacatgaccagagccactattcacaggcagagaaaccagcagagctcatggtaatgtctcaggcctgaagaaagaaaaatagagacaagggcctaggattcctgtgaaaagaactgagtgttttaccctgaagacattttacaaaatcccaaagatgcacaggtcagaaggctgaaaccaagcagaaagcctctgaatagcacagcaggtttcttcaccaatcccatgtactaagaagacaaagattaaagttcaggacacaccgtgggggacaaagattaaagttcaggacacaccatgggggaagggccccagttcttagccagaactcctgcagggtacttccaaagagtagaggcaaaccaaaaagagatggagcctgaccaaaaccacgcccttgctgtggtcagctcagacaagataaatggaatcagcccccattctatttgcctagcaaatggtgtaagccatctagatattagaaaatcatctagggtcgctacaatttttttatatacaatgcccacttttcaataaaaattaacaggcatgccaaaagataggacaaaatgagtgtcaaggccgggtgcagtggctcacgcctgtaatcccaacactttgggaggccaagccaggcagatcacctaaggtcaggagttcgagaccagcctgaccaacgtggagaaaccccatctctactaaaattacaaaattgccaggcttggtggcgcgtgcctgtaatcccagctactcaggaggctgaggcaggagaattgcttaagtccgggaggcagaggtggcagtgagccgagatcgtgccattccacttcagcctgggtaacaagagtgaaactccatctcaaaaaaaaaaaaaaaaaacagggtgtaatattttaatattgggtaagacagagcaaaaaaagagaatgattgatccaaaagctatgccatcagaaaacatctagactgaaagctggaggagaaggaaggagaatagaaaaatacagatttgtattgagtgctagcctgagaaaatgtctcagcaaaacagtgtttaggtatccattggatgatacatgcagaaataaacacagatgtcacctctttgacaattatacaggatttatgttacttgatttccaagtaacaaagacagcaaaataatcagaaaaaaaatatttagactcaatgagaaagataagagagatccttaacatactgaggatgaagaacctgataattcttagctcactctcttatcaatctcaaagttaaaatgatcacgggagtggtgtgattcaatggatccgtttctgccccgtgggaactacaatttcacagatacaaatttgtaacatcttttttgatatctaatcaccgatgtgaaaatttttaacatttttaaaccgttttattatgaaaaatttcaaatatacagcaaagttgaaaggattttacagtgaactcccatatactcaccatcttgattccactattaacttgcttatcacaaatatatccattaatccatcttactttgtgacctatttccaagtaaactgcggagatcagtatacttcctgctaaacacttcaacatgcatgttaattaattagattttttttcccttcttggtgtaaaagttcatgcaatgaataggtgtgcatttgcggagtttgacaaatgcacatacctgtgtaatctaaatccctatcaagatatgaaacattacaatcactcctgaaaggtttcccaagcccctttccagtcaatccctacccttatttccctctctcagaataaatgtttttttgtttgtttggagacggggtctcgctacrttgcccaggctgtcctggaactcctggcctcaggttctgaggagctaggtctctaggcatacatagcacaagtgtttttgttgttgttatttgtttgtttgtttttgagacagtctccctctgtcacccaggctggagtgcagtggcatgatctcagctttctgcaacctctgcctcctggcctcaagcaattctcctgcctcaatctcccaagtagctgggattagaagcacacaccactacacctggctacttcttttgtatttttagtagagacagggtttcgccatgttggtcaggctggtctcgaactcctgacctcaagtgatctacctacttccgcctcccaaagtgcgggga

SEQ ID NO: 676113 - DNA, 2414 bp, Homo sapiens
acagccagagaaaattaaaaaaaaaaaaattttttttttcaaagtctgaagactttggagaactgtggaagctactatgacttgaagagacacaatccggaagggtaaaccctttaggagcaagccaatatgccacaactgctttgcccctcagggaatctgccaatgctaggtgccaggaaggaggctgaggaaacagaaaagcagcctgggaacatgaccagagccactattcacaggcagagaaaccagcagagctcatggtaatgtctcaggcctgaagaaagaaaaatagagacaagggcctaggattcctgtgaaaagaactgagtgttttaccctgaagacattttacaaaatcccaaagatgcacaggtcagaaggctgaaaccaagcagaaagcctctgaatagcacagcaggtttcttcaccaatcccatgtactaagaagacaaagattaaagttcaggacacaccgtgggggacaaagattaaagttcaggacacaccatgggggaagggccccagttcttagccagaactcctgcagggtacttccaaagagtagaggcaaaccaaaaagagatggagcctgaccaaaaccacgcccttgctgtggtcagctcagacaagataaatggaatcagcccccattctatttgcctagcaaatggtgtaagccatctagatattagaaaatcatctagggtcgctacaatttttttatatacaatgcccacttttcaataaaaattaacaggcatgccaaaagataggacaaaatgagtgtcaaggccgggtgcagtggctcacgcctgtaatcccaacactttgggaggccaagccaggcagatcacctaaggtcaggagttcgagaccagcctgaccaacgtggagaaaccccatctctactaaaattacaaaattgccaggcttggtggcgcgtgcctgtaatcccagctactcaggaggctgaggcaggagaattgcttaagtccgggaggcagaggtggcagtgagccgagatcgtgccattccacttcagcctgggtaacaagagtgaaactccatctcaaaaaaaaaaaaaaaaaacagggtgtaatattttaatattgggtaagacagagcaaaaaaagagaatgattgatccaaaagctatgccatcagaaaacatctagactgaaagctggaggagaaggaaggagaatagaaaaatacagatttgtattgagtgctagcctgagaaaatgtctcagcaaaacagtgtttaggtatccattggatgatacatgcagaaataaacacagatgtcacctctttgacaattatacaggatttatgttacttgatttccaagtaacaaagacagcaaaataatcagaaaaaaaatatttagactcaatgagaaagataagagagatccttaacatactgaggatgaagaacctgataattcttagctcactctcttatcaatctcaaagttaaaatgatcacgggagtggtgtgattcaatggatccgtttctgccccgtgggaactacaatttcacagatacaaatttgtaacatcttttttgatatctaatcaccgatgtgaaaatttttaacatttttaaaccgttttattatgaaaaatttcaaatatacagcaaagttgaaaggattttacagtgaactcccatatactcaccatcttgattccactattaacttgcttatcacaaatatatccattaatccatcttactttgtgacctatttccaagtaaactgcggagatcagtatacttcctgctaaacacttcaacatgcatgttaattaattagattttttttcccttcttggtgtaaaagttcatgcaatgaataggtgtgcatttgcggagtttgacaaatgcacatacctgtgtaatctaaatccctatcaagatatgaaacattacaatcactcctgaaaggtttcccaagcccctttccagtcaatccctacccttatttccctctctcagaataaatgtttttttgtttgtttggagacggggtctcgctacgttgcccaggctgtcctggaactcctggcctcaggttctgaggagctaggtctctaggcatacatagcacaagtgtttttgttgttgttatttgtttgtttgtttttgagacagtctccctctgtcacccaggctggagtgcagtggcatgatctcagctttctgcaacctctgcctcctggcctcaagcaattctcctgcctcaatctcccaaktagctgggattagaagcacacaccactacacctggctacttcttttgtatttttagtagagacagggtttcgccatgttggtcaggctggtctcgaactcctgacctcaagtgatctacctacttccgcctcccaaagtgcgggga

SEQ ID NO: 676114 - DNA, 2164 bp, Homo sapiens
taaactttggaagacaattgttagcagacaaaacagggctatattgaaagttagagtgtcttagtctgtttggcctgctataacatggcctgctataacaaaataccatcaactgggtatcttgtaaacaacagaagttatttctcctagttctggaggctgggaagtcctgtgtcagcatactggcagatttggtgtctggtgagggcctgtttcctggctgataaaaggccctcttttcactctgtctctcgcagcagaaggagcgagggacctctctggggtttctttcataaaggcacacatccactcatgaggaaccccacccccaggacttaatcacctcccagaggccccatctccaactgctatcatattggggattaggtttcaacatatgaattttaggggacataaacatagtctatagcatagccattaaattaaacaaataactaagtgaatgagttttcaaagacttaggcaggccagtagccaaaaactaaaactaaaaaaacacaaaataaaaacagaaaaacccactacttgattggtcctttctttgaaaggtagaggtcagtatgacagtttcttccattggtcaaagctcaaagctcgttagtgctggctgactcattatgacttgaacttaaataagggagagtcttgaaaaataatttcttgctaatgtaaatttagttaatagaagcaacagaaactgaactcgatatctgagcatagtagactaaggatgcataaagatacattttcagagctggagcagaaatgagaaatagtcatctactccaagatctttattttgcagaggcctgtgggggctgggggctggggacagagcggggactggaaccccagttttgagctccagcttgatctcttcttcggggtatagcaggtcagcyaagatgacatccaggggttccagagaaagaaaggactaggggtggagagctgcatacctttgccttgtggcttctgcagagctctcttggtaaaaggaatgggaactcaagaggaacgccaggttttttttttttttttttttttttttttttttttttttggagacagagtctcactcagtcacccaggctagagtgcagtggcatggtttcagcttactgtagcctctgcctcccaggctgaatcaatcttcccatctcagcctctccagtagctgggactacaggtgctcccctagagcctccgcagcaatgcagcaatggtgatcaagcgaccttgatcctgtctcagtgagaccctcatcccatgtccacccctgatctatagaactgtaagaaaatctatttgtttcattttaaaacagatgctggccggtgcggtggcccatggctgtaatcccagcactttgggagggaggttgaagcaggtggatcacttgagatcaggagtttgagaccaatttggccaacatggtgaaatcccatctctattaaaattacaaaaattaggcagatgtgatggcaggtgcctgtaatcccagctacttgggaggctgatgcaggagaattgcttgaacccgggaggtggaggttgcaatgagccgagatcgcaccactgcactccagcctaggtgacagagtgagactccatcacgaaaacaaaacaaaacaaaacaaacaaaaaaaaacagatgcacagtaatttggtacagcaacaacaggaaaggaatacaggagggcttccaacttcaatgccaaacaagctgtcactttattcccatccaagtccaaaggtacagtgtctacaaaaaatcaagaaagaagaaaaggaaggccctcccactttcctctcataaagcttaatctttagggggagtaggggaggcaggttttaggagggtgttgacaggggctgcaggtaggtgatagggagaggggtacttgggaggcatcacctccactggaagtgttttttatctttttttttttttttttgagatggagtttcgctcttgttgcccaaactggagtgcaatggcgcgacctcggctcactgcaacctctgcctcctgggttcaagtgattctcctgcctcagcctccctggtagctgggattacaggcgcctgccaccacgcccagcttattttttattttttttatttttatttttttagtaga

SEQ ID NO: 676115 - DNA, 1880 bp, Homo sapiens
caccctgatctacccaagtgtttcatgcctcatggaggaaagagatacttgcacatgcatttttatagcagcacaatttgcaattgcaaagatatggaaccagcccaaatactcatcagtcaacaagtggataaaggaactatgagatatatatatatatatatatatatatatatatatatatatatatatatatatawaatgatgaaatgctacttagccatggaaaggaatgaattaatggcattcgctgcaaactggatgggattggggactattatctaagtgaaataactcaggaatggaaagccaaatgtcgtatgttctcactcataagagggagctaagctatgaggaagcaaaggcttaagaataatacaatggactttggcgagtcagggggctgaaagggtgggaggacggtgagggataaaagactacaagttgggttcagtgtatactgctcaggtgatgggtgcacgaaaatctcataaatcactgttaaaaaacttactcatataaccaaacaccatgtgttccccaaaaacctttggaaataaaaaaaaaaaaacagagtgcacaagtagaagtagaaattgataacataggttgttgggcacatggccctgccccctgcctgctggcggagaattttcagctaaggcttggcttgtgaacttctccttcagccttacaggttccttgaattcagaccacctcttacagcatctcgttcttcttccgtagcattcatcacactgaaattcttgatttcctgcgggtttgcttgtcaccacctgtcttctccctgtgggttagaacaggggccaggatccttttggtcctcccgtgtctcctgtgcctagctttcctgcctggcacacggtagactcacagtcagtgccgaagtgagcaggattcaacagtgatagccagttgtctttttttttttttttttttttttaatgttagggaagttatcaaataagatacttaaaataaacaactcacagctttttctcgccctcctatctttgcaccactcttctccttgatcatttaccgtgtagctttagtgccatgggcagctctgggatagtagtagaaatggtaatagccactagcagcagcagtagtaagaagaatgacaggaatgacaagtaacatttatttattttttgagacacagtttcactctgtcactcaggctggagtacagcggtgccatctcagctcactgcaacctccacctcccaagttcaagcaattctcttgcctcggcctcccgagtagctgggattacaggcgtgcgccaccatgcccggctaattttttgtattattagtagagacggggttttgccatgttggcgaggcttgtctggaactcctgacatcaagcaatccgcccaccttggcctcccaaagtgttgggattaccccgcccaggggcttattgtgtgccagaggctgttctaagtgatttgcatgaagtaactcatttaatacataaccatgtgaggtaggtaccattaggactgatgtttggcaggggagaaaattgaagtggaaggaggctcagaaaccgttcaagttcacacagctggaattgaggggagctgggaaacctgtccaagttcacacagctggaattagtggggctggaactcactccaggctgcctggcttccagctcccagctctctacgccaggacttgggggttagggctggggtgtgacgagagggacatcgaaaagctcacaaaagacccacagtaatgttagggtgggatattaactacgtattgcttcataacagattgccccacatttagtggcttaaaacagcaatatggtaatccccacttatctgcaggttc

SEQ ID NO: 676116 - DNA, 2502 bp, Homo sapiens
gaaggctaaatggagctggagtggggtaattggccttctcccagttcagatatggacctggtaaagatttccttctgagagtaggactttcttatggaaaatgccctgggattttattcaaaatggttactttattctttcctttgccataaatatgaggatttcaaaaaaaatctttacagagtgagactccattaggtaaaacctgtgaaaatgtgggagtcgctctaggactgaaaccctcggaattgtcactttcacactagtctccagcaattcatcaaaattactatttaagtattcacaccagtttgtggcctaacagttctgttcctgttaaattgatcttggctgtgattgcctgtatttggctatgaatctctgtattctccaatctctccagagtctggggtttgccctgttacttcaattctctgatgcatctgggaaaatttgttgatttcaagtttgttcagcctttttcttattgtaataatgggagtgacaactttgaaactgtttacatgttggagctgaaaatgaaagtccctctgataaccagatagggccacctaaaatcatgctcattaggcagagcaagctggtctaggcactgcaaaacatatcaactcaggtgagttggttaaaatgaatgaaggatgaaataaaatctatcaattcacctcctagtgcagagacttgcaaaaaactcataaaaaatatgggatgatttcttacagtcccaagcaaaagacatagtcatacgatagttctatcttttgtgtttctgtagcactttcactttacatattttatgattcatattgtgttatagttggctcattatatgtaagctttttgaaagacttcaaactagcatgaacaagaccactattagaagagattacaactgataaacaatattgtggaaacaaatacacagtgtgtgattgagagtatagccaaaactatctgcattttaagttttttacttttatatgaccatcaaatatttagcccataataatgtggatccaaccccaccaattctcataaagtacttttacaaaggcctctacaagttaatttttcttcttctaagtttcaccacttaaccaaactataagctaatcacctgtatgactatctctattctcactagataggaggctttttgaaagcaggagtgatgttatgagcctgttgtattgctggcatctagcacaatgtctaacacatagtaggttttaataaatactttataagtgaattaatgaatgaaggtcactaataccagaactacaatgttctatacatacacaaaaaaagggctgaccttatcagtaaagcaccacgaacatattgtgaaacctttctcctttttaggacaaactcattattctctatttatagcatgcacaaggaagctgacaaaatcaggaagaagtaagaaagcatgcatcatgaacattggaatgtgagacatttcctcctgtattaatcatattttcagattctgtgttgactatttgacatctattattcctaacctctccataagcctgctggatcacagggccaaactaacaaccaatattgtttacatctttactgcaagttagctttcatggacatgcagaagttgtattacaatcctcccaaccactaaccctgacctgcctgtttcctcttagttcccagtagggaacatttccacctagttactttattccacgattgtcatacaggtatagtcccagttcctctgtttgtctgctttcctacccatgcatatgacagactttgggtagcctgtatggtatgctatgcctctcattaccaggggaaatggtgagtattaaaaactttctttcaatggcatttacttctttgtgtcatcactcagttacatgtataagttaagaagttgacacaatataacctctcatcatcagggtgtgttatgaagtaatctcacttcctttagcactgagattttcctctgctttctgctattgtccccataggagattgatatggtttggacttgtgtctccacccaaatctcttctcaaattgtaatccccaagtgttgagggagggacctggtgagaggtgattggatcatgggggtggtttcccccatgctgttctcatgataatgagtgagttctctcgtgatttgatgttttgaaagtgtgacacctgtgcccctgccccacctgccatcatgtaagatgtgtcttgcttcccctttgccttctgctatgattttaagtttcctgaggcctccccagccatgcagaactgtgagtcaattaaacctctcttttttttttaaataaattacccagtctcaggtagttctttatagcagtgtgaaaatgaactaatacagagatattcagaactgtaagcataattatcaacttcaaatgtggagtgcagtttcttagccactctccttctttttccctgcagcctaccccaamttgtagatca

SEQ ID NO: 676117 - DNA, 736 bp, Homo sapiens
gacgatttcccatcattccccatctcacacacaataaagcttggacatacagtgaaaacaaccacctaaagttcccagacaatgagtggaaacagtcaggcactagtccagagtttatgctctcttgaaagagggaaggtgaaaatctacacaagtgtaaaatcaagattatatcaaatacctcctctgaccatattggaataaaactagaaaccaataaaaggaagaactttagaaattataaaatttatagaaacaaaacaacatacttctgcatgacatggggmaataaataaattagaaaaggaattaaaaattttttgagatagataaaaatggaaacacaacatactaaaacctatgggatacagcaaaagcacttcaaaaaggggagtttatagcaataaataaaaattagaaagatctcaaatagaccacctaatattgtatcttaaggaattagcaagaaaaaatccaactaactgagctcaaaattagcagtagaagaaaaataagtaaaaagttgataggtgcagcaaactactatggcacatgtttacctacgtaacaaacctgcacatcttgcacatttaccctggaacttaaaaaaaaattaaaagaaaaactacaaatatcatctggatagaaaaaaaatacaaaaaaaagcagcttggtttttcataatgctttgaaaagaactttgactaactgtatgatctttatagggacaatacca

SEQ ID NO: 676118 - DNA, 726 bp, Homo sapiens
ttgcattattagtgttaggacagactctcagagcttctgagatccatacaattgtcacatgtgtatgaagaaagattaaaaaattaactgaagaaggattttatgaaagagagtgaaaggaatgtcagctaccactatttaagatgctttttaaggatgttcctttctttctttgactctgtattggagccaaaaattttctgtatgagggtgttttatgatggttgctacagttccagatcacattccaggcataaagtcctggaaatgttcattgcacatggtgcaccttagggagctcatgggaggrattctcactctgtattaacatatactattgtatttatttatttaacttttaagttcagagatgcaggtttgttacacaggtaaacttgtgtcatgggggtttgttgtacagattattttatcacccaggtattaagcctagtagccatgagttatttttcctgatcctctccctcctcccaccctccagattttttttttttttttttttttgatatggagtcttgcgctgttgcccaggctggagtgcagtggtgtgatcttggctcactgtaagccccacctcctgggttcacgccattctccttcctcagtctcctgagtagctgggactacaggcacccgccaccatgcctggctaattttttgtatttttttagtagagatggggtttcactgtgtaagccaggatggtct

SEQ ID NO: 676119 - DNA, 726 bp, Homo sapiens
ttgcattattagtgttaggacagactctcagagcttctgagatccatacaattgtcacatgtgtatgaagaaagattaaaaaattaactgaagaaggattttatgaaagagagtgaaaggaatgtcagctaccactatttaagatgctttttaaggatgttcctttctttctttgactctgtattggagccaaaaattttctgtatgagggtgttttatgatggttgctacagttccagatcacattccaggcataaagtcctggaaatgttcattgcacatggtgcaccttagggagctcatgggaggaattctcactctgtattaacwtatactattgtatttatttatttaacttttaagttcagagatgcaggtttgttacacaggtaaacttgtgtcatgggggtttgttgtacagattattttatcacccaggtattaagcctagtagccatgagttatttttcctgatcctctccctcctcccaccctccagattttttttttttttttttttttgatatggagtcttgcgctgttgcccaggctggagtgcagtggtgtgatcttggctcactgtaagccccacctcctgggttcacgccattctccttcctcagtctcctgagtagctgggactacaggcacccgccaccatgcctggctaattttttgtatttttttagtagagatggggtttcactgtgtaagccaggatggtct

SEQ ID NO: 676120 - DNA, 331 bp, Homo sapiens
gatctttttcagtttgcgtttaatcttccattaggctatttgtctcagaaatccctygagttctgtgatgacctaaaatcaaaaacatactaaaaatccagtttgatcaaatctaaataatgtatggttgacccttgaacaatatggaggttatgggtgccaacccctcacacagtaacttttggctttccaaaaacttaactactaataacctactgttgacaggaagtcatactgataacataaaccattgatgaacacatattttgtgtattctatgtattatgtactgtattctcaccataaagtaagctagagaaaacaatgttaa

SEQ ID NO: 676121 - DNA, 643 bp, Homo sapiens
gtgtgtgctcttctaatgtgagtaggttttggggcaccagttttccatgcaattctaatactttttgcattttgtcatatcaattctgttttttttttggagatggagcctcactgtgtcgcccaggctrgagtgcagtggcgcgatctcggctcactgcaacctccgcctcccgggttcaagcaattctctgcctcagtctcccgagtagctgggattataggtgcccaccaccatgcctggctaattttttggtatttttagtagagatggggtttcactatcttggcaaggctggttttgaactcctgacctcgtgatccacctgcctcggcctcccaaagtgctgggattgcaggcgtgagccactgcgcccggccatatcaattctttttaatctttcagtgtaatggtagttcaaacagaaattcatgctttttgtgtcttaattattgttccacttaatacttttgccttgaattctattttgtcttgtgttcatattgtcactctctccttttatttttatcttcttgagatacaacatatctggttgttttgagaggtagtatctcattttttctcctcaatctgagagactttgtctttaatattggggaggtcaattcatttatgatgatca

SEQ ID NO: 676122 - DNA, 643 bp, Homo sapiens
gtgtgtgctcttctaatgtgagtaggttttggggcaccagttttccatgcaattctaatactttttgcattttgtcatatcaattctgttttttttttggagatggagcctcactgtgtcgcccaggctggagtgcagtggcgcgatctcggctcactgcaacctccgcctcccgggttcaagcaattctctgcctcagtctcccgagtagctgggattataggtgcccaccaccatgcctggctaattttttggtatttttagtagagatggggtttcactatcttggcaaggctggttttgaactcctgacctygtgatccacctgcctcggcctcccaaagtgctgggattgcaggcgtgagccactgcgcccggccatatcaattctttttaatctttcagtgtaatggtagttcaaacagaaattcatgctttttgtgtcttaattattgttccacttaatacttttgccttgaattctattttgtcttgtgttcatattgtcactctctccttttatttttatcttcttgagatacaacatatctggttgttttgagaggtagtatctcattttttctcctcaatctgagagactttgtctttaatattggggaggtcaattcatttatgatgatca

SEQ ID NO: 676123 - DNA, 635 bp, Homo sapiens
gttggaggtgatacagcagattctggaattttttgaaagaaagatgatggcatctggctttaatgcatgaagatgttagagttaagaatctatatgggtggtttatcgtgatggtggtagtaataaagcaatacagaaagtatgtgtgtaaacaattttaattgccctccatttacttgcatacccaagaaagtgtcatttgtctttttctgtggagaataagttctctctagtatggtttgggatggaaactttttggtttacaaaatacttggaggaggtgtggagaaggaaatatttcccacacagtctctttatgaagccaagagttctcaggtaatatgttaaaaacgatgagctctagtagaaaaggtcatgttaaatcatttctttgtatctccatctcataaaaaagtgactgacatatggcaacaacccaatacatatctgttagtttcataaataactctacrtgacacaactgttctccaagcatgctctaggaaacactaggctcaaaatcatctacatgagctcaaaatcatctatggataaaagattcattcaaagtgcaagatagaccaatggattttaatataccaatatgaaaagtttatttgtatagtttcagactc

SEQ ID NO: 676124 - DNA, 587 bp, Homo sapiens
tgttccatggattggcagtttctagtatttaattgctctgggttacactggtgttatttcctagcagatgaattctaactaagcagatattttatggcagaaccaattgccaatatagcagcaatgcaaagcctacagagcacaaaatagctccaattctggagtatgctgctggtgacattgtgtggccaaggtcaaaatagctccaactctggagtatgctgctggtgacattgtgtggccmaggtttactgtaaacagataagctagccactacattggaaggtgctacccgtcaacaaaaacagaatcaatttctaggaaactgcatttctaggatgatcaaaaacaccttgtaggtcagtgaaaaatcatgcatgatctaccatttaaatggattgtcatgcaaaaacatcagaaggatacacatcaaagcaaagaattaaatcagccaacccaacaaacaatcaaaaatgattctatcttggagtgggggtggggtcggggtcagggtgttgtttatttttattttctgcattgtgctttttccaccatgtacacgttttacttttggctatcaaaaaaag

SEQ ID NO: 676125 - DNA, 597 bp, Homo sapiens
cccgtggttagtagtgggaagtttccctttttggttcgtgcattggtgagagaacttgctttccttgacgtcatgtgattaagtaaaccatattcaaamattttaaatttatacctggatttatgaaagttgggagaagtccctcttctccagccacatccccagatcactctacatttctgaggcttcagcaaaatcctgtggcacagagctgtgtttgcacacttggcttgcgggctcctttgctgtgggccgtggatcacatggtggtctgtgcaggcttttgagggaggcctcatgatcataagtgagtcttcagattcatttccttataaatatctgacatccccaaactggaaagctgtgactctgaataaatagaagcacaacacgcagtgggcgagatgcccactcacaaatgtccagagtcactctagggagtccagagtcctcttggcttggatccgaacatgggggtctgggtacgtacttctgagggctaggggctcccacgtgggagtcagtccctctaggacgctcctgacttcagggagaccctgggctggccgatggggttgttacttcaatcccttctcc

SEQ ID NO: 676126 - DNA, 597 bp, Homo sapiens
cccgtggttagtagtgggaagtttccctttttggttcgtgcattggtgagagaacttgctttccttgacgtcatgtgattaagtaaaccatattcaaacattttaaatttatacctggatttatgaaagttgggagaagtccctcttctccagccacatccccagatcactctacatttctgaggcttcagcaaaatcctgtggcacagagctgtgtttgcacacttggcttgcgggctcctttgctgtgggccgtggatcacatggtggtctgtgcaggcttttgagggaggcctcatgatcataagtgagtcttcagattcatttccttataaatatctgacatccccaaactggaaagctgtgactctgaataaatagaagcacracacgcagtgggcgagatgcccactcacaaatgtccagagtcactctagggagtccagagtcctcttggcttggatccgaacatgggggtctgggtacgtacttctgagggctaggggctcccacgtgggagtcagtccctctaggacgctcctgacttcagggagaccctgggctggccgatggggttgttacttcaatcccttctcc

SEQ ID NO: 676127 - DNA, 614 bp, Homo sapiens
tattcatagatttcatttgtgggtagcaccaacagtggacagcagagattttctttacttcccctttcccttctccaggtaaaaacaaactgagacatctggaaactcctttctaggataagacatgttataaacctatgaaattttggagtggagagaagaaaattggctcgtttgtttttccctgttcctaattctctcctctctatgctttttgttcagtaaaacctaagatctgatataattaataattggaaagaaatcttcactgtcgtagatacattcgttcaccttttatttatttaacaaatatttatgatacctacttctgttaggctctgtgtcaggcttggatcygtagtggtgaggtgagttgagatgaagaaaatctgtggagaaaaaaagaagatgaaaacatgaaacaaacacagatgtacgctcataggtatgatgtgatttttgtatgtattacttatacatatacatgcatctactttatatttactatatattttacatatttatatataatttaaacttattcactttatgtgcttattctatacatgttttacatgtgtatatagttacaaattatcacaagtgctatgaag

SEQ ID NO: 676128 - DNA, 620 bp, Homo sapiens
ccaagacaaggttgcaacactttcatctttaagaaaggagtttgaaaatattcgctgcaaattaacacaacttttctggctggtatgtacccacaaatggatgcagctgcaccccggaccgacctgggctccctgaaagatcagagggaaatgtgagggacaaacccattcagtgcagagctctctttcttcaagcaagggaaaaaagatttccaaatttgaaaatgaccttcgcacctcccctcctttctgttcccctcttcagtggaatgtttgaacaagmactgatgactcgctcccaaatagcccagataaggttttacaagaacaggtgggcctgcttgaaagataaactttttctgaagcaacaagaagacaaatgatccgaaacttgcaatttggttaatgtttctctctctctctctgccttgtgtgtacacagctccttctggccggcagcaggaagagtggccctgtgtgtgccaggccctgcagtctctcctctcagctggtgtctccagtgagggacctgagtcatcgcacacatgagcctgtgctcagcctgcacatctcccgcctcccaccagctgctcctcaactgccagggccagactgtggca

SEQ ID NO: 676129 - DNA, 629 bp, Homo sapiens
ttgcatcaatcccttacccattaaccctggaccctggcaacaactgatttcctttctgttttaatggtttaccctttctaaaatttcatataattggactcatacagtatatagtctattattattggattattttacttagcataaagtttttgagattcatccatgctgtcatgtgtatcagtaatttgttccttctgaataccagttttttatcatatatattttggtatatttttatatagggaacagaagcacaaaccataaacagaaatagataaattggaactcattcaacttaaaaaaaaacttttcttctaaagtcatggttagaataatgaaattgtaatacacagcctggcatctctatttactgtatgcccactatacagtaaatatttctgcatttatcagttgatgggcatttcagttgtgtccaggtttttgatattatggataaaactgctataaaaattcrtgcagtttcagtctttgtgtggatatgttttctgtctccttgaatataataaccaagagtagattgactagattatatgaaaagtgtctggttagctctataggaacctgccaacctatttccaaagtagctgaaccattttgcatttata

SEQ ID NO: 676130 - DNA, 648 bp, Homo sapiens
gtcttgcaaggtttgtcttcagccatgattgaatcagccaggaccaaactcgagaatacacagaacttatagaaacaaaggacaaaattcaagaaatgtaggaattacatattctatatcaataatctacatgtgattcttataactttctgcctcaataaatttatcattcatatcttatgggaatctatggttccatgcttttaagattatgtttttaagtttaattggttgtaatatcctgagtattaatgatgtatagtaatataataattattatacagcaggcactcttctaagtgttttccatttataagcccattcacatttataattcttataacaaatctgtgaagtggatactattgttatccctaccttaaacacaagggaattgaggcacagagaatttaacattttgawttaagaatcttaattaagaattaaggtcacataggctgggcatggtggctcatgcctgtaatcccagccctttgggaggccgaggtgggaggatcacttgaggtcaggagttcgagaccaggctggccaacgtggcgtaatcaggtctctactaaaaaaaatccaaaaaaattagccgggcatgatggtacatgcctataatcccagctactcaagaggctgtgg

SEQ ID NO: 676131 - DNA, 2361 bp, Homo sapiens
gtgtgaaaccaggagacctgtggatggtcctaaaaaaagtatggtaggtaatggtgtggaagccacattacaaaacaaggacattcatcccactgtgtaatgcttgagatatgaaaggaagaagctgtctatctacttgagggaatcttacaaaaatcttcctctcaaggaacaagagaggtgtctagccaaggacatggaaggaatgttggacagagaaggagaggatgtaggggcattatctgacctgtgtgttcattctagaattggcaggtggaggctgggaaaatgctatacaccctgacctttgtacatttacacaaatatgtgttttctcaacctgaaaagtatagaattatcaaaacatttatattaataacaagcagcttacctatcattgtcttaaagcgaaacctatcttttttgtctcgtttttaatccttgttttaatttaaagaaaaacagcagctcttacaatgatgttgagcacattaaaaagaatgctgtacaatccaaggagcaagtcattgtggttgcccaggaagctgtcttggaaacccaaaatatatgtgtaacgggaggaagactgttctaggtataaaatacatcttaacggtttcattattctatatttgggacttggatttaagacaggcaatatcagaatcctcaaaataggctagttacaagaaaagtatttaattttctcggctgtttcattaatcagaatgctaattcaataaatgtaacggaatcatttgcaacaacatggatgaacctggaggatgttatgttaagtgaaatgagccagtcacagaaagacaaataccacacaatcttacttatatgtgcagtctaaaaaggttggactcatagagaaagagaatacaatggtggttactaggggatgggggtggttggggaagatgttggtcaaaggattttcacatagaaagaataagttcaagagatctattgtataacatgatgactacagttaataacaatatattgtattcttgaaaatcactaagagtagattttgggtgttctcatcacaaaaaatgataggtatgtgaggtgatgcaatatgttaattagctcaatttagccatgtcacaatgtatatatatttcaaaatgtacacaatgaatatatacattttttgtcaatttaaaaattaattagttttttaaaagtaacaggagttaccataattatgaagaattatatgccctcctgaagtgactaatccttgttatttatattgactaagaagcctggtaagaggtaacacagaagcctaagaatgagaactaaagccaggtgctgtggcttgcacctgtattcctagctactcaggaggctgagaccaaggcaggaggatcacttgaggccaggagttcaagaccagcctgggcaacatagcgagactctgtctctaaaaaaatttttataattagccagggtgaggtgttgtgtgcctgtagtcccagctacttaggaagctgaggagggaggattgctcgagcccaggaatttgggctacgtgatctatgattgtaccactgcacttcagcctgggccacagagtgagatcctatctgtaagaaatttaaaaaataaagaatgagaaattggatatctggtgaggtaaaaatagagcttttatttctaagttgagtatacaaaagacaaaaattagttatttttcatatggaggacagaaatacaccaagttataattcttttttagttaccagtattattgtcaagtttaagcttttttctgtttattggcaagctaaataattgtacatgtttttaagcatatatagtgttgatggacggtatttaaagttttaagtttcagtctcaaataattaacataaggctgatctcattagtttaggcaaaaatacaagtaaaattattgcatgagaacactttgtatagttttgtttttgaattttttaacaaaaatatttattcttataatgatttcctaacagagatcttagaaattgaaaaacaacttaatcagtcttaagttaaaaactgcctgaaaaatatgccatttctggtatttactttgagtaaagtaattgtagattcacgtaatttctggcactgtctgtaaattataagatactagttggacacatatatctacatgtgcctaatcttacatatttatgaaggcaatattagcctatctgatttttaaaatcagtataggttgactctcccttatccaaaatgcttaggaccataaktgtttcagattttgggtttgtttggttggttggttggttggtttgcattttggaatattaccataaacataatgagatatcttgg

SEQ ID NO: 676132 - DNA, 2361 bp, Homo sapiens
gtgtgaaaccaggagacctgtggatggtcctaaaaaaagtatggtaggtaatggtgtggaagccacattacaaaacaaggacattcatcccactgtgtaatgcttgagatatgaaaggaagaagctgtctatctacttgagggaatcttacaaaaatcttcctctcaaggaacaagagaggtgtctagccaaggacatggaaggaatgttggacagagaaggagaggatgtaggggcattatctgacctgtgtgttcattctagaattggcaggtggaggctgggaaaatgctatacaccctgacctttgtacatttacacaaatatgtgttttctcaacctgaaaagtatagaattatcaaaacatttatattaataacaagcagcttacctatcattgtcttaaagcgaaacctatcttttttgtctcgtttttaatccttgttttaatttaaagaaaaacagcagctcttacaatgatgttgagcacattaaaaagaatgctgtacaatccaaggagcaagtcattgtggttgcccaggaagctgtcttggaaacccaaaatatatgtgtaacgggaggaagactgttctaggtataaaatacatcttaacggtttcattattctatatttgggacttggatttaagacaggcaatatcagaatcctcaaaataggctagttacaagaaaagtatttaattttctcggctgtttcattaatcagaatgctaattcaataaatgtaacggaatcatttgcaacaacatggatgaacctggaggatgttatgttaagtgaaatgagccagtcacagaaagacaaataccacacaatcttacttatatgtgcagtctaaaaaggttggactcatagagaaagagaatacaatggtggttactaggggatgggggtggttggggaagatgttggtcaaaggattttcacatagaaagaataagttcaagagatctattgtataacatgatgactacagttaataacaatatattgtattcttgaaaatcactaagagtagattttgggtgttctcatcacaaaaaatgataggtatgtgaggtgatgcaatatgttaattagctcaatttagccatgtcacaatgtatatatatttcaaaatgtacacaatgaatatatacattttttgtcaatttaaaaattaattagttttttaaaagtaacaggagttaccataattatgaagaattatatgccctcctgaagtgactaatccttgttatttatattgactaagaagcctggtaagaggtaacacagaagcctaagaatgagaactaaagccaggtgctgtggcttgcacctgtattcctagctactcaggaggctgagaccaaggcaggaggatcacttgaggccaggagttcaagaccagcctgggcaacatagcgagactctgtctctaaaaaaatttttataattagccagggtgaggtgttgtgtgcctgtagtcccagctacttaggaagctgaggagggaggattgctcgagcccaggaatttgggctacgtgatctatgattgtaccactgcacttcagcctgggccacagagtgagatcctatctgtaagaaatttaaaaaataaagaatgagaaattggatatctggtgaggtaaaaatagagcttttatttctaagttgagtatacaaaagacaaaaattagttatttttcatatggaggacagaaatacaccaagttataattcttttttagttaccagtattattgtcaagtttaagcttttttctgtttattggcaagctaaataattgtacatgtttttaagcatatatagtgttgatggacggtatttaaagttttaagtttcagtctcaaataattaacataaggctgatctcattagtttaggcaaaaatacaagtaaaattattgcatgagaacactttgtatagttttgtttttgaattttttaacaaaaatatttattcttataatgatttcctaacagagatcttagaaattgaaaaacaacttaatcagtcttaagttaaaaactgcctgaaaaatatgccatttctggtatttactttgagtaaagtaattgtagattcacgtaatttctggcactgtctgtaaattataagatactagttggacacatatatctacatgtgcctaatcttacatatttatgaaggcaatattagcctatctgatttttaaaatcagtataggttgactctcccttatccaaaatgcttaggaccataagtgtttcagattttgggtttgtttgkttggttggttggttggtttgcattttggaatattaccataaacataatgagatatcttgg

SEQ ID NO: 676133 - DNA, 622 bp, Homo sapiens
taactacttgtgtcctgtcccaaacaacccggagttctcagtcggcttggttctgcttgtgacctcacatcaagaatagcagagatcaccaaagtgatgttcacctcagtgtgacactgttgttgttgttgtttccttgscttaagcaaaggaagcactagtggagagtctcagcccttaatcctcctccctaagtccccatttataatagaaataaaaggctgtaaagtcagctgggcttgggtccaggctcatctgtggaggaggcaagctcatgttcctcgccttccctttcaatgtccattgtgttgtgtctctgccacacaatgccattacccttgccattatctgtatacctaaatttgatcattttgtgtgtgtgtgtgtgtgtgtgtgtgtgtgtgtgtgttttgaaaaagatttagtaaaacatttcccaacaagtgaaagttcttggctgggcgtggtggctcacgcctgtaatcccagcactttgggaggctgaggcgggcagatcacctgaggtcgggagttcaagaccagcctgaccaacatggagaaatcccatctctactaaaaatacaaaatcagctgggcgtggtggtgcatgcctgtaatccca

SEQ ID NO: 676134 - DNA, 622 bp, Homo sapiens
taactacttgtgtcctgtcccaaacaacccggagttctcagtcggcttggttctgcttgtgacctcacatcaagaatagcagagatcaccaaagtgatgttcacctcagtgtgacactgttgttgttgttgtttccttggcttaagcaaaggaagcactagtggagagtctcagcccttaatcctcctccctaagtccccatttataatagaaataaaaggctgtaaagtcagctgggcttgggtccaggctcatctgtggaggaggcaagctcatgttcctcgccttccctttcaatgtccattgtgttgtgtctctgccacacaatgccattacccttgccattatctgtatacctmaatttgatcattttgtgtgtgtgtgtgtgtgtgtgtgtgtgtgtgtgtgttttgaaaaagatttagtaaaacatttcccaacaagtgaaagttcttggctgggcgtggtggctcacgcctgtaatcccagcactttgggaggctgaggcgggcagatcacctgaggtcgggagttcaagaccagcctgaccaacatggagaaatcccatctctactaaaaatacaaaatcagctgggcgtggtggtgcatgcctgtaatccca

SEQ ID NO: 676135 - DNA, 656 bp, Homo sapiens
aactgtgagcaataatgttatttgtaaattacacagtctaaagtattttgcagccaaaacagactaagaaagaatattgtaaggattcaaacaaagggagggatggtcaaagctacatgcaataccaaaagcctgaaaggacaaaggtacctgatcttagctataatgttaatctgggcatccttcccctagggatgatccaattcatgatccactaggcagaagacaaacactgattgacagrtgtgtgcacttaattccttctctctctcaatgtcacggcaaatcctcatgcacagaggtcacattttattcctttacctccaaaggaatagacacacactaaatacctttagattgcatcatttccatttaatgctggtcctgatattaaggaatttaagaagagagtaggagaaggaggtgaaataagcttcctactttcacagcaggtaacatgtttcttggtacatggattaaaatcaggatttttgttaataataaaatagatttcctgtaaagtctttatgtaaaacagtctatgcacagacctttaataaattgataatgtatggacaatatttcagtaatttttcttgatttgaattttctgcactaatttcttacaataaacatgtaatgttttacacaaatta

SEQ ID NO: 676136 - DNA, 1050 bp, Homo sapiens
caaaatacatgaatgtccctctaatggtgactcctccctaacaactacataccggcaaagcaaaccaaagctggacagtagttaaagcggtaaaaacagattttcttcaggactgcaacagggaaagagagatcacactgtagaactggactcaattctgaacacagtgaggataagtgggaataagccaggagcagggtggaggwcagtggatgggaaattactaagaagacatcagaggaaaggggcctcctggttaaacagattcaacaggattcttgctgaaggcaggccaggataatcacatattacttgggggatgctggaggatgaggaatttgattggatattgagagtgatcaggtatgaggggtggggaatatctctctaaactgacttagcaagattctcactaaaactcagcaatgcaggcccaagaaggacgaaagccaaggttgaggcctagagggcttagatgagcctaactaaagtttagtcaaggagagtctttggcattactcagaaaaggaaagaataagtgcccagatttcatcagtttcttttttcatgctttgagaaaaagggaaagaacatttgaggatggaactagcaagaagaaataattaaaacaccacaacagctggcagtgggattgtggatcaagcttgagtgtggatcaagcttgatttatataaaatcaagttcaagaatgcctctccctgctggagatttaatcatgtttgggaaaggtttccccaaatcccaaatttcccctttttctcttctctgtttgatggggttgcagggaggaagtttctgctgaggagaggcaagatacaggggagaaagtggaggttgagggtggagaggaaaaaaattgttagtattgtttggatcagtagtaaaatttctgaggctctcactacattgggaaggaataatttaaaaactgagccatttatcaccacccattaaatcaggggcctgggaactgacactcataaaaattaaaataaataaatattgaattaatgtctgctaaactttttt

SEQ ID NO: 676137 - DNA, 1050 bp, Homo sapiens
caaaatacatgaatgtccctctaatggtgactcctccctaacaactacataccggcaaagcaaaccaaagctggacagtagttaaagcggtaaaaacagattttcttcaggactgcaacagggaaagagagatcacactgtagaactggactcaattctgaacacagtgaggataagtgggaataagccaggagcagggtggaggtcagtggatgggaaattactaagaagacatcagaggaaaggggcctcctggttaaacagattcaacaggattcttgctgaaggcaggccaggataatcacatattacttgggggatgctggaggatgaggaatttgattggatattgagagtgatcaggtatgaggggtggggaatatctctctaaactgacttagcaagattctcactaaaactcagcaatgcaggcccaagaaggacgaaagccaaggttgaggcctagagggcttagatgagcctaactaaagtttagtcaaggagagtctttggcattactcagaaaaggaaagaataagtgcccagatttcatcagtttcttttttcatgctttgagaaaaagggaaagaacatttgaggatggaactagcaagaagaaataattaaaacaccacaacagctggcagtgggattgtggatcaagcttgagtgtggatcaagcttgatttatataaaatcaagttcaagaatgcctctccctgctggagatttaatcatgtttgggaaagktttccccaaatcccaaatttcccctttttctcttctctgtttgatggggttgcagggaggaagtttctgctgaggagaggcaagatacaggggagaaagtggaggttgagggtggagaggaaaaaaattgttagtattgtttggatcagtagtaaaatttctgaggctctcactacattgggaaggaataatttaaaaactgagccatttatcaccacccattaaatcaggggcctgggaactgacactcataaaaattaaaataaataaatattgaattaatgtctgctaaactttttt

SEQ ID NO: 676138 - DNA, 722 bp, Homo sapiens
aacctccgcctcccaggttcaagctattctcctacctcagccccctgagtagctgggattagaggtgcacaccaccacgcccatctaattttagtatttttagtagagayggggtttcaccttgttggtcaggctggtcttgaactcctgacctcaggtggtctgcctgctttggcctcccaaagtgctggaattacaggcgtgagccaccatgcccagccagaataacaatatttcataagtgatcaagacatttcatatctaattctttttttattttcaggaaatccagcaattggaattttaaaatataaagaaaaatattacacattcaatagtaaagatgctgcatattcatttgcagaaaatcctgaacattatattgacatagttagagaaaaggccaaaaaaaatacagagttaattcaactattggaacttcatcaacagtttgaaacatttattccatattctcaggtaagcagggtcaatattttatgaatttatgacatttaaaaatatagttaatttaaaagttgtattttgttgtagaatgcttcccaggtccacacagagagagtcagatgagggtctttacaggttgtctgaaagggattcatatctgaagatgaaaactaattgaatcaaagaataatgaaaacaggatatggagtcaaattgatgaattaggaaatggggaaaatctgaatcagaacaacttc

SEQ ID NO: 676139 - DNA, 1306 bp, Homo sapiens
tgtcttcagcaagttacatagcggcagttatcatatttaaagcaaccttcaccatattatacccagcaggatgaaatatcatggctgttttcttaaataagaagcatacagaaggcttatgtttttatgaagcttaagaatttgcagcacaaaagtagcaaaaacaaaaaaagagtgtgtaattacaagctacattaaacggttgttgcttcatgagcaagttaattattgacaggtttaaacaagttacactgaaagaaaaagcattccttcaagaccacagtgagcacgagaacaccggcaactgccccctgaagaaactcaccactgactgtgttcttccaacaacagagaaccacattttcatttccgggaccacaacaacttcatgaactgaaaatcaaccgtctacttctctcagttttcaacagcaaccaagacagctggtttttcaagaccgggatcaccacattctgcgctggatgctatgaccctgtatggcatttatcaacacgacctagaaccaatgcaatattcaggctcttacgtaaccagtccacgctgactgctattcgctttgtacttttaaactttaaaaagacttagaaaaataaaaaggagggaattgtttgtaattttaaaatccaaattaaacaggaagcatcatgttgtcccacagatgaccaagaagtagcctgctgaccgtccccaaaagcaatgttttaaaaagtaaactgcatacccacactgcttccaaatcatctggatttcataaaacttaaccaccgtgtggaaggcgagtcagggaacttaacatcaaaacatggttcagggttacagcagctaccccatacaccaatttagaaaaggaaaaaagaacgggccaaagacaaaaaccacgcagcttatagaaaacaagaaaagcacacaaatgactaggggtaaaatttaacgacacaagtctataggttcctctgcagaaaaaacatataccacacactcatgagactaacaagaatacaaacagcaggtgattatccaataccaggctcaacatgcctgacacagcttctctctctgaagagctgaggtaactataaytattactactatattaaaggcaaggaaactgaggctttgagagggggtgccatgggctccgtgctccaaggctgccagtggcaggagcagaatatgcacagcagcagcgtgactgaaaagcccaggcataaacagaatcctatgtgatgctgccacaccaacacgctcagtaagacgcagggcagggctaacggtgaaatccccc

SEQ ID NO: 676140 - DNA, 1306 bp, Homo sapiens
tgtcttcagcaagttacatagcggcagttatcatatttaaagcaaccttcaccatattatacccagcaggatgaaatatcatggctgttttcttaaataagaagcatacagaaggcttatgtttttatgaagcttaagaatttgcagcacaaaagtagcaaaaacaaaaaaagagtgtgtaattacaagctacattaaacggttgttgcttcatgagcaagttaattattgacaggtttaaacaagttacactgaaagaaaaagcattccttcaagaccacagtgagcacgagaacaccggcaactgccccctgaagaaactcaccactgactgtgttcttccaacaacagagaaccacattttcatttccgggaccacaacaacttcatgaactgaaaatcaaccgtctacttctctcagttttcaacagcaaccaagacagctggtttttcaagaccgggatcaccacattctgcgctggatgctatgaccctgtatggcatttatcaacacgacctagaaccaatgcaatattcaggctcttacgtaaccagtccacgctgactgctattcgctttgtacttttaaactttaaaaagacttagaaaaataaaaaggagggaattgtttgtaattttaaaatccaaattaaacaggaagcatcatgttgtcccacagatgaccaagaagtagcctgctgaccgtccccaaaagcaatgttttaaaaagtaaactgcatacccacactgcttccaaatcatctggatttcataaaacttaaccaccgtgtggaaggcgagtcagggaacttaacatcaaaacatggttcagggttacagcagctaccccatacaccaatttagaaaaggaaaaaagaacgggccaaagacaaaaaccacgcagcttatagaaaacaagaaaagcacacaaatgactaggggtaaaatttaacgacacaagtctataggttcctctgcagaaaaaacatataccacacactcatgagactaacaagaatacaaacagcaggtgattatccaataccaggctcaacatgcctgacacagcttctctctctgaagagctgaggtaactataactattactactatattaaaggcaaggaaactgaggctttgagagggggtgccatgggctccgtgctccaaggctgccagyggcaggagcagaatatgcacagcagcagcgtgactgaaaagcccaggcataaacagaatcctatgtgatgctgccacaccaacacgctcagtaagacgcagggcagggctaacggtgaaatccccc

SEQ ID NO: 676141 - DNA, 1306 bp, Homo sapiens
tgtcttcagcaagttacatagcggcagttatcatatttaaagcaaccttcaccatattatacccagcaggatgaaatatcatggctgttttcttaaataagaagcatacagaaggcttatgtttttatgaagcttaagaatttgcagcacaaaagtagcaaaaacaaaaaaagagtgtgtaattacaagctacattaaacggttgttgcttcatgagcaagttaattattgacaggtttaaacaagttacactgaaagaaaaagcattccttcaagaccacagtgagcacgagaacaccggcaactgccccctgaagaaactcaccactgactgtgttcttccaacaacagagaaccacattttcatttccgggaccacaacaacttcatgaactgaaaatcaaccgtctacttctctcagttttcaacagcaaccaagacagctggtttttcaagaccgggatcaccacattctgcgctggatgctatgaccctgtatggcatttatcaacacgacctagaaccaatgcaatattcaggctcttacgtaaccagtccacgctgactgctattcgctttgtacttttaaactttaaaaagacttagaaaaataaaaaggagggaattgtttgtaattttaaaatccaaattaaacaggaagcatcatgttgtcccacagatgaccaagaagtagcctgctgaccgtccccaaaagcaatgttttaaaaagtaaactgcatacccacactgcttccaaatcatctggatttcataaaacttaaccaccgtgtggaaggcgagtcagggaacttaacatcaaaacatggttcagggttacagcagctaccccatacaccaatttagaaaaggaaaaaagaacgggccaaagacaaaaaccacgcagcttatagaaaacaagaaaagcacacaaatgactaggggtaaaatttaacgacacaagtctataggttcctctgcagaaaaaacatataccacacactcatgagactaacaagaatacaaacagcaggtgattatccaataccaggctcaacatgcctgacacagcttctctctctgaagagctgaggtaactataactattactactatattaaaggcaaggaaactgaggctttgagagggggtgccatgggctccgtgctccaaggctgccagtggcaggagcagaatatgcacagcagcagcgtgactgaaaagcccaggcataaacagaatcctatgtgatgctgccacaccaacasgctcagtaagacgcagggcagggctaacggtgaaatccccc

SEQ ID NO: 676142 - DNA, 636 bp, Homo sapiens
gaagcaattctaaaacagtttgggcttaaatatcttcaataccactggacgtatgatggcttagttcatgatgtcctcagtatatgagaggaaacgagcttatttataaaacagggaacataatattttaattagtatttaattttgattagtgttagacaataatactggcatttaattagtattagacaataatactgccataagaaactattaatttggaattataaatagacataactcaggacatgttattgataagtgagtgctaattatggaagatggttagtattcagactttracattattccagatgattgtgccagagaagctagatttgtactttacattggatttgtgctttcagctatttctaaatgtaccattctgattattcttgaataatatgcatggatttccattactctgtggcctaagaatggatattggctttcaaagtttttattttaagcagttatacatgcaaagtcctttttaaatttttcttttgattttgaggtctcactataaaatagtttgatttttttaaaaacgaagatctgaatgattgttatctttttctaagtagtattctggaacgctgtacaatgataactgctaatgtttataatgct

SEQ ID NO: 676143 - DNA, 615 bp, Homo sapiens
ttaattcattttttattttttgagatggagtttcactcttgtcacccaggctggagtgcaatagcacagtctcagcttactgtaacctccgcctcccaggttcaagtgattctcctgcctcagtctcccgagtagctgggattacaggtgcctgccaacatgcctggctgttttgtatttttagtagagacaggatttcaccatgttggccaggctggtcttgaacccctgacctcaggtgatccacccaccttggcctcccaaagtgccaggattacaggcgtgaaccactgagcccggctctattttcttctttaaataacattgatcgctttcctgattttaagagtaacacacactcattgtaaaaaatgtgaaaaagtacagaagagcgtttcttttcttttcctttcctttycttttcttttcttttcttctcttttctcttttcttttctttcttttttgagacaggttctcacttcatcacctaggctggagtgcagtggctccatctcggctcattgcaataacttctgcctccctggctcacgtgatcctcccacctcagcctcctgagtagcgggaactacaggtgtgtacccccacgcccagc

SEQ ID NO: 676144 - DNA, 1084 bp, Homo sapiens
gcacagtggctcacgcctgtaatcccagcactttgggaggccgaggtgggtggatcacttgaggtcaggagttcgagaccagcctagccaacatggtgaaaccccatctctactaaaaatacaaaaatgagctgggcgcggtggtgggcacctataatcccaggtacttgggaggctgaggcaggagaatcgcttgaacccggaagtcggaggctgcagtgagccaagatcgctccactgcactccagcctaggcgacagcgagattccatctcaaaaataaataaataaataaataaataaataaataaataaataaaataaattcagtgccttgggagagcttcgggaaaggaaatttcatgaaactaccacaagagggcggcactttatactccttttgtgagtgagaaaattctcataaaatttaaaaggcttkctagcaattcctgggctcttttctcaaaagtggaaagaaaccctacaatattctttggcagtgagttacatgtatatgcagcatttctttataaagacacaggagaatgaaaagtaccttgggaaggtggtttagcccagcattccttgtgtttttttggcagtgatgacctggcagcttctgaagcctggccattgattaggattatagagcacaagatactgttgtgtttatcccctgagcccaaggatgttagatcttatccatgcctgtgatgatatctgttatttattgagtacttagcataatgcttggcacattacagtcttacttccatcaacttgttgaatcttcacagacaaatttggaggttggttttatatagcccattttccagacgcggttcagtgatagagttatctgtatgctctatataccacatctaccccaactatgaccttgggcctttcttcatgtttttcaagctaatactatattgaaagataaagtatctggcacaacactgcagacagttgtctttaatagcaatcctcacactctataaacaaacctgcttagaatatttgatggtactcacacacctggtgattttgccattgaaaattatacttcagtttttattccc

SEQ ID NO: 676145 - DNA, 1084 bp, Homo sapiens
gcacagtggctcacgcctgtaatcccagcactttgggaggccgaggtgggtggatcacttgaggtcaggagttcgagaccagcctagccaacatggtgaaaccccatctctactaaaaatacaaaaatgagctgggcgcggtggtgggcacctataatcccaggtacttgggaggctgaggcaggagaatcgcttgaacccggaagtcggaggctgcagtgagccaagatcgctccactgcactccagcctaggcgacagcgagattccatctcaaaaataaataaataaataaataaataaataaataaataaataaaataaattcagtgccttgggagagcttcgggaaaggaaatttcatgaaactaccacaagagggcggcactttatactccttttgtgagtgagaaaattctcataaaatttaaaaggcttgctagcaattyctgggctcttttctcaaaagtggaaagaaaccctacaatattctttggcagtgagttacatgtatatgcagcatttctttataaagacacaggagaatgaaaagtaccttgggaaggtggtttagcccagcattccttgtgtttttttggcagtgatgacctggcagcttctgaagcctggccattgattaggattatagagcacaagatactgttgtgtttatcccctgagcccaaggatgttagatcttatccatgcctgtgatgatatctgttatttattgagtacttagcataatgcttggcacattacagtcttacttccatcaacttgttgaatcttcacagacaaatttggaggttggttttatatagcccattttccagacgcggttcagtgatagagttatctgtatgctctatataccacatctaccccaactatgaccttgggcctttcttcatgtttttcaagctaatactatattgaaagataaagtatctggcacaacactgcagacagttgtctttaatagcaatcctcacactctataaacaaacctgcttagaatatttgatggtactcacacacctggtgattttgccattgaaaattatacttcagtttttattccc

SEQ ID NO: 676146 - DNA, 1084 bp, Homo sapiens
gcacagtggctcacgcctgtaatcccagcactttgggaggccgaggtgggtggatcacttgaggtcaggagttcgagaccagcctagccaacatggtgaaaccccatctctactaaaaatacaaaaatgagctgggcgcggtggtgggcacctataatcccaggtacttgggaggctgaggcaggagaatcgcttgaacccggaagtcggaggctgcagtgagccaagatcgctccactgcactccagcctaggcgacagcgagattccatctcaaaaataaataaataaataaataaataaataaataaataaataaaataaattcagtgccttgggagagcttcgggaaaggaaatttcatgaaactaccacaagagggcggcactttatactccttttgtgagtgagaaaattctcataaaatttaaaaggcttgctagcaattcctgggctcttttctcaaaagtggaaagaaaccctacaatattctttggcagtgagttacatgtatatgcagcatttctttataaagacacaggagaatgaaaagtaccttgggaaggtggtttagcccagcattccttgtgtttttttggcagtgatgacctggcagcttctgaagcctggccattgattaggattatagagcacaagatactgttgtgtttatcccctgagcccaaggatgttagatcttatccatgcctgtgatgrtatctgttatttattgagtacttagcataatgcttggcacattacagtcttacttccatcaacttgttgaatcttcacagacaaatttggaggttggttttatatagcccattttccagacgcggttcagtgatagagttatctgtatgctctatataccacatctaccccaactatgaccttgggcctttcttcatgtttttcaagctaatactatattgaaagataaagtatctggcacaacactgcagacagttgtctttaatagcaatcctcacactctataaacaaacctgcttagaatatttgatggtactcacacacctggtgattttgccattgaaaattatacttcagtttttattccc

SEQ ID NO: 676147 - DNA, 1084 bp, Homo sapiens
gcacagtggctcacgcctgtaatcccagcactttgggaggccgaggtgggtggatcacttgaggtcaggagttcgagaccagcctagccaacatggtgaaaccccatctctactaaaaatacaaaaatgagctgggcgcggtggtgggcacctataatcccaggtacttgggaggctgaggcaggagaatcgcttgaacccggaagtcggaggctgcagtgagccaagatcgctccactgcactccagcctaggcgacagcgagattccatctcaaaaataaataaataaataaataaataaataaataaataaataaaataaattcagtgccttgggagagcttcgggaaaggaaatttcatgaaactaccacaagagggcggcactttatactccttttgtgagtgagaaaattctcataaaatttaaaaggcttgctagcaattcctgggctcttttctcaaaagtggaaagaaaccctacaatattctttggcagtgagttacatgtatatgcagcatttctttataaagacacaggagaatgaaaagtaccttgggaaggtggtttagcccagcattccttgtgtttttttggcagtgatgacctggcagcttctgaagcctggccattgattaggattatagagcacaagatactgttgtgtttatcccctgagcccaaggatgttagatcttatccatgcctgtgatgatatctgttatttattgagtacttagcataatgcttggcacattacagtcttacttccatcaacttgttgaatcttcacagacaaatttggaggttggttttatatagcccattttccagacgcggttcagtgatagagttatctgtatgctctatataccacatctaccccaactatgaccttgggcctttcttcatgtttttcaarctaatactatattgaaagataaagtatctggcacaacactgcagacagttgtctttaatagcaatcctcacactctataaacaaacctgcttagaatatttgatggtactcacacacctggtgattttgccattgaaaattatacttcagtttttattccc

SEQ ID NO: 676148 - DNA, 756 bp, Homo sapiens
ttccccagaccctccagatatgaatgctgcttaaccaacaccttgatttcagtcttgttagatcctgagaagagaatccagtcatgccacgcttgggcttctgatcaactgaactgagagctcatgaatgggaagagctcattatgttaagctgctgaattggtggtaatttgttacatgacaatagaaaaataatataccattttcttattattaatatactttttctgcactatagactcattgaggtgccaygggtgtctttctttctttctttcttcctttctttcttccttccttccttccttccttccttccttccttccttccttcctttctttctttctttctttctttctttctttctttctttctttctttctttctttctttccttctctctctctctttctttttttctcatctcctttgcattgtgcttacacctagcaggtgctgtaaatgtgagctagagaggctgtgtgtctagttaggaggacagactctggagccagactgcctgggtttaaacctggcgctgtgtcttaccagctgtgggaccctgggcaacttacttaactgccatgtgtaaaataggaatgaaataatcatgcttgctcataaggctggggtgaggatgagatgacctttgtgtgtaaagtgcctagtacatagtaagagctcaacaacatgttagtaattattactgtgtgtttcataaattagcaaataaatcttaactactatgggacaaaa

SEQ ID NO: 676149 - DNA, 596 bp, Homo sapiens
gctgaaaaacccacagtgatcaactaagcgtatacgtcatgctctatttgccctggcagggccatttgccaccctgtcgtaccctgctctctggctgcaaagctgaactttaggggcttcatcaactggctccctaactcactgcctttcagctaggcaagctggcaagaaataagagggaagagaggaggctgggatatttgtttcctagactcactttttctggggttgccttggctggtcgtttcctctgtggtcatcattcctcttcaggtagccttttttcacagagctcttcctcgttcctgattctgggaacaatgccctcctcttttccttcagaccccrggatggtaacagcttcttcaaatttccgacaccaaaccctttgtaaatagtgcctttactgaactgcccttgaattatcccagtctaaatgagccatctgatttctgataggcccttcactgttacaccgagatcgttagatttttaagaagagtttggagtccataggttctgactgtagctctctaattagcaaagtgcttgagtttgactacatctatatgggctgttcaaaggaccatttctct

SEQ ID NO: 676150 - DNA, 661 bp, Homo sapiens
agcagaggaagcggccggtccctgtgccctgtccaggcaggccagtgtccaaagctggcccccagggtgtgctctgcatggcttttagtctggaatgttcgtggagacagcccacgtgccttgctgggtttgagcctcacatggacctgatggagacagagccggagggtcctgtggtccttgctctttgggtaaggacaccaggctcragtaggtgaaaaggatttgccacaggtcccggcaggtaggaggtgcagcttggaaccaccctgagcttctgccgattcaaggcccattaaatacttcccaccaaggcagcgggactgaccccaagccaggcgctctcctgtctctgcacccaccttgctgggtgactttagacctgctcccttccttctctgggactgtaatatgaggagaaaggaagcgtgtttccaccagatcgaggttagggactgtgggaggagacacgactcacagtcagcaccacggggcgctgtggggcgggtgctcctggttgtagtgtctgccaccccctcgtgctccctcatttcctcttgaggagtcaccagtggtctccattcacgtgtcaggcctgcctgccctgagctctcagcggggacccagggacagcgccctcccccacacactctgtggctcc

SEQ ID NO: 676151 - DNA, 661 bp, Homo sapiens
agcagaggaagcggccggtccctgtgccctgtccaggcaggccagtgtccaaagctggcccccagggtgtgctctgcatggcttttagtctggaatgttcgtggagacagcccacgtgccttgctgggtttgagcctcacatggacctgatggagacagagccggagggtcctgtggtccttgctctttgggtaaggacaccaggctcaagtaggtgaaaaggatttgccacaggtcccggcaggtaggaggtgcagcttggaaccaccctgagcttctgcygattcaaggcccattaaatacttcccaccaaggcagcgggactgaccccaagccaggcgctctcctgtctctgcacccaccttgctgggtgactttagacctgctcccttccttctctgggactgtaatatgaggagaaaggaagcgtgtttccaccagatcgaggttagggactgtgggaggagacacgactcacagtcagcaccacggggcgctgtggggcgggtgctcctggttgtagtgtctgccaccccctcgtgctccctcatttcctcttgaggagtcaccagtggtctccattcacgtgtcaggcctgcctgccctgagctctcagcggggacccagggacagcgccctcccccacacactctgtggctcc

SEQ ID NO: 676152 - DNA, 661 bp, Homo sapiens
agcagaggaagcggccggtccctgtgccctgtccaggcaggccagtgtccaaagctggcccccagggtgtgctctgcatggcttttagtctggaatgttcgtggagacagcccacgtgccttgctgggtttgagcctcacatggacctgatggagacagagccggagggtcctgtggtccttgctctttgggtaaggacaccaggctcaagtaggtgaaaaggatttgccacaggtcccggcaggtaggaggtgcagcttggaaccaccctgagcttctgccgattcaaggcccattaaatacttcccaccaaggcagcgggactgaccccaagccaggcgctctcctgtctctgcacccaccttgctgggtgactttagacctgctcccttccttctctgggactgtaatatgaggagaaaggaagcgtgtttccaccagatcgaggttagggactgtgggaggagacacgactcacagtcagcaccacrgggcgctgtggggcgggtgctcctggttgtagtgtctgccaccccctcgtgctccctcatttcctcttgaggagtcaccagtggtctccattcacgtgtcaggcctgcctgccctgagctctcagcggggacccagggacagcgccctcccccacacactctgtggctcc

SEQ ID NO: 676153 - DNA, 643 bp, Homo sapiens
aaaatgtgaaaaattttcttttcttcttttcgtgcaattagatcttcttgactaagaaaaaatgcagacaagcaattactccgttactttaattactctcctaattataacgataaccttgtcacattatcataattccccaaacagaaaaacgcatgctccaaattgcaccaatatttgataattttaccttgttaacggctcactgtcagtatgtagagcactacattttttccccattacctttctattgcacagtctatatttctttgcctcagaaaatgataatacattctgtacaacatgtttgtgttrcacaaccccgtgatttgaatatggctttttaacgtctcgcagtttcagaagctatctcctgagcagtgtgtaattctctcctggctgtttgatggtaatgggagctgtacatgtatctggagagaggagaaccagcctgggggtaagaaagtagctatttatcaaggtatcttacaatctcagtttatgttgttgtaaaatgttattgtgcacgttccctgagattatatccgctagacatttgtcagccattgtcaacatactgtaaggaataagcatgtgtattattccagtcaacttaattttattctgcatttctttgccctca

SEQ ID NO: 676154 - DNA, 643 bp, Homo sapiens
aaaatgtgaaaaattttcttttcttcttttcgtgcaattagatcttcttgactaagaaaaaatgcagacaagcaattactccgttactttaattactctcctaattataacgataaccttgtcacattatcataattccccaaacagaaaaacgcatgctccaaattgcaccaatatttgataattttaccttgttaacggctcactgtcagtatgtagagcactacattttttccccattacctttctattgcacagtctatatttctttgcctcagaaaatgataatacattctgtacaacatgtttgtgttgcacaaccccgtgatttgaatatggctttttaacrtctcgcagtttcagaagctatctcctgagcagtgtgtaattctctcctggctgtttgatggtaatgggagctgtacatgtatctggagagaggagaaccagcctgggggtaagaaagtagctatttatcaaggtatcttacaatctcagtttatgttgttgtaaaatgttattgtgcacgttccctgagattatatccgctagacatttgtcagccattgtcaacatactgtaaggaataagcatgtgtattattccagtcaacttaattttattctgcatttctttgccctca

SEQ ID NO: 676155 - DNA, 887 bp, Homo sapiens
ccaggctggccttgaactcctgacttcaggtgatccacccgccttggcctcccaaagtgctgggattacaggcgtgagccactgggcccggacagattttgttattttatatattaaaactatatgtattcatgtattatataataaaatatattttttaaatttaaggcaaaaatgttttaaaatacacactgccagtaactacttgcagaaggaaaagtatattggaaaacctcacagaagtttttaaaatttttaaatttaaaacaaccagttaacatggaaagttagatttatatttaagaatttactaggcagccataaaaagaatgaaatcatgtcctttgcagcaacatggatggagcaggaggccattatcctaagagaactaattcagaaacagaaaatcaagtatctcatgttctcacttataagtgagagctaaacataggtacccatggacataaagacgaaagtagtagacacagaccattccaaaatggaagagtttgggagaagactgaggattgaaaaagtacctcttgggttcaaggttcaatatttgggtcatgtgtgtataagtccagtccccaccattacacagtataccagtgtaacaaacatacacatgtaccctctgaatctaaaataaattaattaaaaaaattaaagacacttcctaaagtttgcccccccaaaaagttaactartatggcttatttatttatttatttatttatttatttggagatggagtctcactccatctcatcacagtgatgtgatctcggctcattgcaacctccacctcctgggttcaagtgattctcctgcctcacactcctgagtagctgggactaccggagtgcaccaccatacccggccaa

SEQ ID NO: 676156 - DNA, 887 bp, Homo sapiens
ccaggctggccttgaactcctgacttcaggtgatccacccgccttggcctcccaaagtgctgggattacaggcgtgagccactgggcccggacagattttgttattttatatattaaaactatatgtattcatgtattatataataaaatatattttttaaatttaaggcaaaaatgttttaaaatacacactgccagtaactacttgcagaaggaaaagtatattggaaaacctcacagaagtttttaaaatttttaaatttaaaacaaccagttaacatggaaagttagatttatatttaagaatttactaggcagccataaaaagaatgaaatcatgtcctttgcagcaacatggatggagcaggaggccattatcctaagagaactaattcagaaacagaaaatcaagtatctcatgttctcacttataagtgagagctaaacataggtacccatggacataaagacgaaagtagtagacacagaccattccaaaatggaagagtttgggagaagactgaggattgaaaaagtacctcttgggttcaaggttcaatatttgggtcatgtgtgtataagtccagtccccaccattacacagtataccagtgtaacaaacatacacatgtaccctctgaatctaaaataaattaattaaaaaaattaaagacacttcctaaagtttgcccccccaaaaagttaactagtatggcttatttatttatttatttatttatttatttggagatggagtctcactccatctcatcacagtgatgtgatctyggctcattgcaacctccacctcctgggttcaagtgattctcctgcctcacactcctgagtagctgggactaccggagtgcaccaccatacccggccaa

SEQ ID NO: 676157 - DNA, 2603 bp, Homo sapiens
tttaccttatcccatataaccaagcctaaataagctttgacaaaatgcctatatgaaatatttttaaagtagttttaaaacaatttaatattctaagagtagaaaatactgtaaagaaatctttatgaaaaagagcagtgtttaatttcaaatacatttattttcttaagactggatttttacctaataggtttgtctaaagtaggggcattcctatgatgggttggtatttattttctcagatgagccgctgatataagcccatatagcattcagtttttttaatttttatttttagagatagggtcttactctgtcattcaggccgtagtgcagtggcaaatcatggatcactgcagccttgacctcccggactctagtgatcttcccaccttagcctctcaagtagctgggactgcaggcatgtgccaccacacccagctaatttttaatttttttgtagagatggagtctccctatgttgcccaggctggtttcccaactcctgggctcaagcaaccctccttccctggcctcccaacgtgctgggattagaagcatgagcgaccacgcctggcctaaaaattattttcatggtttatttcaacatagcaaataaaagtatctacaactggctgggcacagcctccccagtaaccgggaccacaggcatgtgaccactacacccagctaattttttaaattttttgtagaagttggggtttccctgtgttgcccaggctggtctcaaactcctgtgctcaagtgaacctcctgcctcagcttccctaagtgctaggattacaggtgtgagccaccatgcctggggtatgattttttaatttttttttttctttttgagactcagtctcgctctgttacccaggctgcagtgcagtggcgcaatctcggctcactgcaagctctgcctcctgggttcatgccattctcctgcctcagcctcccgagtagctgggactataggcgcccgccaccacgcccggctgatttttttgcatttttagtagagatgggtttcaccatgttagtgaggatggttttgatctcctgaccttgcgatccgcccaccctggcytcccaaagtgctgggattacaggcatgagccaccgcaacccggccgatttttaaatttaataaaagcatttacataacagatttcagaaagaaatcaagtttttagttttctttcctacttaaaaaaattgagtgaaagctgatttgactagatgtaaaataaaaatatgtaaatatacgtcaggggctgtactaccattggaaatacaaatatgtgataaattctatacttgtgatgaaaaacttgtaagatgctaagcagttcagaaaaggtagctcctttccacagaaatttttatagactttggtagttgtagttttttttttttttttttttttgagaccgagtgttgctttgctgcccaagctagaatgcagtgacgcgatttcagctcactgcaacctccgcctcctgggttcaagtgattctcctgcctcagcctcccaagtagctgggattacaggcatgtggacccagttattggggaggctgagtgggaagactgcctgagcccaggagttggaggttgcggcgagctatgatcatgccactgcagcctgggcgacagagccagaccctttctcaaaaaaagaaaaaaataaataaaaatcacgagttaggtaaaatggttactaaatatttaatttaaaccaaatgatatatctttaatttgctcttctttttctaatttcctaaagtagatgctgattttagatctttaacattttccagtatatgcattcaatactataaatttccctctagccactgcttttgctgcatctcacaattttttttttttttttttttttgagacggagtctcgctctgtcgcccaggctggagtgcagtggcacgatctcggctcactgcaaactctgcctcccgggttcacgccattctcctgcctcagcctcccaaatagctggtactacaggcacccaccaccacacctggctaattttttgtatttttagtagagacggggtttcaccatgttagccaggatggtctctatctcctgaccttgtgatccacctgcctcggcctcccaaagtgctgggattacaggcgtgagccactgcaccggcagcaacaaaatgatatatcttaaggaacaatgactcacttatgcaaatgagacttaccctaaagaaataattaagtgaaaagacattcaggtatcctttgttctcaatatcaagcagtttgaaaatatattgtagagctgcaggttcctttctgttttctaatgcaaggacaaagtccaagtaggtcttatagtcctacagaacagaaaataatgttcattagaggccttagttgaaattaactttcaagtgaatatcttatgatttgaagctattttgcaatcaaaggtggcaaatttaattttttccctaagttatgatatgagaaatccatttatatacttaatattggtttctagggaatttttttcgagacagagtttcactctcattgcccaggctggagttgcaatgg

SEQ ID NO: 676158 - DNA, 593 bp, Homo sapiens
aatttaacagaaaaattagtattaaatcctaggggcttacaatttttaattgttttaaatatttttgggtaggcaacagactgtgcagtttttacctaaacagatttcttctctgtggactggagttgaggaatttcaggagkcactcaaagaactgcatccatttctgctttagatacacaaacagcaaagctagagggtatgtctgtttttgtgtgtatatatgtagttaaagaactatgctatcaaaacattaattatatttgaaagagaacagagcatgttgtgaagaaaattgcaatattgaatttatattccacagaatctgtctgagagggctgaaattgtatacctgtcttatatgatgcaccctcttcagagaggtgcctaacaagagcaaagagatgaaagagtcaaacttggaggggagtgatcttaaatgtttggttggtcctgagcagcgggaatccacatgaaaatgcaaaccacatgaagaacatacatgggatctttgttccctgtcaacaaaaacaaatagaatttttttttcctctaccaagcaaatacagaataatcttagctgaatttggggg

SEQ ID NO: 676159 - DNA, 584 bp, Homo sapiens
gaacaccaactgcttgggtctctattggaaaaggacacaccagtccttgccctcaaaaattgaatgtttaaaaatatctgtcagctgatgggcaaaggtgcgaagtcatggagctttgcratagctcctgacaagttctacttgtgtatggaggcaacatgtggaaaaacaagaaaaagtagtggagaagaagtcactttctaagccagtgcagatcacatttctacatggtattgatgacaatgattaaaaagtatccctttcaaaatgcctttatttgttttccccaaggttattttagcaggtgccatttgtaacacatgataaacatgaagcaagacttttaggctgggcgcggtggttcacgcctataatcccagcagtttgggaggcagaggtgagcggatcatctgaggtcagaagtttgaaaccagccttgccaacatggcgaaaccccatctctactaaaaatacaaaaattagccaggtgtggtggcgggagcctgtactcccagctacttgggaggctgaggcagaagaattgcttgaatccaggaagcagaggttgcagtgagcagagatca

SEQ ID NO: 676160 - DNA, 584 bp, Homo sapiens
gaacaccaactgcttgggtctctattggaaaaggacacaccagtccttgccctcaaaaattgaatgtttaaaaatatctgtcagctgatgggcaaaggtgcgaagtcatggagctttgcgatagctcctgacaagttctacttgtgtatggaggcaacatgtggaaaaacaagaaaaagtagtggagaagaagtcactttctaagccagtgcagatcacatttctacatggtattgatgacaatgattaaaaagtatccctttcaaaatgcctttatttgttttccccarggttattttagcaggtgccatttgtaacacatgataaacatgaagcaagacttttaggctgggcgcggtggttcacgcctataatcccagcagtttgggaggcagaggtgagcggatcatctgaggtcagaagtttgaaaccagccttgccaacatggcgaaaccccatctctactaaaaatacaaaaattagccaggtgtggtggcgggagcctgtactcccagctacttgggaggctgaggcagaagaattgcttgaatccaggaagcagaggttgcagtgagcagagatca

SEQ ID NO: 676161 - DNA, 1969 bp, Homo sapiens
tccctcatttctttattcccttcaatataattatggcattcatttaaaataattaaagttaagtccatttgttccagtttcctttcagtttaggttatttttttcttccctcccattcttattgtwctaattttattttttgaacctgtagaatgctgatatggattgaatatttgtcccctccaaatcttacattgaaatgtgacctccaaaattggaggtgggccggggtgtatccctcatgaacggcttggtgctctcccagcagtaatcccactctgatagttcacatgatatctagttgttaaaaagagcagtggttcatgcttgtaatcctggcacttttggaggccaaagtgggaggattgctggagcccaggagttcaagaccagcacgggtaatgcagtgagaccttgtctctacaaaaaattaaaaaataaaaaattagacactgggtgtggtggcacatgcctgtggtcctagctatttgggaggctgaagggggaggattgcttcagcctaggtggtcaaggctgcagtgatcactctactgtactccagcctgggcaacagattgagatcctgttgaaagaaagaaaaaaaagaaaaataaaagaaagaaagaaagaaagaaagaaagaaagaaagaaagaagaaagagaaagagagacaaaaggaaggaaggaaggaaggggaagggaaatgaagggaagggaaggaaggaaggagaaaaagagaaagaaagagagagagggagggagggaagaaggaaggaaggaaggaaaaaaggaaggaaggaagacagcctggcatctcccttgcctcctctttcaccatgggacacacctgcttctgctttgcctactgccatgagtgaaagcttcctgaagcctccactggaagtggatgctggagtcatgcttcttgtgcagccagcagaacggtgagtcaaataaacctcttttctttataaattacccagcctcagggtaattccttcatagcaacacaaatggactaacacatgtgctttccaacttaaaactatacaaaaagctgcactcaaacaaccatcactgccttccctatctcttccatcccatttcctcccagcccttgtaaatacacaaattcattgtttctggctgattcttcttcggtttctttctgtaataataaggagatatatgtatatttttgtattttccttctttctagcctcaaaagtatcatactaaatgtattttttgtctttgagtttaaaatttaatatcctttagaaatcactccacattagttcatagatatctttctcagtcttttataattatgtgacacacactgatatcacaacctttttgaggtccttaaaaaatatgaaaggagattggatttcattccatgcctgtattatgtgaaaggattaatgacatgagaaaaacttttcaagaaaggtgttggcataaatgaccatatctgctgtgttcattgtctaagagcaactgtgctttaagtccatcttttcatgcttctctttgactttcctctggcagttacccctattctcctgtcccttaactaaatttgatgcccctctcactctgccaacaactggctactttccctaggccagtgcagtgtgcacgcactgttgagagaaagttttggatggcagcagatatttaagcatgggcttgcacactgcataaagactcctagctggagaggccagtcaggatgaaatccatccaatattcatctggccaagtcatgctggctcacatgttgaaaaatgtcttccaagaggaagggatgcattttcttagttttcaaaaagacactgtaaagtctagtagcagccctgtcctcaaccctccttccctgtagagttaccatcacatctgtccaccctacacaatcagacttctcagagtttcatcttagccatatccctcccattcattcttc

SEQ ID NO: 676162 - DNA, 1969 bp, Homo sapiens
tccctcatttctttattcccttcaatataattatggcattcatttaaaataattaaagttaagtccatttgttccagtttcctttcagtttaggttatttttttcttccctcccattcttattgttctaattttattttttgaacctgtagaatgctgatatggattgaatatttgtcccctccaaatcttacrttgaaatgtgacctccaaaattggaggtgggccggggtgtatccctcatgaacggcttggtgctctcccagcagtaatcccactctgatagttcacatgatatctagttgttaaaaagagcagtggttcatgcttgtaatcctggcacttttggaggccaaagtgggaggattgctggagcccaggagttcaagaccagcacgggtaatgcagtgagaccttgtctctacaaaaaattaaaaaataaaaaattagacactgggtgtggtggcacatgcctgtggtcctagctatttgggaggctgaagggggaggattgcttcagcctaggtggtcaaggctgcagtgatcactctactgtactccagcctgggcaacagattgagatcctgttgaaagaaagaaaaaaaagaaaaataaaagaaagaaagaaagaaagaaagaaagaaagaaagaaagaagaaagagaaagagagacaaaaggaaggaaggaaggaaggggaagggaaatgaagggaagggaaggaaggaaggagaaaaagagaaagaaagagagagagggagggagggaagaaggaaggaaggaaggaaaaaaggaaggaaggaagacagcctggcatctcccttgcctcctctttcaccatgggacacacctgcttctgctttgcctactgccatgagtgaaagcttcctgaagcctccactggaagtggatgctggagtcatgcttcttgtgcagccagcagaacggtgagtcaaataaacctcttttctttataaattacccagcctcagggtaattccttcatagcaacacaaatggactaacacatgtgctttccaacttaaaactatacaaaaagctgcactcaaacaaccatcactgccttccctatctcttccatcccatttcctcccagcccttgtaaatacacaaattcattgtttctggctgattcttcttcggtttctttctgtaataataaggagatatatgtatatttttgtattttccttctttctagcctcaaaagtatcatactaaatgtattttttgtctttgagtttaaaatttaatatcctttagaaatcactccacattagttcatagatatctttctcagtcttttataattatgtgacacacactgatatcacaacctttttgaggtccttaaaaaatatgaaaggagattggatttcattccatgcctgtattatgtgaaaggattaatgacatgagaaaaacttttcaagaaaggtgttggcataaatgaccatatctgctgtgttcattgtctaagagcaactgtgctttaagtccatcttttcatgcttctctttgactttcctctggcagttacccctattctcctgtcccttaactaaatttgatgcccctctcactctgccaacaactggctactttccctaggccagtgcagtgtgcacgcactgttgagagaaagttttggatggcagcagatatttaagcatgggcttgcacactgcataaagactcctagctggagaggccagtcaggatgaaatccatccaatattcatctggccaagtcatgctggctcacatgttgaaaaatgtcttccaagaggaagggatgcattttcttagttttcaaaaagacactgtaaagtctagtagcagccctgtcctcaaccctccttccctgtagagttaccatcacatctgtccaccctacacaatcagacttctcagagtttcatcttagccatatccctcccattcattcttc

SEQ ID NO: 676163 - DNA, 1969 bp, Homo sapiens
tccctcatttctttattcccttcaatataattatggcattcatttaaaataattaaagttaagtccatttgttccagtttcctttcagtttaggttatttttttcttccctcccattcttattgttctaattttattttttgaacctgtagaatgctgatatggattgaatatttgtcccctccaaatcttacattgaaatgtgacctccaamattggaggtgggccggggtgtatccctcatgaacggcttggtgctctcccagcagtaatcccactctgatagttcacatgatatctagttgttaaaaagagcagtggttcatgcttgtaatcctggcacttttggaggccaaagtgggaggattgctggagcccaggagttcaagaccagcacgggtaatgcagtgagaccttgtctctacaaaaaattaaaaaataaaaaattagacactgggtgtggtggcacatgcctgtggtcctagctatttgggaggctgaagggggaggattgcttcagcctaggtggtcaaggctgcagtgatcactctactgtactccagcctgggcaacagattgagatcctgttgaaagaaagaaaaaaaagaaaaataaaagaaagaaagaaagaaagaaagaaagaaagaaagaaagaagaaagagaaagagagacaaaaggaaggaaggaaggaaggggaagggaaatgaagggaagggaaggaaggaaggagaaaaagagaaagaaagagagagagggagggagggaagaaggaaggaaggaaggaaaaaaggaaggaaggaagacagcctggcatctcccttgcctcctctttcaccatgggacacacctgcttctgctttgcctactgccatgagtgaaagcttcctgaagcctccactggaagtggatgctggagtcatgcttcttgtgcagccagcagaacggtgagtcaaataaacctcttttctttataaattacccagcctcagggtaattccttcatagcaacacaaatggactaacacatgtgctttccaacttaaaactatacaaaaagctgcactcaaacaaccatcactgccttccctatctcttccatcccatttcctcccagcccttgtaaatacacaaattcattgtttctggctgattcttcttcggtttctttctgtaataataaggagatatatgtatatttttgtattttccttctttctagcctcaaaagtatcatactaaatgtattttttgtctttgagtttaaaatttaatatcctttagaaatcactccacattagttcatagatatctttctcagtcttttataattatgtgacacacactgatatcacaacctttttgaggtccttaaaaaatatgaaaggagattggatttcattccatgcctgtattatgtgaaaggattaatgacatgagaaaaacttttcaagaaaggtgttggcataaatgaccatatctgctgtgttcattgtctaagagcaactgtgctttaagtccatcttttcatgcttctctttgactttcctctggcagttacccctattctcctgtcccttaactaaatttgatgcccctctcactctgccaacaactggctactttccctaggccagtgcagtgtgcacgcactgttgagagaaagttttggatggcagcagatatttaagcatgggcttgcacactgcataaagactcctagctggagaggccagtcaggatgaaatccatccaatattcatctggccaagtcatgctggctcacatgttgaaaaatgtcttccaagaggaagggatgcattttcttagttttcaaaaagacactgtaaagtctagtagcagccctgtcctcaaccctccttccctgtagagttaccatcacatctgtccaccctacacaatcagacttctcagagtttcatcttagccatatccctcccattcattcttc

SEQ ID NO: 676164 - DNA, 1338 bp, Homo sapiens
tgttttagacttttctgctagtatttgtgctttaaacctgtagtcattttctgctcgtgtttgatattttaagggctgccttaaactcttattggaagacagtgcctgaagactaaggtgaagaggagagctactcaaatgtttttatgaagacattctttagaaattgattgttagttgatgggtttgtatctgtatcctttcccgtatttctgctgttagcgttttacatcagtcagtcattgttccagtaatgcgcataaaacccaccccaactcagtggcagtttcctgagctgtgtgctcatattccctgtttgagttatgagccatgaggttggtttattggcatatatcctgaggagtggctgtacaaaccccctctcatggtgggcaggaggctgaagtcagtgggtggggagaaggtccattgaagtcagaattgctcttgaaagttccttaaatttccctggaaatcaccagatcctaagctcttggatactcaaaagcagggagtgactttgttcccttctttctctacctagtcggtggcttcccttgccctgcgtgagtggaatccacggtcctgttgaatgaaggtggaggggaagtgaaagactgtggggtgggtgtgagctctgacagcaggcactgactgcagcagagctggtggcaacatggtcatcgtggctggagccttgggctttgatctgcagaactcagaacttggatgttagtcttcagttctctttctgactcactgggtcatggcactcatccataactgccacgtaccctacttcccagcttggaaatcacagcggatggcaacctcttccttatatccaagttaacagaggaagacatcattaagttctgagttattttgaaagtagttgacagtagaacatgtgtttatcttaatgaggcaggtcttagacagttaggtaatgagagagagttttattatcctctgtactgtactctatgtctccactctcttgccccttagtctgccttcctcatttttattacttttcattttctaaagtccagacttctttgcctggcccctacaggcactaatctccttgtcggtatcatctgtcctagcacagttctttctgtgcccaccacccctggagtccccgccctgccagaggccctgctgctggtyggtgtgtgcaccggggctttgggtttcctggtgtcttgtggtctttgcctgtgttactccttcattcaggatgtgtcccctttccgttcctctagcaaaatccatcttgaagcccgcctcccccgatcactcctcttctcccctacttcccagttaggatga

SEQ ID NO: 676165 - DNA, 2473 bp, Homo sapiens
gaaaatgtggaaaatgaaaagttgtccaggctggactcaaactactgggctccagcaatcctcccacctcagcctcctgagcagctgggactacaggcacatgccactgcacccagctcctaggagccatattttaaatagatttataatattttggaacacattcatcactatatcaaactattcccctgcaaacacttagattgctttcaattatttgctaatataaataatatcagagtgtacatctttttctttttgagacagggtctcactcttttgtccagtctggagtgcagtggtgtgatggctcactgcagccttcacctgcctgggtgatctgactacctcaacctcctgagaagatagaaccacaggcacatgctaccatgcctggctaatttttgtattttttggtagagacagggtttcaccatgttggccaggctggtctcaaatgcctgggctcaagcaatctgccagcctcattctcccaaagtgctgggattataggggtgagacaccgtgcctggctggagtgtccatctttatatgcctatatgttttttttctatatgttgaattattttgttaatgtaggttctcagaaatgggatagtcaaaaaacagacatttttataggttcctgactacagattcttgacatatatactgttgaaagctaagcaaactactgaattgctatttgtagcaaatcatgactctaaccatacatggaattctaataatttcattttattcctgctactactgaatattaccttaaaaataaattatgccaatttaacttgcagttttaaattcccattctgaatgagacaacataagttttagagtatcaactttccaaagtacatttgatctatcctctagtctctgccagatccctgagcaaatgaagggttccacagccaaataaatgtgggaagctctgcatattatcacctttctcccagatttccaattatgttagtatatgaatagttcagaaaggctctgcagatcactccacgtcttattttaaaaacatgtcaacagacaacaaattcccctaattaacaaacgaattcctttctcatgctatcatcatctagcaatatttagggaaatgcgttatgtaaagayaactaactcaccttcccgtatactggtgaagtgttttatacaaagcaagaactgctgattcttcttcacaagggggattttcttgatccatgccattctcttctgaaagataaggaaatactagtactctgtattttccaattaagtgttatcaaaaggactgaagacattaagcatgcaaatatattcataaactcacatataacatgaagtattcctagaaaacatgcaaaattgtaatccctcaagtgggagcacagtattgatctcaatcaaaccaaacagccagctggcatgttttaagtaaaatcaaataaatatagtcttaaagtgtatgaaaaacaagaattttgaatgcaaaacgtaatttaatgatgaattcatgtgggcattaacaaacatgtaagttaaaacaaaattggcattctaaaacataagattctaaaagatttaattactattctacacaaatattactgaatgtatgaaattaaaactagaaacattcacattactaggaaattttaagaggagaaagaaatgtttcaaaacttttcatatgaagatacacagaaaaaaacagccttattcatgtgttattctcatccaaataccttttcctctaatactttttttaaaactcagaaaactcaagtatttccttcaagaaactgacaaaaaggcaagagttacctgtacatgaggtaagtaagatctgtatgatgtgtgccatagtaaccagatggaaaatgtgaaggtctccagtgccaaggctgatccctgaaaaatcctgacactgcaacgcaggaaatgcaagcaccaagcccacctaggcaccaaacacaggacatcagacagatcgcctttcctttcacagctaagcaaatttccatcttcttacttttacttttattttgattttttttttgagacagagtcttactctgttgcccaggctggagtgcaatggcgcaacctcggttcactgcaacatccacctcctgggttcaagcgattctcctgcctcagcctcctgagtagctgggattacaggcgtgcaacatcatgcccgactttttgtatttttagtagagatgaggttttgccacgttggccaggctggtctcgaactcctgacctcaggtaatccgcccacctcggcctcccaaagtgctgggattacaggcgtgagccaccgcgcctggtcacatttccattttcttactgtgatccctcctgagttcagctcctccctttaagaaatctttgttcttaaagaaagggcatccatgttggaaaatccaataggactggctacatgaaatga

SEQ ID NO: 676166 - DNA, 2475 bp, Homo sapiens
cagccataaaggaagaatgaaatcatgtcttttgtagcaacatggacctggaggccatgttctcacttataagttgaagcaaaataatgtgtacatgtgggcacagtgtggaataacgacactggagactcagaaggttgggaggctgggaggaggctgagtaacaagaaattactgaatgggtacacgtacattatttggatgatggatgcactaaaagcccaaactgcagcactatgcaatgtattcatgtaacaaaactgcacctgtagcccttaaattgatacaaaaaagttgtttggagagtggcactaaggagtgaaacagaattcttgatccttattacaagcattctgggctattagacttttttcaactacatacatatattactatttgaagtttttaaatggacttaaaatctgaaagaatagtgatcttttaatgaaaaacaaaaccgtaagatactctgcctaaactttcccccataatgcaatgaataaaactttagtttaaccttcctcttcaggataaataatttctgaggctttagaaccaccttaaaaggtatctgtaggccgggcacggtggctcacgcctgtaatcacagcactttgggaggccaaagtgggcagatcttctgagatcaggagttcaaaccagcctggtcaacatgctgaaaccctgtctctactaaaaatacaaaaattagccaggcgtggtggtgcacatctctaatccagctactcagaaggtgcaggcaggaaaatctcctgaacccgggaggcagaggttgcagtgagccaggatcgcagcactgcactccagcctgggcaacagagcaagactcaggactcaaaaaaaaaaaaaaaaaaaagatatttgtagacaactaaataagtcaagttacatgatatatagactatcatcaaaattactggaccgtcactgcttatcaaagtaaagtgtaaccaaaaatttaattcacagtacttcgaccagaccaaaacatccaattcatccatagtttcctaattttaatacttactttaccagagtatgaaaatcttttttgttttttgttttgttttgttttsttttttgagatagggtctccctctgttgcccagtttggagtacagtggcacaatctcagctcactgcaacctctgcctcccgggctcaagcaatcctcccacctcagccttctgaggagctgggaccacaagcatgtagcaccgtgcctggctaatttttgtattttctgtagagacggggtttcttcatgttgcccagctggtctcaaactcctgagctcaagcaagccacccgccttggccttccaaagtgccgggattacaggcatgaggcaccacgccccaccaaaaatgtatctttaacacctgttctctagattgatttaggttttactgatcttagaggtatatacaaccatcatttcaaactcaccagacctaatttagttcaacttcactttttttttttttttaatttctgcccaggctggagtagtggctcgatctctgctcactgcaacctccaccttctagggtcaagtgattctcatgtctcagcctcccaggtagctgggattatagacatgcaccaccacacctggctaatttttgtattgttagtagagacggggtttcgccatgttagccggactggtctcaaactcctggtcccatgtgatctgcccacgttggcctcccaaagtgctgggattacaggcaggagccactacacgctgcctagttcacttttcattccattttttcctttgtaccttttagaagaagcttttaagtaatataaagattattattgtttaatctgtcagaaattgacagggaaaagaacttaaagtttaaatacacaatacaaaaagattaaaaagttatcacaaattggcagggcgtggtggctcacgcctgtaatcccagcactttgggaggccgaggtgggcagatcacccgaggttgggagtttgaggccagcctgaccaacttggagaaacctagtctctactaaaaataaaaaattagctaggcatggtggcgcatggctgtaattccagctactcgggaggctgagggaggagaatcgcttgaacctgggaggcggaagttgcagtgagccaagatcacatgtgccattgcactccaacctgggcaacaaaagcaaaactctgtctcaaaaaaaaaaaaaagttatcacaaattattgctcataacagtttagttaaaataaagaatgtatgtaaaactacagagtaatagcttgatagcaagacaaaatagtttaaaaaaaattctaggaaaaatatggctgactaaattatgatgaaagattttagatatcaaaaataggctgggtgcagctggcgtatgcctataatcccagcactctgacaggccaaggtgggtggatcagttgagcccaggagttcaa

SEQ ID NO: 676167 - DNA, 2475 bp, Homo sapiens
cagccataaaggaagaatgaaatcatgtcttttgtagcaacatggacctggaggccatgttctcacttataagttgaagcaaaataatgtgtacatgtgggcacagtgtggaataacgacactggagactcagaaggttgggaggctgggaggaggctgagtaacaagaaattactgaatgggtacacgtacattatttggatgatggatgcactaaaagcccaaactgcagcactatgcaatgtattcatgtaacaaaactgcacctgtagcccttaaattgatacaaaaaagttgtttggagagtggcactaaggagtgaaacagaattcttgatccttattacaagcattctgggctattagacttttttcaactacatacatatattactatttgaagtttttaaatggacttaaaatctgaaagaatagtgatcttttaatgaaaaacaaaaccgtaagatactctgcctaaactttcccccataatgcaatgaataaaactttagtttaaccttcctcttcaggataaataatttctgaggctttagaaccaccttaaaaggtatctgtaggccgggcacggtggctcacgcctgtaatcacagcactttgggaggccaaagtgggcagatcttctgagatcaggagttcaaaccagcctggtcaacatgctgaaaccctgtctctactaaaaatacaaaaattagccaggcgtggtggtgcacatctctaatccagctactcagaaggtgcaggcaggaaaatctcctgaacccgggaggcagaggttgcagtgagccaggatcgcagcactgcactccagcctgggcaacagagcaagactcaggactcaaaaaaaaaaaaaaaaaaaagatatttgtagacaactaaataagtcaagttacatgatatatagactatcatcaaaattactggaccgtcactgcttatcaaagtaaagtgtaaccaaaaatttaattcacagtacttcgaccagaccaaaacatccaattcatccatagtttcctaattttaatacttactttaccagagtatgaaaatcttttttgttttttgttttgttttgttttcttttttgagatagggtctccctctgttgcccagtttggagtacagtggcacaatctcagctcactgcaacctctgcctcccgggctcaagcaatcctcccacctcagccttctgaggagctgggaccacaagcatgtagcaccgtgcctggctaatttttgtattttctgtagagacggggtttcttcatgttrcccagctggtctcaaactcctgagctcaagcaagccacccgccttggccttccaaagtgccgggattacaggcatgaggcaccacgccccaccaaaaatgtatctttaacacctgttctctagattgatttaggttttactgatcttagaggtatatacaaccatcatttcaaactcaccagacctaatttagttcaacttcactttttttttttttttaatttctgcccaggctggagtagtggctcgatctctgctcactgcaacctccaccttctagggtcaagtgattctcatgtctcagcctcccaggtagctgggattatagacatgcaccaccacacctggctaatttttgtattgttagtagagacggggtttcgccatgttagccggactggtctcaaactcctggtcccatgtgatctgcccacgttggcctcccaaagtgctgggattacaggcaggagccactacacgctgcctagttcacttttcattccattttttcctttgtaccttttagaagaagcttttaagtaatataaagattattattgtttaatctgtcagaaattgacagggaaaagaacttaaagtttaaatacacaatacaaaaagattaaaaagttatcacaaattggcagggcgtggtggctcacgcctgtaatcccagcactttgggaggccgaggtgggcagatcacccgaggttgggagtttgaggccagcctgaccaacttggagaaacctagtctctactaaaaataaaaaattagctaggcatggtggcgcatggctgtaattccagctactcgggaggctgagggaggagaatcgcttgaacctgggaggcggaagttgcagtgagccaagatcacatgtgccattgcactccaacctgggcaacaaaagcaaaactctgtctcaaaaaaaaaaaaaagttatcacaaattattgctcataacagtttagttaaaataaagaatgtatgtaaaactacagagtaatagcttgatagcaagacaaaatagtttaaaaaaaattctaggaaaaatatggctgactaaattatgatgaaagattttagatatcaaaaataggctgggtgcagctggcgtatgcctataatcccagcactctgacaggccaaggtgggtggatcagttgagcccaggagttcaa

SEQ ID NO: 676168 - DNA, 2475 bp, Homo sapiens
cagccataaaggaagaatgaaatcatgtcttttgtagcaacatggacctggaggccatgttctcacttataagttgaagcaaaataatgtgtacatgtgggcacagtgtggaataacgacactggagactcagaaggttgggaggctgggaggaggctgagtaacaagaaattactgaatgggtacacgtacattatttggatgatggatgcactaaaagcccaaactgcagcactatgcaatgtattcatgtaacaaaactgcacctgtagcccttaaattgatacaaaaaagttgtttggagagtggcactaaggagtgaaacagaattcttgatccttattacaagcattctgggctattagacttttttcaactacatacatatattactatttgaagtttttaaatggacttaaaatctgaaagaatagtgatcttttaatgaaaaacaaaaccgtaagatactctgcctaaactttcccccataatgcaatgaataaaactttagtttaaccttcctcttcaggataaataatttctgaggctttagaaccaccttaaaaggtatctgtaggccgggcacggtggctcacgcctgtaatcacagcactttgggaggccaaagtgggcagatcttctgagatcaggagttcaaaccagcctggtcaacatgctgaaaccctgtctctactaaaaatacaaaaattagccaggcgtggtggtgcacatctctaatccagctactcagaaggtgcaggcaggaaaatctcctgaacccgggaggcagaggttgcagtgagccaggatcgcagcactgcactccagcctgggcaacagagcaagactcaggactcaaaaaaaaaaaaaaaaaaaagatatttgtagacaactaaataagtcaagttacatgatatatagactatcatcaaaattactggaccgtcactgcttatcaaagtaaagtgtaaccaaaaatttaattcacagtacttcgaccagaccaaaacatccaattcatccatagtttcctaattttaatacttactttaccagagtatgaaaatcttttttgttttttgttttgttttgttttcttttttgagatagggtctccctctgttgcccagtttggagtacagtggcacaatctcagctcactgcaacctctgcctcccgggctcaagcaatcctcccacctcagccttctgaggagctgggaccacaagcatgtagcaccgtgcctggctaatttttgtattttctgtagagacggggtttcttcatgttgcccagctggtctcaaactcctgagctcaagcaagccacccgcsttggccttccaaagtgccgggattacaggcatgaggcaccacgccccaccaaaaatgtatctttaacacctgttctctagattgatttaggttttactgatcttagaggtatatacaaccatcatttcaaactcaccagacctaatttagttcaacttcactttttttttttttttaatttctgcccaggctggagtagtggctcgatctctgctcactgcaacctccaccttctagggtcaagtgattctcatgtctcagcctcccaggtagctgggattatagacatgcaccaccacacctggctaatttttgtattgttagtagagacggggtttcgccatgttagccggactggtctcaaactcctggtcccatgtgatctgcccacgttggcctcccaaagtgctgggattacaggcaggagccactacacgctgcctagttcacttttcattccattttttcctttgtaccttttagaagaagcttttaagtaatataaagattattattgtttaatctgtcagaaattgacagggaaaagaacttaaagtttaaatacacaatacaaaaagattaaaaagttatcacaaattggcagggcgtggtggctcacgcctgtaatcccagcactttgggaggccgaggtgggcagatcacccgaggttgggagtttgaggccagcctgaccaacttggagaaacctagtctctactaaaaataaaaaattagctaggcatggtggcgcatggctgtaattccagctactcgggaggctgagggaggagaatcgcttgaacctgggaggcggaagttgcagtgagccaagatcacatgtgccattgcactccaacctgggcaacaaaagcaaaactctgtctcaaaaaaaaaaaaaagttatcacaaattattgctcataacagtttagttaaaataaagaatgtatgtaaaactacagagtaatagcttgatagcaagacaaaatagtttaaaaaaaattctaggaaaaatatggctgactaaattatgatgaaagattttagatatcaaaaataggctgggtgcagctggcgtatgcctataatcccagcactctgacaggccaaggtgggtggatcagttgagcccaggagttcaa

SEQ ID NO: 676169 - DNA, 1157 bp, Homo sapiens
atatttttccatttatttgtgtcttcttcaatttctttcatcaatgttttatagtttttattgtacaggtcttttaccggtttacatttacttctgagtattttatttctttagatgttgttgtaaattaattgtctccttaattgtacctacttagtttttcagtactttagcgtggtagaatcatgcactatacatcaaaagtaaggtgcaaatttaatgtagaaaagttaaattgaaaaaccactctttacagatatcagctgtataagttatattttacagactacttcaactatatttcctttttttctgtgtgtcttggtaaataatcagcacaaaaggggaagctgaactctttatgttctatattttatctttttctaggaattttctactcatttataatccaaatgcatagatacatttcaattataagactcattaaataacagatataaatgcaaattagtcataaaccaacctaaagtagttttaatattatctacccaaacatatacatatacacacacacacatgcatactggtttggggtaatatgaatttaatcaagcagttcttatacactattactaaaacagtttctaactactttttttaattcaactgatatcttcataataaatgaatggctgaacttatattttccaatgtattcatttgtatagatacagtctcaattttactttaggaatagtttttgtggtcagttcttcctttctgcaagtcagacctctgtaagttggttatttttgccytctcttctagtctttctggctatccattcagttccttgtctagagctttacacagggtatatgctgaataaatgcctgttgactgatagtcaatgactcacagtcttttttgcagagtttgaggaataatacagcatattggctaacatcccagtctgatctttgcttaggaatttggactgctttattttgcagacacattggctctgtatttctgtatagtcttcttggcagaataattgtcttgaacattagttgagacctgaggcattagaatcagagtcttgagtttgaacacctgctctgactcttatagttgtatgaaatatgttgacacgctgtgcctcagtttttatatctgtcaactatcaatgaaaa

SEQ ID NO: 676170 - DNA, 1710 bp, Homo sapiens
tgacttaggaaagtcatttatcttcttggatcaattttctcacttagttcagctttcaactaggacaatagaaccttacagggatgaagagacaatcaagtgggggaaaaatgatttttwttaaaaaaaaactgcaaagtgccattcaaatgttagctattgagagttaatgataattaacattcactgagtgtggatgaagagctgggcaccatggaaagtctcatatatacatatctatatttatttacaaatagatataagattattgcaatgtatattatgttcaatttgttaaatttacacagctagtaaataaaacttagaaaatgtaattttcttagctcatgtttaaacatttaaacctcgattagaaacatgatcagctttggtctgaaaataagagaaaactctgacacaatctgatgaaaccaataaggatacttgctatcgctcataacgtgaagttcagagagacagtggacgccagagtgtctttaaccatattcttatagttaccatcttttatgacaatcatcacagtaggctgtgttagaaatttctaaagctgggaaaggcttcagcagtcagagtctagactgttttcttacagcagggaaaatcaagattggagtttcaaggagctaactcatgatagcaccaggggatggtcccttcatccaatccctgattggaaaacaaccctaggccatgacagtggcagggacttagtttgcttagtgacttgctctttataatttctagataaatctgcattttgcttcactcttctctcatcagagaggttgagttcttcaaacacttttgttgttatttctcaattcaaagagcaacataagaaagacatgctcttactaggtcattccaaggtttttttttccatctattatatgtaatcagatttgtatctctgttgtagaaagtcttatttttctttatgtctgttaaaataccagtaggttctctattctgctaatgtaatatttcttttttttgctgttcctttgagctggggcacattttattgttttgtgttaattctgtgattttaagtctgtatatcaaaattgtagtcctactaggcatgtaaatattataataaatacattagtaatgcagacagcctacaaaatagtttgctagtttgctctaaagatatttctggctgtgataatgattaatttcagataccctgcatcataattttcttgaaatatgtaaattacttccctctcaaaatttcttatgtagaaacacacacacgcacagacacacatacacacacatatttagcaggtcgaaatgaggttcttgaatctgcacaaaagttgttgatgccaagcccaaacagtacaattgtgagtgcagctggtcaggtcttcaataccgttcccttctcctcaccattcttcatgcccaaggggtctatttgcatttcctagaacatgccttgcgctttctagccttcagaccttttctcccagtttgtccttcacttaggatgtcttcttttagtatctccaactaaatgaaccccaccctttcaccaatagggttgaaaatacattttctcaatatctcagacaatcccaggccagacaaaaccccaagggccagttatcttttgcatttcttgagcactggttgagcatcgtgttagtaaaattaaatgttaatctcaaacacaga

SEQ ID NO: 676171 - DNA, 1710 bp, Homo sapiens
tgacttaggaaagtcatttatcttcttggatcaattttctcacttagttcagctttcaactaggacaatagaaccttacagggatgaagagacaatcaagtgggggaaaaatgattttttwtaaaaaaaaactgcaaagtgccattcaaatgttagctattgagagttaatgataattaacattcactgagtgtggatgaagagctgggcaccatggaaagtctcatatatacatatctatatttatttacaaatagatataagattattgcaatgtatattatgttcaatttgttaaatttacacagctagtaaataaaacttagaaaatgtaattttcttagctcatgtttaaacatttaaacctcgattagaaacatgatcagctttggtctgaaaataagagaaaactctgacacaatctgatgaaaccaataaggatacttgctatcgctcataacgtgaagttcagagagacagtggacgccagagtgtctttaaccatattcttatagttaccatcttttatgacaatcatcacagtaggctgtgttagaaatttctaaagctgggaaaggcttcagcagtcagagtctagactgttttcttacagcagggaaaatcaagattggagtttcaaggagctaactcatgatagcaccaggggatggtcccttcatccaatccctgattggaaaacaaccctaggccatgacagtggcagggacttagtttgcttagtgacttgctctttataatttctagataaatctgcattttgcttcactcttctctcatcagagaggttgagttcttcaaacacttttgttgttatttctcaattcaaagagcaacataagaaagacatgctcttactaggtcattccaaggtttttttttccatctattatatgtaatcagatttgtatctctgttgtagaaagtcttatttttctttatgtctgttaaaataccagtaggttctctattctgctaatgtaatatttcttttttttgctgttcctttgagctggggcacattttattgttttgtgttaattctgtgattttaagtctgtatatcaaaattgtagtcctactaggcatgtaaatattataataaatacattagtaatgcagacagcctacaaaatagtttgctagtttgctctaaagatatttctggctgtgataatgattaatttcagataccctgcatcataattttcttgaaatatgtaaattacttccctctcaaaatttcttatgtagaaacacacacacgcacagacacacatacacacacatatttagcaggtcgaaatgaggttcttgaatctgcacaaaagttgttgatgccaagcccaaacagtacaattgtgagtgcagctggtcaggtcttcaataccgttcccttctcctcaccattcttcatgcccaaggggtctatttgcatttcctagaacatgccttgcgctttctagccttcagaccttttctcccagtttgtccttcacttaggatgtcttcttttagtatctccaactaaatgaaccccaccctttcaccaatagggttgaaaatacattttctcaatatctcagacaatcccaggccagacaaaaccccaagggccagttatcttttgcatttcttgagcactggttgagcatcgtgttagtaaaattaaatgttaatctcaaacacaga

SEQ ID NO: 676172 - DNA, 1710 bp, Homo sapiens
tgacttaggaaagtcatttatcttcttggatcaattttctcacttagttcagctttcaactaggacaatagaaccttacagggatgaagagacaatcaagtgggggaaaaatgatttttttwaaaaaaaaactgcaaagtgccattcaaatgttagctattgagagttaatgataattaacattcactgagtgtggatgaagagctgggcaccatggaaagtctcatatatacatatctatatttatttacaaatagatataagattattgcaatgtatattatgttcaatttgttaaatttacacagctagtaaataaaacttagaaaatgtaattttcttagctcatgtttaaacatttaaacctcgattagaaacatgatcagctttggtctgaaaataagagaaaactctgacacaatctgatgaaaccaataaggatacttgctatcgctcataacgtgaagttcagagagacagtggacgccagagtgtctttaaccatattcttatagttaccatcttttatgacaatcatcacagtaggctgtgttagaaatttctaaagctgggaaaggcttcagcagtcagagtctagactgttttcttacagcagggaaaatcaagattggagtttcaaggagctaactcatgatagcaccaggggatggtcccttcatccaatccctgattggaaaacaaccctaggccatgacagtggcagggacttagtttgcttagtgacttgctctttataatttctagataaatctgcattttgcttcactcttctctcatcagagaggttgagttcttcaaacacttttgttgttatttctcaattcaaagagcaacataagaaagacatgctcttactaggtcattccaaggtttttttttccatctattatatgtaatcagatttgtatctctgttgtagaaagtcttatttttctttatgtctgttaaaataccagtaggttctctattctgctaatgtaatatttcttttttttgctgttcctttgagctggggcacattttattgttttgtgttaattctgtgattttaagtctgtatatcaaaattgtagtcctactaggcatgtaaatattataataaatacattagtaatgcagacagcctacaaaatagtttgctagtttgctctaaagatatttctggctgtgataatgattaatttcagataccctgcatcataattttcttgaaatatgtaaattacttccctctcaaaatttcttatgtagaaacacacacacgcacagacacacatacacacacatatttagcaggtcgaaatgaggttcttgaatctgcacaaaagttgttgatgccaagcccaaacagtacaattgtgagtgcagctggtcaggtcttcaataccgttcccttctcctcaccattcttcatgcccaaggggtctatttgcatttcctagaacatgccttgcgctttctagccttcagaccttttctcccagtttgtccttcacttaggatgtcttcttttagtatctccaactaaatgaaccccaccctttcaccaatagggttgaaaatacattttctcaatatctcagacaatcccaggccagacaaaaccccaagggccagttatcttttgcatttcttgagcactggttgagcatcgtgttagtaaaattaaatgttaatctcaaacacaga

SEQ ID NO: 676173 - DNA, 1710 bp, Homo sapiens
tgacttaggaaagtcatttatcttcttggatcaattttctcacttagttcagctttcaactaggacaatagaaccttacagggatgaagagacaatcaagtgggggaaaaatgattttttttaaaaaaaaactgcaaagtgccattcaaatgttagctattgagagttaatgataattaacattcactgagtgtggatgaagagctgggcaccatggaaagtctcatatatacatatctatatttatttacaaatagatataagattattgcaatgtatattatgttcaatttgttaaatttacacagctagtaaataaaacttagaaaatgtaattttcttagctcatgtttaaacatttaaacctcgattagaaacatgatcagctttggtctgaaaataagagaaaactctgacacaatctgatgaaaccaataaggatacttgctatcgctcataacgtgaagttcagagagacagtggacgccagagtgtctttaaccatattcttatagttaccatcttttatgacaatcatcacagtaggctgtgttagaaatttctaaagctgggaaaggcttcagcagtcagagtctagactgttttcttacagcagggaaaatcaagattggagtttcaaggagctaactcatgatagcaccaggggatggtcccttcatccaatccctgattggaaaacaaccctaggccatgacagtggcagggacttagtttgcttagtgacttgctctttataatttctagataaatctgcattttgcttcactcttctctcatcagagaggttgagttcttcaaacacttttgttgttatttctcaattcaaagagcaacataagaaagacatgctcttactaggtcattccaaggtttttttttccatctattatatgtaatcagatttgtatctctgttgtagaaagtcttatttttctttatgtctgttaaaataccagtaggttctctattctgctaatgtaatatttcttttttttgctgttcctttgagctggggcacattttattgttttgtgttaattctgtgattttaagtctgtatatcaaaattgtagtcctactaggcatgtaaatattataataaatacattagtaatgcagacagcctacaaaatagtttgctagtttgctctaaagatatttctggctgtgataatgattaatttcagataccctgcatcataattttcttgaaatatgtaaattacttccctctcaaaatttcttatgtagaaacacacacacgcacagacacacatacacacacatatttagcaggtcgaaatgaggttcttgaatctgcacaaaagttgttgatgccaagcccaaacagtacaattgtgagtgcagctggtcaggtcttcaayaccgttcccttctcctcaccattcttcatgcccaaggggtctatttgcatttcctagaacatgccttgcgctttctagccttcagaccttttctcccagtttgtccttcacttaggatgtcttcttttagtatctccaactaaatgaaccccaccctttcaccaatagggttgaaaatacattttctcaatatctcagacaatcccaggccagacaaaaccccaagggccagttatcttttgcatttcttgagcactggttgagcatcgtgttagtaaaattaaatgttaatctcaaacacaga

SEQ ID NO: 676174 - DNA, 586 bp, Homo sapiens
gcctccaaagtagctgggattacaggtgcctgccaccacatcctgctaatttttgtatttttagtagagatggggtttcaccatgttggccaggctggtctcaaactcctgacctcaagtgatccatccacctcggcctcccaaagtgctaggattacaggtgtgggccaccgcgcccagccaataattgaaaattgygctgtgaattgaacctctgattggtgcccaaaccacggtctgggctagctagcctataccctcctactatctcccagagtacaaggtagatgtagttccctaatattacaatataatcatgtcattccccttgccttgaagtaaacaggaaagaaattcatattttctctctagaatccatcacgtaaatgcagagggctggaccactcttggcttccacacaagttagacctctttgatggttctcagagagtcttctctcaggccatgacgaaagagtagggtttccttggttttatgtcctcaggggagtccatgaccttggcaaacattcaggcagactgctggttctctgccagctttggaataggggcacttgaagcaagaa

SEQ ID NO: 676175 - DNA, 586 bp, Homo sapiens
gcctccaaagtagctgggattacaggtgcctgccaccacatcctgctaatttttgtatttttagtagagatggggtttcaccatgttggccaggctggtctcaaactcctgacctcaagtgatccatccacctcggcctcccaaagtgctaggattacaggtgtgggccaccgcgcccagccaataattgaaaattgtgctgtgaattgaacctctgattggtgcccaaaccacggtctgggctagctagcctataccctcctactatctcccagagtacaaggtagatgtagttccctaatattacaatataatcatgtcattccccttgccttgaagtaaacaggaaasaaattcatattttctctctagaatccatcacgtaaatgcagagggctggaccactcttggcttccacacaagttagacctctttgatggttctcagagagtcttctctcaggccatgacgaaagagtagggtttccttggttttatgtcctcaggggagtccatgaccttggcaaacattcaggcagactgctggttctctgccagctttggaataggggcacttgaagcaagaa

SEQ ID NO: 676176 - DNA, 1861 bp, Homo sapiens
ttggtaaatttgaaaagagagaattaaataagaaacactctcaagaatgctcaagaatgtaaaactcaagaatttgagttttacaaattacttttcaaaatagaaaatgaagtatctgcccagattgatgttagtattatagcaagctaccggaggtcaggccgtaggatcaaaaactaccaatggtcattttctgatactttagaaactaatctcttaagtgaggtctaaaatgagtcataccaaactgcatttacagaaggactccattatattttgaagttagagcaaggaatgaacactttcaacaaataaaggactaataaaagggtaacagaatgggtattatcttggtaaaactcacagtaaacgtcactctaaagctacaattaacctgattttgtagtaccatagtagtttgtcacatatttatgcctgtagtccatgaaacacccttaaatgctcattgctgaaaaatttccaccaatgtgacaccagcactgataaattggagttatctttagcttttcagagtataaaaagcagtttcctttaaaaaaaaaaaaaggtttttatgttgaagcaatttcactgttggctatttatcttcctcccccctacccaaatgaggcttgctaaaaaggaaaaaaaaaaaaacaccttatgtgtacttaagagtcaactcttgtatgaaagggtcattaccaaaggccagtattcttaggctaacttcttagctagttttaaaattattactcattccattattcataaaattaatctctctgaatgacacagatgggtccactactaaattgaagataaagctttcataactattgtctkatgagcagcatgaagcaaacctgcatcatgtggaaagatatcaaaacgtctatgtgcagtaaaaacattaggttaactatgcattttcctattggttttactgaatttctctcaagttctccttaaagagagtaagaaaagagtagtcatgtcatttcactaaaaaataaaaatgaattcctttctctgaaggatgtgaattttaaagattaagtccaggatagtggatcaccaaagggttgcaatattcttatctataacaatctcaaattggatatggaggaaaatggacaagttgtatattaacaaaatacaagactatctagtacagtttgccttttaaaaaagaaatctatcgtagtgatttaaggcaagtattgcaaaaacgttatgatccccaaaccagaaaaaaataataataattatgtttccctacccaagtaattctaactgcgggaaacatgttattagaatttgccataagctcagaagttgagctgttttactagaaaattaaacaagtttgactaaatttatactcactattaagtcacttgaaagcttgcctgctgtctcttgtttcaggctcctgtatgtcacaaaattaatttgtttccatatttcctttggcaattataagacaacttctgcccagcttttgttaaaggctcattttacatttaaccccagaatatagctcatattttcctggaatattcaggtgaattttcatttggacacttaagttgtaggagtgtgagtacactaggaagaccccaagtcaggtttctgtatttaagggtgggtgaagtttacccagattcttctccccttaagttgttggaattcaaggcagcaccctcatctgggaattaaacaagattggttagataaatttcacatcatactaacatcttaaaagacgaatatgggtaaaatataaaggaaggaaaattgaaaactccaagacagtaactttgagatcaatttcagctttactttacatttgcattta

SEQ ID NO: 676177 - DNA, 615 bp, Homo sapiens
tgttaatatgattttattcccactccttgtgtaccataagctctgacatttgttaggttaaataacattttattctttctggaccagtttacattacacgagccttagaagtcactataattgatactctcctccacatcctgaaggggcaatgctcagtctgattcgattgacttctcattctacatctttccacccatctcccttggaaagggcaatggggcctttcccacttcacctcatgtggcccagacacttaaaaatgcactgcagttggccgggcacggtggctcacacctgtaatcccagcactttgggaggccgaggcgagcagatcacgaggtcaggagatcgagaccatcctggctaacacagtaaaaccctgtctctactaaaaatacaaaaaaaatttgccgggcgtgttggcaggmgcctgtagtcccagctacttgggaggctgaggcaggagaatggtgtgaacccaggaggcagagcttgcagtgagtggagatagcaccactacactccagcctgggcgacagagcaagactccatcccaaaaaaaaaaaaaaaaaaagcactgcggtcgagataaatgatgcagtgaggattcaa

SEQ ID NO: 676178 - DNA, 740 bp, Homo sapiens
caggccacaaaggaaagtctattttatcctcttcaaaaaaaatgaatgggagaaaactggtatcaacaatccatttgcctccaagaatccatttacttgtaatcttaaaaatgtttaattcccagtgccttttctgtagtggtaaaataaattccccatccaggataactaaagscctctcttcatttgaataaaaacatttctactgaattaggcacattgaaatgatcacatcctgaaggagagaaccctccctgccctgcccttgctcagaacccacacattctccttgccttgtctgcagcgtagaggttggcatgggtaaatttatggtacattagttcctttcggctttgtcctgaagttggctcagattttgttaatgctgaaatttgcagctgaattcagttggactttgcttctcattaatgagttgacattgcagtggggagatgtttcagcatttgctccttgagcttgctcaagcaggagccaaaagctgaacaagatcttcctcttaaaaacatgtccaacatattttaaaatgctggatagtttaattccactcagtaaaactggtcccccaaaatattttaattttgatatgcagattccaagaagaaatggaagatgggaggttcaaaacagtctggaagcttagatcgtctgactttgacggctcactcctccatgttgggtcacctgaagaaatttttttttttttaaacagagtctcaccc

SEQ ID NO: 676179 - DNA, 1474 bp, Homo sapiens
ttgggccagggagtgacaagatcagagacagcacttcattggttaccaagtgggcaggcctcagggggaagagcccacagtcactacgtaatgtgatctgctggggtgctgaatagctctcttcctcttcatcactcaaacagctcctcttagcccaataggattttaactttgtttgagagtgttatctccactttaaattaaatgtctctaaaaaggccaggtataattgaatatgaaggaacttaatggatccgtcagtgataaccccagagggctcccasagacttgaggaggaaaagggctgcagaagaggcagtgaaggggtctcacccttcactgggaccaacgctcacccttcagctcagggcctctttcttggaaactggctaatttatccaaaatgaggaaacatagggaggagtttgggtcacaagcttgaaccacaaattgattcccagctttacactgacgctctacgtgactttgcagccactctcccttgaatccctccatgtcatctgtaaaacgggtagaacagtacatcttgacctcccagagatgattcccagatacatagacacaatgtaaaccaaattcttaaccttatcaatgctttgttagaggggcaacatcatgtttttcaaatcacttttggaagatgccaatcatagttttgttttggttttttaagtccacaggaaagggcagatgtcccagctctacctcatatcatttaaaaagtgaactcttaagaatcagacccaagctgctggcctagaagacactgtcatctgcacaacttagcaactcacctcccaggtctcacagcgaccccagcaggcatccgtggtgatccgaaggcccctgcagcctggcttcttggccaggaaagtaaactccctcacggcacagcccacaaaggtgcgcaggttcccactggaggcaccgaggacacagccatagccagccagaaggaggagggccatggggccaaggaagaggaatgccagcttcatgctgctcttccggagagggaaaggacagagtttaacagatctggctgccttcaatggcacagccaaccatgcatttgtcactatcaaagggaccttgctcctagcatttcagggaaaatgagcccagaaattgtaaatgcccacaaactccaacacaggcatccagagattcctgtaactggtgccagtgtggatgccatggccctctctagatgcccatcctccaagtgcattctcaggcttttccttattgtaacttaactgctgcagttgacttgtgtgttaaagaagtttgtcccagtggtctttccaaaataaacataaaatatgagtaacaccaaaactaatccataatccaacagaatacatgaatacatataaattatttttattcaggtccagggtatttgggtgccatgttacatactttgctcaaaactatattttcagtgtca

SEQ ID NO: 676180 - DNA, 1474 bp, Homo sapiens
ttgggccagggagtgacaagatcagagacagcacttcattggttaccaagtgggcaggcctcagggggaagagcccacagtcactacgtaatgtgatctgctggggtgctgaatagctctcttcctcttcatcactcaaacagctcctcttagcccaataggattttaactttgtttgagagtgttatctccactttaaattaaatgtctctaaaaaggccaggtataattgaatatgaaggaacttaatggatccgtcagtgataaccccagagggctcccagagacttgaggaggaaaagggctgcagaagaggcagtgaaggggtctcacccttcactgggaccaacgctcacccttcagctcagggcctctttcttggaaactggctaatttatccaaaatgaggaaacatagggaggagtttgggtcacaagcttgaaccacarattgattcccagctttacactgacgctctacgtgactttgcagccactctcccttgaatccctccatgtcatctgtaaaacgggtagaacagtacatcttgacctcccagagatgattcccagatacatagacacaatgtaaaccaaattcttaaccttatcaatgctttgttagaggggcaacatcatgtttttcaaatcacttttggaagatgccaatcatagttttgttttggttttttaagtccacaggaaagggcagatgtcccagctctacctcatatcatttaaaaagtgaactcttaagaatcagacccaagctgctggcctagaagacactgtcatctgcacaacttagcaactcacctcccaggtctcacagcgaccccagcaggcatccgtggtgatccgaaggcccctgcagcctggcttcttggccaggaaagtaaactccctcacggcacagcccacaaaggtgcgcaggttcccactggaggcaccgaggacacagccatagccagccagaaggaggagggccatggggccaaggaagaggaatgccagcttcatgctgctcttccggagagggaaaggacagagtttaacagatctggctgccttcaatggcacagccaaccatgcatttgtcactatcaaagggaccttgctcctagcatttcagggaaaatgagcccagaaattgtaaatgcccacaaactccaacacaggcatccagagattcctgtaactggtgccagtgtggatgccatggccctctctagatgcccatcctccaagtgcattctcaggcttttccttattgtaacttaactgctgcagttgacttgtgtgttaaagaagtttgtcccagtggtctttccaaaataaacataaaatatgagtaacaccaaaactaatccataatccaacagaatacatgaatacatataaattatttttattcaggtccagggtatttgggtgccatgttacatactttgctcaaaactatattttcagtgtca

SEQ ID NO: 676181 - DNA, 600 bp, Homo sapiens
acatcacctactgaaatagaaagttaccttggtgggtggcataatcctaaggaaatagtcagaggtagttccacctggttctcaggagaacaaatgcattgtggcagatggattaaattttccttcatggtaaccacaagtttcctttgaaacaggggtaagtgactagcagctcatggcaaaccctttcctttaaccgacaacatgtttcaatgcactgaaaaacaacaaaacgataattcttgctggaaagaacacaggatcactacctgaaaagatggaaatcacagtgagaagaaacatgtcgaaagtcttaaaattagctaagaattagatgatattaataacgccttaaaatgaatcatttaggaaaaaataccacgatgttccaagtgattatcttccagcatgggaattaaagaaaacttttcatttcctttatatggttttcagcatttttcacatgttctacattgggcagacttttgtaataaagagtcagtcaatatcaatgttttaaaattaaaataaaccaaaaggtaygcatttgttctgtctgtgaggacattcagtgctgctctgatagagaagttttacaga

SEQ ID NO: 676182 - DNA, 600 bp, Homo sapiens
acatcacctactgaaatagaaagttaccttggtgggtggcataatcctaaggaaatagtcagaggtagttccacctggttctcaggagaacaaatgcattgtggcagatggattaaattttccttcatggtaaccacaagtttcctttgaaacaggggtaagtgactagcagctcatggcaaaccctttcctttaaccgacaacatgtttcaatgcactgaaaaacaacaaaacgataattcttgctggaaagaacacaggatcactacctgaaaagatggaaatcacagtgagaagaaacatgtcgaaagtcttaaaattagctaagaattagatgatattaataacgccttaaaatgaatcatttaggaaaaaataccacgatgttccaagtgattatcttccagcatgggaattaaagaaaacttttcatttcctttatatggttttcagcatttttcacatgttctacattgggcagacttttgtaataaagagtcagtcaatatcaatgttttaaaattaaaataaaccaaaaggtacgcatttgttctgtctgtraggacattcagtgctgctctgatagagaagttttacaga

SEQ ID NO: 676183 - DNA, 640 bp, Homo sapiens
ttttaagttcttcaatttgttcttcttttacatctaactgttctgtaagtcttgatgctgaatccaatgcagcatttgcttcatcyaaacattcctgagaaagaaaactttattaaaaaaaagtatgcaaaaattatttcacaaactataaggctgagagacatcttagagtcaacctctacatttcagctggtgaagctgcacctctatgaccttgggcaaatgtatccaaccaataagtatcaaaggcagaacccacattcttttcaatacaatactgcctcatttagaggaactaaataaaaagagcagatgccactgaaagacaacatgatgacagaagtaaaaaaaaaaaaaaaaaaaagtaacaacataaactacaaaaaaacaaagatacaggaagtccagaaatatagcaacaaatgttctctttttcatttttgaaagtctaataaagtgatgttgattatgactttgttactttaaattttatttccctgaccactactagtgaatttgagcattacttttcatgtttacagggcaagctggatctgtccttctgtgaaaacctctttgcatacattgcccaagattctactgagttctatttctcctgtccatctgtaagagcaccttg

SEQ ID NO: 676184 - DNA, 608 bp, Homo sapiens
tgagccactgcgcccggcctatgtttggagttttaaaaaatagtcaccttaaggccgggcgcgattgctcacgcctgtaatcccagcactttgggaggccgaggcaggtggctgaggtcaggagttcgagacaagcctggccaacatggagaaaccccgtcctctactaaaaatacaaaattagctgggcgtggtggcggacacctataatcccagctactcaggaggctgaggcaggagaatcatttgaacccgggaggcggaggttgcggtgagccaagatcaygccattgcactctagcctgggcaagaagagcaaaactccatctcaaaaaaaaaaaaaaaaaaaaaaagtcaccttaaaaacaaaattgcaattgaccctgaaatgtgaattatctggtagcttcttgtctctcttattattaaatcatgcctgtggctggagaaaagaaacagaaacctctgtggggcttgtgcactagtctgatgcctcattagaataacctcttgttttatgagaacactggaatcagcttctgcacttgggcttaaggggtaggaagactgagtcacagatgtgaccttgtcatcctgaggtccctctc

SEQ ID NO: 676185 - DNA, 608 bp, Homo sapiens
tgagccactgcgcccggcctatgtttggagttttaaaaaatagtcaccttaaggccgggcgcgattgctcacgcctgtaatcccagcactttgggaggccgaggcaggtggctgaggtcaggagttcgagacaagcctggccaacatggagaaaccccgtcctctactaaaaatacaaaattagctgggcgtggtggcggacacctataatcccagctactcaggaggctgaggcaggagaatcatttgaacccgggaggcggaggttgcggtgagccaagatcatgccattgcactctagcctgggcaagaagagcaaaactccatctcaaaaaaaaaaaaaaaaaaaaaaagtcaccttaaaaacaaaattgcaattgaccctgaaatgtgaattatctggtagcttcttgtctytcttattattaaatcatgcctgtggctggagaaaagaaacagaaacctctgtggggcttgtgcactagtctgatgcctcattagaataacctcttgttttatgagaacactggaatcagcttctgcacttgggcttaaggggtaggaagactgagtcacagatgtgaccttgtcatcctgaggtccctctc

SEQ ID NO: 676186 - DNA, 667 bp, Homo sapiens
cccattgcagtctgattcacttgtgtcattctcataattttctcatatgctcccgtagttcttttccacccaaattattgttccattctatgcatccacaactyatgcaatctttatgattttctttttgcatttgtatacccatgaattttgttcctttaacagctatttattatctactctgcaccaatcatcagatgtagtggtgaaaagatggacaaaatttctactctcagcttacattttggtgatgggagatggacaatcaacccaggtcaatgacagatgctggagcagaacacatagacatacaggtgggggccactgcttatctagggtttccagtttcactgaggccctcagcgatactcatctatttatattgtctttgatctgcattttctcctgttcctttcagcaaatactctttactactcatgccattatcttgtcccatcatgtttaataatagcagataatctttgcttatacttctctggtaaaaagaggttatcagtcatggactccattaatttcacaactcctctccctccagaggcaatcatttatatcaccacttttcactccctctttctcccttcctggtcaaggtgaacctctccacctagctaattaatctcatttattctggtcacaggacttttca

SEQ ID NO: 676187 - DNA, 658 bp, Homo sapiens
gaactgaaatgtatgtctgcaaaatatgtatagccaagcaactaaccacttcaacctcccaatatcctttctctaggccccttaagagctgtcttcccacaccttccaccccctttctccaataaagtccaaaatcagcaatcagtgttgacatcaacgtgcaaacggcttagagccccaggtaaaacaaaagacgcctgcaaaaaggcaaacgagaaaggaactcaaggaaagttcatgatggaaaaataaacacaggcaaaacaaacatccacagagaggaaaaagagggaaaccaaagagacaagatcrgccagaaaaaataagaacaaaaacaatgagaaaagccaagaacaagggggaaaaaaaggacagactaaaataaaatacaggcataattctccaaagaaaagtagaggaaaaggcagggagagaatcagcatttggggcacaggactaagaacttttacatagattggctcacttaatcttcacatcactctgaaaagtggatatcactatctccattttgcagaggtgaaaatacaggcctacaggcttaagttattggtctaagtctatatagatagaaaatggtagagcagaatttcaacacgactctgctaatttcaaaacttacactctcttgcagcctacc

SEQ ID NO: 676188 - DNA, 595 bp, Homo sapiens
tgagtcaccacacctggctatcatagtacttatttagaaatgttcagtaatttttttccttgctcatatttctgtgtaaactctgattggtcaatacctgcctatcagtacttgtccctctactgagaactactcagtttattgtgttayctacatgccacgttcattcttttgcttttgtacatgtggtctctactctctaaagtaaccatcttttctgtatctgagtcctattgaaacataaatattgaattcaaatttcacttttttcaagtcttctgtcctgactactccaaacttagtgatgcttttcctctaatcagcaacaaaacttatttatccatattatttgttattgttttacacttctttgtgttcttccttacaaagtatagactccctaaaggaaaagcctttgctttatacctttttcattgtccttcagtgtctagcatggtgaagatttcatgctgagtatatcataaatatttattgattgaagccctgaattgtttacttctactcaaagtgtgttctgtagacggatgtcagtccatgaactgtttattacagctttgctggaatataagtaaag

SEQ ID NO: 676189 - DNA, 1042 bp, Homo sapiens
ttttatctttcagcctaagtctagcaatataccagattgtggttgcctcaaatatgattttttaatatattgattttagctattttcttttagtcattctaaaatctttttagcatttgccagaaaaactcatgaatgatccttagtgatcagaaaagacacaggagttcagaacattgcatcaatttacaacaaataaatgagcaaagatgattaagtttatgatgatacctgtagtagataccttgtatgwtcactgtttaactcaaaggaattgcccattacctggaataatctccaacatggtcagtgtgcatccattgaccacatctatacagtgaccttctgtaagttagtttctgtgtgtaacaaacttgtctaagagggcataccttatccaacctaggtcaattagattatttctccaaagaatttaaaacttggaattgagacatacagaaactagaagttttggggatctggtcacatcaatggcagtgctcttcaataaagtccatgaactcctgtttttgagatctccagagttgcggttgttctttccaatcctgggtattatgttttcaatttttctttaattctgttaattatctctgtattctattaataagtttatgttttgacttagactaaccagaattggctacagtttcttcaagaaaataccccaatggaagaaaaaaaggtggagggagaaactgaatgaagaaaggatgatttgaaattaccagaaagtggaacgtggaaaaaacagagtaaaactagtttgagaataaaatcttaggttgtaacatcttctgggaatttattctttaaatattgcttttaactggattctttggtaaatagtaaatgcattttggttttgatttaagcagctcattcttttgtttcttcacttctccaataaacttgctctcacttaaaaaatgccttgtagaacaactcatgataattattactgttgggaaataggagaaacatattgtattagtcagaattttacagagaaacagaaccaata

SEQ ID NO: 676190 - DNA, 1042 bp, Homo sapiens
ttttatctttcagcctaagtctagcaatataccagattgtggttgcctcaaatatgattttttaatatattgattttagctattttcttttagtcattctaaaatctttttagcatttgccagaaaaactcatgaatgatccttagtgatcagaaaagacacaggagttcagaacattgcatcaatttacaacaaataaatgagcaaagatgattaagtttatgatgatacctgtagtagataccttgtatgttcactgtttaactcaaaggaattgcccattacctggaataatctccaacatggtcagtgtgcatccattgaccacatctatacagtgaccttctgtaagttagtttctgtgtgtaacaaacttgtctaagagggcataccttatccaacctaggtcaattagattatttctccaaagaatttaaaacttggaattgagacatacagaaactagaagttttggggatctggtcacatcaatggcagtgctcttcaataaagtccatgaactcctgtttttgagatctccagagttgcggttgttctttccaatcctgggtattatgttttcaatttttctttaattctgttaattatctctgtattctattaataagtttatgttttgacttagactaaccagaattggctacagtttcttcaagaaaataccccaatggaagaaaaaaaggtggagggagaaactgaatgaagaaaggatgatttgaaattaccagaaagtggaacgtggaaaaaacagagtaaaactagtttgagaataaaatcttaggttgtaacatcttctgggaatttattctttaaatattgcttttaactggattctttggtaaatagtaaatgcattttggttttgatttaagcagctcattcttttgtttcttcacttctccaataaacttgctctcacttaaaaaatgcctkgtagaacaactcatgataattattactgttgggaaataggagaaacatattgtattagtcagaattttacagagaaacagaaccaata

SEQ ID NO: 676191 - DNA, 646 bp, Homo sapiens
aattaacatttagcttatagcataaaatgtgagctaaactagttatatttttttattttggtaaactatgcataacataaaatttactattttaactattttaagtgtacaattcagtggcattaagtacattcacttcattatacagcagttactgccaccctttttcatcttctcaaaccaaaacattgtatccattaaacaatagctctccatttcccatttctccactgaattagttatttgaaatctacccattttggtattttcttacttgtcttatttgctacttttataaatgaatatatattaggtactccttatatatatggaactgggccagatgctgagcagggttgaattacagttataaagaaggctgcacaattttccatgatattacgtggtttcctgggtgacagagtcttgttgcatcacattctttatcttacatccaaactacaatccaattaaatgtgcaaaagtacacaagctgatttttgtttcagaggttaccrggaaaataattacaccagtctgacaattttaaatcaagattgaagtattgctttggtttcttctgagattttgagtacctaaatgaacatatttgcaaaattattaaatatgaaagtgggtggtagtt

SEQ ID NO: 676192 - DNA, 1136 bp, Homo sapiens
tgcacatccatgggatggaacatattctgcagatagtcaagtatttttccctagatattttttactttgctctacacatatgctttctctatctactgaactaataatgttactcactagatcaaacttggcctctgaattacaaaagtcttttgaaacatatggcagagaaaatcttgaaaaccagttatattactttcaagagtcaggtattttgcaacacaaaaagctaagcctggacagaaacttggcaaaaaaatgtgtgcactaaatgatagatttgaaacagataaaaaagattcaaaccaccctatctttatagattagataaagattgcgggagctgaaaaaatagctcctgagaggggggctggcatcattccatcccagaatgatgaaaacaccaggcaggtctggggcaatctgagagcagaggcgaattgtgattcattctctgggcaaagtccaaagaagaagcaggtttcacggtgaatttctttattactgcatggaattacatttgtgaagcataaatgatgcgaaggcacatgtaaagaaagagcactttagagcaaagagcatctacagccacagaaagtattcctaaatttcctatgccatttaagagaagtgcaggtatgtctaagagaggggcagatatattttccctaccgacaacgtaatattatggtaaggtctccaccattttccgtctttcttattactaatcacctccataacctgtggtcaactctgaggataagggaggaagaaaaatttcccaaatgactgaatcaataccttaaatgtctaaggaggaaaaaaccccaccgaccaaacaaaactatactatcataatttatctggaagtgactaaattttatgccatgtagaaggatgtgagcttcaactagagaytattattctatagaagtttacattttagaataactattttgttgctttagtatattttcccatatatagatagagacttgtagatacacagtagttgtttcaatcttcgttttgctcatccaattgcctgagctatatctctttataaaaattttctcacttctgtcttgaccctatcaaaactcctgctgacctccacttgggagcattcactgtga

SEQ ID NO: 676193 - DNA, 1719 bp, Homo sapiens
gcataaccgagagtattacatggctgaagtagaccggggggtgtatgcccggaatcctaacctctgttctgacagccgtgtgagccataccaggaatgacaactattcctcttacaacaacgtgtatttggctgtagctgatacccatcctgaaggcaatttgaagctgcaccgctcagcatcccagaaccgacttcagccttttcctcatggttaccatgaagccttaacacgagtgcagagctatggcccagaggattctaagcaaggcccccacaaacagtcagtcccccacttagctctgcatgcccagcacccatcaactggaacacgttccagctgtcctgcagactaccccatgcctcccaatatccatcctggggcaaccccccagccaggccgtgccctggtgatgactcggatggatagcatttccgactcccgcctctatgagagcaaccccgtgaggcaaagacgacctcccctgtgccgggaacagcatgccagctgggacccgctgccctgtacaactgactcctatggctaccactcctatcccttgagtaacagcctcatgcaaccatgttatgagccagtcatggtacggagcgtgcctgaaaagatggagcagctttggaggaatccttgggttggaatgtgcaatgattccagggagcatatgatcccagaacaccagtatcagacctacaagaacctctgcaatattttcccttctaacatcgtccttgcagtgatggagaagaatccccacacagcagatgcccagcaactggcagccttgattgttgctaagcttagggctgcacgttgatatgacatagtacttatttctttatacaaatatgaatattaatactaataatacactaatacaataattatagtaactaataatttgtgttgcgctttacaagttagagtgtttatatcatttaagcgcttaacaaccctgtgaggtacgtcttactaacatcctcttttatagagaaggaaggtgaaggtcagtgaaattaagtggctagccagggtcacactgctagcaaatgactaagtcaagacacacacccaagtcctctaaatccaagtcccatgcccctttgcactgcaccatgcaggtaatggaggacaaaacccagggggagaggtctagatgtaagaaatcccagaggattccattaccagagttttcctttttctcttttcgtttctttctttctttctttmttttttttttttgagacagaatctcactctgttacacaggctggagtgcagtggcactatctctgctcactgcaacctccacctccagggttcaagtgattctatggcctcagcctcccaggtagctgggattacaggcgtgcaccaccatgcccagctaatttttgtatttttagtagagacgtggtttcaccgtgttggccaggctggtctcaaactcctggcctcaagtgatccgcccaccttggcctcctaaagtgctgggattacaggtgtgagccactgcgcccagcctaccagagttttcgtagtcacatattctatattacaaagtatggatgatatatccaatttagagagcaaaagcatcaggatcagatcatatgttgaattaaccttttaggttttttctaatagaaatatttaaagctatttaaaagtaaatgcatactttattgcatggatatctgatca

SEQ ID NO: 676194 - DNA, 658 bp, Homo sapiens
aaaaccaggggattttatttgtggaaaaaggaagtttccaaaaggggatactgcatctttactaatagctggctcagttackcactttaaatccatgcaaagagtgcacttgctgttaaataattgttaaatgagttattagaaggcaggacttttggtttgggcgacaccatttgcgcaacttgtatcttgctcagggtggaaaacttcatagctaaatgcctctagaagaggtgtttattgttttttttaagctgcactaaatgaattccctttttgaatccattgtatatttcaatatttcgaaccatgatcagctcactatttcctgagctggaacttgctaacttctatgatcgttttttcatgaaagttgagaaggccgggccttggccttttgtttcttcatgagaaggtgtgacactgcctataaatgtttcttactgtgaaacactctgaatgtgaggctgtagtcagggttgtttctggtggtttgacaatggcttgcatgctgctttctggctttctgtctctgtccaagttgatcaatactgcatcttaaccaatgtttcacttgagttaaccacagctttacattctatctcctatcttctgatcttcgtataccccagcatattgaaaaagagtaaaagtattt

SEQ ID NO: 676195 - DNA, 658 bp, Homo sapiens
aaaaccaggggattttatttgtggaaaaaggaagtttccaaaaggggatactgcatctttactaatagctggctcagttactcactttaaatccatgcaaagagtgcacttgctgttaaataattgttaaatgagttattagaaggcaggacttttggtttgggcgacaccatttgcgcaacttgtatcttgctcagggtggaaaacttcatagctaaatgcctctagaagaggtgtttattgttttttttaagctgcactaaatgaattccctttttgaatccattgtatatttcaatatttcgaaccatgatcagctcactatttcctgagctggaacttgctaacttctatgatcgttttttcatgaaagttgagaaggccgggccttggccttttgtttcttcatgagaaggtgtgacactgcctataaatgtttcttactgtgaaacactctgaatgtgaggctgtagtcagggttgtttctggtggtttgacaatggcttgcatgctgctttctggctttctgtctctgtccaagttgatcaatactgcatcttaaccaatgtttcacttgagttaaccacagctttacattctatctcctatcytctgatcttcgtataccccagcatattgaaaaagagtaaaagtattt

SEQ ID NO: 676196 - DNA, 1269 bp, Homo sapiens
ataaaattaatgtgtaatagttcatatggtagttcttaattagcccacttttttcaacaatacgctggaaaattcccactgagtttgatgggaatcataaagcccgtgggcgaggggaagaacggattcaatttctgtttctaatgctagcgtaatagataacttctaattttggactctaaaactaagatacattgaatttatatctaggaatgtaattcatataaatgtttacatacataaaattaaaaccctaattttaaacatacaaataattaacaataatttaggacagctcatttaaaatccttaggattaaatctctgaatttaaataaagaaaatattatttccatgattacattgttttcctgggaaatacaacatagttcctacaatgggaaaaaacagtgacctggatctgctaaacatctcactgtgagttggacaagtcagatttatctccaaatcctgcatctgaatacaactatgcatttatatctttatacatacattatctatttatttatgtttctacagagcagtcttctaaaatacaccgctatttcaaagtttattcactgagcaggttctattttcttcatgtatgacgtgagacagttggaataaatgatctctgatgattgcttaaatggggcaattgtcaccctacagacacagcagctctatgaaggaatctgtgttgatataaagccatccmggttttatacagagattcacagatctaacttaagaacaaatttgtccccataaagaaaccttctttgccaatctgacccaatgaccacactgaaacgtcccggcaatgataaagcacacccaggcttacccataggaatgcctcctgctccacagaaactgaattcctttaaagaattcctataatctcctgccatttgtaatctctccaatatgtgaaagggtttctcagtcaccatgcaattaaaggtcctcctacacatccagatgtactcatgcacatcatcatttcacattttggttttataggttaatttatacaaaggtctcacttgcaagtaaaggaatgcattctactggttttcagaagtatctaaaggctgcaactacttaccgctttccataatgctatcaaaatacactaggtttatttattatttctgcaaagcaaatctaaaactgaaatccacaaaaatacggccagttcatttaaatagcattaaaattcctcgttgtatctaggtgaatactataatggttaatcctatac

SEQ ID NO: 676197 - DNA, 1269 bp, Homo sapiens
ataaaattaatgtgtaatagttcatatggtagttcttaattagcccacttttttcaacaatacgctggaaaattcccactgagtttgatgggaatcataaagcccgtgggcgaggggaagaacggattcaatttctgtttctaatgctagcgtaatagataacttctaattttggactctaaaactaagatacattgaatttatatctaggaatgtaattcatataaatgtttacatacataaaattaaaaccctaattttaaacatacaaataattaacaataatttaggacagctcatttaaaatccttaggattaaatctctgaatttaaataaagaaaatattatttccatgattacattgttttcctgggaaatacaacatagttcctacaatgggaaaaaacagtgacctggatctgctaaacatctcactgtgagttggacaagtcagatttatctccaaatcctgcatctgaatacaactatgcatttatatctttatacatacattatctatttatttatgtttctacagagcagtcttctaaaatacaccgctatttcaaagtttattcactgagcaggttctattttcttcatgtatgacgtgagacagttggaataaatgatctctgatgattgcttaaatggggcaattgtcaccctacagacacagcagctctatgaaggaatctgtgttgatataaagccatccaggttttatacagagattcacagatctaacttaagaacaaatttgtccccataaagaaaccttctttgccaatctgacccaatgaccacactgaaacgtcccggcaatgataaagcacacccaggcttacccataggaatgcctcctgctccacagaaactgaattcctttaaagaattcctataatctcctgccatttgtaatctctccaatatgtgaaagggtttctcagtcaccatgcaattaaaggtcctcctacacatccagatgtactcatkcacatcatcatttcacattttggttttataggttaatttatacaaaggtctcacttgcaagtaaaggaatgcattctactggttttcagaagtatctaaaggctgcaactacttaccgctttccataatgctatcaaaatacactaggtttatttattatttctgcaaagcaaatctaaaactgaaatccacaaaaatacggccagttcatttaaatagcattaaaattcctcgttgtatctaggtgaatactataatggttaatcctatac

SEQ ID NO: 676198 - DNA, 1285 bp, Homo sapiens
tcccactcgtgagaagttaggcatggcaagtgacttgctttatccagtgaaaagtaatgagaaatgattgtgttacttccagacagaagcgttgaagagctgaagtgcagtattccatgttctctcttcctctgtctcatcaacttgcagaagctatgtattgtattccagatggtacagctataggaagacggagctaaggcaggcttagattagtgtgttgcccctaaggattgcatggacctgtggtaggctttgtatgaatataatactttgttgtattaagccactaagatttatgggctgttactctattagcacctagcacatcctgatagatgtgccctccaatataaaccctcccagcccttgtcacagcctacaattacaaatcatattctaacaaagtctgtgtgagacagacgtctattaacagaagtttcccaaggagcttttgagccatccatgcctctggatgctctaaattctagccctggatctagggagaccacaaaaacctgtaaacttgaaccaaattaccttggacctacacagaattgtgggttatcatggtgccctcgrgttagttaatttgctcttgattaaagattgctgttagcaaaagcacactgaagtctactacaatctttgctgtacaattgtattgataccatacattttgtcaccagaacccccctatttaaattctctcttgagaaatttcttttagaattcagctaccctttccctgaggaatgctaggctcccatcttttggataataacaattgtgaaaaaaatagttagaaagaatgaataaaatcagtatagtagttgatagcacaacagggtgactgtagccaataataatttaattgtacatttaaaaataactaaaaagagtataattggattatttgtcacacaaaggataaatacttgaggggacaagtaccccatttaccccgatggtgattattacgcattatatgcttgtatcaaaatatctcatataatctataattatatacaactactatgtatccataaaaatacaaaattaaattaaaaaaagaattatgggccaggagcggtggctcacacctgtaatcccaacactttgggaggccaaggcgggtggatcacctgaagtcaggagttcgagaccaacctggccaacatggtgaaaccccgtctctactaaaaatacaaaaatcagctgggcatggtggcatgcacctgtaatcccagctactcaggaggctgaggtgggagaatcacttgaa

SEQ ID NO: 676199 - DNA, 1285 bp, Homo sapiens
tcccactcgtgagaagttaggcatggcaagtgacttgctttatccagtgaaaagtaatgagaaatgattgtgttacttccagacagaagcgttgaagagctgaagtgcagtattccatgttctctcttcctctgtctcatcaacttgcagaagctatgtattgtattccagatggtacagctataggaagacggagctaaggcaggcttagattagtgtgttgcccctaaggattgcatggacctgtggtaggctttgtatgaatataatactttgttgtattaagccactaagatttatgggctgttactctattagcacctagcacatcctgatagatgtgccctccaatataaaccctcccagcccttgtcacagcctacaattacaaatcatattctaacaaagtctgtgtgagacagacgtctattaacagaagtttcccaaggagcttttgagccatccatgcctctggatgctctaaattctagccctggatctagggagaccacaaaaacctgtaaacttgaaccaaattaccttggacctacacagaattgtgggttatcatggtgccctcgagttagttaatttgctcttgattaaagattgctgttagcaaaagcacactgaagtctactacaatctttgctgtacaattgtattgataccatacattttgtcaccagaacccccctatttaaattctctcttgagaaatttcttttagaattcagctaccctttccctgaggaatgctaggctcccatcttttggataataacaattgtgaaaaaaatagttagaaagaatgaataaaatcagtatagtagttgatagcacaacagggtgactgtagccaataataatttaattgtacatttaaaaataactaaaaagagtataattggattatttgtcacacaaaggataaatacttgaggggacaagtaccccatttamcccgatggtgattattacgcattatatgcttgtatcaaaatatctcatataatctataattatatacaactactatgtatccataaaaatacaaaattaaattaaaaaaagaattatgggccaggagcggtggctcacacctgtaatcccaacactttgggaggccaaggcgggtggatcacctgaagtcaggagttcgagaccaacctggccaacatggtgaaaccccgtctctactaaaaatacaaaaatcagctgggcatggtggcatgcacctgtaatcccagctactcaggaggctgaggtgggagaatcacttgaa

SEQ ID NO: 676200 - DNA, 666 bp, Homo sapiens
ttttagagttatcttctccgtatagcaagtgatagaaaatttccatttatattagcaaaaagaagctttttattttttatcttaaaattttcaaaataaaaaacagaaagaatagtacaatgaataaccrtatcctcaccacagagattcaaccattctttacaatctcatctataatttattttttgtccaaaaacttaaaactaaattacagacattgtgacacttttctcctgaaatacttcaacatgcaattccagaaaacaagaatattcttccacaaaatcattacccattatcacacataataacattaataattccctcatgctgtctagcccatgttcaattaggaaggtggtttttgttaaataaattcactttaaacatgtgagatgattgaaagaagaaaacattaggtaaataatagtaaataataatataggtgatatatggatatgggcaaaagtctgatgatggcgggttttataaaactctagcttgaggctgggcgcggtggctcaaataaaatctctaccgggtttggtggtgggcacctgtaatcccagctactcaggaggctgaggcaggagaatcacttgaacgtgggaggcagaggttgcagtgagcagagatcatgccattgcactccagcctgggtaacaa

SEQ ID NO: 676201 - DNA, 630 bp, Homo sapiens
atttattaagaacttctagaacagtggttctccaatgttagcatgcatcagaaccatttgaaagccttgttaaaacacagtaggtccagggtggggcccaagaatttgcatgtctaacacttttacaagtgatgctgaggcttctagtgtagggtccacacttggagaacatctgtactagaagttgggattgaaaataattatgaggctgggcgcagtggctcatgcctgtaatcccagtactttgggaggctgaggygagtggatcacctgaagtcaggagtccagctgacccacatagtgaaatcccatctctactaaaaatacaaacattagccgggcatggtggcacatgcctttaatcccagctacttgggaggctgaggtaggagaatggcttgaacccaggatgcggaggttgcagtgagccaagattgcaccattgcactccagcctgggcaacaagagcaaaactccattaaaaaaaaaaaaaacagaaaataattatgagagagctgtggatcagccttccaaaggagctcaacagccagagtttgaaaaaaaatgcacaacagggtgggatacacaacagccacggaccaggttagacaacactaagtggagccctgg

SEQ ID NO: 676202 - DNA, 630 bp, Homo sapiens
atttattaagaacttctagaacagtggttctccaatgttagcatgcatcagaaccatttgaaagccttgttaaaacacagtaggtccagggtggggcccaagaatttgcatgtctaacacttttacaagtgatgctgaggcttctagtgtagggtccacacttggagaacatctgtactagaagttgggattgaaaataattatgaggctgggcgcagtggctcatgcctgtaatcccagtactttgggaggctgaggcgagtggatcacctgaagtcaggagtccagctgacccacatagtgaaatcccatctctactaaaaatacaaacattagccgggcatggtggcacatgcctttaatcccagctacttgggaggctgaggtaggagaatggcttgaacccaggatgcrgaggttgcagtgagccaagattgcaccattgcactccagcctgggcaacaagagcaaaactccattaaaaaaaaaaaaaacagaaaataattatgagagagctgtggatcagccttccaaaggagctcaacagccagagtttgaaaaaaaatgcacaacagggtgggatacacaacagccacggaccaggttagacaacactaagtggagccctgg

SEQ ID NO: 676203 - DNA, 807 bp, Homo sapiens
tctggcttatttacttatagagaacactactctaaaatgaaaatagaatatataacttctaagttactcttattaaaaatgatgaaatacagaaaatctgagaatgacaacatgtagagagtggatgggaaaaataaaaagaaaagcctcaaaataaaagtataaataaagtaatgtaartgcacttaagtgtgtcagttatcaagaaatataactattgaagggaaaagtttataaaattaaatcaactcagtgctgtatacaaaagaagtattcaaagtaacataggttaaaaatcaaggctgggcgtggtggcttacgcctgtaatcccagaactttgggaggccgaggtgggcaggtcatttgaggtcacgagcttgagaccagcctggccaacatggtgaaactccatctctactaaaaatacagaaattagcacccacctgtaatcccagctactcgggaagctgaggcaggagaaatcacttgaatctgggaggcagaggttgtagtgagccgagatcatgtcactgcactctagcctgagcaagactcccctcaaaaaatacataaataaataataatataataaaataaaaatcaagtgaaaaatatgccaataaaatacaaatctcaaataaaaacacggtttacaaatatcgacagacaaaatttcaaggcaggaagcattaactggagcaaactggtggcttttatgtcctccccaccctctgccaacccccatttccctttggttttaatagcaactcaggatcccaagcatctttgaaatgggtttatagggg

SEQ ID NO: 676204 - DNA, 1198 bp, Homo sapiens
gttctgggcatgtattactacttggtgaccatcaatgcagaattatttttataaggaattattaatcccaaatattttcaactctatatttcatatttatttggggctaccaaaggactgttaggacattggtaaaataaaaaacaaaccatctggtcatctcactttgaagtcaaataccgaattatgcctcagggtcataaaagtctgacacgcacaaacacacacacacacacacrcacacacacacacgcatgagacagtcacaacccagatatctcttaatttagtcaataaatactgagaatcaatatatatacttagcaggtactaaaaatacagtactgtgaggaagacagacatgatccttgccctcatgaaactaacattcattgggagagacacacattaaacaataaattatttaatcataattatagtaagcatgagaaggagatatacattgtaatcagagacccaatctagcacttagaatcatatctgatgcatagtaataagcaaatgctagttattatcatcatctaacttccacagtataatattgagtaaaatactgtcagtttacagataaggatgctagagcccaaaggagttaaacaagttgcctgaagattatacagctagaaagtggtagagtggggattcaaaatccagtcttttggactcaaaagccatgtttttctccatttcgtcataccattaagagtcccaggaactctgggttaaagttttatccacagctaaaacaccaactgcaatctagccttctctggtttcaggtaaggaactggcacagacgaggggccacatttctttactggtccacccctctatgattatatccattttcctctctggttcttcccatcttggtcaaatatcccaaggcatgaactatgccagggttagagatatcctgattatggctttcttctgagcctgacacagatagacaaggaaaggagaagagagcagagaagagaagaagaaaaagaagacaacaaatggagatataagcatattactaatattataatataatgttgatataaatacttacattattataataagtacattatttaatggcaaaaaagtaaccactagaacaaaaactcttaaagtggttgcctctggagaatgagtccaagctgtatttttttatgtacccttctct

SEQ ID NO: 676205 - DNA, 586 bp, Homo sapiens
tataatgtgaaagcaagtggggcatttaggaaggagtgttttgggagacctggagcatcatttttgaatggagcggtttggagaaatctgtctcttccttttcataaagttattctgggtggccttcaccaaggcgatctataaagctgtgaagagctattagatcaagtgcctggatgttgcaaagtgattcggagataagtagagaggaaaagtctactccggaagggagatatattgttgggggaaatccatccatttctatgaggcaaatatttctcaatgtggttctcaaaacatctgcattcgaactactagagcagctgataaatacaggcctccatgttcctgattcagattctgattgagtaggtcaggagtttcaacccaamcacaggtgagtctcaggcaactgaggtttgagaagcactgcaagtctttctcccaggcactctcattcccacccacctctataatagctctcatgtctacaatcacttatttaaatacacttactgaaggtcgggcatggtggctcctgcctgtatgcttagcactctgggaggcgaaggcaggtggattgctt

SEQ ID NO: 676206 - DNA, 1316 bp, Homo sapiens
cagttctgactgtgggacacctgaccatggtctggccaatcagaggttccatgattagtggagagatggtcacatgagccaagctgggccaatgggaaagtgcaatatttgggacatatttatacttaaaaaaaaagtgttgtttatctgaaattcaaatttaactgggatcctgcattttctctagcaaccataccaccacacccttcttatataaaaataatgcataagatgaacaagttctgcaatgctatgttgtacacttaaaaatctgttcggggccaggtgcagtggttcacgccagtaatcctagcactttgggaggccaaggtcggaggattgcttgaggtcaggagtttgagacctgcctgggcaacatggcaagaccctgtcttcacaaaaaaattaaaaacttagcttagtgtgatggtgcatgcttgtagtcctagctactggaaaggctgaggcagcaggatcccttgagcccaggagtctgaagttacagtaagctattatcacaccactgcattccagcctgggcgacaaagcgagactctgtctaataaaaaaaaaaaaaaaaattaatctgttaaaagttgagatctcatgttaagtgttcttgccacaaccaattttttaaaaagaaagaaaaataaaatatgctattcatagtgcataatcaacataatcccactagcaagtacagtatcatactaaatgaaccatttgatttgcaaattttccaacgtcgtgaatctcacaacttttgtgccaggtgaaactgcttgagaggacttcctttactaataaaatctcaggctgaataaattcatacatagacacatacaagcaaggtctgccttttcagttccccatccaccaacctgcaggaccctccttggtgtccttccttctaagaaggcaggggtaggggcaagtagatatccgtagagtttaatattggggggccgttaacaaatacagtaatttttttttccttttcacattttgtttcatggcatgtgaaatatatacatgctttaaaatgtcacatgtggccgggcrtggtggctcacgcatataatcccaacactttaagaggctgaggtgggcagattgcttgaggggggtcaggagttcgagactagcctggccaacatggtgaaaccccatctctactaaaaatacaaaaattagccaggcatggtggtccatggctttagtcccagctactctgctcaggaggctgaggcaggagaatcacttgaacccgggaggaggaggttgcagtgagccgagattgcaccacctgggcg

SEQ ID NO: 676207 - DNA, 1013 bp, Homo sapiens
catggcccaactgaaggctgagctcagatcctgctgtgagcacaggatctgaaccactaatgtgagccaagcacatcctgctgggccaagtgggcagagcaaggccactgggcatgagtgaaacttgagcagaggccctgccagccacggaggtctctggctggtgaagtggccctgaaaaaatcctatgtcagtagcaagcactccaaaaaagtcttgatttgtagtgtttgtcagttttcatggtataaakactcccacaattaacaaattcaagatatgcaagcaacgtgacagaacacagtttgggaaatgataataattggctcttgtgagttggcttcagtgcacccctgacaggctatttctaagccttgaagcttttatctgattaacatgtatgaaaagttttataaccattggccatttttccaatcttgtgctgaccaaggcatagaaatagaactgtagagatgatctgtttttaatacttaggaatatacctttatccattggagaaaaaattctaggaaaaatggctacactagacaacatgttctgttgtaactgatggctcttaaatccattcgcttaacacatagctaacataattgtgaaggactgaaaacattttctctaaggtcaggaacaagacaaggatgcctacttctattcaacattgtaatggaagttatagccaaaacaattagacaagaaaaaggaatagaaggcatccaaattaaaaaggaaggagtattattatctttatttgcaggtgacatgatcttatataaagtcatacataatctacaaaaaactgtttgagctaatgagtaaattcagcaaagttgcaggatacagaatcaacacataaaagtaagttttatttttgtacattagtgattaacaatctgaaaatcaaattttaaaaaaatcatcaaaaaaataaaatacttagagaaccaatttaacaaaggaaatcaaagggcaaaacttgtacacagaaaactaca

SEQ ID NO: 676208 - DNA, 596 bp, Homo sapiens
gttcactatatagcctggttattaatgycttgtcaaatggatggtttgcaaatatttattcccattctataggttgtccctttacttcattgattgtttcctttgttgtgcagaaactttttagcttgatttaatccatttttcaatttttgctttggttgtctgtgtctgttgttcccctctttgtgttcatgtgttctcattgtttagctcccacttataagtgagaacatgtggtatttagttttctgttcctgcgttagtttgctaaggattatggcctacagctccatccatgttgctgcaaaggacatgatctcattcttttttatgactgtgtagtattccatagtttatatgtaagaaaagttttagagacattgtcccatgaacccatttaacaaacaagaaaattaaatccaagaaattaagtaaattatcaaaggtcacataaccagcaaatggtagcttcaggattaaagttcatctctcttgtcgtatacttttaactgttgggaatttggagtatgacccattgtgcatttttaagaagtttcaggaacatgggtaatgggaaagcaggatgtgcacacata

SEQ ID NO: 676209 - DNA, 647 bp, Homo sapiens
gctttaagaagcacaaatatgatttaattaacagtcatgtttttgcattgcatatcacttcaaggatttgtatattattgtcacttggtgattgaagaaatagctttacatttgagctctgataaataataaaaaagtacaagtaagaaagacagattttaaagtctatagcaaatgaattgcttttttaaaagaaaatgggatatgtgtactatttacatataaataattcacacgacattcaggtacatatgcatctgtgtatcattttaaatgacaggcaccaatttaatggagaagctagrgctcattagttccctgagtaggattgattcttcataactggaatggtgcgtacagctcttagataatttgtaatgaattgaattttccctcagcatacttaattagtgactctttcttttgctacttaaaaggatatagacatttaaaaagataaaagtttggaaattctgctaaaatgctggaaagaaattaagccttcatgtgcatgggctctatggaaaaaaaagcatgagaaaaaaagaaaatttcattttgggagatggagatggtaagggttttatttcaagagcatcatatgtttttagcccatatgcagagttatttggcaaattctacgtgat

SEQ ID NO: 676210 - DNA, 800 bp, Homo sapiens
ccacctcctaggttcatgccattctcctgtctcagcctcctgagtagctgggactacaggggcccgccaccaagcctgactacttttttgyatttttagtacagatggggtttcactgtgttagccaggatggtcttgatctcttgacctggtgatccgcccacctcagcttcccaaagtgctgggattacaggcgtgagcccctgtgcccaaccaccttgttcccagtcttaaggggaaactgttccattttttgttattcagttctacaggattagatgtagattttttaaagatttttttaaaatcaagttgaagaaatttcctttatttctagttttctgatagggttgcatttatttgttttaaaaatgaataattgttcagtttagtcaaattttgcttgtttggcatgcaattgattgtcatcatgttttttcataattatgtgtgtggtttttttttgtttgtttgtttgtttttagcctattaaaatggttgacagccgggcgttgacagccggacacggtggctcatgcttgtaattccagcactttgggaggccaaggctggcatattgcctgagctcaggagttcgcgaccaacctggttaacacggtgaaaccccgcttctactaaaatacaaaaaaaaaaaaaaaaaaaaaaaaattagcagggcgtggcagctcccacctgtagtcccagctgctcaggaagccaaggcaggagaattgcttgaacccgggaggcagagtttgcagtgagccgagtttgtgccattacactccagcctgggcaac

SEQ ID NO: 676211 - DNA, 800 bp, Homo sapiens
ccacctcctaggttcatgccattctcctgtctcagcctcctgagtagctgggactacaggggcccgccaccaagcctgactacttttttgcatttttagtacagatggggtttcactgtgttagccaggatggtcttgatctcttgacctggtgatccrcccacctcagcttcccaaagtgctgggattacaggcgtgagcccctgtgcccaaccaccttgttcccagtcttaaggggaaactgttccattttttgttattcagttctacaggattagatgtagattttttaaagatttttttaaaatcaagttgaagaaatttcctttatttctagttttctgatagggttgcatttatttgttttaaaaatgaataattgttcagtttagtcaaattttgcttgtttggcatgcaattgattgtcatcatgttttttcataattatgtgtgtggtttttttttgtttgtttgtttgtttttagcctattaaaatggttgacagccgggcgttgacagccggacacggtggctcatgcttgtaattccagcactttgggaggccaaggctggcatattgcctgagctcaggagttcgcgaccaacctggttaacacggtgaaaccccgcttctactaaaatacaaaaaaaaaaaaaaaaaaaaaaaaattagcagggcgtggcagctcccacctgtagtcccagctgctcaggaagccaaggcaggagaattgcttgaacccgggaggcagagtttgcagtgagccgagtttgtgccattacactccagcctgggcaac

SEQ ID NO: 676212 - DNA, 800 bp, Homo sapiens
ccacctcctaggttcatgccattctcctgtctcagcctcctgagtagctgggactacaggggcccgccaccaagcctgactacttttttgcatttttagtacagatggggtttcactgtgttagccaggatggtcttgatctcttgacctggtgatccgcccacctcagcttcccaaagtgctgggattacaggcgtgagcccctgtgcccaaccaccttgttcccagtcttaaggggaaactgttccattttttgttattcagttctacaggattagatgtagattttttaaagatttttttaaaatcaagttgaagaaatttcctttatttctagttttctgatagggttgcatttatttgttttaaaaatgaataattgttcagtttagtcaaattttgcttgtttggcatgcaattgattgtcatcatgttttttcataattatgtgtgtggtttttktttgtttgtttgtttgtttttagcctattaaaatggttgacagccgggcgttgacagccggacacggtggctcatgcttgtaattccagcactttgggaggccaaggctggcatattgcctgagctcaggagttcgcgaccaacctggttaacacggtgaaaccccgcttctactaaaatacaaaaaaaaaaaaaaaaaaaaaaaaattagcagggcgtggcagctcccacctgtagtcccagctgctcaggaagccaaggcaggagaattgcttgaacccgggaggcagagtttgcagtgagccgagtttgtgccattacactccagcctgggcaac

SEQ ID NO: 676213 - DNA, 602 bp, Homo sapiens
tatataattaaatatatacttagcacataaagaatttgcttgtaagagaattgaaaaacaaaatttaatgaatttctgtatttaaatccttcaggagtaataaagaagacacagcactttatttcttaagctatgaaacagacctcaaagtttaatgtatatctttatctttttctttcacgcctgaagctatgactttgtgaattgtatgtcttcagaaattaaagactgactgaaagtttattccaaatcatgcacatagggaagtactctttgggctaaggaatgtaacttatgtcagaaatacragcataccttggagatactgcaggtttggttctagaccaccacaataaattgcaataaagggagttacacaatttttttggttccctagtgcatataaaatttatgtttatactttactgtagtctattaactgtgcaatagcactatgtctaaaaataatttgcatacagtaatttaaaaatactttattgctaaaaagttctaaccatcatctgagccttcaacaaattgtaattttttttgctggtggagattcttgccttgatgcccataactgctgactgttcagggag

SEQ ID NO: 676214 - DNA, 625 bp, Homo sapiens
tttttttaattttttatgttttttacttttttccctgacttcatttgtaatgttctgcgatgaacataccttaactaaatatctgggcccatccaatggtgtactggagatggttcgtgaagctccagggaaaaagaaaatgaattccccattgctgtgggtcccgattttctgtggtgcactttcttccactgtggtcagttgaaacaccagtgtgaaggccctgaaggtggggctgggaaggggtgaacatatcagctcttgcaagccaggataagctggcgcctgagtacagctgggaccacccatgctaatgttttaggataaattcctaaaagcggaatttctgggtctaagggtatgaacattgtcacatattttgttttgttttgttttgttttttgagatggagtttggctcaggtgatcggcccgccttggcctcccawaatgctgggatgacaggtgtgagtcattgcgccccgcccattgtcacatatttcgtaggtgttgtctagttgcctttcagaaatatcaaaatctatattcccatcaggagcctataaggatgttctcaagtgtgtaatttgtcctgagatggaacagactgcctctccaggccacga

SEQ ID NO: 676215 - DNA, 625 bp, Homo sapiens
tttttttaattttttatgttttttacttttttccctgacttcatttgtaatgttctgcgatgaacataccttaactaaatatctgggcccatccaatggtgtactggagatggttcgtgaagctccagggaaaaagaaaatgaattccccattgctgtgggtcccgattttctgtggtgcactttcttccactgtggtcagttgaaacaccagtgtgaaggccctgaaggtggggctgggaaggggtgaacatatcagctcttgcaagccaggataagctggcgcctgagtacagctgggaccacccatgctaatgttttaggataaattcctaaaagcggaatttctgggtctaagggtatgaacattgtcacatattttgttttgttttgttttgttttttgagatggagtttggctcaggtgatcggcccgccttggcctcccaaaatgctgggatgacaggtgtgagtcattgcgccccgcccattgtcacatatttcgtaggtgttgtctagttgcctttcagaaatatcaaaatctatattcccatcaggagcctataaggatgttctcaagtgtgtaatttgtcctgagatggaacagactgyctctccaggccacga

SEQ ID NO: 676216 - DNA, 1191 bp, Homo sapiens
acttgaaatttttaaaaatcagagattatatatacttatggaaattcctctcacacccctccaataaaatattttaaatgtaaaagatgataaatgtgcatctctgcattgtgaactatcgtgttgaaataatttctcagcttctgagattctaatgaaattctccaggcaggttgaagtgctgaatcccctggtggaagctccggaggaaccttcctcccgtccccgttggcggctggcaggctgtggtggtttcgggcagggaagggccccgcagtgtccctcctgtggccacacacactcctttattgctccagcgcccacctgctgcttgcacttgcgatttgggtggcgtgatgccagtgacatcagacaggccagggtattgtcccagtctcagggaagatataagttgtcatcatcagtgaatatttattaggtgttcataggcacaggacttcatgcaaggagtgatcagcaggagaccaggaaacacagaggaagccggatcatttttggggtgcaaggcaccttgtgccggtgatcactcgtatgccagttttatttctttgtaagtgtgaaaaacgtggcccccaatttctgcatcattattctaacaaggttggcaaaagtcctaggcctttgttacagagcgacagcttttctctttatatgatatttttgaggtttatttatggaaagccttaaacgttatttttttcatgattatcctttaaacctagtgcattattacctgggaaaactcagggaagatttcttgttcagagctaagcaaaatagtatttactgtaagatgtaatgacgcagcccaagtgggtttttatttctaggctggtcatggtcataatagtgactttgccgagttttgaaaacgtatctgtacagaagattcaagctagaagaaaacactagttattggaggaagtcttttactgtgggcagcacggaggtcaccttgtctgtatgcctgggagwtttctccttgcccagcctatgaaattaatggtttaatagagagggaaagttcaacctcaaaatgtaaatctttagcccagttaatagacacactggggcactgtattaacttgcatttatattcaagcggcgcggtcactctgaaatcctcctctgtgccggaaagcagcctctgcaggaacttgaaagggccta

SEQ ID NO: 676217 - DNA, 1046 bp, Homo sapiens
ctcccttgccatctccagacctgccccacaaactccctccctggtctcctggctcttgttcactccttccaggcagccttccacagtcatctctaaaacatatatgactgtccctcctttatccagcaccttccatggctccccagagccctccaggtcaagttcaagttctttgatcagacactagatcttaagctgcattctacctcctgaattaagatcccggagaagcccaccttgctcagcacaaacgcatcactgaagtcgaaaatcttgaacgtggccttggcattgaggaagtcatcaacaccctggctagtgagggtgcagtgccgctccaggatgatggtgtctaaagttgtgcaccaggtcgcaggccctgcagaagcatctcccctcaggagtgaggtagtacaggaagtctgtgcacaggcagatctgctggtgctgttacactatgagggcactgagctccaagatggtggcaatatattcactgggattcctgcacggtgaggttggagagaggaagcatctccataacacatatgaaaccctggaagcacttcccagccagaaattcaggaccacgttatatgcagatatgggtgccctctgagcacacttgtctctctgtctcccactctgagctgcctcctggccccacatgccccagcctggcccagggcttagcccagtgggtgttcagtccatggtgttgactgctccctgggccaggagagcccttggtggctctgtgactcctcctgtggaacccctacctctgccttgggacctcccaattcccatggaagcccccacagctctggattgccccacctgccctgtgatcctccagccccataggccttactcgatgccttagccctcccagaacatgacacgtttctctgaatgtggctgatgyccagggccatctgtagatgtttgctggggacctcttgctgttttcctttatggtctgtaggccagggccaagaggagaaaccagcctaatctcagaatggacaaaaggctcactgccc

SEQ ID NO: 676218 - DNA, 2608 bp, Homo sapiens
ttagagaatcgtcaaccccttggggaggttggctgggccccgtcagggcagctgtgagcaaggaagactcacagggcatcctgcctccgaggtccttcctcagtgccgcatggtggaagctgtggcaccaaccaaatatttcctgcggcctgtgcttgaagagacctacaccaactccctccgagtgactgacacctccccggaggcgcaaaatggagacatcctcttttttctgtgtgtgcaaacagaaagaaggccgggcgtgcagacgactcgggagaacagatgccccgcttggcacctcgcttggcagcctgtgttctcccaggctctgagcctgtccaggctgtggggagcgcagagagtggaagccaggaggggcctcccaaagacctcacccctagggattctctgtctctgccagcagtgccgtgcacagggttggcagaacattcaggccagaggaagaggcacctggggttggcaccatggggttggcagaacattcaggccagaggaagaggccccggctcccgacccccacggcagtggcagaggccctgccctactccacactcgtgctgcacagctgagaagggttcaaacacgttgacatgacccagcctggagtgggaaggctgtgcaggtgctcctggaatccttgcagggagccaggatctgctgctctcggccaggccctggctttgccgctctctgttcctgtgtaacagatccagcaaaccctcctgagtgtggcctctggatggggcaaggcatagagggaaacacaggggagggccttggcctggttccccccagccacagccttggtgtggagaaagaggagggggaggagaggagcccctgagggccagagcctgcaccgggcagagtggccaccatgggctctgttctggtaagagatccactgcagggtggccagggaagagctgagctaggtcccaggtgaaaggttcctggggtggctgcagttgtggctgccacaagcccttgttggactctccaagaggaagagaagaggacagaagtgctctcctgggccgtgtccacctttgggtgcttctctcacggttccacctgcaggtcagcctctcctcatcagtaggtgatgggaccctctaatgttactgatgagtggggaggcggcccctgaggactgctgtttccacaggctcacacacagaccccactgcaccccaagcccgggcagcccttgtttcctaccctccccacccgtcagtgtggaacggcaggtgaggagagccggctgtgagggctgaagcagcctctgaatcactgtggaagtctccaggtgtgtgcagctctcctgctccgtgggcgggtgctgcggagaagtgtgaggacagggtagacaggaggggagaggtttggaaggaaaggggcccggccgcctgccagctctcctggtgagtctctgctgtgtaaggattttatgcccccagttgttaggggagcaccctccagctctacctgtggccacagccccctctgccatgggctgggtttgccatgtgccatgtgccatgtgccagaagcagaggcagccgacccgagtggagccctctcaagggacaggaggcagcacccaggagaggacagcaggtgagcagcctcccagagctcagctcaggttctcactgaaaatcccaccaaatccttttgcaggagcctggaggcgatgtgctggtgggaagggctgtggcgccgggaaacacggggtggaaatggaaccggaacgagcaaggagagtccaggcaccacctgggcgacagccagggagaggaatcctggatcccgggtctgagccggaagttgctcctctgcctgattccaaatgagctcaaggctggacccagcaccccagctggcatgtgtgaatctcggctggtcaccacccgcagggccggccttaactgatgagcagtgtctgagtgcatttccgagtgtggacctggatgtcctttgattgtctcctcaagtcctagttaaagaatcccactggtgctggtcagagccagcttcctagacacgtgggtcccggcaggcagccctgtcgtggggctcaggtagccgggtggatctttctggccaacagatcacctgcgtggggcctgcatctgtggccggccacacgctccaggcttcaatgcatgcaggtaaatttgggagtctgttcctgcccgttagtgatatcggagttcaaattacttgaaatagcacaattgaaacagactcccggcgcattgctctggtggggctcaggaagctcgcaggaagcagaaagcgtggctgcaccrtcaccacgccaccacgaatcttgcctctttatgcatgtgaaccaggtaacgggtttcgtgacgttttcatacgccctgcgggacctgcgttctgccctgtgctcagaccgtgggtcagaggcgcctgctggggcttttgcaccgggacagctggaaggtgccctggccacgtccaccgtggtgtgcagttgctctgtggtcagggcaggggactttccacttctccttccccgcaaggcaagagcaaaggggagcccgggcagaagcgg

SEQ ID NO: 676219 - DNA, 2608 bp, Homo sapiens
ttagagaatcgtcaaccccttggggaggttggctgggccccgtcagggcagctgtgagcaaggaagactcacagggcatcctgcctccgaggtccttcctcagtgccgcatggtggaagctgtggcaccaaccaaatatttcctgcggcctgtgcttgaagagacctacaccaactccctccgagtgactgacacctccccggaggcgcaaaatggagacatcctcttttttctgtgtgtgcaaacagaaagaaggccgggcgtgcagacgactcgggagaacagatgccccgcttggcacctcgcttggcagcctgtgttctcccaggctctgagcctgtccaggctgtggggagcgcagagagtggaagccaggaggggcctcccaaagacctcacccctagggattctctgtctctgccagcagtgccgtgcacagggttggcagaacattcaggccagaggaagaggcacctggggttggcaccatggggttggcagaacattcaggccagaggaagaggccccggctcccgacccccacggcagtggcagaggccctgccctactccacactcgtgctgcacagctgagaagggttcaaacacgttgacatgacccagcctggagtgggaaggctgtgcaggtgctcctggaatccttgcagggagccaggatctgctgctctcggccaggccctggctttgccgctctctgttcctgtgtaacagatccagcaaaccctcctgagtgtggcctctggatggggcaaggcatagagggaaacacaggggagggccttggcctggttccccccagccacagccttggtgtggagaaagaggagggggaggagaggagcccctgagggccagagcctgcaccgggcagagtggccaccatgggctctgttctggtaagagatccactgcagggtggccagggaagagctgagctaggtcccaggtgaaaggttcctggggtggctgcagttgtggctgccacaagcccttgttggactctccaagaggaagagaagaggacagaagtgctctcctgggccgtgtccacctttgggtgcttctctcacggttccacctgcaggtcagcctctcctcatcagtaggtgatgggaccctctaatgttactgatgagtggggaggcggcccctgaggactgctgtttccacaggctcacacacagaccccactgcaccccaagcccgggcagcccttgtttcctaccctccccacccgtcagtgtggaacggcaggtgaggagagccggctgtgagggctgaagcagcctctgaatcactgtggaagtctccaggtgtgtgcagctctcctgctccgtgggcgggtgctgcggagaagtgtgaggacagggtagacaggaggggagaggtttggaaggaaaggggcccggccgcctgccagctctcctggtgagtctctgctgtgtaaggattttatgcccccagttgttaggggagcaccctccagctctacctgtggccacagccccctctgccatgggctgggtttgccatgtgccatgtgccatgtgccagaagcagaggcagccgacccgagtggagccctctcaagggacaggaggcagcacccaggagaggacagcaggtgagcagcctcccagagctcagctcaggttctcactgaaaatcccaccaaatccttttgcaggagcctggaggcgatgtgctggtgggaagggctgtggcgccgggaaacacggggtggaaatggaaccggaacgagcaaggagagtccaggcaccacctgggcgacagccagggagaggaatcctggatcccgggtctgagccggaagttgctcctctgcctgattccaaatgagctcaaggctggacccagcaccccagctggcatgtgtgaatctcggctggtcaccacccgcagggccggccttaactgatgagcagtgtctgagtgcatttccgagtgtggacctggatgtcctttgattgtctcctcaagtcctagttaaagaatcccactggtgctggtcagagccagcttcctagacacgtgggtcccggcaggcagccctgtcgtggggctcaggtagccgggtggatctttctggccaacagatcacctgcgtggggcctgcatctgtggccggccacacgctccaggcttcaatgcatgcaggtaaatttgggagtctgttcctgcccgttagtgatatcggagttcaaattacttgaaatagcacaattgaaacagactcccggcgcattgctctggtggggctcaggaagctcgcaggaagcagaaagcgtggctgcaccgtcaccacgccaccacgaatcttgcctctttatgcatgtgaaccaggtaacgggtttcgtgacgktttcatacgccctgcgggacctgcgttctgccctgtgctcagaccgtgggtcagaggcgcctgctggggcttttgcaccgggacagctggaaggtgccctggccacgtccaccgtggtgtgcagttgctctgtggtcagggcaggggactttccacttctccttccccgcaaggcaagagcaaaggggagcccgggcagaagcgg

SEQ ID NO: 676220 - DNA, 596 bp, Homo sapiens
taacaagaatttgacacctggtgaggatgtggaggaccccaaacctgagactgtttggaaggagatgagagagctgaggtgtgtggtcccacccctgagccctgcagccacctggactcctcagcccagcgccatgtcgcagaggcccctctgtagtcaycaggccagcaatggaggtgtcacctgcacgctttgcccctgggggagctcagcctcactctgtgatctcgctgatccagccagcagacctggggctttgattggaggcccctgtggaatttaagacctattcatcccacctacagaggtgctggttgctctctgtatttctctactgatggtggccatgggggctccccgctgctctccagaccctggtcccatttgggactctccattgtccctcccacgggtctccactttctcacacccagctcctcctcctctcctgcttcctttatcatcttcacttgcggtcctggcatcctcaggataccaaccctcagctctacagaccagacaaaagggcagttgtggcctaggagagcttcttaatctgaattccataaagattcatttttattcagtggtgcatg

SEQ ID NO: 676221 - DNA, 843 bp, Homo sapiens
gtgctcctaggtcccttccccagggtgctccctggatcaagtccgactaggagatcctccaccattcctatgccatggcagacgtgaaacacggtcatgcttgtgttgcatgctgggaggaatggtggacaggtggaaacttccagtacccagagccgagccctggcccagttctgctgcccagagggctgcaaggaggcacttggtgtcctgagcaggactctgagagacaacatgacactggaggaacactcaggggaggacacacgcagaagacagaaagagccgccatctgagcactgcccccgactccaggcagatcagccctggcgaggatgggcgggaggagcggccagcccacctgtgcagggaaacacgcaggcaaggcgtggaaaggagctgatgctcagcgtcttcaaaaccagacgcaaatctcaccccagagccagtgggctcctcggaagttttggtcagggagaaggaatacgctctgagctaggaatcaggagacatctctggagccagcagtggggtttctgtccacagtcagtggaagcagggcgactccctagggcttttcagcagagagaagcccagaacrcccagcctgacttgattttctccccatgcctaggtcacaggcttaggatgttaaagactcaagatgacattattcctacctcaaaataacaacagcttctaccttgcacacccactggctaccaaccttccattaacatgcaagtaagagcaattcccgagagagaagcacagcgtcaggttgtttttctcacctactaagatggtcaagggcgaagcagtccagggtggcccattggctct

SEQ ID NO: 676222 - DNA, 629 bp, Homo sapiens
ttgtgccttcacatggcagaaagtggaaagcaagcaggctaaattcacgcctgcaaggccttttacaaggggctgtaatcccattcatgagggtggagccctcatgacttcatcaccttccaaaggccccacctctcaataccaccgtcatgggaattaaattcaacatgaattttggagggaacgtcaacattcaaaccatagcaaccaccaagcaataataagcaccaccacagggcttttcatttcttttttttttygtttgcttgtttatctatgatttaaatgtaaataagcattaggtttcagtagtgaataaggatacaaaaggcatatgagaattgctgtcttagtgacattaacatttttggattatgaggtatcataagggatatttacaaatatgtacagtctttatacttcccctcgtagagatacagtggtcagacacctttcatgtctagtctctgcaaacttaaagacataattttcctgcttgttacttttaacaaatcatatttttagattattagaacttaacgtggccatgcatgatggcttacacctgtaattccaacactttgggagtctgaggtgggaggattgcttgggtccaggagtttaagacc

SEQ ID NO: 676223 - DNA, 629 bp, Homo sapiens
ttgtgccttcacatggcagaaagtggaaagcaagcaggctaaattcacgcctgcaaggccttttacaaggggctgtaatcccattcatgagggtggagccctcatgacttcatcaccttccaaaggccccacctctcaataccaccgtcatgggaattaaattcaacatgaattttggagggaacgtcaacattcaaaccatagcaaccaccaagcaataataagcaccaccacagggcttttcatttcttttttttttcgtttgcttgtttatctatgatttaaatgtaaataagcattaggtttcagtagtgaataaggatacaaaaggcatatgagaattgctgtcttagtgacattaacatttttggattatgaggtatcataagggatatttacaaatatgtacagtctttatacttcccctcgtagagatacagtggtcagacacctttcatgtctagtctctgcaaacttaaagacataattttcctgcttgttacttttaacaaatcatatttttagattattagaacttaacgtggccatgcatgatggcttacacctgtaattccaacrctttgggagtctgaggtgggaggattgcttgggtccaggagtttaagacc

SEQ ID NO: 676224 - DNA, 589 bp, Homo sapiens
tttttataaaaatgttatcacttctggcagtagaaacaggtatatttgataatttaatgagatgtcatcaagaatagtgtttattttaaaaaatactaaatatacatttgtcttcattattatggaacttggggttgctggtggtaggagacttayaatgatttcagatgcttttctctagcaaggagtattatttttgcttctctcaaatatcactgagttccagtcttctttatagcttttcataaaagatcattttttttcagaaccatttattctcaccaggaactaaatccagataaagacatagttgagttcatatttgatttgagactatagtgatgtttcatttaagtagctttggaaaacacagacatttggttgccatttgattctggttacttactctagtttgttatcgaacttctggttcagcaacattaaagggaattaacacttgaatttacatctcttctgatttgaagctcatggcttgaggttcaagggcacgcctcttattaaaatcatttaatgttctatacatttccgagaaagtaatcaaaatcagacactctcactcctagactca

SEQ ID NO: 676225 - DNA, 1099 bp, Homo sapiens
ttcccttgcttgattagatgaggcaaaaatacaatgtggatgtgaattctaaacagatggggaaaataaccatagaaaaggaactgctggctttggccaaattgttaaaggttctcctaatgggctagcagaatatgcttcgtggagaaagaagttagaggggatctggccactacaaacaaaaagccaaagttaaatgccccaccactgggaaggagggagaagatgataatcagagagaaaaacaaggggtgtttcagagttgctggtaatctatttcttgactagtgatgactaaacacgtttgcacacttttaataattcagcaaactctacacttataatttgtgcacctttccatatatatgttacatttaaatttttttaaaggaaaggaagttaaatgccggactccctaactgagattcatatagactaacctcagaatctgtgggtttctgtgaaagaagtaacaaaaaggaatttgttcaatgttaacactaaggcatatcattgagtgagacacatgttgttgtggtgacatttcatcttatcgggtccgtttgtgaacattctgktgtggcattagtccaaactcattgctgcatactaaacaagatgctctctgtttgactgtttggtactaaccaatgctgttgtctgtcagcaggcagatatagaggacctcatagatacacagcactgtctgcactggccattgtggcaagagaagtattctgcacacagtgagattaaaatgacttgtggatttttttcacaagtaacaagtataaaataatacaattcatactaaattataagtgctaaaggaagaaggactaaacacctatattattttaattaaagaggatctccaagaattggcaacggtctttgttttttatcttgagacagggtctctctctgttgcccaggctggaatgcagtgatgaaaacacagcttaccgcagtctccatacttgggctcaagcaatcctcctgtctcagactcctgagtagctgggaccactggtgcatgccaccacactctgctaatttctaaaatttttgtagagatgggatcttgctatattgccca

SEQ ID NO: 676226 - DNA, 2221 bp, Homo sapiens
aaatatctccctaccatcttgatgaaaagttttgaagttttaaattaattcacattaaaaattgataaataaaacacttgacatttattcattcatctattcattcgacaaatgtttattgagtacctgtcctgtgccaggttatcttttaggcactagggatacaccagagtaccaaacagaccaagagtttcttttgtgtgtgtgtgacagtatatacagtggtacaaacatggctccatgcagccttgatctcctgggctcaagcaatcctcccacatcaacccccctaagtagctaaggctacaggaacgtggcatcacccccagctaacttctgtatttttagtagaaacagactttcaccatgttacccagcctggtctctaactcctgacctcaagagatccgcctgacttggcctcccaaagtgctgggattacaggcctgagccaccacactcagcccagaccaagagttttaccttcatgaagctaatagtctactgataaagataagaagagcatgttttaatatataataaatgatgtcattattttacatcatttattcaacaattagtattatgcattcattcttacatttaactaaacatgtcaatgttacttacagatcaataaaatttaaaaactagggtattttattttaatttaatatgtagctattttctcagctatgcaatgctgataaaatatatatgaaaagtgtgacatgtctcatgtttattcaaatgtaagaatacatagattcatatacgccgcacaaaacataaaaaatgcaggtattttccaatctagaaatagttaatttgctaacaacttgtacatactaatgatcactacagctcccattttctccaaccttaatgcctcctaattcccaactctggtttgcacttgccctttggttcttctctgctgtcggactgttcaccaaccatccatttattcattgcacaaggacgtactaggaaccactggagtgagaccctctagaactccttcacccttgtctcttaggactagggcctcttggaagttgaaagagacccaagactcttctactaattgggaactctcaaaatactattataaaaaataaagaaatgccagttaacagcgttattaaaatttactttaaggacttacatttcacatagtaattcttttaacagacacaattgcaatgacaaaggcaatgactttatatctgcccatatttgaaagaaatgtcaaaaattcaaatttataaagccctctgtgaaatatgaggccctattcaaatggccctcctggtcttgtctgtcaccctttccttcttggctgctggcaccttcctatctcattgtcaacgagaagccaccacactatctccacatctgagtatctctatcccattctccaccagttagagctcttaaaacctccagggaagctagcctcagaaggacagaggaccctatatttgggcttaggaatcctaaatgccctagggcttagagctgccattactggtatttcacacttatttcaggtttttttttttttttaaaaaaaaggaagaaaatttttgtggcttgcccatgaattgcataacattgttctagggggaaatgcattctgacctcaaactcacctaaaactacagatttttgaaacatgacatatatgtttagggcattacatgagaccacactttttctcacacatggtaactatatttcctttttcttttttttcttttcttttttttttttttgagacagagtctcaactctgtagcccaggctggagtgcagtgatgtgatctcagttcactgcaacctccgcctcccgggtacaattctcctgcctcagcctcccgagtagcagggattgcaggcactcaccaccacacctggctgatttttgtatttttagtagagacrgggtttctccatgttggtcaggctggtctcgaactcctgacctcaagtgatcggtctacctgggcctcccaaagtgctgggattacaggcatgagccaccacccccagcccttattttccttatgtattttgcttatatgtttttcctacatatggtaactgtgagtcttttttcattcaacttgcccgcaaatgtgattttatatatactgtcatatatttctaacttatataaataatgcaaagtaaaagatgtccttgagtttataaggta

SEQ ID NO: 676227 - DNA, 691 bp, Homo sapiens
tgactcttttgaattccagtgtctaaatggctattgttcctctcagcatagaattttctagaagacaaaacacatactaaagctctaacaagaaaatatccattaaagatacaaagagactggggctccactaatgtaatataaaaattcaacgtgcaagtaagatgccagagttggattgattgctgtgtacaacagtgacatgagtataaagactccctaaggttaaattgggctcctgcattgaaattctaattagaaatatgagtgccccaactctgtgaaaagtacatgtgtgtttaattattctccttttcaccttatctcttccattactttatacccttttccctcctcctttctcactgttttcaagaaacccatgctcctcgcttaatctaagtgcaggccttcctttaagctggcattaattgacaagcagtgtttaattattatttttcatgtctgaagagggctaatattaactctccatgagcccaaaggygacctcagcccccttgtttctggtggcaccactctgccttcatcactggcatttctttagtcagagagacatgccacatgctcttcttcattttaatggtctatacctatatttgtgctaatcgaggctgctgggtgcctcacttatcttctagcattgcacgtgaaaaactggcaccttggacaa

SEQ ID NO: 676228 - DNA, 645 bp, Homo sapiens
ttcttcctggttcaatcttgggagattgcatgtgtccagtaatttatccatttctkttaggctttctagctagtgtgcatggaggtattcatattagtctcctttcttatttcttattgtgtttatttggaccttctctcttttttctttattagcctagccagcagtctaactaacttattaattttttcaaaaaaccaattcctagatatgttgactttttgtatggtttttaatgtctcaatttccttcagctcagctttgattatagttatttcttgtcttctgctacttttgggggttgacttgctctcgcttctctagtttctccagttgtgatgttaagttgttaatttgagatctttctaacttttttatgtgggtgtttagttctataaagttctctcttaacactcccttagctgtgtcccagagattctggtatgttgtatctttgtttggaactatttttaatattcttcagtgcaacctgctggaatgactaatagctgcaattaggtccaatgtctgaaagttttgaaatctaatattgctacatatggcttttactattttcttacaattgcatgagctttgaaactgaaagacctgagagggaatctcagcttgacacttactcattat

SEQ ID NO: 676229 - DNA, 1589 bp, Homo sapiens
ttttcactttcctctttcacatatattaatttcctcttaccgctccaaaaataataaagataagatctaccgggaaaggacaaatgggaattgatttgtacctcgtaagtattacatgaaaaaaaaaattcttaaatatggctacaaattcttttgaacttgtttgttttgtgttccaatatgtcaaggaatagatatccacatgtaatactaaggtcttgggagacctggctttgcatctattaatatttctattgctttttattttgtgtgaattcttgggagatgcaggattgatatataaaatgtctgataatgcagagatgtctatcagtgattaataagagatcaaattgggggaaaggttgaaattattaatgtaggatggcatggacatcctttatttaaataaaatgtcagrgtgtttcatggaaacccagaagaacaatatgtttgtatttaggtatggtgtgaagaagtgagaacatcatgatatttagcctgaagtgcagctgcatgcagtagatatgttttgatagaacagaaaagcatagaaagcaaaagtgtttatccccaggcaaagaacaggcttcagttatttctgagctggtcatcagaaatcaccctaataagttaaaggctggtctgtgataaaaggctaaaggaaaaccacctacctaagcagtctggaggcagaatttagagctatgcatttcaaaatatttttttaatcaaaaacaatattatcctcttaattatattaaacaattattaaagttgatttgtattttaacttaatatttacatatatactaatacattaatattacacatatctttctcattttaataagtactttcacctttatgaatgcccttcaaaagtgtaaattaataagactctatttgtgctttaaaaaggctaggttggtttgcctcctacatgttccatagagatcaattcagcctggtggccgcaacttgacttggactctgccactctcagtgtgaatgctgggccaacctctgctctttaaattaaacaagggagtgttttcctgtgtgttacccggttatcaaaaataagattcccctaaacagaactgattataactggtaacagaagcaaaaccattgtcccatctggcaatattcatataatttcaggaattctgctttattattaaatgcaggggcagtgtttacaaagatgcagtctcatatagtgagacaagaatttggtcttttctttttttcaggatagtgaatttaaaagtgaaaaaaaaaacagtgaatgaatcatgtattaacttacataacatctaagaatttctgtgattttcttcaccaaatcatctactctactgataggttgttcaacagtactgtagactcatttagtgtcacatacacattctctgcaatatcagtgtctgtgatagtggttttatatttatagagtatggcttttatatgcttgatactgttgattccgaaataagtgaaggaatattaacatattgaagtggtttgccaaacatattgtactgtatcctatagccacagccacagtgggattataatcattt

SEQ ID NO: 676230 - DNA, 1589 bp, Homo sapiens
ttttcactttcctctttcacatatattaatttcctcttaccgctccaaaaataataaagataagatctaccgggaaaggacaaatgggaattgatttgtacctcgtaagtattacatgaaaaaaaaaattcttaaatatggctacaaattcttttgaacttgtttgttttgtgttccaatatgtcaaggaatagatatccacatgtaatactaaggtcttgggagacctggctttgcatctattaatatttctattgctttttattttgtgtgaattcttgggagatgcaggattgatatataaaatgtctgataatgcagagatgtctatcagtgattaataagagatcaaattgggggaaaggttgaaattattaatgtaggatggcatggacatcctttatttaaataaaatgtcagggtgtttcatggaaacccagaagaacaatatgtttgtatttaggtatggtgtgaagaagtgagaacatcatgatatttagcctgaagtgcagctgcatgcagtagatatgttttgatagaacagaaaagcatagaaagcaaaagtgtttatccccaggcaaagaacaggcttcagttatttctgagctggtcatcagaaatcaccctaataagttaaaggctggtctgtgataaaaggctaaaggaaaaccacctacctaagcagtctggaggcagaatttagagctatgcatttcaaaatatttttttaatcaaaaacaatattatcctcttaattatattaaacaattattaaagttgatttgtattttaacttaatatttacatatatactaatacattaatattacacatatctttctcattttaataagtactttcacctttatgaatgcccttcaaaagtgtaaattaataagactctatttgtgctttaaaaaggctaggttggtttgcctcctacatgttccatagagatcaattcagcctggtggccgcaacttgacttggactctgccactctcagtgtgaatgctgggccaacctctgctctttaaattaaacaagggagtgttttcctgtgtgttacccggttatcaaaaataagattcccctaaacagaactgattataactggtaacagaagcaaaaccattgtcccatctggcaatattcatataatttcaggaattctgctttattattaaatgcaggggcagtgtttacaaagatgcagtctcatatagtgagacaagaatttggtcttttctttttttcaggatagtgaatttaaaagtgaaaaaaaaaacagtgaatgaatcatgtattaacttacataacatctaagaatttctgtgattttcttcaccaaatcatctactctactgataggttgttcaacagtactgtagactcatttagtgtcacatacacattctctgcaatatcagtgtctgtgatagtggttttatatttatagagyatggcttttatatgcttgatactgttgattccgaaataagtgaaggaatattaacatattgaagtggtttgccaaacatattgtactgtatcctatagccacagccacagtgggattataatcattt

SEQ ID NO: 676231 - DNA, 3744 bp, Homo sapiens
  misc_feature 3008, 3035, 3068, 3140: n = A,T,C or G
tttaagtcaagggttcagaatgctggagtagagttctttgttaatgatcactaagaatgtttaaaaaaaattagaaagagagatttttaattttacctttacaagaatacatgtttttctttattattatttaattaaatcttctctattataataaaataactaaaagtatataattggattgtttgtaacacaaaagataaatacctgaggggggggatacttcatttactctgatgtgattattatgcattgcatgcctatatcaaagtatctcatgtactcccataaatatatatacctgctatgtactcacaaaattaaaaataaatttaaaaagtgataattgctcatgatagaatttctaagaaaggatagagttgatatctgtctatgatttatagaagtttttctgtgatggttatctgaaaataaactcgctaaagttatgcaccaatgagctttattgcagatgtagtttataaaaaagtttgtaaaaaaaaaattagccaggtgtggtggcgggcatctgtagtcccagctactcaggaggctgagacaggagaatggtgtgaacccggggggcggagcttgtagtgagcccagatcgtgccactgcactccagcctgggagacagggagactccatctcaaaaaaaaaaaaaagtttaaagtttgtaaaatctcccttgacactataggaggtaatgatctatgtccctttcctagaaagttttctgaaattattttttggaatatatatagtttgtacctgagagtagatatttagattattttcttggtgtagtagatagattgttttacaagataaaatatattgatgatcttattcatgagtttcaaaatcagatgcaaaaagagagaatttatttaaggctatgtaaagttagaagagaattatttgatttgatcaatttggtctaaaaaaactaatgcaccccaaagcaaataaatattaatctaatcaatactttccgttatatagatcatttaaaaactggttaaatgtagcttttaaaacatttgttttacttaatgttgttgccataatatgtctatactttttgtggattattattttctagtcttatttgcaaatctactggaaatctattctcaggcaatgacagaagagaccatgatctccttcttttattggaaggtggaaagttgccacaagtttcaacagccactgaccaaagaacttccatattttggattcttatcaatatgtatgatgactgtttgatgagataatatatcatgagctgtaaacaactagaagataagctctcagagggcagaacagagtttgttttgtactgctttattctgcatgctaacatcatgctctgcctacgataagcactgattaaatttgattgaatgagagcatggtgggtcagaggtgtgactgttagcagtgccgtgtttaggtacaggagaaaggcttctagaggacttaggcactgagaagaacaggcctgacctggcctcagttcttgtgaaaaggatgtggtggttttatttggccttaagtttcatgtgtgcttgctctgaaatgtggatacaaaaaaggtcaagggtaatcgtattacatattataacatctaaagaaggagtcttattttgttagcttcatgctcttgccagcattttctgtttttgccttctgtttactccttgcccttagtgtgtaaacatgctcaagtttctccagcattaaaactaaagaacttatttggcttttacccactccttttatctctttcctctctctcatgtccaaattattaaggaggataattggtagtggatgtcttcaatttctcctttctcatttccgcttaacctctctgcagtctggcattgccaccactgctgtgctcaaaatagttccattgaagcctccaaggctgatattatgagggtcaaatgcagagggtatttctaagaaattcttgctgcatttgaggcttctcctcatatccacttcttgaaactctgttctcttgctccagacttcagagtttcctcttttctaactacccaacctcacgccacatcactcctgctgtatactttagctttccccaaggttctgccctcagtttttggctcacttgttttctcatgtacacatgcttcacagattatcctttccactgcaagtatttttaacacaacctctataataactgtcttttcctttctttcctacctcctgcccttcctttttctactccttccatcctcctttcttttgttccttccaagaatccatctataaaattcttgacagatacacaacaaaacaatggctgtttcctagtgggaaccaagagattgtgtctagtttctttttatagttttatttattttctgatttattttacaatgaatgtgaattagctttaaagtcagaagtaaaaaacaaaattatttccaactagaaacaaacagaaatagtgattattctcaagaataaataccctgtttgactctcccgtaatcatctcacacacttgaccttaccctctgtgtgaattaagtgaagggcaggaaccatgtcttaatcacctttgtaggttgttcagtatggtgcttgggacttagtaaatactcagtgagcatgctgatactgtgataagctcactgcactctctacaattaaaatgacataccaaaatcttgggagacgtgggtgaaaactcaaagcagatggggcttggaacaacattctggagaggagagtgcaccatggtgatctcaacaattgttctacttttttcttaccaaaatctgtctattttcagcaaagagaagagagcctgaggaggaagtataaagtcagacgcttacaacagacttgctgggttggagagagagctgtcacagccagggctccaagtaaatcaggacttgagggtgaagaagaatctcagagaactaaaccagaaataatatgcagtaggtgatttcctctngaaggcatttgccaattcttacactanacaagtgtagggtgaactcctctgaaatcaasnagaaacctgtcccgggagacaaatagctgagcaaagatatcaccgtccagtcgtcctggggagagagaagtnagagtttagtgcctaggaaagtggagtggtccttttaaataccactagcttacagttttgatcccaaaagtactatgatccaagaataagagcaaactggaagaaaacaccatccctaacaaatcccaaaactcacacttaactgaagatatcagtaccttacctgccttctagaataaaataaaattctatttggagaaaatcagaccaaccagagcttttgtgcaatatcttgtgtactatttataatattcatttaaaattacctggcatgctgataaacaggttcagatgaccacaaatgaaaaacacatatttaatagattatttagattttggagttatcaggaacgcctaagtatgattaatattttcaagaaatagagaaaaagatggagaattttcttaaagaactggaatctgaaaaatgcagtgattgaaaattaaaaattcaatatatggattcataacagatttggcaagtcaaaggagagggttagtgaactgaaagatcagtgcctagaaatatccagattaaagctcaaagaaggaaatgcctagaaaatgaagaagaatatttaaaaactggtgacatgtgcctaca

SEQ ID NO: 676232 - DNA, 1303 bp, Homo sapiens
gataaagttcaacacgccccttattctcatagaggaaaggaaatctttaaaatgtttgtggttttacggcaaaatctgtactcctaagaccttcagagaaactctcaggaggtgttggtttattggtgttcagtggttttagggccagttgtgctcttcttaatcgattctgtagaaggcatttggtcacagcttgagggtctcacacattgctttaggatgtagacttattaatgaatttcatgtttagctataagccttagtgataattttaggataacaaaaaaaattctgcttaacattttgttataattatttcctaaaaatccatttgtccttggcatgtgattagatttgtttatctatctaatcctctatctgtttgtctacccactgtccgagtatcaaaggccaattcttycagttcttcaacagacaaaaaagaggactttcgacagcaatcttgtcacaggttctgtgaaatgttgttccctcttattgcatatacacagctcatcactgaaagagatacctacgccaggcctagccaactgattcccgtaagaaggttaattcattctactggaggatcaggggaatcatacaacccttggaggggattcttcagagttccctgtaactagatgacatttcacttattacagctgatataatattttttattatcacttatgtttttagattttcaaagtttcttcctttgtaaattcttgcatcatattcctgttctcttaaaattctacaatttaacccctttaatgttacttctattatagctttttagcacctccttttatgctcgccaatatgtatacgattgtgaaagtaaagcttggcaattactgagttaatgtgatgtgtgtagaggagacagactacaccacctgatttgatttcaaaatgaatcttcatttagtcctcaaagagttattaaatgatgctgttagtcactagttattgaacagcggcttattttcttgaaatgtattcagaataagattcttttctcaaatatttcatttaattaggttctttgatagtatttgctttaaataaaatgttttcaaattactgaaagtgatttctctatatatgcatactagtgctggggtagtcagtagagttcaacttttctgcaagtaagaaagtgattttgaataaataacagtaacaagcacagaaaactagaatgcaaaaatactttatatgagctaaccccaagagttggaatctttacacagtttattagcaaaaaggctgactaatctcactattgtaggca

SEQ ID NO: 676233 - DNA, 1303 bp, Homo sapiens
gataaagttcaacacgccccttattctcatagaggaaaggaaatctttaaaatgtttgtggttttacggcaaaatctgtactcctaagaccttcagagaaactctcaggaggtgttggtttattggtgttcagtggttttagggccagttgtgctcttcttaatcgattctgtagaaggcatttggtcacagcttgagggtctcacacattgctttaggatgtagacttattaatgaatttcatgtttagctataagccttagtgataattttaggataacaaaaaaaattctgcttaacattttgttataattatttcctaaaaatccatttgtccttggcatgtgattagatttgtttatctatctaatcctctatctgtttgtctacccactgtccgagtatcaaaggccaattctttcagttcttcaacagacaaaaaagaggactttcgacagcaatcttgtcacaggttctgtgaaatgttgttccctcttattgcatatacacagctcatcactgaaagagatacctacgccaggcctagccaactgattcccgtaagaaggttaattcattctactggaggatcaggggaatcatacaacccttggaggggattcttcagagttccctgtaactagatgacatttcacttattacagctgatataatattttttattatcacttatgtttttagattttcaaagtttcttcctttgtaaattcttrcatcatattcctgttctcttaaaattctacaatttaacccctttaatgttacttctattatagctttttagcacctccttttatgctcgccaatatgtatacgattgtgaaagtaaagcttggcaattactgagttaatgtgatgtgtgtagaggagacagactacaccacctgatttgatttcaaaatgaatcttcatttagtcctcaaagagttattaaatgatgctgttagtcactagttattgaacagcggcttattttcttgaaatgtattcagaataagattcttttctcaaatatttcatttaattaggttctttgatagtatttgctttaaataaaatgttttcaaattactgaaagtgatttctctatatatgcatactagtgctggggtagtcagtagagttcaacttttctgcaagtaagaaagtgattttgaataaataacagtaacaagcacagaaaactagaatgcaaaaatactttatatgagctaaccccaagagttggaatctttacacagtttattagcaaaaaggctgactaatctcactattgtaggca

SEQ ID NO: 676234 - DNA, 1303 bp, Homo sapiens
gataaagttcaacacgccccttattctcatagaggaaaggaaatctttaaaatgtttgtggttttacggcaaaatctgtactcctaagaccttcagagaaactctcaggaggtgttggtttattggtgttcagtggttttagggccagttgtgctcttcttaatcgattctgtagaaggcatttggtcacagcttgagggtctcacacattgctttaggatgtagacttattaatgaatttcatgtttagctataagccttagtgataattttaggataacaaaaaaaattctgcttaacattttgttataattatttcctaaaaatccatttgtccttggcatgtgattagatttgtttatctatctaatcctctatctgtttgtctacccactgtccgagtatcaaaggccaattctttcagttcttcaacagacaaaaaagaggactttcgacagcaatcttgtcacaggttctgtgaaatgttgttccctcttattgcatatacacagctcatcactgaaagagatacctacgccaggcctagccaactgattcccgtaagaaggttaattcattctactggaggatcaggggaatcatacaacccttggaggggattcttcagagttccctgtaactagatgacatttcacttattacagctgatataatattttttattatcacttatgtttttagattttcaaagtttcttcctttgtaaattcttgcatcatattcctgttctcttaaaattctacaatttaacccctttaatgttacttctattatagctttttagcacctccttttatgctcrccaatatgtatacgattgtgaaagtaaagcttggcaattactgagttaatgtgatgtgtgtagaggagacagactacaccacctgatttgatttcaaaatgaatcttcatttagtcctcaaagagttattaaatgatgctgttagtcactagttattgaacagcggcttattttcttgaaatgtattcagaataagattcttttctcaaatatttcatttaattaggttctttgatagtatttgctttaaataaaatgttttcaaattactgaaagtgatttctctatatatgcatactagtgctggggtagtcagtagagttcaacttttctgcaagtaagaaagtgattttgaataaataacagtaacaagcacagaaaactagaatgcaaaaatactttatatgagctaaccccaagagttggaatctttacacagtttattagcaaaaaggctgactaatctcactattgtaggca

SEQ ID NO: 676235 - DNA, 1303 bp, Homo sapiens
gataaagttcaacacgccccttattctcatagaggaaaggaaatctttaaaatgtttgtggttttacggcaaaatctgtactcctaagaccttcagagaaactctcaggaggtgttggtttattggtgttcagtggttttagggccagttgtgctcttcttaatcgattctgtagaaggcatttggtcacagcttgagggtctcacacattgctttaggatgtagacttattaatgaatttcatgtttagctataagccttagtgataattttaggataacaaaaaaaattctgcttaacattttgttataattatttcctaaaaatccatttgtccttggcatgtgattagatttgtttatctatctaatcctctatctgtttgtctacccactgtccgagtatcaaaggccaattctttcagttcttcaacagacaaaaaagaggactttcgacagcaatcttgtcacaggttctgtgaaatgttgttccctcttattgcatatacacagctcatcactgaaagagatacctacgccaggcctagccaactgattcccgtaagaaggttaattcattctactggaggatcaggggaatcatacaacccttggaggggattcttcagagttccctgtaactagatgacatttcacttattacagctgatataatattttttattatcacttatgtttttagattttcaaagtttcttcctttgtaaattcttgcatcatattcctgttctcttaaaattctacaatttaacccctttaatgttacttctattatagctttttagcacctccttttatgctcgccaatatgtatacgattgtgaaagtraagcttggcaattactgagttaatgtgatgtgtgtagaggagacagactacaccacctgatttgatttcaaaatgaatcttcatttagtcctcaaagagttattaaatgatgctgttagtcactagttattgaacagcggcttattttcttgaaatgtattcagaataagattcttttctcaaatatttcatttaattaggttctttgatagtatttgctttaaataaaatgttttcaaattactgaaagtgatttctctatatatgcatactagtgctggggtagtcagtagagttcaacttttctgcaagtaagaaagtgattttgaataaataacagtaacaagcacagaaaactagaatgcaaaaatactttatatgagctaaccccaagagttggaatctttacacagtttattagcaaaaaggctgactaatctcactattgtaggca

SEQ ID NO: 676236 - DNA, 1303 bp, Homo sapiens
gataaagttcaacacgccccttattctcatagaggaaaggaaatctttaaaatgtttgtggttttacggcaaaatctgtactcctaagaccttcagagaaactctcaggaggtgttggtttattggtgttcagtggttttagggccagttgtgctcttcttaatcgattctgtagaaggcatttggtcacagcttgagggtctcacacattgctttaggatgtagacttattaatgaatttcatgtttagctataagccttagtgataattttaggataacaaaaaaaattctgcttaacattttgttataattatttcctaaaaatccatttgtccttggcatgtgattagatttgtttatctatctaatcctctatctgtttgtctacccactgtccgagtatcaaaggccaattctttcagttcttcaacagacaaaaaagaggactttcgacagcaatcttgtcacaggttctgtgaaatgttgttccctcttattgcatatacacagctcatcactgaaagagatacctacgccaggcctagccaactgattcccgtaagaaggttaattcattctactggaggatcaggggaatcatacaacccttggaggggattcttcagagttccctgtaactagatgacatttcacttattacagctgatataatattttttattatcacttatgtttttagattttcaaagtttcttcctttgtaaattcttgcatcatattcctgttctcttaaaattctacaatttaacccctttaatgttacttctattatagctttttagcacctccttttatgctcgccaatatgtatacgattgtgaaagtaaarcttggcaattactgagttaatgtgatgtgtgtagaggagacagactacaccacctgatttgatttcaaaatgaatcttcatttagtcctcaaagagttattaaatgatgctgttagtcactagttattgaacagcggcttattttcttgaaatgtattcagaataagattcttttctcaaatatttcatttaattaggttctttgatagtatttgctttaaataaaatgttttcaaattactgaaagtgatttctctatatatgcatactagtgctggggtagtcagtagagttcaacttttctgcaagtaagaaagtgattttgaataaataacagtaacaagcacagaaaactagaatgcaaaaatactttatatgagctaaccccaagagttggaatctttacacagtttattagcaaaaaggctgactaatctcactattgtaggca

SEQ ID NO: 676237 - DNA, 647 bp, Homo sapiens
tgaagatattcttttaaaaaaatcaaactgaaaggaattcctttataggatgtaaaactctgtgaaataaatagcawtctatacctttcttatttaaaggtttataattaatgtgtttggacaacaatgcacaacattaatatatgctctcaggcttgagctgtctgcatttctgatgatgggacttattggcctgtgtggttttagagtcattccaaggcgaacaatggatcagggatactcatattatcctttgtcatagtctatttgacaatcaccacctagaaccaggggccccctgggttctgttttcagtacaccatggcatgccattatgtaatatcccatcttctaaagaagacacatccttggatgagcctcatgagttgccaaaatattactgtataaaattatatatattatctcccaacacttactataactttctttttcatctttcgttatgaattttgcaaaaatttatatatctttttcccttttttatagtaattctttcccctctcttctctgtgtctcatctaaataagtaagtctaatgtttttctaaaaatagaaaggcaaaaatacaccaaattgtaaatgttgtaatacagtgcttatgttttacatttcttctctcagttata

SEQ ID NO: 676238 - DNA, 1397 bp, Homo sapiens
ttcttttcctatttctggtcactactctgaaaataattctacttcatagcatttttatagaacttgggagaagcagctaccataacacataaatcagtacatttcggtattaattccataacaattttgataagactaatagtgtttgagacagagaataatgaaagaaaatgcagttaatttgaagttttcctttcaatatgtaatttcactttaagagtttaatatatcctgttacaactgtctcctactgataaaaataaaaaaaacccacacctgcacaaaggagaaagcagaaaagaaataaaacaggaaagaaggaaggaaggaaagaaggaaggaaggaagaaagaaagagaagggagggaggaagagagggacggagggagggatgcaaggaaggaaggaaggaagggaaaggaaaagatggaaggaagacgactgattgaaaaatctatctctcaattctgaaaaaaaaaaaagtgaaactaatggttaaacactaaccacaatatgagaggaattcttcatgctttaaaatagtacaacccagcctcctawattcttggggatgcaggacctgtactatggagaaaaccaggccactgtcttataccccaaacctccaggacctatgccagccttcggaggtaatccttcttgagaaagtaagagtcgttttcctttcacccatcatcagtaagtcaacaattcaaagacatcaagaataatggagggggaattgatggcatcacatttccttctggaggtgtatttccagcataaaatgttctgcagaacagtagaaataggctgagccataggcatttagagatttttctggtcaaagaattatagacggccttaatttcactaggacataaatacttctctccctagttaaagaactattgaagggcagaagaaaatataccttcatcccacagaaccatactagataaatttctggccattgctggaaattgaactggaagcgctgcatctcaaccctgccatgaagtggtatattctttcagtcccagaggacaagagtgcaaagattaattcacacattcctttcttcagttagaaaattttttcttgtttgtttattgtatatattaagggtgcaccttgatgatttgatatgtgttaatgttgtgaaataattaccacaacctagctgattaacagatccataaactctcatagttacctctcagtgtgtgctgacaacacttaggatctatcctcttagcacatttcaagtatacaccagagagttgttacctatggtcacaatgctacacattagatcttcagaacttactcatccagcataactgaaactttgtaccccttcaccaacatctctccatttccccctcaccgcagtc

SEQ ID NO: 676239 - DNA, 474 bp, Homo sapiens
tttattcacccacctgtccatagacatttggcttgcttctatctccctgtaaccttaagttctttaagtacttcctgccacacaagttggagatgccttttggatgtgttttaattatgtttaagttattaatagaaaattggaaaccatcttactaactcaagatgtgaaattggatccrtcaaactttagagaaaaaaccactttttaatctccatttgaagtggatttgaatagaagcagttgtgtacttgactggaagtcgtggtcccagaagctaaccagtgattcctggcaggagaagtaaatgccttttagttcaggaagggaaaagggttgtcttaccaggaagcagttcaacattggggccctttgtgcttcccaggtcctggcaaggccttgggcatttggagagagaggtggaaaagtcagtaggttggttggaaatccagtctcagactcatgcaggaacgt

SEQ ID NO: 676240 - DNA, 664 bp, Homo sapiens
caatggataacttggcctacaacaaaatacaaacataattccccagggttagactaggtttggcgctaaagcctattggaggccatggagatggaaatggtgtgcaatttgggggctctgacataatttggtcattagtcattagactcagatttcagtttcactatgaggagtgacaaatattagcttaaaaaatgtttatttcagttcttcgccaggctgtgtcacttaatgaaacaccccacgttatgtcctttcattgggggctatttttgtgtatgaggtaggagaaggatcattataattgcacttttgattttttaagtcattttttacatgtattttctcatttgaccttcacaacctccccactgaggtagttttttctgtagtcccattgatttgactgggatcatgtaggagtaaatgtcagagccaggagtgaatggatttcaaggcttattccactctgatgaaaagctctgagagttctccaatgctctttcctcaggagtatctttccactactaaagcaattagcaagttgcacaatatatctgctttcataaagattataattataattattatataatcatattatataatayatataatataaaaatatataatatatatgtatatgggcgttgcctattataac

SEQ ID NO: 676241 - DNA, 1920 bp, Homo sapiens
ttttaacaatttccattttaatttctaatactgtaaatattgattgacacaacccatataaacaaaattctttggattttcaataatttgtacgagtgtaaaggggaccttgagccaagaagtttgacaaccagtgacttagcttgctaatttttctacgttaaactcatgtaggagaaagagggaaagagaaagaaatggtcaagrttgcaagaataagactaagactaatactggtttctcaaatgtccaggaattacccatattgtaagccttaatttgaatctccactgatttgattttcaatttgtactaaattaaagttaatttttcctattagtataaccagactgaatcagtaagtaataattttccatagatcatatcatgacatcccaagagaataaagtaggaaagagaattaacatttcctactatgcgtcaggcaccttataaatggcaggtggtcatgagcaaaggttctaattctaatttgttcacatctggctctgacactcacttgctgtgtgagcttgggcaagttatttaacctctctgtctccatttcctcagctgtaaaatgtactgtctcatcaggttgttttgaagaataaaagtcattcctcataaaatcttttcaacaatgtttggtatacaagaagcactaaataacatggtatctttccctggctctataatcatcacaacaactctaaaaaggaggtgttattatcccctttcattgataacaaaactgaggatccagaggtcttgttatctactcaagcttgtgtacactgcaagtgatgagatgttattgaaatctacatgatgcaaaaactctttcttgcaccagaccagtggttctcaaacttaagctcacatcagaattaccttaccctcagagttactgggacagtatttttaggacaggaaaagggatttgtattttgaataatctccctggagttgctaatgctgctgacccaagcaccatgctttgagaaccccagccccagagactacacttggtcaccaataacatttgcacccatagtaccatctgtaaatagcctcactttggtctaccatgccctcactttgctatatcatggttctttcgatagcagtacttttctggacctttcccatatttccactgtaatgtagggacaataaaaagttatgattacttctataaattttgaactaaaagaaggatcttaccaaagaggcttgtcagacacctacttaaactcataccttccagaagggatgaaaaaagaaaatgcagctaactggtactaagaaagaagtctctcctggcacaaagctcaaattttctctattatttgccttactcgatttctacttacttacctcaaaatgaaacctgagaatagccaataaaatatctcatccatagtctttactttcattactctttcataagtaacctaggaatagatattaagcccagcaaagaaagaacaagttggctttctcttgagaactcattattggagcaagcaagtgctatttctaaattttgtcaaattcttagatcaccatggcaaaaacgtgaaagagagttaaaatttaatccttaaaaatgaatcaaattgaagaatagtcacttttgtctactgagttctactcagtaatagaaaatcagtaagcgattggaaattggcaagataacaactggagataagccagtggtcaagatgtatatgttgtagtaatgtggaagcacacttctagtgttctctgtcctattttagactatttatgtatgagtggaaaaaacaaactgtttctcctactacactctttcaacacagaatgcttctgtgactacatgtgtggggattttttccccaaacaccaagcaaacaattgtgcagtgcacaccagcta

SEQ ID NO: 676242 - DNA, 1920 bp, Homo sapiens
ttttaacaatttccattttaatttctaatactgtaaatattgattgacacaacccatataaacaaaattctttggattttcaataatttgtacgagtgtaaaggggaccttgagccaagaagtttgacaaccagtgacttagcttgctaatttttctacgttaaactcatgtaggagaaagagggaaagagaaagaaatggtcaagattgcaagaataagactaagactaatactggtttctcaaatgtccaggaattacccatattgtaagccttaatttgaatctccaytgatttgattttcaatttgtactaaattaaagttaatttttcctattagtataaccagactgaatcagtaagtaataattttccatagatcatatcatgacatcccaagagaataaagtaggaaagagaattaacatttcctactatgcgtcaggcaccttataaatggcaggtggtcatgagcaaaggttctaattctaatttgttcacatctggctctgacactcacttgctgtgtgagcttgggcaagttatttaacctctctgtctccatttcctcagctgtaaaatgtactgtctcatcaggttgttttgaagaataaaagtcattcctcataaaatcttttcaacaatgtttggtatacaagaagcactaaataacatggtatctttccctggctctataatcatcacaacaactctaaaaaggaggtgttattatcccctttcattgataacaaaactgaggatccagaggtcttgttatctactcaagcttgtgtacactgcaagtgatgagatgttattgaaatctacatgatgcaaaaactctttcttgcaccagaccagtggttctcaaacttaagctcacatcagaattaccttaccctcagagttactgggacagtatttttaggacaggaaaagggatttgtattttgaataatctccctggagttgctaatgctgctgacccaagcaccatgctttgagaaccccagccccagagactacacttggtcaccaataacatttgcacccatagtaccatctgtaaatagcctcactttggtctaccatgccctcactttgctatatcatggttctttcgatagcagtacttttctggacctttcccatatttccactgtaatgtagggacaataaaaagttatgattacttctataaattttgaactaaaagaaggatcttaccaaagaggcttgtcagacacctacttaaactcataccttccagaagggatgaaaaaagaaaatgcagctaactggtactaagaaagaagtctctcctggcacaaagctcaaattttctctattatttgccttactcgatttctacttacttacctcaaaatgaaacctgagaatagccaataaaatatctcatccatagtctttactttcattactctttcataagtaacctaggaatagatattaagcccagcaaagaaagaacaagttggctttctcttgagaactcattattggagcaagcaagtgctatttctaaattttgtcaaattcttagatcaccatggcaaaaacgtgaaagagagttaaaatttaatccttaaaaatgaatcaaattgaagaatagtcacttttgtctactgagttctactcagtaatagaaaatcagtaagcgattggaaattggcaagataacaactggagataagccagtggtcaagatgtatatgttgtagtaatgtggaagcacacttctagtgttctctgtcctattttagactatttatgtatgagtggaaaaaacaaactgtttctcctactacactctttcaacacagaatgcttctgtgactacatgtgtggggattttttccccaaacaccaagcaaacaattgtgcagtgcacaccagcta

SEQ ID NO: 676243 - DNA, 1920 bp, Homo sapiens
ttttaacaatttccattttaatttctaatactgtaaatattgattgacacaacccatataaacaaaattctttggattttcaataatttgtacgagtgtaaaggggaccttgagccaagaagtttgacaaccagtgacttagcttgctaatttttctacgttaaactcatgtaggagaaagagggaaagagaaagaaatggtcaagattgcaagaataagactaagactaatactggtttctcaaatgtccaggaattacccatattgtaagccttaatttgaatctccactgatttgattttcaatttgtactaaattaaagttaatttttcctattagtataaccagactgaatcagtaagtaataattttccatagatcatatcatgacatcccaagagaataaagtaggaaagagaattaacatttcctactatgygtcaggcaccttataaatggcaggtggtcatgagcaaaggttctaattctaatttgttcacatctggctctgacactcacttgctgtgtgagcttgggcaagttatttaacctctctgtctccatttcctcagctgtaaaatgtactgtctcatcaggttgttttgaagaataaaagtcattcctcataaaatcttttcaacaatgtttggtatacaagaagcactaaataacatggtatctttccctggctctataatcatcacaacaactctaaaaaggaggtgttattatcccctttcattgataacaaaactgaggatccagaggtcttgttatctactcaagcttgtgtacactgcaagtgatgagatgttattgaaatctacatgatgcaaaaactctttcttgcaccagaccagtggttctcaaacttaagctcacatcagaattaccttaccctcagagttactgggacagtatttttaggacaggaaaagggatttgtattttgaataatctccctggagttgctaatgctgctgacccaagcaccatgctttgagaaccccagccccagagactacacttggtcaccaataacatttgcacccatagtaccatctgtaaatagcctcactttggtctaccatgccctcactttgctatatcatggttctttcgatagcagtacttttctggacctttcccatatttccactgtaatgtagggacaataaaaagttatgattacttctataaattttgaactaaaagaaggatcttaccaaagaggcttgtcagacacctacttaaactcataccttccagaagggatgaaaaaagaaaatgcagctaactggtactaagaaagaagtctctcctggcacaaagctcaaattttctctattatttgccttactcgatttctacttacttacctcaaaatgaaacctgagaatagccaataaaatatctcatccatagtctttactttcattactctttcataagtaacctaggaatagatattaagcccagcaaagaaagaacaagttggctttctcttgagaactcattattggagcaagcaagtgctatttctaaattttgtcaaattcttagatcaccatggcaaaaacgtgaaagagagttaaaatttaatccttaaaaatgaatcaaattgaagaatagtcacttttgtctactgagttctactcagtaatagaaaatcagtaagcgattggaaattggcaagataacaactggagataagccagtggtcaagatgtatatgttgtagtaatgtggaagcacacttctagtgttctctgtcctattttagactatttatgtatgagtggaaaaaacaaactgtttctcctactacactctttcaacacagaatgcttctgtgactacatgtgtggggattttttccccaaacaccaagcaaacaattgtgcagtgcacaccagcta

SEQ ID NO: 676244 - DNA, 666 bp, Homo sapiens
tttgacctccagctcaccccaacacagcttacagaaacattataagagggagaagaagcatagtrcattgcagttaatggcatgcactttggaaccactgtctagtttgtgatttggggcaagtaatatagccctgtatatgcttcactttccccacctcatagagttatcaggataattaaattaaattaatgataacttttttgtaaagcacttagaacaatttcaggcacataacaggtattacacagaaagttttaaaatcaacaaataagtctctctaggcttagcacagacattgccacctccaagaatctttgcataattttgctctcacaaaaccaggttacatgccccttccccttaaattcctcctccgtgtgctctggcttctcgttatattcatcacactataacgtagttgtcaattgttcttaggatttccccattggagtgatagacagggaagatgttctacagctgataaatggaagtttccttatggcaggaattttatcttttttccatctatcagatccccagtgcctaggatagtatcaagtacagacacatgtaactaaaaattttgttgaatgaattgtctaaatttttcatctgctaagattcttactccttttatacgctcacctattatagtacttcaca

SEQ ID NO: 676245 - DNA, 1380 bp, Homo sapiens
tcatgcataattgatgtgaactgtttttaatgtcatttatttgtttattcctgtgctgagtattcatactttaatacttgaaaacatttatgtctcaagtattcatctttggaaaatttattctgctttcaaatctatccctttctctttttttgagacagggtcactctgtcgctcaggctagagtgcagtggcttgatgatggctcactgcagccttgacctcctaagcttgagcgatcctcccacctcagcctccctagtacctgggactacaggtgcaccccacgatgcctggctatttttttaaatttattttttaaagagatggcttttcaccttgctgcccagactgtttgtcttggcatcccaatgtgctgagaatacaggcgttaagtcaccctgcccagctttcaagtctattctgctttcaaagttaaaaattccctaatccccctgtgaaaacgaaaatgtggtgtactggaaaaacctcaaagatctggggtcaaatcttgaccatcacttactcaccatgtgacctcgggcaaactgtttaccttccctgaattttattttattttattttattttattttattttgagagagtctcagtctgttggctgggctgcagcgcagtggcatggccacagctgatggcagccttgacctcctgggctcaagtgatcctcccgcctcagccttccaagcagctggggctacaagcatgtgccaccatgcaccactgatttttgtatttgttgtagagacgatttttcccatgttgcccaggctggttttgaaatcctgggctcaagtgatctccccacctcagcctcccaaagtgctgggattacaggaatgggccaccatgcctggtcacttaacctcatttttaaaataagtatgataatcccttccttgttcatagaactaartgaaataatatttgtaggcagcacagcaaagaagaggcactcaacagacagtagctactattgaatgggttaattatgatctgaaaacttcctttcatgttctaaattccagaaaatttgtaaaaatgggctattagtatgtttttcaaattatatagatagaaaaaagggttccattgttaagtaagtctgtgaaatgccacatgccatatcccttttcccttggtaaataaaagttcatttaaacataattaattgtgttgaaaaatcccaaagtaaaaataaaatgtttagctttacggaaccaagggtcttttaaacttatttgatcatggaaacatttcttcccagaagatatattaacatcctaagaactttcttgtattccacttagagaaatagcaagtgtgtgaccggacgcggtggcacacgcctgtaatccca

SEQ ID NO: 676246 - DNA, 1380 bp, Homo sapiens
tcatgcataattgatgtgaactgtttttaatgtcatttatttgtttattcctgtgctgagtattcatactttaatacttgaaaacatttatgtctcaagtattcatctttggaaaatttattctgctttcaaatctatccctttctctttttttgagacagggtcactctgtcgctcaggctagagtgcagtggcttgatgatggctcactgcagccttgacctcctaagcttgagcgatcctcccacctcagcctccctagtacctgggactacaggtgcaccccacgatgcctggctatttttttaaatttattttttaaagagatggcttttcaccttgctgcccagactgtttgtcttggcatcccaatgtgctgagaatacaggcgttaagtcaccctgcccagctttcaagtctattctgctttcaaagttaaaaattccctaatccccctgtgaaaacgaaaatgtggtgtactggaaaaacctcaaagatctggggtcaaatcttgaccatcacttactcaccatgtgacctcgggcaaactgtttaccttccctgaattttattttattttattttattttattttattttgagagagtctcagtctgttggctgggctgcagcgcagtggcatggccacagctgatggcagccttgacctcctgggctcaagtgatcctcccgcctcagccttccaagcagctggggctacaagcatgtgccaccatgcaccactgatttttgtatttgttgtagagacgatttttcccatgttgcccaggctggttttgaaatcctgggctcaagtgatctccccacctcagcctcccaaagtgctgggattacaggaatgggccaccatgcctggtcacttaacctcatttttaaaataagtatgataatcccttccttgttcatagaactaagtgaaataatatttgtaggcagcacagcaaagaagaggcactcaacagacagtagctactattgaatgggttaattatgatctgaaaacttcctttcatgttctaaattccagaaaatttgtaaaaatgggctattagtatgtttttcaaattatatagatagaaaaaagggttccattgttaagtaagtctgtgaaatgccacatgccatatcccttttcccttggtaaataaaagytcatttaaacataattaattgtgttgaaaaatcccaaagtaaaaataaaatgtttagctttacggaaccaagggtcttttaaacttatttgatcatggaaacatttcttcccagaagatatattaacatcctaagaactttcttgtattccacttagagaaatagcaagtgtgtgaccggacgcggtggcacacgcctgtaatccca

SEQ ID NO: 676247 - DNA, 2009 bp, Homo sapiens
accttgaatcaaaaaggcatgttttcttatctgtaacctacaactaaaataagagcttctggagcacaggatctatattctgtttatcttttatcaccaatgcgtagcatagtacctagaaggtagtatgtggtaaacagatatttgttgaatcaataaatatattaatggttatgacagcaaatgagatgtgagagggttagtttagagtcaaattattgaaaactttggaggacatgttaagatgtttgactttttttttctgcaggcaatggggagccattgaagatttttgagaaaggagagacattatctgacatttttattttgggaagatgagtctgctaatttgtggagattggagagagaattatgaaggcaagaagataattaggatattataaagataattagaaaattaaaatatcagtcaacttttgctgcctaaaatactgccttcaaactcagctgcatacactgcaggttggctacttcagccgatgggtctgtaggtcaattgcataggctctgctttagactgcaggtgcgtgggttggctgatctagactgatctgggcggttttattatcgaattgaaggttcagttctatctttttgatttgtcccttattcttctgggatatttaggggaaactggacattcaggggaagctcttcacctagcattgtcaccagtacaagaggacaagcccaactacacaagtatatatcaagcccctgcttgtgtcttatcattgaccaaagcaggtacaaaaggaagcccaacatcaacgaggcaggaaaaaaaagactcttcccatggaagttaaagggaaaggagtgactgtttgatgaacaataatcaccacagatgctattgatatagtacagatcagtagttgtcaactggggagtacaaaggcatgctccaccttgaaaggtgaaacaaaattttagggaaggggtaaccacgtatgtgtcttttaaatcgtaccttcacccctgcctttcagaatcgtttctagtatgatttttactaattagagtatcaaatccatgaaatctggtgggatggaataaaagtttggaaaatattactgcagaggataactgaaacaggcctagaagatgagaggagaaacacataaaaaggcaaataattggattcagcggatagggaacaagaaaagtcagtgacgacctgaagtgttagagaccaagtgatcagtaacatagagatggtttgaatgaagatagtgagggagaaaggcgtttattaattgaagaatcaggatgcattgattatgtacaagccccttattcacagacgtggataagatgtggtacctgtccacacgtcttacagtccagtgaacacaagacttgtgcaagtaagacatatacacaggtaaatattagatgttcttgaaagaggtgaatgccatagggagaagaagaaattgcgagagcttaattccacctgtagaaatcagtagtggggaagatgacaataaatcttagtgctaatgtataggtgaatttggaaaagtagcagagaaggtcagggagatagcctaagcaaaggtacagagaaacaagtgtctgggatgcatgcaaggcagtatatatgaagggatggtgagaaatggtgctaggcatgttggcattcttcaggcctcttgtgatggcaagagaaaaaaagtccaaactggattaggttagacaaaaagggaattttctaggaagtgctaaagaatctcaggaacccatgtgaaggacagtgtattagtcagagttcagtagaggaacagaacatatacatatatattcattaagtattagctcacacgatcacaagatcccacaataggccgtccrctagctgaggagcaaggagagtcagaccgagtccctaaactgaagaacttggagtctgatgtttgagggcaggaagcatccagcacaggagcaagatgtaggctgggaagctaggccagtgtagtcttttc

SEQ ID NO: 676248 - DNA, 1036 bp, Homo sapiens
tctagaggcccctgttgggaggtctcacccagtcaggaggaatgggatcagggacccacttaaataagcagtctggttgtcccttggcagggtgggtgtgctgtgcggggtgaatctccctcttttgggctgtctttactctccatagctggcaggcagagtaatataaaattttaagacaattattattgttcctgtaaaggctactgggagttcaactttgtggtcaggcatttttattttggagtctggcagatctgtgtaacttcagactagattttaaccagtggggaagccagggagaagagaacaatttctagggacttcagtccccccacatatgatgtctcaatagccctatggtccacaatccaacccatacttaagaattaatgaaaactaattgcttgatatgtgaatggaacctcaaggcaggttttctaatccagagaaaattttattaaaaatgtaaaggatggccagtgacgtttacatatgtaactaacctgcacattgtgcacatgtaccctaaaacttaaagtataataataataataaaagaggaaaaaaaacaacaaaaacatatgtaactaacctgcacattgtgcacatgtaccctaaarcttaaagtataataataataataataaaaagaaagaggaaaaaaaaaaacaaaaaacaaaacaaaacaaaacaaaaatgtaaaggaatatacatgcgtacactcacacaggcaacccaaaattaaaacacaaacaaacaaacaaacaaaaatcactgagtaaaaacagtagattttcagacaaatttagcttcaaaataagaaagtcctttagccagcttctacccacacagcttactcacttttgtgtttcttctctactcctctaccccaaacacatttttgcacaggggagtaaaggtctaaacccttctgtatacagatgtggtctccttaactagctatatgtaacttctctatgcctcaattttccaatctgtgaagtggaaaaaataagaaacatttaatgagatc

SEQ ID NO: 676249 - DNA, 627 bp, Homo sapiens
ccactggtcctatacctgcaggtgttcttccagtatttttcctgcaaatattttacataattcataacaaactgtatatcattaaaactttctggccgggcatggtggctcatgcctgtaatcccagcactttgggaggccaaggcaggcggatcacctgaggtcaggagtttgagaccaggcagaccattatggtgaaaccctgtctctactaaaaatacaaaaattagccggrcgtggtggcgggtgcctgtaatctcagctactcaggaggctgaggcaggagaatcgcctgaatccaggaggcggaggttgcagtgagccgagattgcgccactgcactccagcctgggcgacagcgtgagactccgtctcaaaaaaaaacaacaaactttcacaaatattatttttaatgaccagacattcatggaggggacgtggttcaccgaactgctgtttccctaatgtccatttacatggttttatttatttttattttttaattatactttaagttttagggtacatgtgcacaacgcgcaggttagttacatacatttacatggttttaaacctttttgtggttcttagtgataaggtgggcgtctggcttgtattaccatctcc

SEQ ID NO: 676250 - DNA, 627 bp, Homo sapiens
ccactggtcctatacctgcaggtgttcttccagtatttttcctgcaaatattttacataattcataacaaactgtatatcattaaaactttctggccgggcatggtggctcatgcctgtaatcccagcactttgggaggccaaggcaggcggatcacctgaggtcaggagtttgagaccaggcagaccattatggtgaaaccctgtctctactaaaaatacaaaaattagccggacgtggtggygggtgcctgtaatctcagctactcaggaggctgaggcaggagaatcgcctgaatccaggaggcggaggttgcagtgagccgagattgcgccactgcactccagcctgggcgacagcgtgagactccgtctcaaaaaaaaacaacaaactttcacaaatattatttttaatgaccagacattcatggaggggacgtggttcaccgaactgctgtttccctaatgtccatttacatggttttatttatttttattttttaattatactttaagttttagggtacatgtgcacaacgcgcaggttagttacatacatttacatggttttaaacctttttgtggttcttagtgataaggtgggcgtctggcttgtattaccatctcc

SEQ ID NO: 676251 - DNA, 627 bp, Homo sapiens
ccactggtcctatacctgcaggtgttcttccagtatttttcctgcaaatattttacataattcataacaaactgtatatcattaaaactttctggccgggcatggtggctcatgcctgtaatcccagcactttgggaggccaaggcaggcggatcacctgaggtcaggagtttgagaccaggcagaccattatggtgaaaccctgtctctactaaaaatacaaaaattagccggacgtggtggcgggtgcctgtaatctcagctactcaggaggctgaggcaggagaatcgcctgaatccaggaggcggaggttgcagtgagccgagattgcgccactgcactccagcctgggcgacagcgtgagactccgtctcaaaaaaaaamaacaaactttcacaaatattatttttaatgaccagacattcatggaggggacgtggttcaccgaactgctgtttccctaatgtccatttacatggttttatttatttttattttttaattatactttaagttttagggtacatgtgcacaacgcgcaggttagttacatacatttacatggttttaaacctttttgtggttcttagtgataaggtgggcgtctggcttgtattaccatctcc

SEQ ID NO: 676252 - DNA, 627 bp, Homo sapiens
ccactggtcctatacctgcaggtgttcttccagtatttttcctgcaaatattttacataattcataacaaactgtatatcattaaaactttctggccgggcatggtggctcatgcctgtaatcccagcactttgggaggccaaggcaggcggatcacctgaggtcaggagtttgagaccaggcagaccattatggtgaaaccctgtctctactaaaaatacaaaaattagccggacgtggtggcgggtgcctgtaatctcagctactcaggaggctgaggcaggagaatcgcctgaatccaggaggcggaggttgcagtgagccgagattgcgccactgcactccagcctgggcgacagcgtgagactccgtctcaaaaaaaaacaacaaactttcacaaatattatttttaatgaccagacattcatggaggggacgtggttcacygaactgctgtttccctaatgtccatttacatggttttatttatttttattttttaattatactttaagttttagggtacatgtgcacaacgcgcaggttagttacatacatttacatggttttaaacctttttgtggttcttagtgataaggtgggcgtctggcttgtattaccatctcc

SEQ ID NO: 676253 - DNA, 627 bp, Homo sapiens
ccactggtcctatacctgcaggtgttcttccagtatttttcctgcaaatattttacataattcataacaaactgtatatcattaaaactttctggccgggcatggtggctcatgcctgtaatcccagcactttgggaggccaaggcaggcggatcacctgaggtcaggagtttgagaccaggcagaccattatggtgaaaccctgtctctactaaaaatacaaaaattagccggacgtggtggcgggtgcctgtaatctcagctactcaggaggctgaggcaggagaatcgcctgaatccaggaggcggaggttgcagtgagccgagattgcgccactgcactccagcctgggcgacagcgtgagactccgtctcaaaaaaaaacaacaaactttcacaaatattatttttaatgaccagacattcatggaggggacgtggttcaccgaactgctgtttccctaatgtccatttacatggttttatttatttttattttttaattatactttaagttttagggtacatgtgcacaacgygcaggttagttacatacatttacatggttttaaacctttttgtggttcttagtgataaggtgggcgtctggcttgtattaccatctcc

SEQ ID NO: 676254 - DNA, 675 bp, Homo sapiens
ggggtttcaccatttttgccaggatggtttcaatctcgacctcgtgatctctctgcctcggcctcccaaagtgctgggattacaggcgtgagatgcattgaatcagtgtccagcattttcctccccaagttagctcccgttccgggaggcagaggggtgggaatccttgggcaggttggttgtagaaacatccttccattcagttcctttacccctgcccaatgtctcccagcccatggtgtgtgctctgtgtgtcatctctttgcacacctgtccccttcagtggacygggagccccttgagggcagggtcatacccgattaacttgttatagagtatggggcatcaacttgggcagcaatggggaacggtgtctctggaaggtggaacagcctgggtgaaggcatggaaggagagaggcagcagtaagtggaaaccaccgtttattgagtaccactgtgtgctggcctctgtgctgggtgctttacacacataaactcatttagtcctcatagcagccctgggaggatgctaagatatgatttccattttatttatgtattttgtttgagacagggtcttattctgtcatccaggatggagtgcagtagtgggatcatagctcactgcagccgtgaactccttggctcaagtaattctcctggctcagcctcc

SEQ ID NO: 676255 - DNA, 675 bp, Homo sapiens
ggggtttcaccatttttgccaggatggtttcaatctcgacctcgtgatctctctgcctcggcctcccaaagtgctgggattacaggcgtgagatgcattgaatcagtgtccagcattttcctccccaagttagctcccgttccgggaggcagaggggtgggaatccttgggcaggttggttgtagaaacatccttccattcagttcctttacccctgcccaatgtctcccagcccatggtgtgtgctctgtgtgtcatctctttgcacacctgtccccttcagtggactkggagccccttgagggcagggtcatacccgattaacttgttatagagtatggggcatcaacttgggcagcaatggggaacggtgtctctggaaggtggaacagcctgggtgaaggcatggaaggagagaggcagcagtaagtggaaaccaccgtttattgagtaccactgtgtgctggcctctgtgctgggtgctttacacacataaactcatttagtcctcatagcagccctgggaggatgctaagatatgatttccattttatttatgtattttgtttgagacagggtcttattctgtcatccaggatggagtgcagtagtgggatcatagctcactgcagccgtgaactccttggctcaagtaattctcctggctcagcctcc

SEQ ID NO: 676256 - DNA, 675 bp, Homo sapiens
ggggtttcaccatttttgccaggatggtttcaatctcgacctcgtgatctctctgcctcggcctcccaaagtgctgggattacaggcgtgagatgcattgaatcagtgtccagcattttcctccccaagttagctcccgttccgggaggcagaggggtgggaatccttgggcaggttggttgtagaaacatccttccattcagttcctttacccctgcccaatgtctcccagcccatggtgtgtgctctgtgtgtcatctctttgcacacctgtccccttcagtggactgggarccccttgagggcagggtcatacccgattaacttgttatagagtatggggcatcaacttgggcagcaatggggaacggtgtctctggaaggtggaacagcctgggtgaaggcatggaaggagagaggcagcagtaagtggaaaccaccgtttattgagtaccactgtgtgctggcctctgtgctgggtgctttacacacataaactcatttagtcctcatagcagccctgggaggatgctaagatatgatttccattttatttatgtattttgtttgagacagggtcttattctgtcatccaggatggagtgcagtagtgggatcatagctcactgcagccgtgaactccttggctcaagtaattctcctggctcagcctcc

SEQ ID NO: 676257 - DNA, 675 bp, Homo sapiens
ggggtttcaccatttttgccaggatggtttcaatctcgacctcgtgatctctctgcctcggcctcccaaagtgctgggattacaggcgtgagatgcattgaatcagtgtccagcattttcctccccaagttagctcccgttccgggaggcagaggggtgggaatccttgggcaggttggttgtagaaacatccttccattcagttcctttacccctgcccaatgtctcccagcccatggtgtgtgctctgtgtgtcatctctttgcacacctgtccccttcagtggactgggagccccttgagggcagggtcatacccgattaacttgttatagagtatggggcatcaacttgggcagcaatggggaacggtgtcyctggaaggtggaacagcctgggtgaaggcatggaaggagagaggcagcagtaagtggaaaccaccgtttattgagtaccactgtgtgctggcctctgtgctgggtgctttacacacataaactcatttagtcctcatagcagccctgggaggatgctaagatatgatttccattttatttatgtattttgtttgagacagggtcttattctgtcatccaggatggagtgcagtagtgggatcatagctcactgcagccgtgaactccttggctcaagtaattctcctggctcagcctcc

SEQ ID NO: 676258 - DNA, 675 bp, Homo sapiens
ggggtttcaccatttttgccaggatggtttcaatctcgacctcgtgatctctctgcctcggcctcccaaagtgctgggattacaggcgtgagatgcattgaatcagtgtccagcattttcctccccaagttagctcccgttccgggaggcagaggggtgggaatccttgggcaggttggttgtagaaacatccttccattcagttcctttacccctgcccaatgtctcccagcccatggtgtgtgctctgtgtgtcatctctttgcacacctgtccccttcagtggactgggagccccttgagggcagggtcatacccgattaacttgttatagagtatggggcatcaacttgggcagcaatggggaacggtgtctctggaaggtggaacagcctgggygaaggcatggaaggagagaggcagcagtaagtggaaaccaccgtttattgagtaccactgtgtgctggcctctgtgctgggtgctttacacacataaactcatttagtcctcatagcagccctgggaggatgctaagatatgatttccattttatttatgtattttgtttgagacagggtcttattctgtcatccaggatggagtgcagtagtgggatcatagctcactgcagccgtgaactccttggctcaagtaattctcctggctcagcctcc

SEQ ID NO: 676259 - DNA, 675 bp, Homo sapiens
ggggtttcaccatttttgccaggatggtttcaatctcgacctcgtgatctctctgcctcggcctcccaaagtgctgggattacaggcgtgagatgcattgaatcagtgtccagcattttcctccccaagttagctcccgttccgggaggcagaggggtgggaatccttgggcaggttggttgtagaaacatccttccattcagttcctttacccctgcccaatgtctcccagcccatggtgtgtgctctgtgtgtcatctctttgcacacctgtccccttcagtggactgggagccccttgagggcagggtcatacccgattaacttgttatagagtatggggcatcaacttgggcagcaatggggaacggtgtctctggaaggtggaacagcctgggtgaaggcatggarggagagaggcagcagtaagtggaaaccaccgtttattgagtaccactgtgtgctggcctctgtgctgggtgctttacacacataaactcatttagtcctcatagcagccctgggaggatgctaagatatgatttccattttatttatgtattttgtttgagacagggtcttattctgtcatccaggatggagtgcagtagtgggatcatagctcactgcagccgtgaactccttggctcaagtaattctcctggctcagcctcc

SEQ ID NO: 676260 - DNA, 1528 bp, Homo sapiens
tcagtggctggtggcttcctttgggcccagagcatagaactggaagttgcttattgaatgaacatgtgtgtgaattgaggtctgtcctgggactgtgcatggattctggctgacattctgggctgttaccttggcgggggcagtagaatcttcgagaaggtgctggtgcatcctttccgtcatccccacattcccgggccctgtggcctattcctttgattctcatccatttgagccacatacattaacccattgttttgattttggaaatttstagaagtcatactgagtcaggagtaagtaagatggggattcaacagttgatccaagccaaggacagacatgctgggctggggcaaatatgaaaataccaaatgccacttgtttttccaaaaatcatccatggacattcacaatggcaaagatatggaaccaatctaagtgcccatccaccaatgagtggataaagaaaatgtgagatatatatatatacacacacaccatggaatactactcagccataaagatgagatgaaataatgtcttttgcagcaacttggatggagctggaggccattattctaagtaacttgagaatggaacaccaaatatcatacattctcacttacaagtgggagctaagctatgaggatgcaaaggcataagaatgatataatagactttggggactcaggagggggaggttaagagggggtgaaggataaaacactacatatttggtacagtgtacaccgctaggggggttgggtatactaaaatctgatcaatcaccactaaagaacttgaccaaaaaccacctgtacccccaaaatgattggaaaaaaaatcagccgtgggccatgctcagcgcttggctgtttgggcatcaccactactttgttcagggaactgtaatgtctctcactcaacgtcctggtcactgaggccaacctgagtcagaaacagacccttagacagagatgtgggaacatgttgcatatttggggaaggaccccagaaggctgtggcagggaaatgggaaaatgacacaggagagggaaggcaggtagtataaggtgcatgaaggagtggcttacccctgggaaactgaggctcagtccagctggggacccctgggagactctgaggaatatgcctcctggttgtcctatccaagagacaaggaagttgagatatttatccagagactaagggggagccccctggcttattagcctgtcaccagggaagtgtaggagctcaattttattcctgagtttctcctcctggggcagagtgggggggcccccgccccctgatgtgggctcaaggacctgacccatcacatcagtgcatctgatgataagagaaagtcacttttataaatattttactaatacttgatgatggcaataatttctgccagtcctccccctatcccacgttataaattattttaagaagagctgccgtcagtctgcctgggaggcctgcccgatgatttacttacttatatattctgctttga

SEQ ID NO: 676261 - DNA, 1528 bp, Homo sapiens
tcagtggctggtggcttcctttgggcccagagcatagaactggaagttgcttattgaatgaacatgtgtgtgaattgaggtctgtcctgggactgtgcatggattctggctgacattctgggctgttaccttggcgggggcagtagaatcttcgagaaggtgctggtgcatcctttccgtcatccccacattcccgggccctgtggcctattcctttgattctcatccatttgagccacatacattaacccattgttttgattttggaaatttgtagaagtcatactgagtcaggagtaagtaagatggggattcaacagttgatccaagccaaggacagacatgctgggctggggcaaatatgaaaataccaaatgccacttgtttttccaaaaatcatccatggacattcacaatggcaaagatatggaaccaatctaagtgcccatccaccaatgagtggataaagaaaatgtgagatatatatatatacacacacaccatggaatactactcagccataaagatgagatgaaataatgtcttttgcagcaacttggatggagctggaggccattattctaagtaacttgagaatggaamaccaaatatcatacattctcacttacaagtgggagctaagctatgaggatgcaaaggcataagaatgatataatagactttggggactcaggagggggaggttaagagggggtgaaggataaaacactacatatttggtacagtgtacaccgctaggggggttgggtatactaaaatctgatcaatcaccactaaagaacttgaccaaaaaccacctgtacccccaaaatgattggaaaaaaaatcagccgtgggccatgctcagcgcttggctgtttgggcatcaccactactttgttcagggaactgtaatgtctctcactcaacgtcctggtcactgaggccaacctgagtcagaaacagacccttagacagagatgtgggaacatgttgcatatttggggaaggaccccagaaggctgtggcagggaaatgggaaaatgacacaggagagggaaggcaggtagtataaggtgcatgaaggagtggcttacccctgggaaactgaggctcagtccagctggggacccctgggagactctgaggaatatgcctcctggttgtcctatccaagagacaaggaagttgagatatttatccagagactaagggggagccccctggcttattagcctgtcaccagggaagtgtaggagctcaattttattcctgagtttctcctcctggggcagagtgggggggcccccgccccctgatgtgggctcaaggacctgacccatcacatcagtgcatctgatgataagagaaagtcacttttataaatattttactaatacttgatgatggcaataatttctgccagtcctccccctatcccacgttataaattattttaagaagagctgccgtcagtctgcctgggaggcctgcccgatgatttacttacttatatattctgctttga

SEQ ID NO: 676262 - DNA, 580 bp, Homo sapiens
gcttcttaggaaacgagggttgccatgtggaggttactgggggaaggtgctatataatctgcatgcattttwcaagtggatgaggtgcccccatccagccccccaccactagactgctgactgccctcaagttccccagataaaccctgtttccttcactggctccaggtctcttctccggcctgttgaacctggtgccatccctaatgaggtaaacaggggtctggcacgacaaccaggtaccaggaggtaacatcactggtgagaataaaggcatgtacgaaagctccagagtttggaagggataggagtggacccttcaaacacggggaagcgctttcattgattcctctccctgcactatcaatgaccagggcaaaggcagcccacgatcactttcgaatacagggacaaaatagggcagtgagtgagttgagaggggaggcactgacagcagcttaggaagggcccaaactaagagacctggaaacaagtcagtgaccagatttgcagcctagaattgcagcagctgcttctgattcccaaagatttctaacatggtttgatttcccaaacttta

SEQ ID NO: 676263 - DNA, 472 bp, Homo sapiens
tgccttcttcatgcttccatggtccyctggccccacaccaggtttagcctctatgatgacacttcgtgttttattattgtagtttatttttttcttaattttttaaattttaactagttgaccatctgtagataaatttcactacagatctgtttttgtcatccttttcttctctgtgtagtagaaaagatttcaaatatattaaaaattgtaataacagccaacacttacatagtacttactatgtgttgagtactgttaaaagttctttatatgtattaacttgtctgaccctcagaacaaccttatgaggtacatgatactacaaatgagaaaaatgaggatcagagagtgaacaaaatgccaaagaacacataataattaatggtgcaactgagattttgattctcctgaaggctagttccacattctacaattggaaccaatacatatgctatatttcctgtctaaa

SEQ ID NO: 676264 - DNA, 593 bp, Homo sapiens
tccctccagctcagcttacaggctgtagagctaagggtgactgagacaagcagaatctgctgtttcatgaaacccagaggcagagctagcagggccatgagaaccatctcatcaagcccctcactttacaatttgggaaactgagggagaaaaaaagataaccatttgagrgttactccttaaccataaaggtaaaaaaaaaaacaagaagaagtttctcctccatgcagcctgccttgactgcactgtctctctcgtgctttgggaccctggtcaggtcgctcagtcattcaacaaatacttattgagcactaactctgcgccaggcacagagctgagtgctaggataacagccatgagcaagactgacaaggttcctgcttttgtggtccttatattctaatttctaatggaatgaatcagataataaacattcagcacacagctagataaacagaaagtgctgctagaacaaggactgaggaaatccttcagggaaacagactggagactgcctgcagtcaccactggccagagtggccagatgaggcttcagtgaggaggggatatttaagcagaagcctgagaaaagg

SEQ ID NO: 676265 - DNA, 1604 bp, Homo sapiens
ttgttctctctattgaaagttcaaacccttacaaagcatcagtttgtatgcttatctattaagaaacaaccatgctgggaagtgggataatacatatataagacctgccctcaagagagcattatagataattttagtttccttatatttttctagaagagaaaaacaaaaaataacctaaacccttatgtgacatggtttggctgtgtccccacccaaatctcattttgatttgtagctcccacaattcccacctgttgtgggagggrcccagtgagaggtaactgaatcatgggggcagatatttcctgtgctgttctcatgatagtgaataagtcttacaagatctgatggttttataaagaagagttcccctgcacaagttatctctcttgtctgctgccatgtaagacgtgccttttgccttccaccatgattgggaggcctccccagccacgtggaactgttagtctattaaacctctttttcttaaaaattaccctgtcttgggtatgtctttatcagcagtgtgaaaacagactaatacactatgtgattaaatattaaaacagttgtgccttgaaggaatctgttggttttggaatgggcagaaaaaggaaaaaaagattaactcaaggagagagaataacaacagcaaaactgagataagcaagtacaggaagcactgctgaaaattattttggcaagcatatggtatggaagaaatttggtagaatggaaaatgtgttaggaaaagcaaaaatgaattctagccctagcttaatcgctaaggtactgttagggcaataggctcaacttctttcagttatgacaagaatgaaatgaaagttctgagctggataatctctaaggtgcctttcagttctgcaaagctaaggagattggaactagagtctagaagtaatttaattttaatactatattttatttaacccaatatgctccaaatattatttcaacatgtaattaacataaacatattactttttataccaggtgtttgaaatctatatgtattttacacttacacacctcaattcagactagccacaaattgctcaacagctgtgtggctactggctactatattggacagtgcagctctaaagggtttagaattaggagttactcacaggcaatggtaatatactacttctttaatttctcttgaatattataaatcaacatatgtttactggacacctaccatgtgcctgccttcccctttgcctataaagatgtttatggtttcccattctaaatgggtccttttcttttcaaccctttaagtagctgcttattgtcacccctcttttcccacccagatttctggagataaaatgccatttttataacttttctcctgttaactctaatttacctctcaagctgttacactggattctataatcatatcaagaccatttttattcaagttaccaatgacaaaattgccaaatctaaagacttatttcagtgtgagctgaaaaggttgttttacctttctatgtcaggtactacggattttttttttttttttttttttttgaggcagggtcttgcgctgtcacccaggctggaat

SEQ ID NO: 676266 - DNA, 1604 bp, Homo sapiens
ttgttctctctattgaaagttcaaacccttacaaagcatcagtttgtatgcttatctattaagaaacaaccatgctgggaagtgggataatacatatataagacctgccctcaagagagcattatagataattttagtttccttatatttttctagaagagaaaaacaaaaaataacctaaacccttatgtgacatggtttggctgtgtccccacccaaatctcattttgatttgtagctcccacaattcccacctgttgtgggagggacccagtgagaggtaactgaatcatgggggcagatatttcctgtgctgttctcatgatagtgaataagtcttacaagatctgatggttttataaagaagagttcccctgcacaagttatctctcttgtctgctgccatgtaagacgtgccttttgccttccaccatgattgggaggcctccccagccacgtggaactgttagtctattaaacctctttttcttaaaaattacccygtcttgggtatgtctttatcagcagtgtgaaaacagactaatacactatgtgattaaatattaaaacagttgtgccttgaaggaatctgttggttttggaatgggcagaaaaaggaaaaaaagattaactcaaggagagagaataacaacagcaaaactgagataagcaagtacaggaagcactgctgaaaattattttggcaagcatatggtatggaagaaatttggtagaatggaaaatgtgttaggaaaagcaaaaatgaattctagccctagcttaatcgctaaggtactgttagggcaataggctcaacttctttcagttatgacaagaatgaaatgaaagttctgagctggataatctctaaggtgcctttcagttctgcaaagctaaggagattggaactagagtctagaagtaatttaattttaatactatattttatttaacccaatatgctccaaatattatttcaacatgtaattaacataaacatattactttttataccaggtgtttgaaatctatatgtattttacacttacacacctcaattcagactagccacaaattgctcaacagctgtgtggctactggctactatattggacagtgcagctctaaagggtttagaattaggagttactcacaggcaatggtaatatactacttctttaatttctcttgaatattataaatcaacatatgtttactggacacctaccatgtgcctgccttcccctttgcctataaagatgtttatggtttcccattctaaatgggtccttttcttttcaaccctttaagtagctgcttattgtcacccctcttttcccacccagatttctggagataaaatgccatttttataacttttctcctgttaactctaatttacctctcaagctgttacactggattctataatcatatcaagaccatttttattcaagttaccaatgacaaaattgccaaatctaaagacttatttcagtgtgagctgaaaaggttgttttacctttctatgtcaggtactacggattttttttttttttttttttttttgaggcagggtcttgcgctgtcacccaggctggaat

SEQ ID NO: 676267 - DNA, 1604 bp, Homo sapiens
ttgttctctctattgaaagttcaaacccttacaaagcatcagtttgtatgcttatctattaagaaacaaccatgctgggaagtgggataatacatatataagacctgccctcaagagagcattatagataattttagtttccttatatttttctagaagagaaaaacaaaaaataacctaaacccttatgtgacatggtttggctgtgtccccacccaaatctcattttgatttgtagctcccacaattcccacctgttgtgggagggacccagtgagaggtaactgaatcatgggggcagatatttcctgtgctgttctcatgatagtgaataagtcttacaagatctgatggttttataaagaagagttcccctgcacaagttatctctcttgtctgctgccatgtaagacgtgccttttgccttccaccatgattgggaggcctccccagccacgtggaactgttagtctattaaacctctttttcttaaaaattaccctgtcttgggtatgtctttatcagcagygtgaaaacagactaatacactatgtgattaaatattaaaacagttgtgccttgaaggaatctgttggttttggaatgggcagaaaaaggaaaaaaagattaactcaaggagagagaataacaacagcaaaactgagataagcaagtacaggaagcactgctgaaaattattttggcaagcatatggtatggaagaaatttggtagaatggaaaatgtgttaggaaaagcaaaaatgaattctagccctagcttaatcgctaaggtactgttagggcaataggctcaacttctttcagttatgacaagaatgaaatgaaagttctgagctggataatctctaaggtgcctttcagttctgcaaagctaaggagattggaactagagtctagaagtaatttaattttaatactatattttatttaacccaatatgctccaaatattatttcaacatgtaattaacataaacatattactttttataccaggtgtttgaaatctatatgtattttacacttacacacctcaattcagactagccacaaattgctcaacagctgtgtggctactggctactatattggacagtgcagctctaaagggtttagaattaggagttactcacaggcaatggtaatatactacttctttaatttctcttgaatattataaatcaacatatgtttactggacacctaccatgtgcctgccttcccctttgcctataaagatgtttatggtttcccattctaaatgggtccttttcttttcaaccctttaagtagctgcttattgtcacccctcttttcccacccagatttctggagataaaatgccatttttataacttttctcctgttaactctaatttacctctcaagctgttacactggattctataatcatatcaagaccatttttattcaagttaccaatgacaaaattgccaaatctaaagacttatttcagtgtgagctgaaaaggttgttttacctttctatgtcaggtactacggattttttttttttttttttttttttgaggcagggtcttgcgctgtcacccaggctggaat

SEQ ID NO: 676268 - DNA, 641 bp, Homo sapiens
ggcctggggagagtgagctcttttttgaagaacactctatacagccacaaggtggctgtcatcctgtacctaagccagtatcaattccacgtcaaacaattacatgtctcagagtcctggggaagacctagtcttttcaatattagttactatagcaaatcaatagatgtgagacagctgctcatctttctcttgcccaattctcctagaagggtgggcccgctcctattagttatttattcctgcataacaagttattccaaaacttagaagcttaaaacaacaaatgttggttggacacagyggctcacacctataatcccagcactttgggaggctgaggtgagtgaatcacttgaggttaagagtttgagaccatcttggccaacacagtgaaaactcatctttactaaaaatataaaaattacctggcgtggtggtgcatgcctgtaatcccagctacttgggaggctgaggttgcagggagccgagattgccccactgcactccagcctgggcaacagagcgagattctatctcaaaagtcaggaatttgggagcagttcggctttgtagttaaggttgcactcaggatgtcagcagggactaaagttgccaaaaggcttgcctggagctagaga

SEQ ID NO: 676269 - DNA, 660 bp, Homo sapiens
ttctcttctgatgaatatttggattgtttcacaattttcaccatataaataatgctgtagtaaatatccatgtgtagacatatatacacactcatatacctatttatctttgacactagcatttctataagaaaacatggaatttgggggtcaatgaatacacataatttaaaattcagcagacactaccaaattgttctggaagctttttattccatgtaatgttttttgtgtgaacttttctattagatttgcttttkcttttgactttttttttctactagaaaagtagtatacactgatttagatttgagaaatacagaaggccaaaataacaaagcaattatctaaggacaatataggtccaaaaaaaaaaaattagagctccataacataaatactagcattattcttttggcttttaattgctttccagttttctctgccaaggaagggagggaatttgaattggttttctcctttatttttaataactataaaattaccttaaatacaagtttctgatctgatttaacttagaatataagtgatacacccaatacacataaatcactcacaaatgagacaggcatttaaaaaatccaagcaatgtaacaatcttagttcacagcatctgaatagttcagaaggttgcttgat

SEQ ID NO: 676270 - DNA, 660 bp, Homo sapiens
ttctcttctgatgaatatttggattgtttcacaattttcaccatataaataatgctgtagtaaatatccatgtgtagacatatatacacactcatatacctatttatctttgacactagcatttctataagaaaacatggaatttgggggtcaatgaatacacataatttaaaattcagcagacactaccaaattgttctggaagctttttattccatgtaatgttttttgtgtgaacttttctattagatttgcttttgcttttgactttttttttctactagaaaagtagtatacactgatttagatttgagaaatacagaaggccaaaataacaaagcaattatctaaggacaatataggtccaaaaaaaaaaaattagagctccataacataaatactagcattattcttttggcttttaattgctttccagttttctctgccaaggaagggagggaatttgaattggttttctcctttatttttaataactataaaattaccttaaatacaagtttctgatctgatttaacttagaatataagtgatacacccaatacacataaatcactcacaaatgagacaggcatttaaaaaatccawgcaatgtaacaatcttagttcacagcatctgaatagttcagaaggttgcttgat

SEQ ID NO: 676271 - DNA, 1204 bp, Homo sapiens
ttttcttaggtcaataatagattagtgaagactgttttgtatataaaaaccccacttcgcctagcctaagctgaaagaggaatgagagatgaatgttgggatacctcaagggcctcacttcagttcaagggagtgacagattggggtgtagaatcttagtcctccttccaaatcaccaagaaaggaccgtggcacccttgagtcagatgctcatacccgagccagttagtgtgacctgtgaacaaagcaatgtatacctatggctgctcttgaaaacagccacctggaggaagaggttaagggagtggggagagtaggccaatcctagaaaacaggaggagcacaggtcacaggaaaacatggactgaagagaaaaacagaaggtgctcaccacgtctccagaacggatgtttcttttttcttaatgttttgaacatctgggtgtggaatgccacgtgtgtccctgacaggaggggagctcaccagtgagccttcgcggattggctcttcctaacaatagttcctttcattctttggtccttgtcaaagcagtgaaagtttggccctcctaggtgtrggggtcccacaggaaatgccaagatgaagggtactccagaagggcatgtgattaaaaagtgacaactgcttgttctctgaagcaatcctttaagttccttctacactcttcttacgtactttagctacttccaatgaagcaccaaaaatatttgctcactgcaagagccggataaaagctcattttactgccttgtaggcaaccactaacattttttaaagtggggttggggaagagaaaaatctccatactttgagatgtagttttttcttacagtagtctgggaaataatgttttaaggcctacaaggcctgcatgggctcaggttgtgtatttactggatattcagagtctctctctcttttttttttttttggctcactgcaacctctgccttccaggttcaaatgattctcctgcctcagcctcccaagtagctgggactacaggcatgtgccaccacacccggctaatttttgtatttttagtagagatggggtttcgccatgttggccaggctggtttcaaactcctgacctcaggtggtgggagtatggcgcaccacgcctggcctgtatattcatagtccttatacctcttaaactttaacaaataagattttttaaa

SEQ ID NO: 676272 - DNA, 634 bp, Homo sapiens
aaattgttagtgcattattgagtatactaaatatctgtgattaaataaattagttctaacttttgattttgggagcccaaaataaagggagtgttgttttcatggttatgccttgtttgtggagtcaagtgttgatatacttgaggcatgttatgtgtcttctaattaatatttttatcaccttgaatttgtgtctcttccaagcattaaagatactatggatcttaaattccttattaaaaaaatgcaagtgtgaatactttgtttagcttacattttaatttattgtggttgaccacattttatggctcctgagtgccttcacccagctacactttaccttgtatctataaaagtgtaatttagagtaaatacattggctgtaaagtcgmgatcaggtgctctccaccaaaagcaaaacaaaactgctgaaatgtggcaaggtttctcagtgcaagcttaaatgtttaaactgttgaccatttggaaaatactggacaaaggggaaggacaaaacatcatttgcaatagttaaaggttatgcaaggcaaggcaacattatactttttgactaagttattaaaagttaaatgcatttcttctttgaagtgtggattataaaagccaatcaaag

SEQ ID NO: 676273 - DNA, 703 bp, Homo sapiens
gtcacagctcctccagtcccgtcgcccgcagcttggtgaatgggggcatgtggtgcacagtggctttttctccccctttgctcggcgagcaggagggagagctacagtgttacagctctttgcgcacccaccatttggtgggttccaggttcttgtcctgcaaccaagaagaatgaggttaggcagacactggagagcgagcaaggcagggaagaatgttattgagtgacagaaaagctctcgataatgagaggggaccygaagtgggtagccctgtgtgacaggagagcctgaaagagggtagcccaatgtgtggtgagtccacggtttatatgggctcagaatgggggcgtacatgctgattggtctatgggcaggcctggaaaaagcaccattcaattggctaaaaggcatcaaggaaagttctcactccggttgtggactctacccagaactggcagctcagtttgcaggctttaagctgtctttggcttgaaggttgggtttcaccagggacctgcccctatctgcctaggaatttttctctcttgccactatgattaggaaaacaatctgtttatgtagtgccacgtattcagtgctgcgtacagcgtaggagttcagtcctaccgagcctgcttgcaggcagtgaaacaatgcaggagccgggcacggtggctcacgcctgtaatcccagcacttt

SEQ ID NO: 676274 - DNA, 594 bp, Homo sapiens
gtagcttcctagcacttcggtaacaaccataacccagcggcgttggtggtacagtagcgagcatagctgccttccaaataatcataactttggtgggattttttgttgttttttttctgaaacagggtttcgctcttgtagcccaggctggagtgcagtggtgtgatctcggctcactgcaacctcctcctcccaggttcaagcgattctcctgcctcagccagtcgagtagctgggatcacagcygcctgccaccacactcagctaatttttgtatttttagtagagatggggtttcaccatgttagccaggatggtctcgaacgactggcttcaggtgatccaccctgttggggtgatcagacccaacaccaggctgtgggggcaacgaagtccgggggagtcaaaggaatgagacaagacaagttaagagtgaaagtgggaccgcaggccaacgctagtatggaggctgcgaaggccctgagcgctgggagcccgagctgtttattggtgatcaaagaagcaggtggtgaggatgtgggggttgaaaggaagcagtgcatcaagcgcatgatctatggccgtgacggttta

SEQ ID NO: 676275 - DNA, 594 bp, Homo sapiens
gtagcttcctagcacttcggtaacaaccataacccagcggcgttggtggtacagtagcgagcatagctgccttccaaataatcataactttggtgggattttttgttgttttttttctgaaacagggtttcgctcttgtagcccaggctggagtgcagtggtgtgatctcggctcactgcaacctcctcctcccaggttcaagcgattctcctgcctcagccagtcgagtagctgggatcacagctgcctgccaccacactcagctaatttttgtatttttagtagagatggggtttcaccatgttagccaggatggtctcgaacractggcttcaggtgatccaccctgttggggtgatcagacccaacaccaggctgtgggggcaacgaagtccgggggagtcaaaggaatgagacaagacaagttaagagtgaaagtgggaccgcaggccaacgctagtatggaggctgcgaaggccctgagcgctgggagcccgagctgtttattggtgatcaaagaagcaggtggtgaggatgtgggggttgaaaggaagcagtgcatcaagcgcatgatctatggccgtgacggttta

SEQ ID NO: 676276 - DNA, 1940 bp, Homo sapiens
tcaaagaggcttgtttaatgtaaaaatcagtagtaacctgacagtgacatggtccaggtactttaggctgtcttatcccttaatgtaggctattaccatcaagcacagttttgcaaatagccagtggaatgtagttcagatacatgactttgtgggtaatccaggggtagagactaaaacagtactgtgcagtatgtggttatttacagttaattaagattaaataaaatttaaaaattagttccttgactaccaaatgctcaatagccactagtaggtaccatgttgaacagtacagatatagaccatttccatcatcacataaagtactgttggattgtgttggtcaagacaatctaaagcaattgtttcccaggtgtgctgtgtggtgtgccttacatgtcattgaaaggggtgctgtcaggagttctagatgcttcagcctccctttactaagagcagttcttatgttttctattttatcgcttgggcttccagatacaatgttttgttttaggtttgttttttttgtttgtttgtttttttttttttgagacggagttttgctctggttgcccaagctggatggagtacggtggtgcgatcgcggctcactgcaacctccgcctcccgggttcgagagattctcctgcctcagcttcccgagtagctggaattacaggcgtccaccaccatgcctgactaattttttttgtatttttagtagacttggggtttcaccatgttggccgggctggtttcaaactcctgacctcaggtgatccacccgcctcggcctcccagagggctgggattacaggtgtgaaccaccgtgcccggcctgttttagttttttagagatggagtctccctctgttgcccaagccagagtgcggtggcatgacactctcagggttcaacctctcagggatcaagggatcctcccacctcagcttcctgagtagctggaaccacaggcacatgtgccaccatgcccagctaatttttgtattttttgtagaagcaaggtttcaccatgttgcccaggctggtctcggactcctaggtcaagtgatcctcccacctcaatctccyagagtgctaagactataggcgggagtcaccatgcccagcttcatctacaatttatttgaagaaaatgtttgagcaccacccatcttgaaaagtgatagactgccttccattaaatactgtcacacctagttatttagcagcagtgagcttcactttttatactttagaccttaatctaaagggtgatttctagttgccagttaaatccagagccaagctctttggagaatccaggagcctcactaggtcatgtatcaggataaaatacccatccactcccattagaaggtgagcttgtacttatggcttcctgatggctgctgcaacaagtctaaagcagtctccttagtatacaatgtcttctctaagtggtagaaaaaagcaaaaatactacaagttaatagggctacataaaatttgctagtttcttttttgccctagccatttattccttcctgaaatcttgtctctctctcgctctctctttctctcgctctcactttctttctctttttcttttctcttttcttttctttcttccctttcttttctttcttttttcctgttgcccaggctggagtgcagtggaacaattatggctcactgcagccttgacctttctggacccaggtgatcctcccacctcagtctcccaattagctgggactacaggcatgcgccaccacacccagctataatatatattgtatatatattttttatttataaatatatataaatatatatttatatgtgtaaattatatatatttatatattataaattatatataaatatatatttatatataatatatataatatatatttatttttatatatttt

SEQ ID NO: 676277 - DNA, 1940 bp, Homo sapiens
tcaaagaggcttgtttaatgtaaaaatcagtagtaacctgacagtgacatggtccaggtactttaggctgtcttatcccttaatgtaggctattaccatcaagcacagttttgcaaatagccagtggaatgtagttcagatacatgactttgtgggtaatccaggggtagagactaaaacagtactgtgcagtatgtggttatttacagttaattaagattaaataaaatttaaaaattagttccttgactaccaaatgctcaatagccactagtaggtaccatgttgaacagtacagatatagaccatttccatcatcacataaagtactgttggattgtgttggtcaagacaatctaaagcaattgtttcccaggtgtgctgtgtggtgtgccttacatgtcattgaaaggggtgctgtcaggagttctagatgcttcagcctccctttactaagagcagttcttatgttttctattttatcgcttgggcttccagatacaatgttttgttttaggtttgttttttttgtttgtttgtttttttttttttgagacggagttttgctctggttgcccaagctggatggagtacggtggtgcgatcgcggctcactgcaacctccgcctcccgggttcgagagattctcctgcctcagcttcccgagtagctggaattacaggcgtccaccaccatgcctgactaattttttttgtatttttagtagacttggggtttcaccatgttggccgggctggtttcaaactcctgacctcaggtgatccacccgcctcggcctcccagagggctgggattacaggtgtgaaccaccgtgcccggcctgttttagttttttagagatggagtctccctctgttgcccaagccagagtgcggtggcatgacactctcagggttcaacctctcagggatcaagggatcctcccacctcagcttcctgagtagctggaaccacaggcacatgtgccaccatgcccagctaatttttgtattttttgtagaagcaaggtttcaccatgttgcccaggctggtctcggactcctaggtcaagtgatcctcccacctcaatctcctagagtgctaagactataggcgggagtcaccatgcccagcttcatctacaatttatttgaagaaaatgtttgagcaccacccatcttgaaaagtgatagactgccttccattaaatactgtcacacctagttatttagcagcagtgagcttcactttttatactttagaccttaatctaaagggtgatttctagttgccagttaaatccagagccaagctctttggagaatccaggagcctcactaggtcatgtatcaggataaaatacccatccactcccattagaaggtgagcttgtacttatggcttcctgatggctgctgcaacaagtctaaagcagtctccttagtatacaatgtcttctctaagtggtagaaaaaagcaaaaatactacaagttaatagggctacataaaatttgctagtttcttttttgccctagccatttattccttcctgaaatcttgtctctctctcgctctctctttctctcgctctcactttctttctctttttcttttctcttttcttttctttcttccctttcttttctttcttttttcctgttgcccaggctggagtgcagtggaacaattatggctcactgcagccttgacctttctggacccaggtgatcctcccacctcagtctcccaattagctgggactacaggcatgcgccaccacacccagctataatatatattgtatatatattttttatttataaatatatataaatatatatttatatgtgtaaattatatatatttatatattataaattatatataaatatatatttatatataatatatatwatatatatttatttttatatatttt

SEQ ID NO: 676278 - DNA, 1940 bp, Homo sapiens
tcaaagaggcttgtttaatgtaaaaatcagtagtaacctgacagtgacatggtccaggtactttaggctgtcttatcccttaatgtaggctattaccatcaagcacagttttgcaaatagccagtggaatgtagttcagatacatgactttgtgggtaatccaggggtagagactaaaacagtactgtgcagtatgtggttatttacagttaattaagattaaataaaatttaaaaattagttccttgactaccaaatgctcaatagccactagtaggtaccatgttgaacagtacagatatagaccatttccatcatcacataaagtactgttggattgtgttggtcaagacaatctaaagcaattgtttcccaggtgtgctgtgtggtgtgccttacatgtcattgaaaggggtgctgtcaggagttctagatgcttcagcctccctttactaagagcagttcttatgttttctattttatcgcttgggcttccagatacaatgttttgttttaggtttgttttttttgtttgtttgtttttttttttttgagacggagttttgctctggttgcccaagctggatggagtacggtggtgcgatcgcggctcactgcaacctccgcctcccgggttcgagagattctcctgcctcagcttcccgagtagctggaattacaggcgtccaccaccatgcctgactaattttttttgtatttttagtagacttggggtttcaccatgttggccgggctggtttcaaactcctgacctcaggtgatccacccgcctcggcctcccagagggctgggattacaggtgtgaaccaccgtgcccggcctgttttagttttttagagatggagtctccctctgttgcccaagccagagtgcggtggcatgacactctcagggttcaacctctcagggatcaagggatcctcccacctcagcttcctgagtagctggaaccacaggcacatgtgccaccatgcccagctaatttttgtattttttgtagaagcaaggtttcaccatgttgcccaggctggtctcggactcctaggtcaagtgatcctcccacctcaatctcctagagtgctaagactataggcgggagtcaccatgcccagcttcatctacaatttatttgaagaaaatgtttgagcaccacccatcttgaaaagtgatagactgccttccattaaatactgtcacacctagttatttagcagcagtgagcttcactttttatactttagaccttaatctaaagggtgatttctagttgccagttaaatccagagccaagctctttggagaatccaggagcctcactaggtcatgtatcaggataaaatacccatccactcccattagaaggtgagcttgtacttatggcttcctgatggctgctgcaacaagtctaaagcagtctccttagtatacaatgtcttctctaagtggtagaaaaaagcaaaaatactacaagttaatagggctacataaaatttgctagtttcttttttgccctagccatttattccttcctgaaatcttgtctctctctcgctctctctttctctcgctctcactttctttctctttttcttttctcttttcttttctttcttccctttcttttctttcttttttcctgttgcccaggctggagtgcagtggaacaattatggctcactgcagccttgacctttctggacccaggtgatcctcccacctcagtctcccaattagctgggactacaggcatgcgccaccacacccagctataatatatattgtatatatattttttatttataaatatatataaatatatatttatatgtgtaaattatatatatttatatattataaattatatataaatatatatttatatataatatatataatwtatatttatttttatatatttt

SEQ ID NO: 676279 - DNA, 1940 bp, Homo sapiens
tcaaagaggcttgtttaatgtaaaaatcagtagtaacctgacagtgacatggtccaggtactttaggctgtcttatcccttaatgtaggctattaccatcaagcacagttttgcaaatagccagtggaatgtagttcagatacatgactttgtgggtaatccaggggtagagactaaaacagtactgtgcagtatgtggttatttacagttaattaagattaaataaaatttaaaaattagttccttgactaccaaatgctcaatagccactagtaggtaccatgttgaacagtacagatatagaccatttccatcatcacataaagtactgttggattgtgttggtcaagacaatctaaagcaattgtttcccaggtgtgctgtgtggtgtgccttacatgtcattgaaaggggtgctgtcaggagttctagatgcttcagcctccctttactaagagcagttcttatgttttctattttatcgcttgggcttccagatacaatgttttgttttaggtttgttttttttgtttgtttgtttttttttttttgagacggagttttgctctggttgcccaagctggatggagtacggtggtgcgatcgcggctcactgcaacctccgcctcccgggttcgagagattctcctgcctcagcttcccgagtagctggaattacaggcgtccaccaccatgcctgactaattttttttgtatttttagtagacttggggtttcaccatgttggccgggctggtttcaaactcctgacctcaggtgatccacccgcctcggcctcccagagggctgggattacaggtgtgaaccaccgtgcccggcctgttttagttttttagagatggagtctccctctgttgcccaagccagagtgcggtggcatgacactctcagggttcaacctctcagggatcaagggatcctcccacctcagcttcctgagtagctggaaccacaggcacatgtgccaccatgcccagctaatttttgtattttttgtagaagcaaggtttcaccatgttgcccaggctggtctcggactcctaggtcaagtgatcctcccacctcaatctcctagagtgctaagactataggcgggagtcaccatgcccagcttcatctacaatttatttgaagaaaatgtttgagcaccacccatcttgaaaagtgatagactgccttccattaaatactgtcacacctagttatttagcagcagtgagcttcactttttatactttagaccttaatctaaagggtgatttctagttgccagttaaatccagagccaagctctttggagaatccaggagcctcactaggtcatgtatcaggataaaatacccatccactcccattagaaggtgagcttgtacttatggcttcctgatggctgctgcaacaagtctaaagcagtctccttagtatacaatgtcttctctaagtggtagaaaaaagcaaaaatactacaagttaatagggctacataaaatttgctagtttcttttttgccctagccatttattccttcctgaaatcttgtctctctctcgctctctctttctctcgctctcactttctttctctttttcttttctcttttcttttctttcttccctttcttttctttcttttttcctgttgcccaggctggagtgcagtggaacaattatggctcactgcagccttgacctttctggacccaggtgatcctcccacctcagtctcccaattagctgggactacaggcatgcgccaccacacccagctataatatatattgtatatatattttttatttataaatatatataaatatatatttatatgtgtaaattatatatatttatatattataaattatatataaatatatatttatatataatatatataatatwtatttatttttatatatttt

SEQ ID NO: 676280 - DNA, 1940 bp, Homo sapiens
tcaaagaggcttgtttaatgtaaaaatcagtagtaacctgacagtgacatggtccaggtactttaggctgtcttatcccttaatgtaggctattaccatcaagcacagttttgcaaatagccagtggaatgtagttcagatacatgactttgtgggtaatccaggggtagagactaaaacagtactgtgcagtatgtggttatttacagttaattaagattaaataaaatttaaaaattagttccttgactaccaaatgctcaatagccactagtaggtaccatgttgaacagtacagatatagaccatttccatcatcacataaagtactgttggattgtgttggtcaagacaatctaaagcaattgtttcccaggtgtgctgtgtggtgtgccttacatgtcattgaaaggggtgctgtcaggagttctagatgcttcagcctccctttactaagagcagttcttatgttttctattttatcgcttgggcttccagatacaatgttttgttttaggtttgttttttttgtttgtttgtttttttttttttgagacggagttttgctctggttgcccaagctggatggagtacggtggtgcgatcgcggctcactgcaacctccgcctcccgggttcgagagattctcctgcctcagcttcccgagtagctggaattacaggcgtccaccaccatgcctgactaattttttttgtatttttagtagacttggggtttcaccatgttggccgggctggtttcaaactcctgacctcaggtgatccacccgcctcggcctcccagagggctgggattacaggtgtgaaccaccgtgcccggcctgttttagttttttagagatggagtctccctctgttgcccaagccagagtgcggtggcatgacactctcagggttcaacctctcagggatcaagggatcctcccacctcagcttcctgagtagctggaaccacaggcacatgtgccaccatgcccagctaatttttgtattttttgtagaagcaaggtttcaccatgttgcccaggctggtctcggactcctaggtcaagtgatcctcccacctcaatctcctagagtgctaagactataggcgggagtcaccatgcccagcttcatctacaatttatttgaagaaaatgtttgagcaccacccatcttgaaaagtgatagactgccttccattaaatactgtcacacctagttatttagcagcagtgagcttcactttttatactttagaccttaatctaaagggtgatttctagttgccagttaaatccagagccaagctctttggagaatccaggagcctcactaggtcatgtatcaggataaaatacccatccactcccattagaaggtgagcttgtacttatggcttcctgatggctgctgcaacaagtctaaagcagtctccttagtatacaatgtcttctctaagtggtagaaaaaagcaaaaatactacaagttaatagggctacataaaatttgctagtttcttttttgccctagccatttattccttcctgaaatcttgtctctctctcgctctctctttctctcgctctcactttctttctctttttcttttctcttttcttttctttcttccctttcttttctttcttttttcctgttgcccaggctggagtgcagtggaacaattatggctcactgcagccttgacctttctggacccaggtgatcctcccacctcagtctcccaattagctgggactacaggcatgcgccaccacacccagctataatatatattgtatatatattttttatttataaatatatataaatatatatttatatgtgtaaattatatatatttatatattataaattatatataaatatatatttatatataatatatataatatatatwtatttttatatatttt

SEQ ID NO: 676281 - DNA, 620 bp, Homo sapiens
gagccaccggcgcccggcccattcttacattctttacaacaatcagtaaagaaaaaagsgggggggggcgcctatacattcatgtattgacaatactgcagtctttacatacaaataaaacccagctacctggaaataacatttatctgaaccttagttgagaatgtgctaagacctttaagtcatgcaaacgaagaagatgctacaaagtccatttacaaatactgcacatgaaaagcccttctgattccgagcctacttgacctacattacatacaattctaaccagcttagttaactggtttctaagacgacaccctatgaaaaagtcacaagttagaaaatgaaaaggctgataataagggaagaataacaggcatcagccttatagcaaaagaggaggcagatacaaaaacttaaaacacacagtatctgagggcagttggtacagaaacatagcacagtgtctctctttctcattccctaatgacatcaccatattcaccataatataaaatctgatattctcagtaacgcctgattcctacaaaattattctgtaacatttaataaattttttaaataacataaaagtatagaatatctttttaaagatttcc

SEQ ID NO: 676282 - DNA, 616 bp, Homo sapiens
ttgcctgactatgctcacaggacagagaagcaagccaggcgcattctggagggaggagccaccggctcccaccaccctgtgcccacggcccatgcccgcagctctgtgcccactgccctgtgcccggctggactaagaccctcatacagtctggggaaaatgggaagagaggactgtactcaagatgtcccgtgtcccatagcttaagagctggcaatcttgggggacggtactcaggatatcccatgtcccatagcttaagagctggcaatcttgggggacggtactcaggatatcccatgtcccatagcttaagagctggcaatcttgggggayggtactcaggatatcccatgtcccatagcttaagagctggcaatcttggcttccagggaaactgcctgcctcgaggtccagagaccaagggtgaggagcccagaaagacctctgtagcgctcacctcgacctcagctgctttttatcttttgaatcttttcccctcatctcctcttccgccttccctctttgagcttctaattccccagacaggagccaaaagtcagtgagccaagaggcaagccctcaaggctggggcgggaagctgtcccctccggct

SEQ ID NO: 676283 - DNA, 659 bp, Homo sapiens
atcctgcccccagatccggcctcctcttgtttctcccatcatcatcctggacgcctgggccccaggccgggttttcctcgacgcctccacccgacctctgctctccttccttgcggtcacagcggctcagccctcctgggctctacccggcccacggcccacctctgaccaccttcctgctgagggctccatcccgagtcagtgctgcctgggatcagagcctggctgcgtcctctcccagtgccacctcagggcacaggtggtctcagcagctgcctcaggtgaggctgtgtcctgacgcctgcctgggtgtgtcccagcccccagcccccagccccagccagggtggtgccccccgtgtccccacttagcaccatgtgtggtgctggccccgctgcgctcctggacgagggcctccacttagtgtcactgtcttctggtcacaccttgggaagcaaaggggtgacgctgtccacagggtgatgtgaagggggctgtgcygggtctgggccctcagaataggcctgccgagctgctcactaggagactgcaggacactggctctgggctccaggcaggaaaataaagaagaaagagttcacttgctctttgtatccaagaacttctcttccatgaaggtgtgggacgaggcccgagcc

SEQ ID NO: 676284 - DNA, 654 bp, Homo sapiens
acattctttcaattaatatttctggaactctttaatatatctgggaatccagctgtaagcaaaacttaacgcatttaggaatggagcttgcatggagctccatggaactttcctggggcatccacgccttcacagaactgacattctaatggagaagagaaacaataaagaaataaatcatatgatgtcaggaaataataaactttttttaggtaactcaggaatctctcttgtgcactcagagacgatagctctctcatgtgtactcagagcaaagataggcccagctatctttccactctggccccctcatttaattagccaccattggaagaaagcatctcttttccacaaaaatgtggcaaaagcaccactcagtggaaaagagttgttttctggatgctgcttttcaggagcatattccccgccgaccccttgtgtgaagtgggcgtctgctgatttcatcttcctagcatctgtttcccaacccaactggtggggaactgcacctccacaattatgataatgtgaccttaaccctggcctgtccagcaatgatatctttcctcctgtccaaagcratttgtcctgaaaaagggcacaaacccaaacaaggccaaaagagttgttccatgagatttgatatatgggtga

SEQ ID NO: 676285 - DNA, 772 bp, Homo sapiens
ggaaaagtagggtcccataacacatattttcagtcgtacattaaactgactggttataagtactgagaataaacaatcactttgactaactgcattatagtataccatgattaagatctttatattcattttctgcagctgagtaggaatagcacattttaaaacttacatagaagtgtttctgatctctagacactaataacttgctatctagcagttttaatctagaaaaagtaataagattaattactatagcttactataaatatacaccgtggaagacactcatgagtgactgcttccttctcatgtattcttttaagtaggagtttatcccctgtatccatcacagacatttcctttcagatagctcctaatcccccaattttacctgtatcagaaaggtttcaggagatatgaataatttatgtctttagaaacatagtgtaaatatttcatgwggtatttattaaataatgcaacccaataaaattatgtaaattttagtttgcatagtaaagtacgaaaagcaaggactttatagactgtagtgcaagtggcacactgtactttgacaatagctgaggtctagaactccattgtaggcccattagaaacagcttcagtacaatttggagaataatgatgactttatggctagaaggatttcacagtttttggcgttcttctgttcttcttttagagaaagaacctatcatctaatttgcagctttgagctttgaatgagagatatgagaaaaaacacatctgg

SEQ ID NO: 676286 - DNA, 772 bp, Homo sapiens
ggaaaagtagggtcccataacacatattttcagtcgtacattaaactgactggttataagtactgagaataaacaatcactttgactaactgcattatagtataccatgattaagatctttatattcattttctgcagctgagtaggaatagcacattttaaaacttacatagaagtgtttctgatctctagacactaataacttgctatctagcagttttaatctagaaaaagtaataagattaattactatagcttactataaatatacaccgtggaagacactcatgagtgactgcttccttctcatgtattcttttaagtaggagtttatcccctgtatccatcacagacatttcctttcagatagctcctaatcccccaattttacctgtatcagaaaggtttcaggagatatgaataatttatgtctttagaaacatagtgtaaatatttcatgaggtatttattaaataatgcaacccaataaaattatgtaaattttagtttgcatagtaaagtacgaaragcaaggactttatagactgtagtgcaagtggcacactgtactttgacaatagctgaggtctagaactccattgtaggcccattagaaacagcttcagtacaatttggagaataatgatgactttatggctagaaggatttcacagtttttggcgttcttctgttcttcttttagagaaagaacctatcatctaatttgcagctttgagctttgaatgagagatatgagaaaaaacacatctgg

SEQ ID NO: 676287 - DNA, 1145 bp, Homo sapiens
tagtttatcaagagtttttatcacagatatgtattgaattttatccagttgttttttacatcaatttgttgatactctggtgtattttaataaactttgtgattttaagcaaattatgcatttctgagaccaatctagcatgtaatgttttaattcactgttgaatttggtttcaaaatattttatttatgattttttcttttaataagataaatttgtaatttttcacctcttgatctgtcctttaccaattttaaaatcaagctaaaattagcatcataaaaarttgagtaggtttcttcctctttctctattcataaacaaattgtacacacacacaaaaaaaaactatggtgtattttctccctgatagtctggtaaagttcatttgtaaaaaaacaagatttggtgtctttctaaaagagatacaacttatgtaatttatatatcagtaagtttactttttaatggtaattggtgtatctatatattttctttcatttcgtctgattatagtcatagttttaaataattatctatttcatctaaattgttatatttactgcaataaagttgttcctaaaaatcttttcctgtcacaaatatttttgttcctaatatttttatttttgctttttctccattaattttaccagaggtttttctgtttcagtagtcttttaaatagttacctttgatttctttaaccctttaatttttttttttgtaatatttgctcttatgtttattatatctttgcttctactttctttggacttactctattgtcttcattaatttattgagttaaaagcctatttaatttttaaactttagtatttcctaatgtgtgccttaaaagttacaaattcccatctaaataacactttaattttacctgacttttttattggtaatgatattcttatttagttttaaatattttcttatttacattacgtcttcttctgtgttccatgaattacaaaacatagcattcttctgttttagtgtctaagcagatgatcaaattgggagagattatttcactaatctctgaatttcttgcaataggtttagagattgtggtctattggatatacaaatcaaatagtatcgaaaatattggctgaaactttcattca

SEQ ID NO: 676288 - DNA, 1145 bp, Homo sapiens
tagtttatcaagagtttttatcacagatatgtattgaattttatccagttgttttttacatcaatttgttgatactctggtgtattttaataaactttgtgattttaagcaaattatgcatttctgagaccaatctagcatgtaatgttttaattcactgttgaatttggtttcaaaatattttatttatgattttttcttttaataagataaatttgtaatttttcacctcttgatctgtcctttaccaattttaaaatcaagctaaaattagcatcataaaaagttgagtaggtttcttcctctttctctattcataaacaaattgtacacacacamaaaaaaaaactatggtgtattttctccctgatagtctggtaaagttcatttgtaaaaaaacaagatttggtgtctttctaaaagagatacaacttatgtaatttatatatcagtaagtttactttttaatggtaattggtgtatctatatattttctttcatttcgtctgattatagtcatagttttaaataattatctatttcatctaaattgttatatttactgcaataaagttgttcctaaaaatcttttcctgtcacaaatatttttgttcctaatatttttatttttgctttttctccattaattttaccagaggtttttctgtttcagtagtcttttaaatagttacctttgatttctttaaccctttaatttttttttttgtaatatttgctcttatgtttattatatctttgcttctactttctttggacttactctattgtcttcattaatttattgagttaaaagcctatttaatttttaaactttagtatttcctaatgtgtgccttaaaagttacaaattcccatctaaataacactttaattttacctgacttttttattggtaatgatattcttatttagttttaaatattttcttatttacattacgtcttcttctgtgttccatgaattacaaaacatagcattcttctgttttagtgtctaagcagatgatcaaattgggagagattatttcactaatctctgaatttcttgcaataggtttagagattgtggtctattggatatacaaatcaaatagtatcgaaaatattggctgaaactttcattca

SEQ ID NO: 676289 - DNA, 1145 bp, Homo sapiens
tagtttatcaagagtttttatcacagatatgtattgaattttatccagttgttttttacatcaatttgttgatactctggtgtattttaataaactttgtgattttaagcaaattatgcatttctgagaccaatctagcatgtaatgttttaattcactgttgaatttggtttcaaaatattttatttatgattttttcttttaataagataaatttgtaatttttcacctcttgatctgtcctttaccaattttaaaatcaagctaaaattagcatcataaaaagttgagtaggtttcttcctctttctctattcataaacaaattgtacacacacacaaaaaaaaactatggtgtattttctccctgatagtctggtaaagttcatttgtaaraaaacaagatttggtgtctttctaaaagagatacaacttatgtaatttatatatcagtaagtttactttttaatggtaattggtgtatctatatattttctttcatttcgtctgattatagtcatagttttaaataattatctatttcatctaaattgttatatttactgcaataaagttgttcctaaaaatcttttcctgtcacaaatatttttgttcctaatatttttatttttgctttttctccattaattttaccagaggtttttctgtttcagtagtcttttaaatagttacctttgatttctttaaccctttaatttttttttttgtaatatttgctcttatgtttattatatctttgcttctactttctttggacttactctattgtcttcattaatttattgagttaaaagcctatttaatttttaaactttagtatttcctaatgtgtgccttaaaagttacaaattcccatctaaataacactttaattttacctgacttttttattggtaatgatattcttatttagttttaaatattttcttatttacattacgtcttcttctgtgttccatgaattacaaaacatagcattcttctgttttagtgtctaagcagatgatcaaattgggagagattatttcactaatctctgaatttcttgcaataggtttagagattgtggtctattggatatacaaatcaaatagtatcgaaaatattggctgaaactttcattca

SEQ ID NO: 676290 - DNA, 635 bp, Homo sapiens
ttaacaataatgatactacaggcattacgctccctatgcagatttatgcaaattgctgtaaatttccaaggacccctaggccatggcctcaaagcattcctgctgtgggcaagcaaggttttgaataataatggaaaatgtgactgcattacacaatgtcagcccagtaaaggtgacttcttaaaaccaccctctcccaggtatttcctgccaggcagtcacatttgatgtcatccaagcctmacagcatatctccaaggaaggtattatttcctttttttaaattatgggaagtgaggcccagaggagtaagtgccttgaccaaggccacacagctggaaaacaaagttgccctctctcccttgagtgtgaatttctccaagccaacttgatcttcatttcaatctctatccatagtacccagtgaagtgttcttgctacaatagaaatttgttaattaattcattcaataaatatgtattatctatcacatgccagataaatcacaatttatgaaaaaaatccaacacacaaacacattcgtatctaagaactcgtattacaatgttatttttaataatgaaaaagaaaactgtctaactgtgcaacaatagagaatttgtgaaatataccat

SEQ ID NO: 676291 - DNA, 635 bp, Homo sapiens
ttaacaataatgatactacaggcattacgctccctatgcagatttatgcaaattgctgtaaatttccaaggacccctaggccatggcctcaaagcattcctgctgtgggcaagcaaggttttgaataataatggaaaatgtgactgcattacacaatgtcagcccagtaaaggtgacttcttaaaaccaccctctcccaggtatttcctgccaggcagtcacatttgatgtcatccaagcctaacagcatatctccaaggaaggtattatttcctttttttaaattatgggaagtgaggcccagaggagtaagtgccttgaccaaggccacacagctggaaaacaaagttgccctctctcccttgagtgtgaatttctccaagccaacttgatcttcatttcaatctctatccatagtacccagtgaagtgttcttgctacaatagaaatttgttaattaattcattcaataaatatgtattatctatcacatgccagataaatcacaatttatgaaaaaaatccaacacacaaacacattcgtatctaagaactcrtattacaatgttatttttaataatgaaaaagaaaactgtctaactgtgcaacaatagagaatttgtgaaatataccat

SEQ ID NO: 676292 - DNA, 609 bp, Homo sapiens
ggcctggggacaactcttttccactcttttaactttccacctcatgtctcttcataaacagatttcagtgcaagagccatggaacacgaaacaaaacagctcagacactggcctcccttaaaagtttgcaaagtgcaaggccatggagcatgaaacaaaacagctcactggccagacactggcctcccttcaaggtttgcagaattctgtgaaggccagatagtaaatagttgattaattcctttgtaacaaggtcaacacccacctattttgtacacttgttgggaagactaagcgaaaacacacatagaagtacctggcataaggccaagcayggtggctcatgcctgtaatcccagcactttgagaggccaagaagggtggatcacctgaggtcaggagttccagaccagcctggccaacatggcgaaaccccgtctctactaaaaatacaaaaattagccaggcgtggtagtgcatgcctgtaatcccagctacttgggaagctgtggcaggagaatcacttgaacccaaaaggcagaggtcgcagtgagccgagatcacgccactccaacctgggtaacagagcaagactcttctcaaaaataa

SEQ ID NO: 676293 - DNA, 615 bp, Homo sapiens
tgaactgattggcagaaggtgctggccaagtgctggaaaacctgtttttctcctattggttggcagaaggtgctggccaagtgctggaaaacctgtttttctcctattggtttataatccttataatcttacagatgacatcactttgagattaatttctttgtaaaggacaaagatgaacttattccttcctgactgtactgtggaaagtaagatcagggtggggcacagtggctcacgcctgtaatcccagcactttgggaggccaagcaggcagatcacttgargtcaggggttcgaaaccagcccggccaacatggtgaaaccccgcctctactaaaaatacaaaaatgtgccaagcgtggtggcacgcacctgtgatcctagctacttgggaggctgaggcaggagaatcgcttgatcgcttgaacctaggaggcggaggctgcagtgaaccgaaatcacaccactgcactccagcccaggcgacagagcaaaactctgtctgaaaaaaaaaaatttaataaacatacgtgtgtgtgtgtctttatagtagaatgatttataatccttggggtacatacccagttatgggattgctgggtcaaatagtat

SEQ ID NO: 676294 - DNA, 1706 bp, Homo sapiens
tctcgctggaattaatctgctaggttcctgtcctgttgctcaatcagcaggagaatctttggccaatgcttaggcaaaccgaatgaacagtggccatgctcttttgaaaccaataatactcacgaagtgggtgttccttaattactaagckttatcttacagaacctggctagtggagtttccaaaaggaaaaatcccaagcatttgcttttgtatgttttcttatgttcttatatgtgattttagacacacagaaagtataccaaatgtaatcattacttctgtatgcataactcatcttaaggaatgaaatattacaagtatcatttaagtgtcctgttcatatcccacccaattcttttgtctttcctcacagagatagctcttgttctgtattcagtttatattaattcccaaacatctttctgcttttactatatattatatataactaaataatgtatatttctacatattttatcctttgtgtaaatggtaacacactgcaacatttaaggtgtttccaattttactatatttctcaagaagcttgatttttataacatctctttcatcgttttaggcaaccttccccttcctttttaaagggcacagcattagaaaacaaatggtgaattgccccctaagcctatgccaagtttataaagaacataactgatcttttggccagtgtaagaaactcttctggccgggtgtggtgactcacacctgtaatcccagcactttgggaggccgaggcaggtggatgacctgaggtcaggagttcgagaccagcctgaccatcatggtgaaactccaactctaccgaaaacacaaaaaattagcagggtatggtggcaggtgtctgtaatcccagctacccgggaggctggggcaggagaactgcttgaacccaggaggttgcagtgagccgagatcgggccattgcactccaggatcggtgacaagagcaagactccatctcaaaataaataaataagaataaactctttctttcggtatctatttggtttccctacaagttggaataattcatctcaatgctagtagtacctctctgaaggtgcatggggctgacttaagtattgctcacacaatgatggttgtctcattttattaattctgtgtattttatggtaggcctaaatgatagttgtgatgggaccttattgagaattttggtggtactggaaaactgcttgcacatggactatggccctataaataggcgatgaaatactattaaattaattaaataacataatctagtaagaaatgaaggaacagcaagaatgcctggctgctttggtggtcaccaacatagtttatattatagacaatgcatcatctggggcctgcccacagccacggtaaggaggtgaaatgagtatagagaatccaattttttttttttctcataaaaacttaagtgttagatcattgtggaagggcttgatttgatatgacagggatttttgataaaccgcattggtgacatgaatacagtaagccagaccagattgcttttgattttaatgttagattcatttttctcagcttcgtaatgtaagaaaaactgaattgaactttaaatatgcttatacttttctaatttaggataggaaatttcctcgattatataacacggctagttaaaaaccaaaaccctaaaacttttgtgtcac

SEQ ID NO: 676295 - DNA, 1706 bp, Homo sapiens
tctcgctggaattaatctgctaggttcctgtcctgttgctcaatcagcaggagaatctttggccaatgcttaggcaaaccgaatgaacagtggccatgctcttttgaaaccaataatactcacgaagtgggtgttccttaattactaagcgttatcttacagaacctggctagtggagtttccaaaaggaaaaatcccaagcatttgcttttgtatgttttcttatgttcttatatgtkattttagacacacagaaagtataccaaatgtaatcattacttctgtatgcataactcatcttaaggaatgaaatattacaagtatcatttaagtgtcctgttcatatcccacccaattcttttgtctttcctcacagagatagctcttgttctgtattcagtttatattaattcccaaacatctttctgcttttactatatattatatataactaaataatgtatatttctacatattttatcctttgtgtaaatggtaacacactgcaacatttaaggtgtttccaattttactatatttctcaagaagcttgatttttataacatctctttcatcgttttaggcaaccttccccttcctttttaaagggcacagcattagaaaacaaatggtgaattgccccctaagcctatgccaagtttataaagaacataactgatcttttggccagtgtaagaaactcttctggccgggtgtggtgactcacacctgtaatcccagcactttgggaggccgaggcaggtggatgacctgaggtcaggagttcgagaccagcctgaccatcatggtgaaactccaactctaccgaaaacacaaaaaattagcagggtatggtggcaggtgtctgtaatcccagctacccgggaggctggggcaggagaactgcttgaacccaggaggttgcagtgagccgagatcgggccattgcactccaggatcggtgacaagagcaagactccatctcaaaataaataaataagaataaactctttctttcggtatctatttggtttccctacaagttggaataattcatctcaatgctagtagtacctctctgaaggtgcatggggctgacttaagtattgctcacacaatgatggttgtctcattttattaattctgtgtattttatggtaggcctaaatgatagttgtgatgggaccttattgagaattttggtggtactggaaaactgcttgcacatggactatggccctataaataggcgatgaaatactattaaattaattaaataacataatctagtaagaaatgaaggaacagcaagaatgcctggctgctttggtggtcaccaacatagtttatattatagacaatgcatcatctggggcctgcccacagccacggtaaggaggtgaaatgagtatagagaatccaattttttttttttctcataaaaacttaagtgttagatcattgtggaagggcttgatttgatatgacagggatttttgataaaccgcattggtgacatgaatacagtaagccagaccagattgcttttgattttaatgttagattcatttttctcagcttcgtaatgtaagaaaaactgaattgaactttaaatatgcttatacttttctaatttaggataggaaatttcctcgattatataacacggctagttaaaaaccaaaaccctaaaacttttgtgtcac

SEQ ID NO: 676296 - DNA, 642 bp, Homo sapiens
atgcaaaacatacacagttaaattatatatgtgtgtataaaattcttactgtgtgtatatgtgtgtgtgtgtgtgtgtatgtgtgtgtgttccagcatcaccattgtgctgggtttgaatctcaattctcccacatattatctgttcaaatttagacattttatttgagccttctgtgttacaggtttcctttyttcaaaacaggaaaaataatactatatttaaatcaatcaatatatttagagtacttgaaataatatctgtcataaagatagtgttcatgaaatgctaattttctcggttagtattgtattaaaatattacctgtataaaggcaaaacacaaagtaacacagtgatgaatacaatggaattcatgtgtatgtcctattgatatcttcagatataagttgaagcatttgtcagttcaatttccttatttcccaaatacccaagaagagagacacttagtcatctgtttagttcctggtccccaattaaccaagaacagacaagctgaaaatttcacctgcttttcttcaggttttaccagaaagttgacaaatgtaatcttgaggaaatacagatatgttaaaccaaaaaggcccttggcttgcttttaatttcagaattttacatttaa

SEQ ID NO: 676297 - DNA, 1836 bp, Homo sapiens
tgcaattaattccatgggcacttaatttcattcccctcactgaaggaaggggttgtctgagaccaccaagctctaatgtcttaccaatctgttgctttctcattttgttcaacttttttcttggaaagaaaaacattgaacatatcaagatgaatcagccaaatattgtactgtgtgtgtgttttgggggtggggggagacagagttgargtggcagaggcaatgtaggaggaaaagacaggctgactaaaatacataaatagtacgtgaattctttcgggccagggatctgggcctactttgcctgcatcatattaccagcatctcaattgtgtctggcacatagtaagtttcagtaaacatttgttgcactaagtgaaagaatgaacttttcacttttttcagagatgtgatttgtgattctcggaatcaaccagggtcctaagatgtcctggaggccgtctccatttctctcggtgagctaaggtgtccgagtggcaccagttctccactctttctgcgacctgcagggagtgggatacgctgtggctttagggagctgggaaaggcgctctctcccggtcccgctctgcccggtcccacgcccctcggccgtccggctgcctgggtcttccgggttcttccgcccctctggctcggtccccgctacctctcctccctcctcccctctcggtaccttcgcccgccgcgcgcctttctcaaatcctccggttattaagcaagctcaggggtccggtggcctgccctggtaactctgcgcccgccccttcctgcccccttcctgccctcacgccccgtcccctcctcttgacgtggcagaggcggcgccagccatgttggccgggcggaggtcttcgctgaggcccggggcggggtggcgccacccctgattgcggtgccacggactgctcctgctgggcggagaggacagattttgcaaagcggaggctgcgacgggtcctgcagggggacagtgaggaaagggccgcctcgtctccgctcctgggggaccgcaggtgcgcagcggggagcgggggcgggctggcggcggcgggctgggggctgggatcctggggtggtcccggctctgccctctcggtgccccggggccagcgaggtgtgctggaggctgaggcccggtccggcgcggggagcgttgagtgctgagcttgccaccctctcacccacttcgctctgccggggccgggggcccggcctcctccagctcccctggattaggtggaaagatgtggaaaacggtggttcgagcatctcgcccagcacccacccccacctcctgggccacccacctccacccaagtccatcatcgcctctgggcccttggacttactgtttcattccttgccagatatggagtgtcctagactttgaacccaattgactacgtcaccgtaattcagccttggaagttaaaggggttaaaggggaaaagagcttggtaaagataatgccttgggttttgattacaaagagttcagttttccagcaggaccagccctatctcactgggctttctttctacggtaggtagtgtttcccgatttggtggtaaaggtactgcctgaggaaggtcatagtaaatctacatcaatcactgaagtggggatgtggaattctcgttttcacttgaactccctcaacctctaccgtccaaagccatggataactagccaaattaacttggtttaaaaaggttttagatttaaatataaatgcatgttgagttttccttctctttctcctctggtagtgaatgaacatcatttcagaagtccagctattttttttttttc

SEQ ID NO: 676298 - DNA, 592 bp, Homo sapiens
cagataagatctgttaattaataaagtctaaagttatctgtacagagtagaaaaccctaattcttaacattagtatactagtcatgtcaatcagcatgtccacatcctcctgcttgcatctctctgctggactaaggagccagcctccgtctcttccttaagcaaaggggtgggatcaagtttcctaagggcacctaatccatagactggttgctgaacctatgaaatgacttgataggaaaaagtttccttagtaagaataatgataattaagtagactaattatactctcttccagcctccccaactaatggtaaagactctagcagactgatttcgggtcacttttatctaatagacttaaaggtcactataagccrtagacaaaaccctgtttaacaatggctaggtcctgtgctaggtggaaacatgcaccacctcatctacttttctccgtggtaatctgtctttttttttaaatatattttttaaattttattattattatactttaagttttagggtacatgtgcacaacgtgtaggtttgttacatatgtatacatgtgccatgttggtgtgctgcacccatt

SEQ ID NO: 676299 - DNA, 644 bp, Homo sapiens
tccacttggttttctcctaactggactgcatttgttttcatagtagtaaaatgttatgtgtattacaccttgcataagtcctcattctactacgtgttaactaaccctctagatgataatgcagatgctaactgtgggattttatttrtaagaactctagaataaataccagttattcctaccaacatcggctgttactaatattctgaagtagttagtgcaacttttcattgtgttgtggttggtctcctaagtaggttggatttttctcctcttctaagagaaaacaatagtgaaattattttctttctcttttctctctgtttctgtctctttctctctctctttctcccttcccttcccttccctcccctcccctcccctcttcttttcttttctttctcttctcttctcttttctttctttcatggggtcccttgctcaacctgttgcccaggctggagtgcaatgacatgatcatggctcagtgcagcctcaacttcctggactcaagcaatccacctgcatcagcctccaaaatggcacatgctaccatgcccagctattttatttttacttttagtacagatgtggtcttgctatgttgcccaggctggtcttgagccattgagctcaagtgatcc

SEQ ID NO: 676300 - DNA, 689 bp, Homo sapiens
ttttatgacacaaggcaggcaggaagacagccacctcgatgggatccacatagtgtgcagtcaccaccagctgagccttcttgttctcctccaaggtggagatggtgttaactcctgctcggaggacaagtggtctcttagtggggacatcccctttgcctgcagctttcttttcagcccgggccaatagcctctgcttattttcttgctttgtctttggtctgtacttgtgggccagcttaagcagctaagtagctatttggcggtgcagggcctgggtgaactggttaattgtaggaggcactttcagytgcttacagaggatggctttgtgccactgcaacctgatatagcggggccatttcacaaagtgagtgaggtccatattgggtggatgtcctgtccaatgccagaattcttaggccttttctcaaacaggggattcaccactttctttctttcttttttttttttttttttttgagatggagtcttgctgtgttgcccaggctagagtgcaatggtgcgatctcggctcaccacaacctccgcctcctgggttcaagccattctgcctcaggctcccaggtagctgggactacaggcatgtgccaccactccggctaatttttgtatttttagtagaggtggggtttcaccatgctggccaggctggtctcgaactcctg

SEQ ID NO: 676301 - DNA, 689 bp, Homo sapiens
ttttatgacacaaggcaggcaggaagacagccacctcgatgggatccacatagtgtgcagtcaccaccagctgagccttcttgttctcctccaaggtggagatggtgttaactcctgctcggaggacaagtggtctcttagtggggacatcccctttgcctgcagctttcttttcagcccgggccaatagcctctgcttattttcttgctttgtctttggtctgtacttgtgggccagcttaagcagctaagtagctatttggcggtgcagggcctgggtgaactggttaattgtaggaggcactttcagctgcttacagaggatggctttgtgccactgcaacctgatatagcggggccatttcacaaagtgagtgaggtccatattgggtggatgtcctgtccaatgccagaattcttaggccttttctcaaacaggggattcaccactttctttctttctttyttttttttttttttttgagatggagtcttgctgtgttgcccaggctagagtgcaatggtgcgatctcggctcaccacaacctccgcctcctgggttcaagccattctgcctcaggctcccaggtagctgggactacaggcatgtgccaccactccggctaatttttgtatttttagtagaggtggggtttcaccatgctggccaggctggtctcgaactcctg

SEQ ID NO: 676302 - DNA, 661 bp, Homo sapiens
ctttatattttgctaccataatgaaataatagaaaatgtaattacagaattcagatttattttttatactgcatctttactacaaagaaagaaacatgatcagagctgcacggacaatgaggtgttttaacctaaacagtttatttaggaatatattgtgcctgtatttactaacatgtgtgcagaatacatatatatgattatatatgcagaatacatatatatgattatatatgcagaatacatatatatgattatatatgcagaatacatatatattcatataaatattatttttataacaacaaaatcccagaaaggtgtactttttcagttaagatactttaccagctaagattacgcttatggtagatgtgcactgttagaatggatggattcatgctagaagacagaaatggaatgtttttcaagacgttaaagaaacagrgcacaggccgggcgtggtggctgacgcctgtaatcccagcactttgggaggccgagacgggcggatcacgaggtcaggagatcgagaccatcctggctaacacagtgaaaccccgtctctactaaaagtacaaaaaaattagccgggcgtagtggcgggcgcctgtattcccagctactcgggaggctgaggcaggagaatggcgtgaacccg

SEQ ID NO: 676303 - DNA, 1244 bp, Homo sapiens
gagagacagagtcttgctgtgttggctaggcaggtctcaaactcctggctccagtgatcctccagcatcagcctcccaaagcactgggattacaggcatgagctatgcctggcctctgttttgttcttgcaggctaaattattttcccctgttctgtttagattattcttaatttaaaatatcatatttaattttccattttaaagcatctgctaccatctatccttattttctcccttttcttgttcatattttttctctgtctctggctttgttttgtgcattcttgctcatagtgctctgccccattaggttaccgaaaataaaatgtactggaattctaatctctaaaatcctggccatcacaactaggattctttggagtttgctttcaacttctgtgcaaggatggacaattcattcatcagtcacagttgtgccattgtggcatttggaggtggtgtacagagccctgctgttttttttttattctctgaggttttgctaaatgataatgggtgggtcaaggaaaaacctgattaagcactcactaaagaaaaaaaaatgtgagtgactgagtgtgtgggcatgaacatgtatgtgtgttttcctgtgtgtgtatggtggggggtatcttcgagaatgtagagagatgaattctccctaaagaatgtataggtatttgatatgaagtactcctcagcatcctctggaatcaaagtgaactttctctcagattaaaatgatgattcagagtggttatggggctggcattttaagaattagagaggagaaaggaataaaagaaggagtgtcttcaaagaattatataaactaaactaaagcttatttaatctctttcrtctcacactgacatatccttcttccttgtgatttccttgattggtttgtctctaagggaaaatgaagaggattcttttagagcttcctatctcataataaagaaagatttcacaggttcctgtttcagaggatggggatacatccttttatcttaaaagagaacaatgttagttcctagagtttctatcattttgaaatagagtttttttttttttttttttttttttttttgcccttgtgctgctgtgactttcaggaaacttttcactggtgatatcagaggcactttgaagaaatgatccttgctaatccatttgattagtgtgcaatactgcagctattgatgggcataaggtattaataataatcaatttctatat

SEQ ID NO: 676304 - DNA, 1593 bp, Homo sapiens
ctaaaacggataatatattattaccaagtagagcttatcttaggaatgcaagcttagttcaaggtcttcttcaaaccaatcaatgaaactcacacatcaaggagaaaaagagaaaactatgatagttatattcaatatatgcagaaaaagcatttgacaaaataaaacatcaattcatgattagaaaccttcactaaaggaagaatagaatagaaagaaaatgctttaatttcataaagggcatctatgagaaacttacagataatgttatgctctttattgttatgtagtttttatttcatagttataaacttaactctgcaatccagctaggcatagaaagggaataaggaaaagagagaacacaaagggaactgcaatgagagtacaaagattataggatactgaagcatrtggggtggaggggtgctctcctgagctacagaaggattggtctggtggttaagttaaaacacaagtcaagcttattagagttgcccacagtcagcaatgataatcttcttgttggtcttgccattcctggacccagagcggtccatggcctccacaatattcatgccttctttcaccttgccaaagaccacatgcttgccatccaaccactcagtcttggcagtgcagatgaaaaactgagaaccgtttgagttgggtctagcatttgctatggacaagatgccaggacctgtatgcttcagaatgaagttctcatcatcaaatttctccccgtagatgaacttgccatcagtgccattatggcatgggaagtcaccaccctgacacataaactctgaaataattctgtgaaagcaggaacccttataaccaaatcctttctctacagtgctcagagcatgaaagttttcgttgtttttggaaatttgtctgcaaacagcttgaaaaagatgaggcccaaggactggctgttgatggcgatgtcaaagaacacagtggaattgaccatggtgggtagtactgggctcccggtggtggtggtgtctgcaaagctaacattatacttattgatgaaatattgaatgtaaactgggcacagtggctaatacttgtaaactcaacactttgggaggccaacacaggaggatcccttaaggccagggattcaagaccagcctgggcaacatgcggagactcctatctctacaaaaaaatgcaaaaattagctaagtgtggtgacatatgcctgtagtccaagctactcaggaggctgaggcaggaggatcacttgagcctaggagtttgatgttacaatgagatatgactgtgccactacactccagcctgggcaacagagcaagatcctgtcttaagaaataatgataataaagaaatattaaattctttcactgtaagtcttgaaacaatgcaagaaagtttgtgtttattacttattattttacactgcactggagacactagccaataacatatggcaagaaaaagaaataaaatacatgtgattgcaaagggagaaatgaaactgtatttacttggagacaacatgatttgttaccttaaaaaaacttgtttataaaaacctacaaagtctatgtgaat

SEQ ID NO: 676305 - DNA, 629 bp, Homo sapiens
agaacggccaccacggtgacacctttggtaagatttgagtgtagttcttagtagctgcgttttctggggctcattgcaatgtttggacttggattctttagcagcaaaagataatacccttgaggcaggggaatagggtctggaggcagggaaactaaggacttcctagaactaaatcccaaccttcttcacccacgtaagtaattttgtaactttaccttaactatggcagaaaacatcctcttcatttgcatagggtgtacastgagtaaataactttgtaacttcatttcctcttcatttatatagggtgtgcactaagtgaccaatgggaaacctctagaggctatttaagccctggaaaattctgtaaccagcactcttgatccgcttgcttgggctgctcctacactgtgaagtgtgcttttgttttcaataaatctctgcttttgttgtttcattctttccttgctttgtttgtgcattttgtccaattctttgttcaaaatgccaagaaccttgacaccctccaccagtaacaccctggagaggggcaaagagaagtttttttttgttttgttttaaaaaaacttcatattcctttaatagacatgaaaaaaagtcactga

SEQ ID NO: 676306 - DNA, 584 bp, Homo sapiens
tgcctaacttgtcagattaaatggattaatatgtgtaacactatgtgcaaatactaaaagtacaatgttacatgagatatcataggcagacaatgagaagtttcagaaaacattcattaatatgcatatgtatacactttgtatgcttacgtagaaaatgagtggttttaaaaggacattcattagcatacttttatatgcattttgtagacttgtacagtcagaaatgcagcaaatgtaaaactttaaatctagaagtctgtttccctctaggaacatatatttcaattccttaactatttattgactgatagcgtttgagccacaaggcaaggcatttgcaatatttaggttttggaacccagctctgccactcactagctgggaaatctacaagtcaccttagttgtctgaatgacacttctctcaacaataaaatggccagcaatgcttacttacttcacagagcagtaaggttaaattaacctagcacatgcttgatacagactaggtgtgaaatttcactttgattcctttggctttaaagaatgcataaattagtgtgkgtggaggcgggagaaggg

SEQ ID NO: 676307 - DNA, 1152 bp, Homo sapiens
tgcccagaggatgcagcgcatctgaggcaaatgggaggttaacgaattccccacataacgagtcaccagtgaagttggctttgcttttccattacacagtaaagcctggaaaacttcctcagscttccccagatttatgatcatagactcactgagttggaaggaaccttagagattaacctgcccaactgtctcatttcagagataagtgactcgctcttgactcctactcgtttctcttgtccttgtctagtttgaaatcatagttgtgctagtaaggcaatgttgaaaagtgaaaggtttgtgttgctggttttattgtattcttacgtctccagatttatttctcctagatccagccagattgtctttagacccttaggctactggcccttgctaacttttataaactgagataaatggaatgcaagtctttgaaattacaatgattttgcttctgcagcagtgtgaatgtctgttgaatttagggggagtggcagatccaagcagaagggcgtagcaaatgttaatgaaaatggtggtgtttgaccaaatacaacccaccagaggataaaatcacaggctataatttcagtagacggtggagttttgtgtggtcggtaacgtcactggaaacccaagaaagaacttattttgcgcaatttggcccatgttgttgtttattttgattacaccaagctcaagggctcttttgacattaaaaatgcttatttcagctaaagtccagattagggttacaatttcccttttaaaaatttcttttcctttttctgggattgcactgtggtctcctacacacttctttctactttcctgtgatttctttctagccagaaaattattagcatttccacatagatatataacaaatgctgtaatatcagtgctgccttcgtggtgtgatgcacaagaagaatcatggagttttttgttgttgttgttgttgttgttgttgttgttgttgtttttgagaccgggtctggctctgtcacccaggctggagtgcagtagtgtgatcttggctcactgcaactctgcctcctgggctgaagcgatcttcccatctcagtctcccaggtagctggggcttagtgggcaccaccatgccccgctaatttttttttttttttt

SEQ ID NO: 676308 - DNA, 1152 bp, Homo sapiens
tgcccagaggatgcagcgcatctgaggcaaatgggaggttaacgaattccccacataacgagtcaccagtgaagttggctttgcttttccattacacagtaaagcctggaaaacttcctcaggcttccccagatttaygatcatagactcactgagttggaaggaaccttagagattaacctgcccaactgtctcatttcagagataagtgactcgctcttgactcctactcgtttctcttgtccttgtctagtttgaaatcatagttgtgctagtaaggcaatgttgaaaagtgaaaggtttgtgttgctggttttattgtattcttacgtctccagatttatttctcctagatccagccagattgtctttagacccttaggctactggcccttgctaacttttataaactgagataaatggaatgcaagtctttgaaattacaatgattttgcttctgcagcagtgtgaatgtctgttgaatttagggggagtggcagatccaagcagaagggcgtagcaaatgttaatgaaaatggtggtgtttgaccaaatacaacccaccagaggataaaatcacaggctataatttcagtagacggtggagttttgtgtggtcggtaacgtcactggaaacccaagaaagaacttattttgcgcaatttggcccatgttgttgtttattttgattacaccaagctcaagggctcttttgacattaaaaatgcttatttcagctaaagtccagattagggttacaatttcccttttaaaaatttcttttcctttttctgggattgcactgtggtctcctacacacttctttctactttcctgtgatttctttctagccagaaaattattagcatttccacatagatatataacaaatgctgtaatatcagtgctgccttcgtggtgtgatgcacaagaagaatcatggagttttttgttgttgttgttgttgttgttgttgttgttgttgtttttgagaccgggtctggctctgtcacccaggctggagtgcagtagtgtgatcttggctcactgcaactctgcctcctgggctgaagcgatcttcccatctcagtctcccaggtagctggggcttagtgggcaccaccatgccccgctaatttttttttttttttt

SEQ ID NO: 676309 - DNA, 1152 bp, Homo sapiens
tgcccagaggatgcagcgcatctgaggcaaatgggaggttaacgaattccccacataacgagtcaccagtgaagttggctttgcttttccattacacagtaaagcctggaaaacttcctcaggcttccccagatttatgatcatagactcactgagttggaaggaaccttagagattaacctgcccaactgtctcatttcagagataagtgactcgctcttgactcctactcgtttctcttgtccttgtctagtttgaaatcatagttgtgctagtaaggcaatgttgaaaagtgaaaggtttgtgttgctggttttattgtattcttacgtctccagatttatttctcctagatccagccagattgtctttagacccttaggctactggcccttgctaacttttataaactgagataaatggaatgcaagtctttgaaattacaatgattttgcttctgcagcagtgtgaatgtctgttgaatttagggggagtggcagatccaagcagaagggcgtagcaaatgttaatgaaaatggtggtgtttgaccaaatacaacccaccagaggataaaatcacaggctataatttcagtagacggtggagttttgtgtggtcggtaacgtcactggaaacccaagaaagaacttattttgygcaatttggcccatgttgttgtttattttgattacaccaagctcaagggctcttttgacattaaaaatgcttatttcagctaaagtccagattagggttacaatttcccttttaaaaatttcttttcctttttctgggattgcactgtggtctcctacacacttctttctactttcctgtgatttctttctagccagaaaattattagcatttccacatagatatataacaaatgctgtaatatcagtgctgccttcgtggtgtgatgcacaagaagaatcatggagttttttgttgttgttgttgttgttgttgttgttgttgttgtttttgagaccgggtctggctctgtcacccaggctggagtgcagtagtgtgatcttggctcactgcaactctgcctcctgggctgaagcgatcttcccatctcagtctcccaggtagctggggcttagtgggcaccaccatgccccgctaatttttttttttttttt

SEQ ID NO: 676310 - DNA, 1152 bp, Homo sapiens
tgcccagaggatgcagcgcatctgaggcaaatgggaggttaacgaattccccacataacgagtcaccagtgaagttggctttgcttttccattacacagtaaagcctggaaaacttcctcaggcttccccagatttatgatcatagactcactgagttggaaggaaccttagagattaacctgcccaactgtctcatttcagagataagtgactcgctcttgactcctactcgtttctcttgtccttgtctagtttgaaatcatagttgtgctagtaaggcaatgttgaaaagtgaaaggtttgtgttgctggttttattgtattcttacgtctccagatttatttctcctagatccagccagattgtctttagacccttaggctactggcccttgctaacttttataaactgagataaatggaatgcaagtctttgaaattacaatgattttgcttctgcagcagtgtgaatgtctgttgaatttagggggagtggcagatccaagcagaagggcgtagcaaatgttaatgaaaatggtggtgtttgaccaaatacaacccaccagaggataaaatcacaggctataatttcagtagacggtggagttttgtgtggtcggtaacgtcactggaaacccaagaaagaacttattttgcgcaatttggcccatgttgttgtttattttgattacaccaagctcaagggctcttttgacattaaaaatgcttatttcagctaaagtccagattagggttacaatttcccttttaaaaatttcttttcctttttctgggattgcactgtggtctcctacacacttctttctactttcctgtgatttctttctagccagaaaattattagcatttccacatagatatataacaaatgctgtaatatcagtgctgccttcgtggtgtgatgcacaagaagaatcatggagttttttgttgttgttgttgttgttgttgttgttgttgttgtttttgagaccgggtctggctctgtcacccaggctggagtgcagtagtgtgatcttggctcactgcaactctgcctcctgggctgaagcgatcttcccatctcagtctcccaggtagctggggcttagtgggcaccaccatgcccsgctaatttttttttttttttt

SEQ ID NO: 676311 - DNA, 1286 bp, Homo sapiens
gatagttttgcaaaacctgctgctgtggaaccaagagtttctttctggtgagcactccaggatctccttgggccccacactttcatcttagagaaaagtcttagcgttcaactctggactgatcactagtactttttcagctctacgatgatccaggcccagaatattcagttctttgccctctgcttgagtgtttatttatttatttaatttaatttttttgcgactgagtttcactcttgttgtccaggctagagtgcaatggcacgatctcagctcactgcaaactctgcctaccgggttcaagtgattctcttgcctcagcctctggagtagctgggattacaggcacgygccaccatgcctggctaatttttgtagttttagtagagacggggtttcaccgtgttggtcaggctggtcttgaactcctaacctcaagtgatccacccgcctcagcctcccaaagtgctgggattacaggtgtgagccaccgtgcctggcctggttgagtgtttaactctccaaggagaatcaacaggtggagacctgtggtggtggaactgggcatgaccccagagtaactcaggtttgattcacagtcctactgcccatcaagataggtaatgttggccaatttttccactgtaggcaatgatattctttcccacctttcccactctgcatcccacttttatggcattattggcactctcaaaacagatctgaatcattgcataggctgttattgatacaatggctatttccctcatagccacttgcctcactccttacctagtctccaaatgccaattcaaatgttgccttattcatggtaggtgttcaacatatatttccatttaggagacatttgccacttttcttggctgcccagagtcttaattctctcattccttctttatgttattaatcttaatagaagctaaagctatgtactactagagaagctgaaaagatagaacaatctcttttccagtgtatcttgcatctagtttttgctggccacgtgaatgcacttggactttattcgaagctagggaggaactgagaatactgaaaatgacttgttgatggttgtaatcttcttcatttctgcaactgattgcaagggcatagttatattatgaccatcattccactgctaaatttacattccctttgctctcatttagtacctcagttggtcatggttttttatctgagtgtgagaccctaaccttcatccctagagggtttaaagcttcagtagatctgaatgtattggg

SEQ ID NO: 676312 - DNA, 1286 bp, Homo sapiens
gatagttttgcaaaacctgctgctgtggaaccaagagtttctttctggtgagcactccaggatctccttgggccccacactttcatcttagagaaaagtcttagcgttcaactctggactgatcactagtactttttcagctctacgatgatccaggcccagaatattcagttctttgccctctgcttgagtgtttatttatttatttaatttaatttttttgcgactgagtttcactcttgttgtccaggctagagtgcaatggcacgatctcagctcactgcaaactctgcctaccgggttcaagtgattctcttgcctcagcctctggagtagctgggattacaggcacgcgccaccatgcctggctaattttygtagttttagtagagacggggtttcaccgtgttggtcaggctggtcttgaactcctaacctcaagtgatccacccgcctcagcctcccaaagtgctgggattacaggtgtgagccaccgtgcctggcctggttgagtgtttaactctccaaggagaatcaacaggtggagacctgtggtggtggaactgggcatgaccccagagtaactcaggtttgattcacagtcctactgcccatcaagataggtaatgttggccaatttttccactgtaggcaatgatattctttcccacctttcccactctgcatcccacttttatggcattattggcactctcaaaacagatctgaatcattgcataggctgttattgatacaatggctatttccctcatagccacttgcctcactccttacctagtctccaaatgccaattcaaatgttgccttattcatggtaggtgttcaacatatatttccatttaggagacatttgccacttttcttggctgcccagagtcttaattctctcattccttctttatgttattaatcttaatagaagctaaagctatgtactactagagaagctgaaaagatagaacaatctcttttccagtgtatcttgcatctagtttttgctggccacgtgaatgcacttggactttattcgaagctagggaggaactgagaatactgaaaatgacttgttgatggttgtaatcttcttcatttctgcaactgattgcaagggcatagttatattatgaccatcattccactgctaaatttacattccctttgctctcatttagtacctcagttggtcatggttttttatctgagtgtgagaccctaaccttcatccctagagggtttaaagcttcagtagatctgaatgtattggg

SEQ ID NO: 676313 - DNA, 1286 bp, Homo sapiens
gatagttttgcaaaacctgctgctgtggaaccaagagtttctttctggtgagcactccaggatctccttgggccccacactttcatcttagagaaaagtcttagcgttcaactctggactgatcactagtactttttcagctctacgatgatccaggcccagaatattcagttctttgccctctgcttgagtgtttatttatttatttaatttaatttttttgcgactgagtttcactcttgttgtccaggctagagtgcaatggcacgatctcagctcactgcaaactctgcctaccgggttcaagtgattctcttgcctcagcctctggagtagctgggattacaggcacgcgccaccatgcctggctaatttttgtagttttagtagagacggggtttcaccgtgttggtcaggctggtcttgaactcctaacctcaagtgatccaccygcctcagcctcccaaagtgctgggattacaggtgtgagccaccgtgcctggcctggttgagtgtttaactctccaaggagaatcaacaggtggagacctgtggtggtggaactgggcatgaccccagagtaactcaggtttgattcacagtcctactgcccatcaagataggtaatgttggccaatttttccactgtaggcaatgatattctttcccacctttcccactctgcatcccacttttatggcattattggcactctcaaaacagatctgaatcattgcataggctgttattgatacaatggctatttccctcatagccacttgcctcactccttacctagtctccaaatgccaattcaaatgttgccttattcatggtaggtgttcaacatatatttccatttaggagacatttgccacttttcttggctgcccagagtcttaattctctcattccttctttatgttattaatcttaatagaagctaaagctatgtactactagagaagctgaaaagatagaacaatctcttttccagtgtatcttgcatctagtttttgctggccacgtgaatgcacttggactttattcgaagctagggaggaactgagaatactgaaaatgacttgttgatggttgtaatcttcttcatttctgcaactgattgcaagggcatagttatattatgaccatcattccactgctaaatttacattccctttgctctcatttagtacctcagttggtcatggttttttatctgagtgtgagaccctaaccttcatccctagagggtttaaagcttcagtagatctgaatgtattggg

SEQ ID NO: 676314 - DNA, 1286 bp, Homo sapiens
gatagttttgcaaaacctgctgctgtggaaccaagagtttctttctggtgagcactccaggatctccttgggccccacactttcatcttagagaaaagtcttagcgttcaactctggactgatcactagtactttttcagctctacgatgatccaggcccagaatattcagttctttgccctctgcttgagtgtttatttatttatttaatttaatttttttgcgactgagtttcactcttgttgtccaggctagagtgcaatggcacgatctcagctcactgcaaactctgcctaccgggttcaagtgattctcttgcctcagcctctggagtagctgggattacaggcacgcgccaccatgcctggctaatttttgtagttttagtagagacggggtttcaccgtgttggtcaggctggtcttgaactcctaacctcaagtgatccacccgcctcagcctcccaaagtgctgggattacaggtgtgagccaccgtgcctggcctggttgagtgtttaactctccaaggagaatcaacaggtggagacctgtggtggtggaactgggcatgaccccagagtaactcaggtttgattcacagtcctactgcccatcaagataggtaatgttggccaatttttccactgtaggcaatgatattctttcccacctttcccactctgcatcccacttttatggcattattggcactctcaaaacagatctgaatcattgcataggctgttattgatacaatggctatttccctcatagccacttgcctcactccttacctagtctccaaatgccaattcaaatgttgccttattcatggtaggtgttcaacatatatttccatttaggagacatttgccacttttcttggctgcccagagtcttaattctctcattccttctttatgttattaatcttaatagaagctaaagctatgtactactasagaagctgaaaagatagaacaatctcttttccagtgtatcttgcatctagtttttgctggccacgtgaatgcacttggactttattcgaagctagggaggaactgagaatactgaaaatgacttgttgatggttgtaatcttcttcatttctgcaactgattgcaagggcatagttatattatgaccatcattccactgctaaatttacattccctttgctctcatttagtacctcagttggtcatggttttttatctgagtgtgagaccctaaccttcatccctagagggtttaaagcttcagtagatctgaatgtattggg

SEQ ID NO: 676315 - DNA, 638 bp, Homo sapiens
cccccgtcgcgccggcgcaccgtccgtccgaatggcctcgtgggcggagcttgcgtagcctcccggaccccggcgcacaccgccccccgccccccgcccctggccaccaagcgcctccgtggacacgcacttcctgcgaggsctccgtgcgcaccttggccgagccgaaccgagccgagtcctgtccttccaggccgttcgcaatggtggatgagttggtgctgctgctgcacgcgctcctgatgcggcaccgcgccctgagcatcgagaacagccagctcatggaacagctgcggctgctggtgtgcgagagggccagcctgctgcgccaggtacgtccgccgagctgcccggtgcccttccccgaaacgtttaatggcgagagctcccggctccccgagtttatcgtgcagacggcgtcttacatgctcgtgaacgagaaccgattctgcaacgacgccatgaaggtggcattcctaatcagcctcctcaccggggaagccgaggagtgggtggtgccctacatcgagatggatagccccatcctaggtgattaccgggccttcctcgatgagatgaaacagtgctttggctgggatgacgacgaagacgacgacgacgaagaagaggaggatgat

SEQ ID NO: 676316 - DNA, 648 bp, Homo sapiens
ctcaaaaaaagaaagaaataattgcagagcgaatacaaatccaccagagtctccacgacgacctgataatagagcacacacttgtggtcaggccccttctctcaatctctctctctctctctctctctctctctctctctctctctctgtctctcccctgcacccctctgccctgccccatgttctgggtcttgagcccaggtctgtctttctgtgctgtctccgtagccccaactacatggctacrtggtggggagaaggagaggatgaagcttaaggcagatttctggcttttctccccaaatgaagcaaaataacaaatgtagcttcaaaaggaaagcagcatgatcatggaaatgtcaaaacagccacgttcttttctagccaggcagaagagactttatagaacctgactcaacacagttgcattcagcattccttaaacacctaacataagctcccctttactggcaaattgccctgaaacaattaggaggtaaaggaattcccagaagaaaaggattttctagggcctttgaagagatgtgttgactctaacccaaacaaccctctgagaacatggagccacttggttagctctctttgagagttgtccaacaggtaaagcaggggcatccaccagtatct

SEQ ID NO: 676317 - DNA, 648 bp, Homo sapiens
ctcaaaaaaagaaagaaataattgcagagcgaatacaaatccaccagagtctccacgacgacctgataatagagcacacacttgtggtcaggccccttctctcaatctctctctctctctctctctctctctctctctctctctctctgtctctcccctgcacccctctgccctgccccatgttctgggtcttgagcccaggtctgtctttctgtgctgtctccgtagccccaactacatggctacgtggtggggagaaggagaggatgaagcttaaggcagatttctggcttttctccccaaatgaagcaaaataacaaatgtagcttcaaaaggaaagcagcatgatcatggaaatgtcaaaacagccaygttcttttctagccaggcagaagagactttatagaacctgactcaacacagttgcattcagcattccttaaacacctaacataagctcccctttactggcaaattgccctgaaacaattaggaggtaaaggaattcccagaagaaaaggattttctagggcctttgaagagatgtgttgactctaacccaaacaaccctctgagaacatggagccacttggttagctctctttgagagttgtccaacaggtaaagcaggggcatccaccagtatct

SEQ ID NO: 676318 - DNA, 2057 bp, Homo sapiens
tcttgaactcctgacctcaagtgatctacccaacttggcctcccaaaatgctgggattataggcatgagccactatgcccagcaaatctaatattctttatagtgtatcataatgcttctttgtcttccctccaacagagaaattaggtagaatgtatcaatttaagttatcaaattagttgaagatgccaaatgaacatggctgttgcaaagagtatgcagtagttatttaaactatatactattaaaagaaatttaagtttccttgtctttgaaggtcaacattaaactgctgagcaactaataaaaaattacagctgataactaaaggccactgctctttcaaacttaacactctacagtcttctyttcatctgtactcaaaaaacacatctagaatctaaagttttttaaaaagcaaaacaaaaccttagacattagggcactgatattttaaatcttaacatcctttaatatgaatttagtgtctaccacagctagatttaaagtatgcacatatcctaaattatatgaaaggccatataataaattcttttggctgaagaatgaggtcttctggttacttaaatggaattgctataaatcatatattaatgagcaatttttaaaagaattagaataaaattttatcttaactataaaattatatataactttatcatatataatttgatcttattttattcacatggttcaagatcatacagttcgttcaaagggataaccatatattacagatgtgaacaaagcatatgttaacagaaatttcctatgtgtgaatgctgataaacaagttttactacagttttgttgtcatataatatgaaatgtatttttaagtaggctaccatggcaatctcttctcttcctacccttttgctatatgcctttttgacctgatatgtacatatgtacacacatatatgcatacataccttgtgcaatgtaattatctgttgtggtgtcatctgtagttttaataaatacaccattttcttctaaaaaataaagcaaatgggaaaagaaaatattttacagaatgacataaagcaacaactcagtttaaataaaagtttatgaaattccatccacactattttcacgaatatgcaagagattctgtggccaaactgaactgcaaaaattacatttttaaccctctataatagcagtttctaattatttatgagaacactaggatattcaataggctcatatcaatagtcagatacaactacaaaattggctgtttgtactaaacagaaaaaacacatagctttactgaatgagaagtataaatgtagtttctgtgtcttcatagatattacaatttttggccacaacactccttgaattaccaaaagtttctttttctagaaagcacatctagggtaataaaaatcacaaaggacctttagtgttttttttttctttttttaaatctagtaaaattaaaaacacacaaaaaaggaggttatctttaaaaaaaaattatcagggcatggtggttcatgcctgtaatcccagccactttgggaggtcaaggtgggaggactgcttgagcccaggagtttgaaatccgcctggacaatatggtgagaccccatctctaaaaaatattagccaggtgtggtgtgcatgcttgtggtcccagctacacaggaggttgaggctgaggcaagaggactgcctgagtctaggaggttgagactgcagtgagccatgtttgtgccacttgtattccagcttgggtgaaaaagtgagacccagtatccaaaaaaaaaacaacaaaaccaacaacactattcatcattcacctattcatctcaggcctgattacaagcctgaataaaactatgtaattaaaaaaaaaccagaggatcagactcattagagaagatttactaaaaacacactatttataattatattggttttattataacatcaaatacaattgaaaaagatacagtatttttggtaagcagtttaaagctagtaagctagcgttcagttagtcaccttgcttgttgaca

SEQ ID NO: 676319 - DNA, 1365 bp, Homo sapiens
taagtgccattttagtgagcacttatttctcaagttttgaacattttgtttaatatttttgtaatatcgaaacagtgtagaactgaggagagaagaaagcccaaagatgatagggtacgctttgttctttgtatgattggcatttcaggtagtgggcacatcccccccacctcgtgtgtgtacttttcaaatgggatgtgaacgtataatattggcattcaatccagtatataattatagaatttggaagacttaggacattttagtcagtgaatctatatttagacttttcaaagacatggcacgtaaggacacgtggagaaaatgtcccacacagataacaggatttgtgattttggctttgctgttttatgattagcaaatattgtttgtatagagtgtctgggtgccctaaaaacacatgaaaataggtcaactaaatctcgttttaaagagaaaaccggaagagtgaacaccactctaaaaatagattttggatgtgtttgttttggtgccttgtatatcttaaagtggaggatgttgttcagcccaatctttcatttagaatttatgtctcaaatgagccagtgtatcatgtgggcagactggaaatacatttaaatattttttttcttcgctggttgttcagaacttggtagaattataattatcaggaaaactctctccaaatagctggtcttttagacaagagaagaaaaaagaaataacttcttttaaaaggagatgtcaacttacaaagtgttttgtttcagtctccaccaacctaacttgtcagaggaaaggaacagacttttttttttaaaggatccaaaacgatattttgagtcaaaagaagaaaaggatattaaatcttttgttttcacaatatcgatctttttaaagaatattattttatatgttaaccatatactaccaggaaacatctaacagcactgacagttgggaattcgaatgcgtatttttctcccgtgttagtaatagaaggtactgagccttttccattctcttggttgccttgtgcctgaggaatctgaatttgtgaaacaacatctttgtggatatagaaactaatttatgtaacacttggctacaaccacctgtgcttacttacggactatctttagttttcatggcgtgttaccttttgggttaattcaaatccaaaatgttgttaacggactgctaattaaagyatttagaacttagaattacagaattatagagtaggatgagataacaaaagactgggggttatgacttgaccaaggtcacacagataatttgccaaagagctttcttatttatgaaatggttgctggctaagaaacatctgtgtgtgatatg

SEQ ID NO: 676320 - DNA, 1162 bp, Homo sapiens
ggcatacattaaatattaggcccctcaataaatgttagcctagacctatgtgtatgtctaggtatttgctgtggaaaactctggtcctgtccgtgagtgccaacacatcttcagcctcattctaggctctgcacttggggctgcatagagttatggggccagcctaatagggaggtggctggaatacaactaagaagcygttttattggagaatgatggaggaagcatttaatgtgatgggtggaaagacaatggacttaggcattacatagacttgtactggaatctcagctctagcactttccactacaggatcttgggaaattcacttaacctctctgagcttagttttctcatctgcaatatgggcaggagtaatcaactcacatagctgttatgaaaaatgaatttatattatgcatataagaatgcacagtatatagtaagagcaaaataactgagcatgatgaggcagaggctggtcccagattctgctaggcatacagcacatactcagtaaatgtgctaaatgagtaaatgatttggacaaaatttactataatctggaatgaatggggaacagaaaaggacactggactaggagacagaaccatatcggtttgtatcccaatttgacaatttgacaaactcacatcttgccaagtctcaattttctcatctgtaaaagagggtgatcctgataaagacaaaagagttgacattggcaaggagaatttatcaattgcaaagcagactctcatgatatttgaaaagcgtttagtatagcaccccaaaacagtaaaccattcaataaatggctgacaatagctttaacagataatcataaagcacctaaaagtgccagccatgggctttccttgtgaacgagatataccaggatccctgcctctttggaggagcagcagcaatatcaccctcctcctcctcatcaccaatgaagggattggaaagataggggtgtgtattctccatctaacatctgatgacagaaatgtcttctgatgttgtgggaattatgtctaacatctgatgacagaaatagatataactatctaagaggtataactatctaagaggtaataatagtttcatgggtatctggtgctgttttaaatccttcaagtgaattgatttatttaat

SEQ ID NO: 676321 - DNA, 1162 bp, Homo sapiens
ggcatacattaaatattaggcccctcaataaatgttagcctagacctatgtgtatgtctaggtatttgctgtggaaaactctggtcctgtccgtgagtgccaacacatcttcagcctcattctaggctctgcacttggggctgcatagagttatggggccagcctaatagggaggtggctggaatacaactaagaagccgttttattggagaatgatggaggaagcatttaatgtgatgggtggaaagacaatggacttaggcattacatagacttgtactggaatctcagctctagcactttccactacaggatcttgggaaattcacttaacctctctgagcttagttttctcatctgcaatatgggcaggagtaatcaactcacatagctgttatgaaaaatgaatttatattatgcatataagaatgcacagtatatagtaagagcaaaataactgagcatgatgaggcagaggctggtcccagaytctgctaggcatacagcacatactcagtaaatgtgctaaatgagtaaatgatttggacaaaatttactataatctggaatgaatggggaacagaaaaggacactggactaggagacagaaccatatcggtttgtatcccaatttgacaatttgacaaactcacatcttgccaagtctcaattttctcatctgtaaaagagggtgatcctgataaagacaaaagagttgacattggcaaggagaatttatcaattgcaaagcagactctcatgatatttgaaaagcgtttagtatagcaccccaaaacagtaaaccattcaataaatggctgacaatagctttaacagataatcataaagcacctaaaagtgccagccatgggctttccttgtgaacgagatataccaggatccctgcctctttggaggagcagcagcaatatcaccctcctcctcctcatcaccaatgaagggattggaaagataggggtgtgtattctccatctaacatctgatgacagaaatgtcttctgatgttgtgggaattatgtctaacatctgatgacagaaatagatataactatctaagaggtataactatctaagaggtaataatagtttcatgggtatctggtgctgttttaaatccttcaagtgaattgatttatttaat

SEQ ID NO: 676322 - DNA, 1066 bp, Homo sapiens
atgaaaagacatatttcatatcaacaaagcctaatttatcatttttctggtttatttatttctctgtgtaatatttaaaaaatatttgctttctgccaagtcttaaagacattttcatgcattttcttctaaaacttcataggttgtatggkttggtcctgggatccaactcaaatagcttttgtgtatgttgtgaggtagggaattaaatttttttcctcactagtagatatctagttggtccagcactactcgttgaaatgacacttcttccccattgtattactttagtaccttttttgaaaaaaaaatcaattgaccatataacaaggatctgttttaggtgtctcacttcagtttcatttatcaatatgtgtatccttttgccacattcacactgttttgtttatagtaataaacagcttaatagtaagtcctctaggtttgacacctcaataaacctgaaatgtgtacatcctatggtgccaccatgaaaatcaagacatgctgtcacttaatctctctcatttcactagaggacacatgctctcataaataatggttgaccccttagccaaagatcctctattgtaccctctggagaaaataaatctctagttaccttaagagctgatctagaggtaaaatgtctgcaacattcagcaatgaatttagattttctttgaaaaaaagttcattttcaaggtagttttttttgttttgttttgttttgttttttttgccaaagaatttcttttttttctgttacttagtagcgtgaagtacaatgtttggtttgcaatttctgttctttgtaggaagaaaaactttagtggaaacaaccagtacttaaagaccattttatgaggctgtcatttacatattatctcttttgctgtttttgttaaaatgatataaggtgggctttatatgctttctgtataacctttggaatgtgtatttaaattaaaaacgtaaaattaaaatattcatcctagactcaggttaagttccaccaacagtacacttaaaataggatgagcccaacctaagcgtacaacctacc

SEQ ID NO: 676323 - DNA, 1883 bp, Homo sapiens
tgtagaactatatctggaatacattaggcactcaatatctatgggatgaatgatggattcgagaaacagaagtaattgagtacatgggaaatgcgattgtgtttatgacaggtggagctccaagagttgaatttaacaagaaatgattgagtttgaaatcttttgccctctaaattagggacagcacaacacagaatgaggatttgggtgaagttgcaaccaccgagttccacataccagtttagaagcctcagagtataagtcattgggtatttaaggaccttacctaagctaactcagaagcattatgaaggrcagtattgacattaactgccaggaatctcctaaaagagtcaagggattatacatgagtcatagaaggatacttgaagatggacaattatagtcccatcactttatggaagactatgagacccaaataagagaaatcccagtggtccacgaacttagctctggtaagtccccgataattatttaaattatttcaggttcaatatcactgattgctgtcaccattttcaaggctaatatctaatctgctttggttctgctaagatctccctgtttttttgtcgttgtttttttcctctagaaaaaacagaaaagagaactatctccagatgaatacagaagaggtggtaaaaagaatacacataacgtggctctcacatgatcacatatcatgctgaagtctctcagaggcaactgaggttggagatcatttttagggtcttaagttcagagctgtatctgtaatatcaacaacagatattctggctcttaccaccttgcccatttctcctcttagcactgtaagagtagttcttgctgagaaggcactagcctgtagtggcgatgaacatcagctttgagtatagcttccccacgtaaggactgtatgaccttggaaaactttctttacttgttgtgataaataaacttccttacagcaaattgatcctcaagttattcccctgtaaggtggaaaaaataatggaaactaccttctaggcttgatatgaagattaaatgaggtaatgtacccaaagcacttagtacagtggctggaacatggtaaatatttgatcagtgttcttattattgttatggttaggaaggcgctagcaagagcaccattgtacttccagagcacattccattttccagcaagtggtgctttaatagatttctagtgacttgagagtgacttccctaagcatcttgcattaaggaaataggaccttctgtattctaaaaacaccatccaataagggattttcacaatttacttgtaggacctttgttacgtagaaccttcagtgtctgctatgtggcccattaggaaaataataaattaggaaacaaaagactttatagtgtctgttactagtgctctataaaggccgatataacatttggcaagtaccttctttttctatcagatgatgcttttaatacttcatgtcaatactttcagaaaaaagtgaaatcatttcattaaacacttctttcctatttctgatttttgagttgaaagctcttaattttgaggatttaacataagaacaagtcaagggaatagaaattatctagaaaactattagctagcatagagaaaaacaagacttacagccaaaagaagaatgtgcaaataatttgggaaatgtttaaatagaaatttaaaaatggggctggtggagtcatgttgatgatttcggagttaatcatttctgcgtattaaattgtttccagcattttctagctgaagttactgttgttgtcaactactcagcatccaaaattttcacaagaaaacaaggttttttctcttcaaattacagtccaaagagtggcaaacaaga

SEQ ID NO: 676324 - DNA, 2438 bp, Homo sapiens
ttttgtttgttttttgagacagagtttcgttgtgtcacccaggctggagtgcggtggcatgatctcagctaactgcaacctccacctcccaggttcaagtgattctcctgcctcagcctcccaagtagctggaatcataggcacacgccaccacacccggctaatttttgtatttttagtagagacaaggtttcaccatcttggctaggctggtcttaaactcttgacttcaaataattcacccacctcggcctcccaaagtgctgggattacaggcatgagccaccgtacccggttctttttatttttcaatgcagttgtcttccattcaaataaataaaacaaataaaaatttaaaaattaaatacaaataaaatgtaaaaataaaagttttccattagcaatcttcctgtacacatcttttcctattagagcttagttgatttttgttttaaattgagatggggacaacaacatctcccttttcagtaagggagatttggtttatctgtaaacaataaaaatgctagtcttatacactatagagaaagaaaaaaattatgcaaaactcttactttgcaactttgctgttctatctagaaacaaagtcttttttacaagtccagatttttatcttacaagcaacaaaagtttacagcagagtaaataagctctttaagctatttgtatgtctcaaatatttcataataaaaagtgaattaaatgactgccttttgcaaattgctctaatctcagccttctttataagcttgtatttaaaaatctattcatatggaatttcagaagcagccttgccttaaaagagcactactgaatcttcataacaagattatgtatttgttatgtggaaagcaaaaataggtatcaaattcatattcgaattttgcattttgagacttacagaggaatgggttgacaaatagctgacgattaattggatctgctaaatatgggcaccaatgaagtgtrcccaccagaatgcatctctacacctccgttcacacaaatcacttcctctggaaaggcgcccgtggtaaaagtaggcatatgggaatgattcacttggggaaagttgtacccagaatatcaaaacagtttgctttctgtcgctatattcttgccataatttttctacccaaaggaaccacctgctattatggctgtgacacctgaaaagctttctgtatattgcaggagattgctcatgtgtgggtgggttttcaggctgttcagtggtattttaaaaaatagttctttggggaaaatattctcagagactggaacattgccttgtcttatcaaaattgctctgtagtcatgttcacaaataccttcaaacattgagctacagatggaattcagtagaagacatactgagctaatttcctttgtgtgacattacccagagaaatcaagctgtcagtatcctgaagaacaagccctcaaagtgagatggtggccaaagccataggaagcagaaatgactgaagggcttgcccttcaaaaccttcttcccattctcccaaattcatcttttccaattaaaatttattacaaaaaaaaaccaaatagactcagcttgtctgacttgggatggttgtacacttatagtaaagatggtaaatattgggctgaaaaaaatcctgaatcctagatctttcttgatattccagaatatattcataaaagagaattactgaaagagagttttaggcatacagaatttcatactttgggcgaactagagacagtcatttctaagttatgcctttgctttatcaaactttagttcaatcatttaacaaatatttaatgagcatctcttttgtgtgaacactattgtgagcgttacgcagtgaacaaagcatttttaaaaaaattctttcttctatgcctacccacagtgcctaggccaaaaagctaaaagtgggctgggtgcggtagctcatgcctgttaatcccacactttgggagtccaagacaggaggattgcttgagcccaggagttcgagaccattcagggcaacaaagtgagaccccagtctctagaaaaaatcaagaaattagcggggcatggtgacatgcacatgtggtcccaactacatgggaggctgaggtgggaggaaggtctgagcccagaagctcaaggctgcagtgagccatgtttgcaccaatgcattccagcctaggcaacagagcaagaccctgccacaaaaaataaacataaaaaataaaaaagctaaaaagattctcttgcagctaggggtttatataatttactttttgctagttatatgcatttgcataagtcttgatttcagaacaaacttcagtggggaaaaggtggtcacagcactttatccattttgctatctaaaattgatctgtggtatgattctgaagccaacagacttgtg

SEQ ID NO: 676325 - DNA, 1146 bp, Homo sapiens
ggctggaaggaaaggagagagctctgcacgtcgcgtgtgggctcgcaacttggagaaagcagggagaggacagccttttgggactattccttggatgggcgggtggcaccaggaagggtagatggagctttctagaggtcaatgtcagcgtamtttctgctgaaacaattgaaggaggaaaaaaaaaaagtatgtgctttgtggttccctggtagtctagtggctaaagtttggcgctctcaccgccgggactggttgattccagatcaggggactgggtctcggcctcactgtgaggtattgttctttcctgtgtttgccatctaccaccgctgtggctcaattatttcaagactgctggagaaatggaattaatgtcgatcctaacatttaagctatttatctaggataaattccaaatagtggaactgctaggtgaaatttattgtgaatttaagattccgatgtatacagccctacaacgtataagcaccaattacattccccaaagtgtgtgagactgcgtcttttccccagaatttaaaaccaatgctagaaattatcagacttttagagataattttaagcttatttatcatcaaaggatttcttcatagtcaatttccccttagactataaatccgcaagagatggcaaagctggaagaactgcctagaatttcagcaaacttgaattcaatagtctctctgttctttcctgttttggcacctacccttttcttccagttaagattggacacaatagaaaaataattaataaatgtaataaaaatgtaagcctggacgttttgctcacagtgttctcactgggtctaaattttgtgaatgtggttccttggatggtctcatgggtatgcttgagactttaggcccttgggacacctggtgcacagaagggtcccaaaacccatctttggaagtgttggcagagtaaataggcaccagtaataaaggcaacggcgcctgaatacgtaaggctggtttaaaccaaagcagatttttcaaaaccagagagggcttgtgttcataatttaataatttaatttttattttgatgaaatttaaatttgatttaaattttcataatttaattttcattttgatggccactttattttgacaaaga

SEQ ID NO: 676326 - DNA, 1146 bp, Homo sapiens
ggctggaaggaaaggagagagctctgcacgtcgcgtgtgggctcgcaacttggagaaagcagggagaggacagccttttgggactattccttggatgggcgggtggcaccaggaagggtagatggagctttctagaggtcaatgtcagcgtactttctgctgaarcaattgaaggaggaaaaaaaaaaagtatgtgctttgtggttccctggtagtctagtggctaaagtttggcgctctcaccgccgggactggttgattccagatcaggggactgggtctcggcctcactgtgaggtattgttctttcctgtgtttgccatctaccaccgctgtggctcaattatttcaagactgctggagaaatggaattaatgtcgatcctaacatttaagctatttatctaggataaattccaaatagtggaactgctaggtgaaatttattgtgaatttaagattccgatgtatacagccctacaacgtataagcaccaattacattccccaaagtgtgtgagactgcgtcttttccccagaatttaaaaccaatgctagaaattatcagacttttagagataattttaagcttatttatcatcaaaggatttcttcatagtcaatttccccttagactataaatccgcaagagatggcaaagctggaagaactgcctagaatttcagcaaacttgaattcaatagtctctctgttctttcctgttttggcacctacccttttcttccagttaagattggacacaatagaaaaataattaataaatgtaataaaaatgtaagcctggacgttttgctcacagtgttctcactgggtctaaattttgtgaatgtggttccttggatggtctcatgggtatgcttgagactttaggcccttgggacacctggtgcacagaagggtcccaaaacccatctttggaagtgttggcagagtaaataggcaccagtaataaaggcaacggcgcctgaatacgtaaggctggtttaaaccaaagcagatttttcaaaaccagagagggcttgtgttcataatttaataatttaatttttattttgatgaaatttaaatttgatttaaattttcataatttaattttcattttgatggccactttattttgacaaaga

SEQ ID NO: 676327 - DNA, 1146 bp, Homo sapiens
ggctggaaggaaaggagagagctctgcacgtcgcgtgtgggctcgcaacttggagaaagcagggagaggacagccttttgggactattccttggatgggcgggtggcaccaggaagggtagatggagctttctagaggtcaatgtcagcgtactttctgctgaaacaattgaaggaggaaaaaaaaaaagtatgtgctttgtggttccctggtagtctagtggctaaagtttggcgctctcaccgccgggactggttgattccagatcaggggactgggtctcrgcctcactgtgaggtattgttctttcctgtgtttgccatctaccaccgctgtggctcaattatttcaagactgctggagaaatggaattaatgtcgatcctaacatttaagctatttatctaggataaattccaaatagtggaactgctaggtgaaatttattgtgaatttaagattccgatgtatacagccctacaacgtataagcaccaattacattccccaaagtgtgtgagactgcgtcttttccccagaatttaaaaccaatgctagaaattatcagacttttagagataattttaagcttatttatcatcaaaggatttcttcatagtcaatttccccttagactataaatccgcaagagatggcaaagctggaagaactgcctagaatttcagcaaacttgaattcaatagtctctctgttctttcctgttttggcacctacccttttcttccagttaagattggacacaatagaaaaataattaataaatgtaataaaaatgtaagcctggacgttttgctcacagtgttctcactgggtctaaattttgtgaatgtggttccttggatggtctcatgggtatgcttgagactttaggcccttgggacacctggtgcacagaagggtcccaaaacccatctttggaagtgttggcagagtaaataggcaccagtaataaaggcaacggcgcctgaatacgtaaggctggtttaaaccaaagcagatttttcaaaaccagagagggcttgtgttcataatttaataatttaatttttattttgatgaaatttaaatttgatttaaattttcataatttaattttcattttgatggccactttattttgacaaaga

SEQ ID NO: 676328 - DNA, 1146 bp, Homo sapiens
ggctggaaggaaaggagagagctctgcacgtcgcgtgtgggctcgcaacttggagaaagcagggagaggacagccttttgggactattccttggatgggcgggtggcaccaggaagggtagatggagctttctagaggtcaatgtcagcgtactttctgctgaaacaattgaaggaggaaaaaaaaaaagtatgtgctttgtggttccctggtagtctagtggctaaagtttggcgctctcaccgccgggactggttgattccagatcaggggactgggtctcggcctcactgtgaggtattgttctttcctgtgtttgccatctaccaccgctgtggctcaattatttcaagactgctggagaaatggaattaatgtcgatcctaacatttaagctatttatctaggataaattccaaatagtggaactgctaggtgaaatttattgtgaatttaagattccgatgtatacagccctacaacgtataagcaccaattacattccccaaagtgtgtgagactgcgtcttttccccagaatttaaaaccaatgctagaaattatcagwcttttagagataattttaagcttatttatcatcaaaggatttcttcatagtcaatttccccttagactataaatccgcaagagatggcaaagctggaagaactgcctagaatttcagcaaacttgaattcaatagtctctctgttctttcctgttttggcacctacccttttcttccagttaagattggacacaatagaaaaataattaataaatgtaataaaaatgtaagcctggacgttttgctcacagtgttctcactgggtctaaattttgtgaatgtggttccttggatggtctcatgggtatgcttgagactttaggcccttgggacacctggtgcacagaagggtcccaaaacccatctttggaagtgttggcagagtaaataggcaccagtaataaaggcaacggcgcctgaatacgtaaggctggtttaaaccaaagcagatttttcaaaaccagagagggcttgtgttcataatttaataatttaatttttattttgatgaaatttaaatttgatttaaattttcataatttaattttcattttgatggccactttattttgacaaaga

SEQ ID NO: 676329 - DNA, 595 bp, Homo sapiens
aactgttgctttagtggctctgggaagaaagcactaactggcagcataggtaagtaaagttttaatctagggaagaaataagaagcagaatcagaattagaattagaagaaagaggaaatatgctataccagaatatcataggcaaaaaaagaagatgaagaaagaggaaatgaaaggacagaagrcaatgctaatggagttagttatttgtggctgttttttgtaaaagagtaatgatcagtcttgtaatcattataatactattatttgctttctaaaatgtctaaaatatttgaaggaatatatgatataaaaagatgaataatgcttgcagtcagtgtttcattgtttgggagaacccagtttcctcagttaatacattttcgtgtaatagctgtttaaggagtaacatggtttaaagacattttaatggctgaaatattaacatgttggtcttttgatgaagttcaaatagaggatttctttccccaattttccctggaaagattaaactgaagagaaaaatctggaaagtttgccccacctgttgggtctgggagtcattatgactttttcaacgacaggagttgtgta

SEQ ID NO: 676330 - DNA, 565 bp, Homo sapiens
tgaataatgttgaacatcttttcatgtatatgtaagccatctcaaaattttctttgaggctgggcacagtggctcatgcctgtaatcccagcactttaggaggctgaagtgggaggatcccttgaagtcaggagttcaagaccagcttgggcaacatagagagaccccatctccacacacacacacacacaaatttaaaaattagccaagtgggcgctgarcacctgtagtcccagctactagggaggctgagggtggagaattgcttgagcccaagagttcgaggctgccctgagctatgatggtgccactgcaccccagcctgggagtgcggtgtgagaccttgtctccagaaaaaaaaaaaaaaaaatctttggtgaagctccagttcaaacattttgctcagtttttaaaaattgggttgtgtttttattattgagttgcaaggagttatttatatactctaggtacaaatcctttctggttatatgtcttgcaaatattttctgtgcctcaagggtcattttgagagctgaaggaggggagtggtcctcccaggctggtg

SEQ ID NO: 676331 - DNA, 1136 bp, Homo sapiens
caaaataaataaaagtccatgtagaacgtaagtaaggtccccatctcagatggattattaatgcctctgcaaatgcctgctccattctagaagcaggtagatgttcattaggtgtttgctgaaactttagttcaatgtatctgtttgtcatttattaggaatcaatgcttctaaacattctatagcagaaaataacattttccttttgataggaaaattgttttaatgaactattacagtatctttccctcttgactcccatgagtttaaaaatgttgaacatcagataacacagctcttaatttcaatgggcttcacatcctgaatgtaactacaataacaaataaactcaccactagatctcaatttacttagaaaagatcccagctgtcacccaaagccaaaatgggtggagacagtttggttcacagatgtggatctctggctattgaaaaagcattttcagacattattaacaagaagaattggcccagtgaataatacaattatgcatgatctgtggttcagatattcaagtgcaagtattcagaaagtgctgctgcagctaatccagggggtagttttgaaaataatgacatttaacctatcatagcaattgttcttgtaaaaggtatgaactgttctaatgaagaaaagaatccagtgtaaaaattatgtcttggtgctagaaatcatgaagctgaacagtcagtcttacattattaagtcccctatacaggggaaaaataaatacatttaaaagtgtttaagaaatttctgtaaagaggaaaaataccagcaaacaacmatttcttccgtgaatttctagacatgtacttgccaagttcagtaagaaaaatgttaatgattattcaaagcatcacatgaaggataacagttaatctgattagagtaatgacatttctaatgtatttatttggagtagcgattgctgaattgcactgttattagcaagcttgccctgtttactggaatgctgatacatatttaaaaaatctgtctttgcataatgcaggctgagcatgtggacaatagaagggggtctttagctttcctatcctcctttatgttttatctgatctgcctgccttgatttggaatgggccccagggctt

SEQ ID NO: 676332 - DNA, 1111 bp, Homo sapiens
tcaaaatctgggttataaataagatatctggcataaagagtttctcttttattcttcttatgtatttttctactcttggacacaagtcatagcattgcaatgtcttttatcttttcaatcttactcgtggtttctccaaatatgccaacatgtgcttgcagaatctctcctttgacaacaataatgtggagctgaacactcatgactgcattagtgacttttaattaactccaccttaagtgtgtctgaggacctccctaattttctcgaaagctcctttaacttctcagcagcccggggtttgtcataaccccattagccacgtgggtgtatctgcatgagactctcccatctttacctacctagtgagccactgtgatgaagsggggacatgcttggctggccctacaactcaccatggcagtaagtgatatttagtcaagttgttcttgccatccccttccaaatttcaagctcttaaaaaacatgagaactctcaagtgcttgttgacttgaatgcaataataatgtggcccttggtgagaccacatcagtgccccttacattgacctaaaaggagataaggattttctgtttgtgaggcaacgttcttgatatgagatctgtaaacctgcagtttctgccttatgaaaacatcacgcaagctctgatggcatgtcgtcctcctctggatagatctttgggctttgtgaggcctcccctccttttttttttagatggagtctcactctgtcatccaggctggagtacagtggtgctatctcagctcactacagcctctgcctcctaggtttaagtgattctcctgcctcagcctcccgagtagctgagactacaggtatgtgccaccacacctgcctaatttttatatttttagtagagacagggttttaccacgttggcgaggccagtctcgaactcctaacctcaagtgatccacctgcctaggtctcccaaattgctgggattacaagtgtgagctatcgtgcctggccaaggccattagaactcaatcttggtcccctgagttttctctaaacttcaggatgtcttcccaactcattaccatgctagaaagtgtacaacactg

SEQ ID NO: 676333 - DNA, 1111 bp, Homo sapiens
tcaaaatctgggttataaataagatatctggcataaagagtttctcttttattcttcttatgtatttttctactcttggacacaagtcatagcattgcaatgtcttttatcttttcaatcttactcgtggtttctccaaatatgccaacatgtgcttgcagaatctctcctttgacaacaataatgtggagctgaacactcatgactgcattagtgacttttaattaactccaccttaagtgtgtctgaggacctccctaattttctcgaaagctcctttaacttctcagcagcccggggtttgtcataaccccattagccacgtgggtgtatctgcatgagactctcccatctttacctacctagtgagccactgtgatgaaggggggacatgcttggctggccctacaactcaccatggcagtaagtgatatttagtcaagttgttcttgccatccccttccaaatttcaagctcttaaaaaacatgagaactctsaagtgcttgttgacttgaatgcaataataatgtggcccttggtgagaccacatcagtgccccttacattgacctaaaaggagataaggattttctgtttgtgaggcaacgttcttgatatgagatctgtaaacctgcagtttctgccttatgaaaacatcacgcaagctctgatggcatgtcgtcctcctctggatagatctttgggctttgtgaggcctcccctccttttttttttagatggagtctcactctgtcatccaggctggagtacagtggtgctatctcagctcactacagcctctgcctcctaggtttaagtgattctcctgcctcagcctcccgagtagctgagactacaggtatgtgccaccacacctgcctaatttttatatttttagtagagacagggttttaccacgttggcgaggccagtctcgaactcctaacctcaagtgatccacctgcctaggtctcccaaattgctgggattacaagtgtgagctatcgtgcctggccaaggccattagaactcaatcttggtcccctgagttttctctaaacttcaggatgtcttcccaactcattaccatgctagaaagtgtacaacactg

SEQ ID NO: 676334 - DNA, 469 bp, Homo sapiens
tataattttttttgacagggtcttactctgtcacccaggctggagtgcaatggcaygacattggctcactgtgatctccacctcccgggttcaagtgattctcccacctcagcctcccaggtagttgggactacaggcaggcgctatcatgcccagctcatttttttttttaattttttggtagagacaaggtttcaccatgttggccaggctggtctcgaactcctgacctcaagtgatctgcctgcttcggcctcccaaagtgctgggactacacgcatgagccactgtgcccagcctataattgtttaaaatgtaaattaccttgactgtttgagcccctgctccctcgggggtgacattctttgatatgtggcagctgacagatatactcaaccacctccccagagctagaggaaggaatggcatggggtggaaaagccctcctcctccttcagggctgggccct

SEQ ID NO: 676335 - DNA, 593 bp, Homo sapiens
ccccatatgtgttttctgtacgttgcccttgctcatagaacccattgatctttgcagcctaggaagaatgctcacctctctgcctcaccaggaactttctggacactgatttgggattttcacagaaaagcagaagctttgagagcttaacaggtgcgtgcccccctcctcccactaagggccaggcctgggcatcagagtgggccacgtgacccttaccctggcaggacagggcagggggttactgttggcccaagccaagggagttcagaggccaggcattcaggaagccagagtcattggcacaggtgggcagaagatgccagaggggccctgtattagtcagggttcttttaaagggacagaactaataggatatatatggttgtgtatatatataaagttaatacttaataaactcccctttatatatatataaaatatatatataaattatatatatattaattatatatataatatatatataaattatatatatattaattatatatatawtatatatataaattatatatatattaattatatataatatatatataaattatatatatattaattatatataa

SEQ ID NO: 676336 - DNA, 610 bp, Homo sapiens
cattgaaatgcaatcttgagggacgagtatttcacaggccatggaccggccttggtgctgactttgacgcacaccagctcctggtcctgagcgtgtcagcggggaaatgccctgcttctccagctttgcaggatggttgttcacggcttctaggccagcgctgttccaggctctgggagaccccgatgagcagccgaaccctgtctacccctgagggagcggatgtcatgtggggcatccggaaggttctgagcaattctgcttggaatctcagaggttccaacagaacagctgcaagttaccagttgacacgttcaagcacctggatgggtggtcagtttctgtagatcccagagaactttctggaaaggtggcagtgtgtgcccctagggcaagagtcaaaggtggtagccacccagggagccccaaggagaggttctggcgctctcaggacatccaggccacaccagtcttccaggcaccccccccgccccacctccaggcacaccagctctgcccaggttgcccaacctgtatgtgtccgggtcatggccatcgtcacccacagcgtcacaggcgtcctggccagcacctgcctcctgcyaaaacg

SEQ ID NO: 676337 - DNA, 554 bp, Homo sapiens
gcatagaggaggggcttccttccttcaaccccggggcaggagactggctccaatggcccccaggttctctgagctttggttttctcacgctgctggaaaagggccaggtatggaagtgggcagtggctgcagaggctgtcgatgcccccttactctgtcttcatcactgcaacaacggagccagcagaaacagggaagtgtttgaattctagagtcccaaggtctgggtttgaatcccagctcctgctcctgacttgcagtgtgaccttgtgacacatgtccctgagcctcagtttccctgcctgkaataaagggacaatgatccctgcccagcaggatcactgtgagcatcatatgggatcaggcacatcaccttcctgttgcatcgtgggctccaatcagaaagatgatgccacggggctgctgggctggcccgtagccaacaagggttggggagctactggcgaagcagccacccactcctggcactgtcagcctttatttattgccctgtttcattcttggttgcgtttcacaagatgactttatgggcc

SEQ ID NO: 676338 - DNA, 783 bp, Homo sapiens
cccctgccaggatgtggagtgtccggcttcacccggccaaccatagctgarggcctactacgtactgggctctgccgtggcaaagtgacgagcaaaatccactcagtctctcctcataagcctctcagtcctgtggaggagaccagcacaaacacgtttcagaaatcacatttgtgtattcattcaataattatttctggagctcccacttggcgccaggacctctgctaggaaacaaggagccacagccctgttgtcatggagtttacatgtagtgaggacacggccaagaaatagacatgtaatgtggcagagaagggtaagtgttgaggaaaatatagaagggttaggggcttcagagggatgagggctgcattttagatgagatggtcctggagcgtttgcgaggcaaggaggcagacaggtggcagatacaggcccaggtcacagtcacggcgagtcttgtgaggtgtggtgagcaccctggtcttggcctgagtgaggagaccagctttgcaaagggaggcgccagggtgggagcctgccatctgcctcgggacccctgcagcccagctccagcatgcagcatggtgggcactccagaacacttggaaggagagaagaaaagaaaatctagaaaggcactctctggtgggggaggggcctggggatgcccagggcacagacaagtaacatggaggcctggtccctgttctctggccccagagggtccacgtccaccaaggtccgacatatggatgtcccagggaggaaggcaatttc

SEQ ID NO: 676339 - DNA, 677 bp, Homo sapiens
aatggaaatagaattacctttctacctcttggcctggattaatttaaaccaaatatggagggtggatttagggtgacttcccttacaatacgagatatgtaccatttacaaaacccacttttgaaagacaacttgaaaaagcaggtgatcattctgtaagaggttgaaactaaggtagaatgtggagctaaaggtgcaccaggagagatctatgtacttatgaagatactgtggccagaagaaatgagttttcaaatatggatccatggttgaaggtttcagttgtatatgtacctatgcccggtgttgattgttttgatgaaacttttcttacctgggctgctctatagaaagctcacaggtaaatggcaaccaggatttcatttttttttttttttttgagacagagtctcgctctgtcacccaggctggagtgcagtggtgtgatctcagttcactgcaacctccgcctcccgagttcaagtgattctcttgcctcagcctcctgagtagctgtgactacaggtgcaygcctccatgcccggctaattttttgtatttttagtacagacggggtttcaccatgttagccaggatggtcttgatctcctgacctcataatcctcccacctcagcctcccaaagtgctgggattacaggtgtgaaggatttcttaa

SEQ ID NO: 676340 - DNA, 631 bp, Homo sapiens
tggcatgaacctgggaggtggagcttgcagtgagccgagattgcaccactgcactctagccagggcaacagagcaagactccrtctaaaaaaataataataataataagttttttagcatgccacatcattcccaccagttggccctttgttcacagatctgggtcaggaaaacattgcatgaagtatctgaggacataatgtgctacagacatgttatatatcatactgctctgtgataatgttaaggagggttgacaacagtgattgaaagtagcagacaattcaaagatctttaaccatctgatttttgaagacacatacaaacacacacacacacacagacacacatacatttattcaaaatgattggggaaatgatgtgtgttggaagaaatattccaaacttggctcaggtttatctaatattttatcattagctcaaaagaaggcactgaaaataaacttgtccaaggtataaaacacataattctggagtgttacaatgacagtagggagtgttctggatagttccaactttaataataaaagccagaagtagaatcccaacaggttggaaaaatgaaccaacccaatgagaagagtccgtaagtagtgaaaacaaatgcatg

SEQ ID NO: 676341 - DNA, 631 bp, Homo sapiens
ctgcaagtagagggactcagagatcatgcagcaaaagcagaaaaaggcaaatgagaaggagaaacccaagtagctttgtggcttcatgcgcaaccctcttgccattcaccagtgtccctgcatctgcagcaggtccctttcgtgcttccttcccctcaggtagcctctctgcccggggccatgggagtcacagttgccccttcccagtgttttttattcctgtggggctcaccccaaagtattaaaagtagctttgtaattccttggggaaaaaaaaagaatgaaatgatgcttaactttgagttatatttgtataaatgtgttaacatgtgttcaaaaattgcatgagattcctaaaaatctggtatatcttggcaaattgcattattctaacgctttttctctmcattctgtttgtaaatcctagagtgttgtgtcttcaagaagattgatggaaaaaaatggagactgtcacaggtactcttaaatacacacctctgctgataattttgagatcacacaattggactgcataagaatttcaaaaacttcagtgaaaaaaggggactcataaaattgctaaccaatatcaagcagagcaagaattaattacatgagactaaagtaataa

SEQ ID NO: 676342 - DNA, 652 bp, Homo sapiens
aggggtccagggcctcccgcctcccttcctagctgggagatgcgaggccagcaaggaaggagggggcatcttgcaaggcccgcccaccactcacttctccttgcacaggtagatcagtttggccacgttgtagcacagctgcacatcaaccacctcacacgtgggatacgcgtccctgtggccagggagagaaggaggcaaaagacaccgttggaaaagaaaacaccccaagcaggagacgtgcccacggatccaagggaaaggatggcagagtgatctcgctgctggtttctgtgccagcggagacctctcttctctttgtcttttatcctccaaaagggggaaattttgaaatttaatacaaagagggcttttgttttgttttgttttgtttagagacagggtctcactctgtcacccaggctgctgtacagtggcrcaatcatggctcactgtagcctcaaccttctgggctcaatcaatcctcccacctcagcctcctgagtagctggggctacaggcacatgccaccaggctgatttttattttttgtagagacggggtctcgctatgttgcccaggctgatttcgaacttctggcctcaagcactcctcctgtctcaccctcccaaagtgctgggattgtaggcgt

SEQ ID NO: 676343 - DNA, 652 bp, Homo sapiens
aggggtccagggcctcccgcctcccttcctagctgggagatgcgaggccagcaaggaaggagggggcatcttgcaaggcccgcccaccactcacttctccttgcacaggtagatcagtttggccacgttgtagcacagctgcacatcaaccacctcacacgtgggatacgcgtccctgtggccagggagagaaggaggcaaaagacaccgttggaaaagaaaacaccccaagcaggagacgtgcccacggatccaagggaaaggatggcagagtgatctcgctgctggtttctgtgccagcggagacctctcttctctttgtcttttatcctccaaaagggggaaattttgaaatttaatacaaagagggcttttgttttgttttgttttgtttagagacagggtctcactctgtcacccaggctgctgtacagtggcacaatcatggctcactgyagcctcaaccttctgggctcaatcaatcctcccacctcagcctcctgagtagctggggctacaggcacatgccaccaggctgatttttattttttgtagagacggggtctcgctatgttgcccaggctgatttcgaacttctggcctcaagcactcctcctgtctcaccctcccaaagtgctgggattgtaggcgt

SEQ ID NO: 676344 - DNA, 1161 bp, Homo sapiens
ctgctccagcacctcccaccttccaccaggtctggggatgttccatgggggagtctctggggctagtgatttctgcccagaatcacctgagaaacctgtgtaaatacagattcctggaccccaactcaggcctcctgaatggactttgctgggggcagtgtccagtaatctgagtgttaaagattctatgcgcattaggtttgagaagcaggggagggtgaggataggtgggggccaatagcaggcaaggaagctgccggagaattcaggtgagaagaactccgtcattccattacacttataacctggcccttctggatgattcctccacttcatgattgccagtgatgagagaaaagaacacaaatgggaacaaactagaaaaacattttttcctgaggtattttctgggctttctctgaatatttgagagtaagaacaggtgaacagaggggtttcttttctctctctctaaataccctgaacataatcaggttatatgcaaattcagcattaaaacatttatttattcatttatttttttgagacagagtctcactctgttgcctaggcaggagtgcagtggtgcgatctcggctcactgcaacttccaccacccgggttcaagtgattctcctgcctcagcctcccaagtagttgggactacaggcacccacaattacgcccggctaatttttgtatttttagtagaggtgaggtttcaccatgttggccaggctggtctcaaactcctgacctcaaatgatccacccaccttggcctcccaaaatgctgggattataggtgtgagccactgcgctcggcctcagcatcataacatttaatgctccaaggtaacagtatgtaggtcaatagatctatcaaagtgtaattatttccaccctcctctaaatttttgtttcttctccacccactctgcctcmctctcctgcaaaaaacccttttgtatctttccccacagcttcagtacttccggaaattttctcctacaagacccctgacataggaggcaggagaccaaggtgctgattctgacctgtgcctgcctgggaacacttagcctgccatttccatgcttatgcagagaagttcctatcttgcccctgatcagaagccactatcatgactccccgcatcaca

SEQ ID NO: 676345 - DNA, 1481 bp, Homo sapiens
caccaattttacattcccaccaactgtacacaagggttccagtttctccacatcctcaccaatacttgttattttctgttgtttgatagtagccatcctaatggatatgaagtggtatcttgtgattttgattatcatcttttttttggatgagggaaagtttgaccccatatgtgggtgtctgtcaccaagatagaatgaatgtaatttccaaggaaaaataatcccaggcaacctcttctggattatgtcccaactgattggaaatgctgggaactttctgtggttgaaggaccttgacatttgttgtcaaactgcctgtgagtcacttatcttctgggggaaaataaacataaccgtgtcttccagtctgaagtggggtgggtgggtgatatgaagcattgcacacagcagagcctgctgcccctccacagcctctgcaaatgccgtgtgaaggtggtggacctgctaccagaactggtgtcctgctgtctctgtagttaactcttaggagaaataacggttgtgtgtgtggaggtgaagaatgggaagggaaggaggggtggggagggctggtgcttctgaggttcccaaagttcctggactcgaattttctgttggcaaataagctggtcagaacttaggaatgtggtaagttgatccaggaagaagttgaaggtttctatctgtgtttttctgtgcggttgtgtatgtgtaacacgtttgcagaaatagttgaagcttattattttcttcaaaagatcttattttctagtgtgtaaatcacaggtaattaaatatgagttaaagtaagagagagacccttgggctatctcagacttagctttgagagagagaatgatcatgggtctaaggcatcactcttggttttataggtttggaaactcaatgttattagttccatctaggagttatcaatgggggattggggtttacatgcatcagaattgtaagatactgctaagaatgacagttcattaattgatgagaactgtgcctcgctgagaaagccagcactcctggggtgtgtgtactccgcagaccttttcttttgtttgtttctttctttctttttttttttgagacggaatctctgttgcccaggctggagtacagtggcacgatctcagctcactgcagcctccgcctcctgggttcaatctattctcctgcctcagcctcccaagtagctgggattacaggtgtgtgtcaccacatactaattttttgtattttttttttttttagtagagacagggtttcaccgtgttggccaggatggtcttgatctcctgaccttgtgatacggccaccttggcctcccaaagtgctgggattacaggygtgagccattgtgcccggtcctcagcaaaccttttctatcggcctatttctatctattttctatcggccaccttttctattggcctatttccatctgtctgaggaatcttgatgca

SEQ ID NO: 676346 - DNA, 1481 bp, Homo sapiens
caccaattttacattcccaccaactgtacacaagggttccagtttctccacatcctcaccaatacttgttattttctgttgtttgatagtagccatcctaatggatatgaagtggtatcttgtgattttgattatcatcttttttttggatgagggaaagtttgaccccatatgtgggtgtctgtcaccaagatagaatgaatgtaatttccaaggaaaaataatcccaggcaacctcttctggattatgtcccaactgattggaaatgctgggaactttctgtggttgaaggaccttgacatttgttgtcaaactgcctgtgagtcacttatcttctgggggaaaataaacataaccgtgtcttccagtctgaagtggggtgggtgggtgatatgaagcattgcacacagcagagcctgctgcccctccacagcctctgcaaatgccgtgtgaaggtggtggacctgctaccagaactggtgtcctgctgtctctgtagttaactcttaggagaaataacggttgtgtgtgtggaggtgaagaatgggaagggaaggaggggtggggagggctggtgcttctgaggttcccaaagttcctggactcgaattttctgttggcaaataagctggtcagaacttaggaatgtggtaagttgatccaggaagaagttgaaggtttctatctgtgtttttctgtgcggttgtgtatgtgtaacacgtttgcagaaatagttgaagcttattattttcttcaaaagatcttattttctagtgtgtaaatcacaggtaattaaatatgagttaaagtaagagagagacccttgggctatctcagacttagctttgagagagagaatgatcatgggtctaaggcatcactcttggttttataggtttggaaactcaatgttattagttccatctaggagttatcaatgggggattggggtttacatgcatcagaattgtaagatactgctaagaatgacagttcattaattgatgagaactgtgcctcgctgagaaagccagcactcctggggtgtgtgtactccgcagaccttttcttttgtttgtttctttctttctttttttttttgagacggaatctctgttgcccaggctggagtacagtggcacgatctcagctcactgcagcctccgcctcctgggttcaatctattctcctgcctcagcctcccaagtagctgggattacaggtgtgtgtcaccacatactaattttttgtattttttttttttttagtagagacagggtttcaccgtgttggccaggatggtcttgatctcctgaccttgtgatacggccaccttggcctcccaaagtgctgggattacaggtrtgagccattgtgcccggtcctcagcaaaccttttctatcggcctatttctatctattttctatcggccaccttttctattggcctatttccatctgtctgaggaatcttgatgca

SEQ ID NO: 676347 - DNA, 1481 bp, Homo sapiens
caccaattttacattcccaccaactgtacacaagggttccagtttctccacatcctcaccaatacttgttattttctgttgtttgatagtagccatcctaatggatatgaagtggtatcttgtgattttgattatcatcttttttttggatgagggaaagtttgaccccatatgtgggtgtctgtcaccaagatagaatgaatgtaatttccaaggaaaaataatcccaggcaacctcttctggattatgtcccaactgattggaaatgctgggaactttctgtggttgaaggaccttgacatttgttgtcaaactgcctgtgagtcacttatcttctgggggaaaataaacataaccgtgtcttccagtctgaagtggggtgggtgggtgatatgaagcattgcacacagcagagcctgctgcccctccacagcctctgcaaatgccgtgtgaaggtggtggacctgctaccagaactggtgtcctgctgtctctgtagttaactcttaggagaaataacggttgtgtgtgtggaggtgaagaatgggaagggaaggaggggtggggagggctggtgcttctgaggttcccaaagttcctggactcgaattttctgttggcaaataagctggtcagaacttaggaatgtggtaagttgatccaggaagaagttgaaggtttctatctgtgtttttctgtgcggttgtgtatgtgtaacacgtttgcagaaatagttgaagcttattattttcttcaaaagatcttattttctagtgtgtaaatcacaggtaattaaatatgagttaaagtaagagagagacccttgggctatctcagacttagctttgagagagagaatgatcatgggtctaaggcatcactcttggttttataggtttggaaactcaatgttattagttccatctaggagttatcaatgggggattggggtttacatgcatcagaattgtaagatactgctaagaatgacagttcattaattgatgagaactgtgcctcgctgagaaagccagcactcctggggtgtgtgtactccgcagaccttttcttttgtttgtttctttctttctttttttttttgagacggaatctctgttgcccaggctggagtacagtggcacgatctcagctcactgcagcctccgcctcctgggttcaatctattctcctgcctcagcctcccaagtagctgggattacaggtgtgtgtcaccacatactaattttttgtattttttttttttttagtagagacagggtttcaccgtgttggccaggatggtcttgatctcctgaccttgtgatacggccaccttggcctcccaaagtgctgggattacaggtgtgagccattgtgcccrgtcctcagcaaaccttttctatcggcctatttctatctattttctatcggccaccttttctattggcctatttccatctgtctgaggaatcttgatgca

SEQ ID NO: 676348 - DNA, 971 bp, Homo sapiens
caaagtttatgacatggagagaagccctgtcctgtccttgggcctgtggggggagagaggtggctgaccaacagcagtcttcctgcaagtgaccctcacgaagacacctgctcgcctctgcccagccaccctccatcacaggtaacacatctgccctgctcttccccacaacacccttggcctgactcccaagagcagcaggggtgtcagatgaagcggtcaacacagataacctgacrgctaaacaagagaacgaaatgaatattcagcagctggttctgcttcagaggctgttaccctgttctccatctctccttcaatcccaggaacagaagaaaagaacaccaatcacctctcagccccaccattctagatccaggtccatggtggtagagcagattgtggagattaacattcaaattcaaacagtcgcagcattctgtcagtgcttttaataagaaaaagtgtatatcctttggataaagcagacccaatttatatatctaatgtatgatctcttgaattcataaaaggccatgtaaaacatacatacatacatacatacatacatgcatacatacgtagacacacttactttgaaagctcaaaacacaaagccatctctctacttcaacatctgaaaaatactatcttgccaatgtatttcccaagaagaagacagtaaaaaggagtataaacaagaggaaaaaaagtataaaacctgattatcatcttcaatccaaacatctcagacacaggtagacccaaggctttggagaatccattccttgcatacaactcaattcctgctgagcctatgtgaccagacagacaagtgcagactggctttgtgtttaaaccctaaatgataccattaacatgaggctttcagttctcctgcccaagtatttcccggggaaatcactccgacaaataagctttcctgggggcaactggcatcctctttcagc

SEQ ID NO: 676349 - DNA, 918 bp, Homo sapiens
tgggctcctgtgagaaagactacacagccctaagaaaaaattcaagggaaaaagagcaccagaaccccaaaactcccatggtaaatgtagaaccttaagaaaacaatctagcactcttaagaaagagtacacttccactgcaggctttcttcttttaacctcttagtggattgtctgatgaaataatcatgttcagatatatatatatatcgtgttcagatatatatatatatagtgttcatatatatatatagtgttcagatatatatatatcgtgttcagagatatatatatatagtgttcagatatatatatatatatagtgttcagatatatatatatgtattgtgttcagatatatatatatataaaatcccaggatcagcttgattctgggcactgatttctatacgaatttttggatgcccaagtccacacagcaaagttacagccctgataaacacctaaagtagtattgcaaattactttcttaaagaaaggaaatgaaggtaaaaagtatgttgttagaattccatttgattgcatataaaagagaacttaaataagtgacttaaacaaggggtacctatttccttttcatctaaaagatgtctagagaagagcaaacctggrctggcaagggcacatagtcactgagaacccaggctccttctgtttttctgcttttcattcttagcatgagatttcttagagtcgtaggtctcctcgtcgtccagaatggctgctggagctccagccatcataacttattccaggcaggagaaagaagcaagggaattggcaatgagagaaagggcgcacttctcagctgagccaacttgactttaagaagcctacagagcagccccatgcaatgaccctgccttacatctcatgagccagctctacctgcaggga

SEQ ID NO: 676350 - DNA, 633 bp, Homo sapiens
caaaaatttttgccagggatggtggcacacrcctgtagtcccagctacttggagggcctgaggcaggaagattgcttgaatccaggaggctgaggctgcagtgagtcaagatcccaccatagcactccagtctgggtgaccatatgagaccctgtttaaaaaaaaaaaaagaaaagaaatctaaactgcataggggtcttagggaagggctctctgagatgacatttaagctgcaatttgaaggacagtggttagggtttggatgtcaatacataacaacttcttctttgcccaagttctgacacaacagagagcagatgaggaatcaggtatattgaaatcaaaataacacttccttactgttccattcactgttcctgcatgacaaaccacctacaaaccacctggtgtttagtgtgcaaaataactgatgctcatggtttctgtgggccaggaggtcagagagggcacagcagggatgacttgtctctgccccatgaagtctggggcctcagctggaaagactcaatggctatgaggtccttgatggctggggctggaatcatctggagttgtacatgtctggaaatggatgctggctgtaggctggcacctcagcagggccttgagcca

SEQ ID NO: 676351 - DNA, 616 bp, Homo sapiens
ctattaggcgtgaaattccaaggacctagagatcactcccagaagctgagtgtaaagaccagacctctcctcggtcaaggttaaattctttaccacacaatctttaaagagtaaactgattgagccatacaaagataggtcgaaagattaaacatctttcccgatattatgtaaccctccaaaaatttttaagatttttttttttacatcttagattttaagctattacttcaaatgtgaaagagaaagacctccacctcttctgcagctatagctggccttatatkctgatttttaggttcttacctattctcttttggtaatacgttatagataatagtgagcacctcagcagcagattatattaactttatgcagtgctctttgcaagcttattttatattttgcttgctgtacaatgttacctagctatactttatgatggtagttagaactttagctctctggacaaaataatctggttctcacctcggttgttagttctactgccctgctctaactaaaaatatgaaacctctttcctgcctttttttaaacaacttcagtaccaataaatctttattcattgtattttcccaagaaaaggagaagggat

SEQ ID NO: 676352 - DNA, 2494 bp, Homo sapiens
attgtcattctgtgaacaggccagtgttgttagaaagggagaagtgtgcaagggaagctgggtgccctgttgttggacaaggggaggcttttggagtaaraagagaagtgacattattgcgttgcactctaaaaacctcttactggctgtggtatgggacatgagtgggtggggtgggatgagtggggctagggtgggagtatgccgaagtggactgcagagatggcacaatgacctaaattaatgaaagagctatgttgaaaaggagtacattcaccagggccagtttgaagtggacactttgaaatcaccttattgtttagggaggcattgagatagaatgaagttgataacacagtgagaaggagaaagtattatcagaggagaaacattgtcagcatttctcaaaaagaggacctgcctacccaggctcttcctcagaccatatcagaacctcatgggtggggccccagaatctgcattccaataagctcttggagaacctctataataggcaccaagaagacccttttcctgcagggactacatgatcctcacccaacgtgaataagagaatgtctgttgcattgttacttataatagcaaacaattggcatcaactgaaatgtttaaaataagaatggtttgattaaattatgctaaatttcattctaatgaaatgttatggttacataaccataaaaataatgttttagaagagaattggaaatactggaggatacctatgatatacaatgatatatttttgagtatctttgaattttccaaacctctcaacgagcaagaattattataaataaaaaaataagaatacatttaaaaatataagaattaaaaagtgataagaggtaaaataggtgacgttgggctaagggacttgagatatgaatttaaatatcaagaagaaaaataaatatatctggttcttaatgattaaggtgccttacttcttaagagaaaaccaaacaaaaaccctccacttacattattccaaaagtgaaaataccttgagtcacatcagcttaccaagaataacattcgtgctttcctttttaatagtatttctattctagagcattttcatgtcacattatgtgcacagcatagtgcatctaaaagcagctacaaggagaggcttttgtaggtatccgcagatgcagaagttgaaggaggctctgagagtttgagatcttgacatgattgagccagcaaaaccccaggcctctacctcccaactagttctctctccacaatcttggctgaattttctctggaaaaatgaactcatccatactcaaggatgaatgtgaaatcaatttaagacaaagaaaatatatttattaatttaagcttaagaaactatgaaaaaatcagaatgctcatgctttctatttgtttaatgtttatgaactgcttcttttactcccttgggcaaacacatataataataatataaaggctcagattctgaagccagactgcttgagttcagtgattggcacttactagctgtgtgttcctgggaaaattatttaacttccctgtgcctccgttttctcatttataaaatagaggtaatgataatatctgcctcaaagggttgtgatacagatttaaaagacttgacatacctaaagtgctttagaacagcacctagcacatagtaaatcctaagtaggagtaaatatacaagacttcattttcttgttttatttacagttctgggtacatgtgcgggatgtgcaagtttgttacataggtaaacatgtgccatagtgatttgctgcacctattaacccatcacctaggtattaagcccagcatgcattagctttttttcctgatgctctccccgcacctgtcccctcactgacaggccccagtgtgtgttgtttccctccctggatctatgtgttcacattgttcagctcccacttataagtgagaacatgtggtgtttggttttctgttcctgtgttagtttgctgaggataatggacaagccttcattttctagagacaaataattttaataaattataaataatagacaaatattataatggatctgataaatactctgatagagataggaacaaagtgctataaatacactgagaaggaaataactaaccctaccttgggctatcaaagaacaatttacagggaggcattcttgttttaaatgaaaggtagacaggatttttgccaaggtgaaaataatgggcagagagaatagcatatacaaagatagagaggtgtaaaaactgtggtgtggctggaacctgggaccttgttgcagatgatgagtaggccagcctgccacagactgcaccaagacgtaacaatgtgacaaaaaatgatccttaatgatcagtgatttgacaataattcctcctatgtctctattaatataatccaagccagagtgaggtctctatacacaataaacctgaacatattgtttaagcca

SEQ ID NO: 676353 - DNA, 639 bp, Homo sapiens
tttagtattagaagatattcacatagtgcataatgaaaagcaagtctttggatttttgagtcaaggacctacacaattgctgagagtattagaagatacttgttgtattaggtggtcgtaaatgacaacaaagcacaggactaataggacagaggaaaatgtgctgttcaagaaaaatagtcttcttttcttaaaacatatgacatttctgcatcctgcatttgccatgatataatgacccattaacagaaaagaaatgaaaaataaggagtcagcatggttgatggttgttacctaagcccataataacattttaaattgcttaaagttgcagtctcctaaagagaaaatatagttgttgagtggcccttttggctacctggcaagatgtataattcaaaagattcaagatttaattcttctggaatcttatttcagatttcctatgtaaaagagtcgagagcatwtaatatattacagaggagtatgagacaattaaggccagaaaaatataggcagagaaatataagaaaacatacttctttccctgtttcacaatactttggtagagtgctaagtaagacaaacaaccctataattaggaagaaaattatgagaagttatttttattctcaaaaa

SEQ ID NO: 676354 - DNA, 639 bp, Homo sapiens
tttagtattagaagatattcacatagtgcataatgaaaagcaagtctttggatttttgagtcaaggacctacacaattgctgagagtattagaagatacttgttgtattaggtggtcgtaaatgacaacaaagcacaggactaataggacagaggaaaatgtgctgttcaagaaaaatagtcttcttttcttaaaacatatgacatttctgcatcctgcatttgccatgatataatgacccattaacagaaaagaaatgaaaaataaggagtcagcatggttgatggttgttacctaagcccataataacattttaaattgcttaaagttgcagtctcctaaagagaaaatatagttgttgagtggcccttttggctacctggcaagatgtataattcaaaagattcaagatttaattcttctggaatcttatttcagatttcctatgtaaaagagtcgagagcatatwatatattacagaggagtatgagacaattaaggccagaaaaatataggcagagaaatataagaaaacatacttctttccctgtttcacaatactttggtagagtgctaagtaagacaaacaaccctataattaggaagaaaattatgagaagttatttttattctcaaaaa

SEQ ID NO: 676355 - DNA, 870 bp, Homo sapiens
ggaactggaattggttacctccaggaaggagaccaataattgggaactgggaagggaaggacacctgcaaacgctgtactccctattgaagctttgtaattttgaactatttccttacaattaagtaaggaagtaaaaaatgttaaaccataattgtaaaactggaagcaaaacaagctgtacaaaacactttctatatgtacatacacatgttgtgtagaaaaagaaaagaaggatacacttcagactggtggcagtggcagaagttttctgggactggataacaaagggtggtcaagggtgaccttgactttatctttttgttgttgttggggttttttgtttgtttgtccgttttgagacggggtcttgctctgtctccaggctggagtgcagtggcagaatctcggctcactgcaacctccgcttcccaggttcaagcgattcccckacctcagcctcccaagtagctgggactacaggcgtgtgccactaagcccggctaaattttttcattttagtagagatagagtttcaccatgttggccaggatggtcttgatctcctgacctcctgatccacccgcctcagcctcccaaagtgctgggattacaggcgtgagccaccgcgcccggcctgttgttgttgttgttgttgttgttgttttttaacatacagggtcttgctttgctttttttgtttgtttgctttggggttttgtgtttgtttgttttggagttttttgtttatttgttttgagatgtcatccaggctgcagtacagtggtgcaatcatggctcactgcagcctgaaccttccaggctccagcaatcctcctacctcagcctctggaatagctgggactacaaa

SEQ ID NO: 676356 - DNA, 626 bp, Homo sapiens
caggtcagtgttacaaatgaccataccctcacactcgctgttccaaatgatggcttcttactaagaacctgagaatttctgcctgcgggttttgtctgggtgcggatcaggccaaagttccatggagttaacaccctggggcaacacttaagcaatgaaaaccagcagttagtggatgaatagcccagcaygggacaaccctggggcaggttctgcacagtcacctggccagacccagcagcactgagccctggctgtccacagcagtgactgctcataaccactctgccttctctttcagtctcacttcccctctaccatctcacgctttctgggtcaaagaaactactatcttggggtctgcttctgctggagctcaaaccaagacaactggctagttggctgattggctgtgtgaatgggcacgattagcagcaaagaaagaaatggaagcccgcgcgccggctgggccctggcacatgcgctgcccccacagtgtgtctagactacgtcggggcacgtgcacagccaacagatccgacacaggaaaaagcacttctcagctgtccccaccatcctgctatttgtcattccatccatctgctgtccccacgaaacgctcaccc

SEQ ID NO: 676357 - DNA, 626 bp, Homo sapiens
caggtcagtgttacaaatgaccataccctcacactcgctgttccaaatgatggcttcttactaagaacctgagaatttctgcctgcgggttttgtctgggtgcggatcaggccaaagttccatggagttaacaccctggggcaacacttaagcaatgaaaaccagcagttagtggatgaatagcccagcacgggacaaccctggggcaggttckgcacagtcacctggccagacccagcagcactgagccctggctgtccacagcagtgactgctcataaccactctgccttctctttcagtctcacttcccctctaccatctcacgctttctgggtcaaagaaactactatcttggggtctgcttctgctggagctcaaaccaagacaactggctagttggctgattggctgtgtgaatgggcacgattagcagcaaagaaagaaatggaagcccgcgcgccggctgggccctggcacatgcgctgcccccacagtgtgtctagactacgtcggggcacgtgcacagccaacagatccgacacaggaaaaagcacttctcagctgtccccaccatcctgctatttgtcattccatccatctgctgtccccacgaaacgctcaccc

SEQ ID NO: 676358 - DNA, 1477 bp, Homo sapiens
cctggctaatttttgtatttttagtagagaccgggtttcactatgttggccaggctggtctcagactcctgacctcaggtgatcctcccacctcgacctcccagagtgctaggattacaggcacgaaccaccacgtctggccaaaatttgcattttcacaagatcccaggtgcgcactgaagtctgaaaaaccctgcaccggaatgtcagttctgtgagggtcgggagcgggtctgtctcattcacatcatgtgtgttaaggttgtagaagtactgggctaacagcaactgtacctgcgtgacttgggcatggcattcaaactgtttgtgcctccaygacctcatctataaaatgagagtgatgacaatagttcatgcctcagtggagttgttggggtgattaaatgagttgatatataagaagagtttgctcatggtaatcattatataagtgctattatcagtacctccagcccaccctgctgcattttcctaaaccttcctggccacagagctaatagactcatggtttggctttgattaggtgcctatttggttttggcatccattgtttctttttgtttgttatccatatattacaatgatataacatacaactaaggaaattgtggggctgagtgcagagggcggtacattgcccacccctttaccaaccagctcttctcttccttacgtgctcatactctttattagttaatgcatttgtcaaatatttattgagcagctattgcatgccgggcatcattacaagtgcctgacttacagcaatgaacaaagcagaatccctactcctcacccttatgaactttcgagtcttaacaaaaggagacagaaacaaaggtataacagatagacagacaagataatttaatgtagactcagggtgatatgctgctatttttcactcatatatcagatgtgttttgcatgttgtcacaaagccttcaccttaccgcccttttaatgtcttcagaatacttgataaacaaacacgataggatttatgaagcccagtgagtgtcagggctagtgatagatttcaggctatccatgtgacgtcacttgaacacagaggtctctggggctggacatcttagagagtgtgtagctgccccttgccttctcagctttccatatcagacagttcgggttgtttttctttatcccttctcagagcacagacgaggttatctttgttctctctcacacacacagacacgcaaatgtcaggaaagaaaattatgaataactgtgctcccagagcagcagccaaccagtcagggttagggattgatgtctcagtaccccagcaccccatcctttgtggggtttgtttgtttgtttgtttgtttgtttttgagatagagtctcactctgtaacccaggctggagtgcaatgtctcgatctcggctcactgcaatctccccctcccaggttcaagcgactctcctacct

SEQ ID NO: 676359 - DNA, 1477 bp, Homo sapiens
cctggctaatttttgtatttttagtagagaccgggtttcactatgttggccaggctggtctcagactcctgacctcaggtgatcctcccacctcgacctcccagagtgctaggattacaggcacgaaccaccacgtctggccaaaatttgcattttcacaagatcccaggtgcgcactgaagtctgaaaaaccctgcaccggaatgtcagttctgtgagggtcgggagcgggtctgtctcattcacatcatgtgtgttaaggttgtagaagtactgggctaacagcaactgtacctgcgtgacttgggcatggcattcaaactgtttgtgcctccatgacctcayctataaaatgagagtgatgacaatagttcatgcctcagtggagttgttggggtgattaaatgagttgatatataagaagagtttgctcatggtaatcattatataagtgctattatcagtacctccagcccaccctgctgcattttcctaaaccttcctggccacagagctaatagactcatggtttggctttgattaggtgcctatttggttttggcatccattgtttctttttgtttgttatccatatattacaatgatataacatacaactaaggaaattgtggggctgagtgcagagggcggtacattgcccacccctttaccaaccagctcttctcttccttacgtgctcatactctttattagttaatgcatttgtcaaatatttattgagcagctattgcatgccgggcatcattacaagtgcctgacttacagcaatgaacaaagcagaatccctactcctcacccttatgaactttcgagtcttaacaaaaggagacagaaacaaaggtataacagatagacagacaagataatttaatgtagactcagggtgatatgctgctatttttcactcatatatcagatgtgttttgcatgttgtcacaaagccttcaccttaccgcccttttaatgtcttcagaatacttgataaacaaacacgataggatttatgaagcccagtgagtgtcagggctagtgatagatttcaggctatccatgtgacgtcacttgaacacagaggtctctggggctggacatcttagagagtgtgtagctgccccttgccttctcagctttccatatcagacagttcgggttgtttttctttatcccttctcagagcacagacgaggttatctttgttctctctcacacacacagacacgcaaatgtcaggaaagaaaattatgaataactgtgctcccagagcagcagccaaccagtcagggttagggattgatgtctcagtaccccagcaccccatcctttgtggggtttgtttgtttgtttgtttgtttgtttttgagatagagtctcactctgtaacccaggctggagtgcaatgtctcgatctcggctcactgcaatctccccctcccaggttcaagcgactctcctacct

SEQ ID NO: 676360 - DNA, 1477 bp, Homo sapiens
cctggctaatttttgtatttttagtagagaccgggtttcactatgttggccaggctggtctcagactcctgacctcaggtgatcctcccacctcgacctcccagagtgctaggattacaggcacgaaccaccacgtctggccaaaatttgcattttcacaagatcccaggtgcgcactgaagtctgaaaaaccctgcaccggaatgtcagttctgtgagggtcgggagcgggtctgtctcattcacatcatgtgtgttaaggttgtagaagtactgggctaacagcaactgtacctgcgtgacttgggcatggcattcaaactgtttgtgcctccatgacctcatstataaaatgagagtgatgacaatagttcatgcctcagtggagttgttggggtgattaaatgagttgatatataagaagagtttgctcatggtaatcattatataagtgctattatcagtacctccagcccaccctgctgcattttcctaaaccttcctggccacagagctaatagactcatggtttggctttgattaggtgcctatttggttttggcatccattgtttctttttgtttgttatccatatattacaatgatataacatacaactaaggaaattgtggggctgagtgcagagggcggtacattgcccacccctttaccaaccagctcttctcttccttacgtgctcatactctttattagttaatgcatttgtcaaatatttattgagcagctattgcatgccgggcatcattacaagtgcctgacttacagcaatgaacaaagcagaatccctactcctcacccttatgaactttcgagtcttaacaaaaggagacagaaacaaaggtataacagatagacagacaagataatttaatgtagactcagggtgatatgctgctatttttcactcatatatcagatgtgttttgcatgttgtcacaaagccttcaccttaccgcccttttaatgtcttcagaatacttgataaacaaacacgataggatttatgaagcccagtgagtgtcagggctagtgatagatttcaggctatccatgtgacgtcacttgaacacagaggtctctggggctggacatcttagagagtgtgtagctgccccttgccttctcagctttccatatcagacagttcgggttgtttttctttatcccttctcagagcacagacgaggttatctttgttctctctcacacacacagacacgcaaatgtcaggaaagaaaattatgaataactgtgctcccagagcagcagccaaccagtcagggttagggattgatgtctcagtaccccagcaccccatcctttgtggggtttgtttgtttgtttgtttgtttgtttttgagatagagtctcactctgtaacccaggctggagtgcaatgtctcgatctcggctcactgcaatctccccctcccaggttcaagcgactctcctacct

SEQ ID NO: 676361 - DNA, 1927 bp, Homo sapiens
tgtatataaatcctgaagtattgggtctgacacaatataaatcataatattaaaaaaaaaagttgtgttgaaggattcccttatgccaggtgccattctatgtaagctggggcctttaacgtccacagccaccctgggaaacagacactatgaccatgcctattttagttacggaaggcgaggggtcataggggttaagtaacttgcccaaggtcacaaaatgaagtctggataagaaccaaggcartctcgccccctgaggcagacccggcctccaaaacactgcctctcttttgtctagggatagcgcttattaaaaaggcggtaatgggtggtcactcttatttcataggtatcattttgccagctacccaccataggagtcatttttaccttgcaaatctgcaagctgtgaacaaacacactgcttcttctaaagtactgttacttttcacgtgctgtgtcccaaagccaggatgcacaacctttctctggagggatcttgcaccaaatacccgaggtagcccaagagaaagaacaaatccctgcagccggccgttgccggaagccaagctggaaagctctctaagccttagctttaagtctataaaatggtaaaccgaagaaagttgaaagccattcctgctggcccttagtctccactttcatccccacgacggcctgggaaaccatacagagggcaggctcttgtcttcatccctggcccaggcgctcatgcgcaccgggggccttctccaatcgttcataaactgctcaccagcgctctgggcgcgttcccgggagctcccttctccgcccagctggtgcagaggaaagacagtctggggaagaagcaggaggtgtcggtactgccacctagaagtgaccccaccagcggtgcgctcttagacaagactggccttgagtgcatcacgtgcggccctggtcactccagatgcccagggagcagcacctggtcccggtcagccctagggcgcacagctcagaaatgccagagcagaaacgcttgccctgggggaagaggcaactcgcatgtggagctgggcagctggagcatctgtggaagttccaggaaagcgctgggggaggtggcatgcccgctgcctaattcccccgtggacccgccgccttaggtttctcagaagcagggctgagcagcttggagcagtgggctccgtgggagctcccggactcccctagctcccacctcatcagtgagggaagaagtgctccttctgccctcggcagaggggagtcagggacccaggctgcccctctcaactgcaatggtacctcctcccggctctggcccagcaatgctactctccaaaccttcctagacataaggtttccttttaaaccaggacacccatgctgtgactgttacccagagcttcatttcttgtttgtttgtttgtttaggtagatcatagctgctcagttttttcctccggaggttacggactacatagacttcttttcttggctccagactgatggtggtgggtgggtggggcggggggtatgaaatacagaatgtggcccgtctacatcgccatcactttattgtactgtcacccttaatttaactataaatactacggtgggggctagtcgcgggcggcctcgggctgctgggctgtgcgcgccctgaccccagacgccgaccctcccggctctgtacactatttacagctcctcgttcctctttctcgaccccctcccgcaaggcagcgcgtgtgcaagaaagtagcatcgtctgtctgtgcaagtccttcgagttaggtaagtaatacgggcaagtgtcccgcggccgtcagctgtccgagtccaaatcgcttttaccttcctcttccctcttctccggtgacgccttcgacgacgacgtcttgttccacttctccgc

SEQ ID NO: 676362 - DNA, 653 bp, Homo sapiens
gattctccctttttgaacacataaggagtgctgtagcactgaggtttgatgacgtagttatttgtgttcagacattatgaaaacacamtgctaacctggtaagtttggaagttatcatgtgaaagccttttctgaagatgagatttttccaggtctctgagacctaacacaaacccatttttcagcctttgacagttttacagttactcaaaataattgagactgttgtgaagtaagtatattgaaagcctaaatagttgatctcttctggccagtctgcaaaaatatgctggcctgtttctggaaagtatgcccaactcagaggatgggaatggggaagagcagaagcgtgcagagggaaataacagtcaggctgttcttgatgtcaactggaggaagggcagtgctgtatatggcaagaaaatagatgtttttaaaagacatgacatgaaaaatctccctcctgttagtccccagttccttctcccaaattaatctctgtgaaacttttttgggccaagcatggtggctcatgcttatagtcccagcactttgagagacagaggaagattgttcgcgcctaggaattccagaccagcctgggcaacatagtgagaccttgtctctacaaaaaaaaaatgttaattagctgg

SEQ ID NO: 676363 - DNA, 1159 bp, Homo sapiens
taagcacatctttattctgcttaatcttcataatcccaatatgtaaaaatcccattgtacagatgaagaatggaggcttgagtctaagccagtctaaaacctctagcaaataacgcaaccaatatatgtcccaaacctgtttagccccaagaaattgctggagatagataaaaacaaagaaagaaaatggaaaagggatcctcttagtcagttgttacaaacaccgacatggtctgttcttcttcagagatgccctgctttccttgtttggcataactccatcagaggcaccaatccatctgtttgcttctctaacaatctggcactacctggrgaacataatcttcctgccattttaccacaaaaatacccatatgctggagtcactgtagatgagaattatagcctgaccacaagacagacactttagaagctgtgagaatcccaagggataggaaatctttgttgaatatataaacctcttgcagaccatcgaggaggaaagcgaacttgaaggcttaaactggggaaatcttactagtacacaatgtgggaggacgaagcctttgcagcccctaagaaggattcacccagccagctaggtaagtcacccagcatcacaagggactgatgtcagggttcataaataatagtttggacaacatatgtatggctgacatcctgtggaaaaacctccagctcttctgaaccctcttctctcccactgcctccccagggaggctagaaattcagattctcactgtcctaacctctttttctttttttctttctttcttttctttctttcttttctttttttttttttttttttttttttttttttttttttgagaaggagtcttgctctgtcgcccaggctggagtgcagtggcgcgatctcggctcactgcaagctccgccttccgggttcacgccattctcctgcctcagcctcccgagtagctgggactacaggcgcccgttaccacgcctggctaattttttgtacttttagtagagacggggtttcactgtgttagccaggatggtctcgatctcctgacctcgtgctccacccgcctcggcctcccaaagtgccgggattacaggcgtgagccaccgcgccctgcctctaaccgctttttcatgggtggccttg

SEQ ID NO: 676364 - DNA, 440 bp, Homo sapiens
catatatctttgttccctcataaaactcccaaatatgtatataaaggtttttttttctgaaaaagatacaaatccataagtaccaagacactggaagagataagacatttgctatctgctgatttattatttatttattacctgataatatcaacaaattttgggaagatgtaattggatagaggcagaaagagaaatataaacaccaaaagcctgccaaaaagggcacgatgaaggcaaaaagttctttcccccaaagctgtaaagtcayaggcagtggcatcccctgaaactatgacagctgagatgagtcacagggctaaaggttggttgaaagtctttataaagagcaattagagctccaggtcaaatccccttcttgtgcagttagctgagtgactcctcctcctcaatgctggcaaaagaaactggaccagatg

SEQ ID NO: 676365 - DNA, 922 bp, Homo sapiens
gcacttccgaacctgcaggggcagggggccttccccaggcccccaagagcacagggatgacctggtctcaagctgtggctgggcggctgcagctgtgcccaggagtgtggggctcctggcctgccaacttggcagggggcagggctcatgcctcttcccagcctgacagctctgtgtagctcacagtgtcagctgcgcctccccaactgcagctggcatccctgcagcagctgctccagatgggccactgctgccatcactaataaagttacaataaatttggttttatttgggagcatctttgggctttctatacagctaatgtgcatgccttcaaaatttttgctcagattagcagatttaaattgaacactaacttgaagagggtagttctgtcacaacttctcttgtttctaaagtttcaaaagaaagcgaatcacttgaaatattttttcaactcaggactataatttctctaggataaaacatcttcccaagtttccaggattctaagccttgatttgtggctcatatgtctatatttcagttaagtttacaatttactaatgccgatgtgtgataatctaataaaatctgcccttaaaggttataggcccaatttactaataaaacctaattcaattctccttgggaaatgcaaatcattagtgtccaagcagcagaactgaatttccttgccttttctatattagaaagaagctgtctctctaagaagtctaaacaaataagagaaatcagactattaataagcccatgagsattcatttatgagcatttttaaaacaaatgaattttgcattttaaaacaatgcaaaaatttaaactggttaattagctgaataaatgatttttaagaggcatttacccttctagactgagaatatcccacttatttcattcc

SEQ ID NO: 676366 - DNA, 2837 bp, Homo sapiens
attcagcgatggtatttctcacaccaatacaattggccttttggtcttagcctttccatccctgctttggccaggacctactcctcttgtgaaaaacagattttagcttattgaagggaatattaccctcactcccactctaagcaagtgtgggaacatggcttaatatagtgactcaagccagaggcattgcaggcagcaaagaagccaggctgtgctgccagctcccactccctccagatgtgaaggctccaaggaaacctccgtgtccccgacaggccaccggctaccactagagcagcgggccactggcagggctgggtgccatcagaaatatctgaatctctctcccatctctcccttccttaacttgtggtttctaaaatattttcagtgttatatttatctctctgtgcagctaccttttttcttgtgtccctttcattttccccttttgtgccttgtttggggggaagaaaaagtaaaataaacatcagaaactggagttccttctgagtggatctgttctgagaagcagtgagctctgactgcatcagaaagtgtgaatatgctgcaaatcaacaacttcctgctgctggcgacggcggcgtgtgctggtgtgacatgttcttcaacactagggctctgagagagaaagaaaacaagtcaccatatgcttttgataggatgcatcacatgcttccccgtctctatataattcatgcgtctgcaaccagatctaaagctatcactcttctgtagtaaatccagcactgaattccatgagaagccaatatacatctttcaactttcacaaaatactcaattcaagattggatgaacgtgttagggtttatttctaaaatatggttctatccatcattatcatcttcctatgatactgaaaactgtaaaagcttcttcgttgtttacatacagcctaatctatgattccttaacacacccttccactgaaataaaatctctaagacgaaaaaagaaatgggtaaaaatcttccattttagagcggcacatggtttttaatcatatcaagattttaaaaacatgctatatttaattttacaagtgaaggctacctcttaagatgccaagtaccttttatgtaaaagtaaaatgagcactctgttttgtgaaatccacagcacttggatggatttaaattttcaatgccctttcctcactctctaccccaaaaatagtgggtaatgggcaagctatatcagaatctttgaattaactagactttttagcaacagagagaaggtcgaaacactcaaagtcctcatcttctaaaacataattagcaacagaacacaaagaattcataagtaagtttattatatcagttagcctagttccatatgggttttcattgctaatattcttcccagctctgcactgacagcttttataatgtatttacattgtgttaattctttgctcaagttaaaatgaagagatgagcctgggattccatagatataaatgcttttctcctatgatctttggaggtatgttaacatagacagaacttgcatatgtagtaatggtattttcattataattagtatcctactgacaataacttaattgggcctcacaataatatgtgtcagagtctcaattactggcagcaattgcagttctataaaagtgcagaaccccgatagtgaatttactcttgataaaaaaaaaaaaagaaattttaattggaagaggcaggcctatattagcaatgcatttttaaactcctagaggcttttctgagttggaaaaggccaattaatttacttctagaactcagaaacctgctgattctgttgcaacctacccaatctgtcttcactgacatgcttccactgttttgttttgacatttccaccaccgaacaagcacatattaggctggtttatgatgtcttgacacagctactgggcatggctcccactcctgactggcatggcctggggccggccagccactccatctgatctaccaggtctactagcccaatttgcatcatattaaagacaaattaatgaaactaaatgtgtggccttgggcatagatgtttcttggaccgtggtgttttcacctattaaaatcaggagactgggctgtctcgaaggctcacgcctataatcccagcacttcaggaggccaaggcgggcatatcacctgaggtcaggagtttgagaccagcctggccaacatggtgaaaccccgtttctactgaaaatgcaaaaatcagccaggcatgttggtgggcacctgcaggcccagctagtctggaggctgaggcaagagaatcgcttgaacctaggaggtggaggttgcagtgagctgagatcgcaccactgcactccagccttggtgacagagcaagactccatctctaaaaaaataaataaataaatgaggagactggactagatggtttgtaagggcagaggcagcatcgtggwgtggttaagggcgccagttaaggccagctaggtttgagtcttggccctgccacttgctgtgtgtatggccatggggcaagtgatttgactactctgtgcctcagtttccttgtctgtaaaaggaccataatacagaatttacctcatggagaatttaccttcatttgtaaaattaaatgtaacatgtttttaaaatctctgaatagttaaaaaatatgtggccaggcatgggggttcacgcctataatcccagcactttgggaggccaaggcaggcagatcacttgaggtcaggagttcaagaccagcctggccaacgtggtgaaaccccatctctactaaaaatacaaa

SEQ ID NO: 676367 - DNA, 2837 bp, Homo sapiens
attcagcgatggtatttctcacaccaatacaattggccttttggtcttagcctttccatccctgctttggccaggacctactcctcttgtgaaaaacagattttagcttattgaagggaatattaccctcactcccactctaagcaagtgtgggaacatggcttaatatagtgactcaagccagaggcattgcaggcagcaaagaagccaggctgtgctgccagctcccactccctccagatgtgaaggctccaaggaaacctccgtgtccccgacaggccaccggctaccactagagcagcgggccactggcagggctgggtgccatcagaaatatctgaatctctctcccatctctcccttccttaacttgtggtttctaaaatattttcagtgttatatttatctctctgtgcagctaccttttttcttgtgtccctttcattttccccttttgtgccttgtttggggggaagaaaaagtaaaataaacatcagaaactggagttccttctgagtggatctgttctgagaagcagtgagctctgactgcatcagaaagtgtgaatatgctgcaaatcaacaacttcctgctgctggcgacggcggcgtgtgctggtgtgacatgttcttcaacactagggctctgagagagaaagaaaacaagtcaccatatgcttttgataggatgcatcacatgcttccccgtctctatataattcatgcgtctgcaaccagatctaaagctatcactcttctgtagtaaatccagcactgaattccatgagaagccaatatacatctttcaactttcacaaaatactcaattcaagattggatgaacgtgttagggtttatttctaaaatatggttctatccatcattatcatcttcctatgatactgaaaactgtaaaagcttcttcgttgtttacatacagcctaatctatgattccttaacacacccttccactgaaataaaatctctaagacgaaaaaagaaatgggtaaaaatcttccattttagagcggcacatggtttttaatcatatcaagattttaaaaacatgctatatttaattttacaagtgaaggctacctcttaagatgccaagtaccttttatgtaaaagtaaaatgagcactctgttttgtgaaatccacagcacttggatggatttaaattttcaatgccctttcctcactctctaccccaaaaatagtgggtaatgggcaagctatatcagaatctttgaattaactagactttttagcaacagagagaaggtcgaaacactcaaagtcctcatcttctaaaacataattagcaacagaacacaaagaattcataagtaagtttattatatcagttagcctagttccatatgggttttcattgctaatattcttcccagctctgcactgacagcttttataatgtatttacattgtgttaattctttgctcaagttaaaatgaagagatgagcctgggattccatagatataaatgcttttctcctatgatctttggaggtatgttaacatagacagaacttgcatatgtagtaatggtattttcattataattagtatcctactgacaataacttaattgggcctcacaataatatgtgtcagagtctcaattactggcagcaattgcagttctataaaagtgcagaaccccgatagtgaatttactcttgataaaaaaaaaaaaagaaattttaattggaagaggcaggcctatattagcaatgcatttttaaactcctagaggcttttctgagttggaaaaggccaattaatttacttctagaactcagaaacctgctgattctgttgcaacctacccaatctgtcttcactgacatgcttccactgttttgttttgacatttccaccaccgaacaagcacatattaggctggtttatgatgtcttgacacagctactgggcatggctcccactcctgactggcatggcctggggccggccagccactccatctgatctaccaggtctactagcccaatttgcatcatattaaagacaaattaatgaaactaaatgtgtggccttgggcatagatgtttcttggaccgtggtgttttcacctattaaaatcaggagactgggctgtctcgaaggctcacgcctataatcccagcacttcaggaggccaaggcgggcatatcacctgaggtcaggagtttgagaccagcctggccaacatggtgaaaccccgtttctactgaaaatgcaaaaatcagccaggcatgttggtgggcacctgcaggcccagctagtctggaggctgaggcaagagaatcgcttgaacctaggaggtggaggttgcagtgagctgagatcgcaccactgcactccagccttggtgacagagcaagactccatctctaaaaaaataaataaataaatgaggagactggactagatggtttgtaagggcagaggcagcatcgtggtgtggttaagggcgccagttaaggccagctaggtttgagtcttggccctgccacttgctgtgtgtatggccatggggcaagtgatttgactactctgtgcctcagtttccttgtctgtaaaaggaccataatacagaatttacctcatggagaatttaccttcatttgtaaaattaaatgtaacatgtttttaaaatctctgaatagttaaaaaatatgtggccaggcatgggggttcacgcctataatcccagcactttgggaggccaaggcaggcagatcacttgaggtcaggagttcaagaccagcctggccaacrtggtgaaaccccatctctactaaaaatacaaa

SEQ ID NO: 676368 - DNA, 1865 bp, Homo sapiens
gctctccattgataagaatcttcccatctccctggttctgacgggccccatgccaccaaaccctcccggctaataatgccacatcttatagagtcatttctgactcctgagaacatgaaagcagagcacacgagctcatgttaacacataagtatgagtcactgctgcagggggtggatgatgaacttctgtgggtggcttttcagcatttcaggattctgagagatccctaaaaggccttgccctctgcctagtattaaaattcactttctaactgaaaacatacttggaaaaaattgagacagtcttctggggagctcagattatgttcataatgcgctggctggggaaccttggtgtgaaccgtggtgttccaggtagtgattttttgaatgttcagcataaagtatgagtgcccccaacccagtccttgacccatgcatcccctaacagcaaggaacctgccccatgtccacccacaacttcctttctgatggtattacttatactccactacttatagttgcctcaagctttctttgcttaatttttaattttttttttttttcctgcaaggctggatggcagcttcccagtgaaaaattgggatccaattcaagatgaaaagactttaccagtaaagggaaaagtacaataaaaataccccctggttcatgtttaatttctgaattccaataagaactcattttatcagtggatttaaaaatctcctgaactcacaactcgggtgcaatcacaaacaaatgcagggctgtggggtctgctgtgtagccagccctggagcagtagagagtgagttcatgtgccatttcccccaaatgggttgtggaagaattttttggctttttatgcttcatcagagaccccagagtagaattcagcatttcacagttcattcctgagttgaacaagcccattttctatggggaactcaagaatgttagcaagttcctcatcttcacatggttttgagcgtggtctaatcccttatctcttcatgagctgtttggctcatgctgttttgatttcaccggaacggctgagccttcaagatccctggctctggccttgtctcttcaatgggtccctttgggcctctgggcttaatgtcttcaatggagatcttgtgggatatgggataatgtttccaaatttgttttccagagcctcagcccctgggagcagcctagccggggttttgtcagtgtcccccagcccctccttcctttcctctttctccccctcccatccctctccctcctccatcagcagctccctccctgttggcttcatcactcaaggctgatctgggagaagccataagggtgtttggtggctgggctcagctggagagactcagaggtgccaaaagccaatttctagtttccaacctctccatctttcactagttctgaacagatttggggattttaaaggctttcatcaatgcataaaacctcttttcactcatccgtgtccctggagatctccattaaagggacagccactctccaccccatgaaragattcttttttttttttttttttttttgagacagagtctcgctctgtcgtccaggctagagtgcaatggcgctatctcggctcactgcaacctctgcctcctgggttcaagcaatcctctcacctcagcctcccgagtaattggaattacaggaggttgccaccatgcctggctaatttttgtatttttttagtagagatggggtttcaccaggttggccaggctggtctcgaactcctgacctcaagtgatccgcctgcctcagcatcccagattgctgggattacaggcgtgagccaccatgcctggccaagacttt

SEQ ID NO: 676369 - DNA, 599 bp, Homo sapiens
cagaaagtacattgcccacagcagagaactgcacggtatggaggcttgtgtggagacacttccaaaggccccaccaatgcaccccaccaggagacaggctgaaaacctgccgtacactgaaggccactccagccaaaggcaaaccacaaccatagtattaacctagtttaactattttctctaatccctctttctcctgctttgtcccagaggagggaagaagtaaaggaagagcagaagaacaactcacagtccttcctcattgcaaagccatgagccatagattaggcatgaactagaaggagaattgatgtttcaaattgcataygaggtggtagtttcgatttgaacttgacagaacctgcttttcagtagctaagaaatgaatcaatgtcagaatgagactgttctatttttttttttttttttgagacagtgtcttactctttttcccagactggagtgcagtggggtgattacagccttgaaatcccgggctcaagtgatcctctcacctcagcctcccgagtagctaggactacaggtgtgcaccaccatgcccgactaatttttaaatttttagtagagacagggtctca

SEQ ID NO: 676370 - DNA, 599 bp, Homo sapiens
cagaaagtacattgcccacagcagagaactgcacggtatggaggcttgtgtggagacacttccaaaggccccaccaatgcaccccaccaggagacaggctgaaaacctgccgtacactgaaggccactccagccaaaggcaaaccacaaccatagtattaacctagtttaactattttctctaatccctctttctcctgctttgtcccagaggagggaagaagtaaaggaagagcagaagaacaactcacagtccttcctcattgcaaagccatgagccatagattaggcatgaactagaaggagaattgatgtttcaaattgcatacgaggtggtagtttcgatttgaacttgacagaacctgcttttcagtagctaagaaatgaatcaatgtcagaatgagactgttctatttttttttttttttttgagacagtgtcttactctttttcccagactggagtgcagtggggtgattacagccttgaaatcccgggctcaagtgatcctctcacctcagcctcccgagtagctaggactacaggtgtgcaccaccatgccygactaatttttaaatttttagtagagacagggtctca

SEQ ID NO: 676371 - DNA, 640 bp, Homo sapiens
gtctgaaattacagaatttaaaaattagcaatctgaagtctaatccaccacttcaagtttaaaagattcttcttattgactttgcctttataatgtgtagtcagagacaacataaagatacatcctcatttctcagtatatttttctacatacatatgcatccttgaatatgttgtattatatacataagtgtctcactaaattgaatctgtaaacttcctaggtctaatgtttttcttaaacatttttttttactatggatatgattataacaaactgtcgtgtagaaacatagaatcctaggactagaaaagatcttaaatttcatcctcaacttctaatagacattctaaggtaatatttttaaaaatcattttaatagcccctctgatttttaacatacttttatcttccstggatgtgaagacagcaaagtgcatttacagtatctctaattcctggtctttggactgctgttccctcgccaatccgtgtgaccccatacacacgagggatttttttttttcataaacattttcaagagtttcaaggctcttttacgaaagtccaggtaggttgcattatctgagtttctctagcaacccagttattagaattcaattaaaaatgaaagtatagg

SEQ ID NO: 676372 - DNA, 677 bp, Homo sapiens
acatggtgagaccaccttcttgcccatcttcttctccaccctctctccccagccaggggaaaaatatacattaggaaggagtggtttgtcagaaagctttaccataccaaggtattgagggagaactttgtaacataattagggatgtgggtaatgaaatccatcatttagatctgctgagggtttccaacaagcaactacctctagcaacgtgagctatatgtgagttttaggttcttgaaaaagggggaaagatttctctctggagtggaaatgccacatatccatcagcctttcctttccgcttagagactttgagttcatttacctggcagaaatcagttgcctctaattcayatcagaggccaccagaagctgcaaaattggtaagatctaagaaacttagtgttttttgttttttttttttctggaaggggaagaatatgaataagagggaaaggcaaaagagagaggaagtcgcacacaaaaaattttccattcctgttggacacctgtggagagagaggccatgtgtgtcatcaatttggtgacatataaatattcaagtcgattccaaactgtgttactcacaggagagtcacagccagagaacacccaaaaaggtgacatttggggcaaggctttgggcttttttcacctttgatcagaagcaaagc

SEQ ID NO: 676373 - DNA, 1113 bp, Homo sapiens
gggagaattcaaagaaagagtgaaagagattggaataatttgaattgtgtgagcaattccagctgccattccactcagtaagtgagtgtcccagcatcagcataacgcagggcacyggagtctgctgttcccccaggtggtctcagtttataggtgcttatcactagtgtgagcctctgcacacagcaaattagctgtcagggtaatttttgacttgttctctcatgtaagcccttcctctcttagaatatgcaggcccaccgtatttatgatgcaagagtgacttagtttcaggaaaacattatcccttgcattaattgagttacttttaattatattcatttacattcttgttcttatataatttacaattgtgcttggttttataactatgtaaaagcaagaacataggccatttacacctagttattttatttgcacatacttatttaataccataatataaaccatgcaacaggctccctttactctgtgtgatttatgaagctcaccctgaatacagtggggcagtacattgaatccaagacctacctattagtaaagattagaagacattgtgaagtgatgtcaacgtagcttaatgtttattgggatgattttgagtagtcctatctgtgtgtgaagcaggggttcagaggaaaatctggattcaggaggaaaatctggattaagaaggaaagtgggatttaaatgattcctgaaaaatgatgatgatcactaacattgacggtggtggcagttcacattgtttgagcatttactaaataatctgcaatggaccaatgctttctatggattattctacttaatcttttttttttttttttttttgagatggagccttgctctgttgcccaggttggcggtgtctcagctcactgcaacctccgcctgccaggttcacaccattctcctgcctcagcctcctgagtagctgggactacaggcacctgccaccacgcccggctaattttttgtattttcagtagagatggggtttcactgtgttagccaggatggccttgatctcctgacctcgtgatctgcctgccttggcctcccgaagtgctgggattacaggtgtgagccacc

SEQ ID NO: 676374 - DNA, 657 bp, Homo sapiens
tgagataaggatcagttctgtggcattgtcagccagaaaacatcatttggagacaatcttgtacaagaagtagaagatacagctgggggcctgcggaggacagaaagctcacagcttctgtccatacccctttcacttcctcctcaaggagatggacctctgtggttggtcaagcttaaggatcttttatgggccacagmtaatggtgaaatcttcctaactctaggtgaagattaatgggcaagttggagagttaaggtagcttgtggctgctccttttagaagaaagtctgatcattgctctcttatttgtggaacccttctgttcccccaaatgcttgataagacatgcctgaggaccaatcctgtgtcagtagacttcatatctactctcttctaccaatcacacaactacagacaaataagaaaaataaaacaaagctcagacacactcccctggcatggaggccactctctggctggctgcttttctctaccctggcacctcctgggcatttggctctttcttagatcaaagcgagacatgggtttgggattaaagagaagtaggtgaaaggggtctctggcctgttttggcattagaccatgtaaataacagagttctggcttaagctcagctctgtagagctttctctg

SEQ ID NO: 676375 - DNA, 1294 bp, Homo sapiens
ggtcaatttatctttccgaatcgtggcttgggggctaccctaacattgcctgtatgaaatgcaggcttcgacttggggcagccaggctagacagcccctgagctttgtttctgatcacagttttcctgcttcatctcaacttccccctaccccttatgctgtctttttaaaaaacaactttcttgaggtataattcatgtgtcatacaattcaccatttgaaatgtacaattcaatgattttagtatattcacaggtgtgtcaaaccatcatcatagttaattttagaacattttcatcacctcaaaaagaaatcttgtaacctttagctatcacctccctatccccccatattccttcttgcccttaacaacactaatgtactttcagtctctgtagatttccctattctggactttcatatgaatggcatcatataataagagacctactgtgactagcttctttcattgagcatagtgttttcaaggttcatccatgttgtagcatttatcagtacttcattccttttcaaggctgactaatattccattgtatgggtatatcacactttgtttatccgttcatctattggtgaacatttgggttgtttccaccttttggatattattattctctctttcctctcattctctagacatcttggatagtatccagtgaggcctgtgggcaagaattggtgtttcttatatttgggtacacctaatatccatgaaagcagggtcttggcacatgtctgctttcatattaagtacatgtactagctggaattttcctccctctattgttactgaggtggggctgctccctcctttatcaattctccctttttatcatgatagctatgttggaaacttgctgactcttcagactaggggattcagatccttctcttggggcktcaaagacatggagtggatgaatgaatgtcttcccatgagggaagagttccctgagtctggtctcaagtgattctccagtgcctcacagtggaaggaaggtctgtgaaggctccaggttctagggaaagttatgttcttggaggtatgactgagcccagaatccaggcctccagtttccatctccttgcctggaccatttcagtcttcagacatgctttgaggtcaatccagtcactcacccagcaacagacactgcctctgccctcatggaccttgcagttctagtggtgagagtaagatgaatacaagtgaacaaaatgatggcaagttgttcaagcttgttcaaacttctaaacactgttcaatgaatga

SEQ ID NO: 676376 - DNA, 1241 bp, Homo sapiens
gccctgaatataatcttggtgtatcaactgttgccataaaaccaagccatttatagttttataatgtgacttatagatatttgataaaaattagtacattgaagatggctgactagacatagccaggaagagccattcccaccaagagagagataaggtttttagtgaacgaagataatttgtacagatcttcagagcgagaacaccaagagtggatggagatgtgaggtatgctctgaggctgaggagggatggggctgggaaccatgcacagggtactcaaatgctggggctagttccggcctygaatggcttctggggaacaaatgagtgaaagccctgtgggactacccatgctctctgcggacctctggaatcttggctacaggagacctcatgtcctccatggattcttgagttggtgggggatctgccttgagaatagacagagatggggcttcagccagcacagaactaggggcctttgtgcatggcgtagctctggcagagtgtggccataggcttccgtcacccagggatacccctttcattccccaggcaggttgagtccctgctgacagctggaccaggggaaagtggggctgacttctacacaggactggggcatgtctgttctacagcctttgttgcctgccatcccctcccaggacccctgcctagccactctgcaaggcgcatgtgaacagtgcagccaccactgcctagcatgggtgctttgcttcacctgattacattcctggttgcttgggagtactttgggtcacccagcacacctggaacctgactctgagggtcaggagggtggagccacaagccattcccaggactccaagtctatagtgtgcagcttgggagtgctgagtcaaaatctatggctggcccttgagcagaagagaagcccacactctcagagcactaagaggcgtgaaatacataggtcatgggttggagtgggagcagggcatgcctccctttagagggctggcctggaaagggtgtggcctatctccttgtcaagacctccacccagggagtcctgtggctgataatgcctaataaaagaaatgctggcacagtgtcagtgatgagggggtgtcccccaagggccaggagtaaacttggtgaaggggttacctctcttcccatcacatcacagagcatggctgcaaatgtgaggaaatatagaggagctccttggctaagagcctgtctaccaccca

SEQ ID NO: 676377 - DNA, 1241 bp, Homo sapiens
gccctgaatataatcttggtgtatcaactgttgccataaaaccaagccatttatagttttataatgtgacttatagatatttgataaaaattagtacattgaagatggctgactagacatagccaggaagagccattcccaccaagagagagataaggtttttagtgaacgaagataatttgtacagatcttcagagcgagaacaccaagagtggatggagatgtgaggtatgctctgaggctgaggagggatggggctgggaaccatgcacagggtactcaaatgctggggctagttccggccttgaatggcttctggggaacaaatgagtgaaagccctgtgggactacccatgctctctgcggacctctggaatcttggctacaggagayctcatgtcctccatggattcttgagttggtgggggatctgccttgagaatagacagagatggggcttcagccagcacagaactaggggcctttgtgcatggcgtagctctggcagagtgtggccataggcttccgtcacccagggatacccctttcattccccaggcaggttgagtccctgctgacagctggaccaggggaaagtggggctgacttctacacaggactggggcatgtctgttctacagcctttgttgcctgccatcccctcccaggacccctgcctagccactctgcaaggcgcatgtgaacagtgcagccaccactgcctagcatgggtgctttgcttcacctgattacattcctggttgcttgggagtactttgggtcacccagcacacctggaacctgactctgagggtcaggagggtggagccacaagccattcccaggactccaagtctatagtgtgcagcttgggagtgctgagtcaaaatctatggctggcccttgagcagaagagaagcccacactctcagagcactaagaggcgtgaaatacataggtcatgggttggagtgggagcagggcatgcctccctttagagggctggcctggaaagggtgtggcctatctccttgtcaagacctccacccagggagtcctgtggctgataatgcctaataaaagaaatgctggcacagtgtcagtgatgagggggtgtcccccaagggccaggagtaaacttggtgaaggggttacctctcttcccatcacatcacagagcatggctgcaaatgtgaggaaatatagaggagctccttggctaagagcctgtctaccaccca

SEQ ID NO: 676378 - DNA, 1241 bp, Homo sapiens
gccctgaatataatcttggtgtatcaactgttgccataaaaccaagccatttatagttttataatgtgacttatagatatttgataaaaattagtacattgaagatggctgactagacatagccaggaagagccattcccaccaagagagagataaggtttttagtgaacgaagataatttgtacagatcttcagagcgagaacaccaagagtggatggagatgtgaggtatgctctgaggctgaggagggatggggctgggaaccatgcacagggtactcaaatgctggggctagttccggccttgaatggcttctggggaacaaatgagtgaaagccctgtgggactacccatgctctctgcggacctctggaatcttggctacaggagacctcatgtcctccatggattcttgagttggtgggggatctgccytgagaatagacagagatggggcttcagccagcacagaactaggggcctttgtgcatggcgtagctctggcagagtgtggccataggcttccgtcacccagggatacccctttcattccccaggcaggttgagtccctgctgacagctggaccaggggaaagtggggctgacttctacacaggactggggcatgtctgttctacagcctttgttgcctgccatcccctcccaggacccctgcctagccactctgcaaggcgcatgtgaacagtgcagccaccactgcctagcatgggtgctttgcttcacctgattacattcctggttgcttgggagtactttgggtcacccagcacacctggaacctgactctgagggtcaggagggtggagccacaagccattcccaggactccaagtctatagtgtgcagcttgggagtgctgagtcaaaatctatggctggcccttgagcagaagagaagcccacactctcagagcactaagaggcgtgaaatacataggtcatgggttggagtgggagcagggcatgcctccctttagagggctggcctggaaagggtgtggcctatctccttgtcaagacctccacccagggagtcctgtggctgataatgcctaataaaagaaatgctggcacagtgtcagtgatgagggggtgtcccccaagggccaggagtaaacttggtgaaggggttacctctcttcccatcacatcacagagcatggctgcaaatgtgaggaaatatagaggagctccttggctaagagcctgtctaccaccca

SEQ ID NO: 676379 - DNA, 772 bp, Homo sapiens
tagaggcctgtcaccacgagatggcgctcagcttccgtctcaaaaagaagtgagttccatgtttttcagcccctacttattaccattcatttcaaggagtgaaaaacagtgttcagagaaaaatctttgttagcacaaagcgtctacatttgtgagagacaaaattatgtttctagttcattcaaagactagttgctaatctcggaattttgcaagttaactcacaggaacatgaaaaaaaaatcctacatttattggttaactaggcacactcatttgctttttatcagttcattgatgttttatggggaagcatggaaaaggcagttgacattttcatgcattttgaaggaagaataaaatggctggttctcggctgtgcttgttcacaggttttgtaagccgaggaaatggatactacggttgtttgtaaaaccggatccaaacaaaggaagagagcaaggatgctttcctgyaacattgacacatgtaccactctctagaaaaaggatgaggctgcagaagaaggttttagcttagcatttcaattctaaaatggatggtcctatttaattttccacatacaataactttcctcgctgaagaatagattaatattactaatctcacttatgtagcagccttaaaaggccagaccaacacggatatttctaaagcagattgtagtcatttctgccggtatcgtcaattccctacccacactgaaagtcattgtgttggtaatctcacgctattgcttcagtaggcgtct

SEQ ID NO: 676380 - DNA, 474 bp, Homo sapiens
cggaaagaagagtgcacagagaagcttaaccagtgttttgctgttctcgcatcatatatttataatgtgtttttacagttcagtttgatgaattatgtttttctgggatgaaaatattttcacatccaaacacaaaaatgtagttaaaagtatttaagggaaacataaatagttaaaacagccagtttaggcaactcrtgtactttcttttctccattcaaacagatatttgagaattcactatatttcacaactgattttcactccctgtatattgaaacaaactcatacatatcttaatgacatgctaatctgaaataatgagcctcatatataatacttgtgtcctttaaaacgaatacataaccatatgctataattttgtggtgcttgttaattaacacaagtagtcctaaacttttcaaaaacgagggagtagacaccatgatgtgaacattaaaacaaataaataca

SEQ ID NO: 676381 - DNA, 1969 bp, Homo sapiens
ggcaataaaagaaactgatcttttgcaaatacagtttgctcttatgtataggaaaagttagagagaataaaagccattaaagttgtgtataaaagatacattggagttacatttatatcattgattacactgtttctcaattacacagttttgaaaaaaacacaagcaattaatcatggtagattacactcagtttgtatttggtcagcagtagcaagtagttatcaagaagtctgagttccaattgtttctctaaataatcctttgtaatatcttttgcttatgggatttctgtaataccctttagtaaatgtgattatttatatctagaaaacattttaaaatagctctcattcttttttataattatacttttaaatatattttaaacgtattatatttttaatatgatgccattacgagtcctgccatttgtcttgtttaatctgaatatgcataattacaaaccataccaattaaaatcactatacatgcattattaactgggtaaattttaggagtaaaaacaagattaaaatattcaggcaaaataattactcgtagcttatgtaaaagaacaacaaataagaactggaagttattaaaatttttattttaaagaaaagcagtagttttatatagatgacacaatttagtattggtagagggcaaaatttctatcaataacaattcttcagatataattttctttagcaattggaaatattaaaaataactttagatattggccagatatatgacatttatatgacctacttgccagtattgaaatgatccactgacaaaaaaaagaagatatactattatgacttttataagaatttaagataccagtactttattatcctgttttatttgaacagaaaataagaaactaaaaaacaattagcaaggccggagagtattttagattaaactgatttgaaatatgtagttttcctttagagactgcaagccattggcaatatggcttgaaatgastggcttaataataaaatgtttctatccatgtctataaaattctaggcaacaaaatttagccatgcatttttgcattaaacatgaactatatcaaactgtagtcctttcagtggggtcctgatttgtccagccttctttatcagtcgcttgaggatcttataagctattgagtttagagtttttaaggtgtgacagatgactccaaatggctcctctgtagctaaaatttggagctataacttgaacttaaaatttgaagttatatcttcaaattttagctacagagtataggctggttcttacactcccagcctctaccagggggaaatactttttgtatggccatagttatctgaatatttaaactgaattcaggaaaaatgggatatcctgcagtagaccgaacacttcattgtaactttgtttttctgtagcttagtacagtgccctgtaacatgtaggttcggaatatatgttcattgaatgattgtatttacacttactaaactggttctactcagataaaggtgcccaaagggtcagtttgaaagtgacagtaaatgttactagcaattaattttatcagagaagatactagggattggaaggaggaagagatgaggaaagagaaaggagaaagaaacaaaggtaagcaggaaaaccaggggagttggacgtgtccttcaggaataggtaaaaattcaatgtgttcaggtggtggacagtatcaggctaaagctggtgagctgagtgtttgaagtttttagaataaattcagggtatttagtgggtgctcataggagatgaaactgctttaattaatggaagacagtcaataactttttgtttagttttattgtaagttgggatgaacaaacaactcctttccttgtaaagtctttggcttacatttatccatatttcatgtccatagaccaaaaaaaaaaaaaaaccaaacaaaaagact

SEQ ID NO: 676382 - DNA, 701 bp, Homo sapiens
aatggaaactaagactgatggcaaaagccctataagcactctatgagctgatgaaractatattctagttcataaagttgttttccacgggaatatggattaactattttgaaccaactatacatgaatcctggaactgaaaaattaagtaatagatggctgaaggtgagagccagttttctcacttttgaagtgggaggtgacaaacaaacaaggggagaaacatggatgcattacttacctataaggtagttaatgaattagagttggagatatcagtataaattatgtttagctcaatatagataaaaatagatacatatagaaatatttataaatatatgtgtgtatactggttagtatacacacatatattcttttactctgagagggccaagaaacaaagatattccagcagcaacaggcatatttgggatctagaccttgtttctaaaaccgtcgtccaatgaaaagaaccatggcttcctgaagaaatgactggttgttgggcaggaaatatataatataatcctggagcatcttgtggtgtcaaaatttaaagaagtatccaaagacccatatacatacacgatcactcacccaataatgagggtatggggtatgtcaaagggacatttgaaccttccgaaagctcttaaaatggcaaaatccagtacatgtcgaagaatcatgaacatatt

SEQ ID NO: 676383 - DNA, 655 bp, Homo sapiens
aataaaatttttctctccctgtcctctttataagtaagtttatgttattacttggatgcttatatgtttctggaacatcacataacatcacataagttagagcttggtattaattaattattttgtgctaatttttccaataacatggtatttttttctattggtagacttaggttttgtttcaggaaagttttcttctcttttgtttagcaatatgttttcttttatttattgtgtcttttcagtaataccaacttattcagaaatgttttctatatctatcttttctaaaaatcatttgggcaattttatttttttttcatttggtttttattttacttattttggattatctactgcctctttattcagtttttgtttgtatttattttattctaatggatctctacttattttatttatttctttatcctcaggtcctaaagctatgcctactcggygggcattagatacatattattaagtgaagttgattaaaaatatattcaagaagagataatcattcacaaaggaccatttagggcatttcagtaggcaaatgactaaagcatagcttctttttttccaggttgggaggcagaccatgaatgctgtggcctctgcactcaaaggtaaagtacaacttaaaaagaaa

SEQ ID NO: 676384 - DNA, 644 bp, Homo sapiens
tgcttgttatcacattgcatcaggctttttaagtttcatcataagtatwactaactcaagaaagatttccttaactctctagactaggttaagcaccttgaaagctaccaccaaatcactcaataagccctcttttgtaacacttaaggtacttgttactagtgtaagctctatgactgaggaaaatgttcatcttgctttccaggactttcaatcaatatttcttgaattgcatcaatatatcttaatcatatactaagggcattcaataaagtttttgcccttcagccttatctgaaagcaaagatcatacaaaaccttggctccttagaacacttacaatagtagaaatgtagggcaatacaatcttttagatttttcacaaaaatagatctgtgtgtaattttattttaactctaaggcacaccattgaaattaagcctgagatgatctttatgattcttccacaagcatccatttatctcaccatggaaccactgtccccctccactatggtagataaagcaagaaaagaaaatggtcaagagcccaagtgaagaaaagcaccagaatactgcagggagaaggcaggagaggaagagatgctgagtaggaatttctgcctttaattctcccgaatgctc

SEQ ID NO: 676385 - DNA, 644 bp, Homo sapiens
tgcttgttatcacattgcatcaggctttttaagtttcatcataagtataactwactcaagaaagatttccttaactctctagactaggttaagcaccttgaaagctaccaccaaatcactcaataagccctcttttgtaacacttaaggtacttgttactagtgtaagctctatgactgaggaaaatgttcatcttgctttccaggactttcaatcaatatttcttgaattgcatcaatatatcttaatcatatactaagggcattcaataaagtttttgcccttcagccttatctgaaagcaaagatcatacaaaaccttggctccttagaacacttacaatagtagaaatgtagggcaatacaatcttttagatttttcacaaaaatagatctgtgtgtaattttattttaactctaaggcacaccattgaaattaagcctgagatgatctttatgattcttccacaagcatccatttatctcaccatggaaccactgtccccctccactatggtagataaagcaagaaaagaaaatggtcaagagcccaagtgaagaaaagcaccagaatactgcagggagaaggcaggagaggaagagatgctgagtaggaatttctgcctttaattctcccgaatgctc

SEQ ID NO: 676386 - DNA, 644 bp, Homo sapiens
tgcttgttatcacattgcatcaggctttttaagtttcatcataagtataactaactcaagaaagatttccttaactctctagactaggttaagcaccttgaaagctacyaccaaatcactcaataagccctcttttgtaacacttaaggtacttgttactagtgtaagctctatgactgaggaaaatgttcatcttgctttccaggactttcaatcaatatttcttgaattgcatcaatatatcttaatcatatactaagggcattcaataaagtttttgcccttcagccttatctgaaagcaaagatcatacaaaaccttggctccttagaacacttacaatagtagaaatgtagggcaatacaatcttttagatttttcacaaaaatagatctgtgtgtaattttattttaactctaaggcacaccattgaaattaagcctgagatgatctttatgattcttccacaagcatccatttatctcaccatggaaccactgtccccctccactatggtagataaagcaagaaaagaaaatggtcaagagcccaagtgaagaaaagcaccagaatactgcagggagaaggcaggagaggaagagatgctgagtaggaatttctgcctttaattctcccgaatgctc

SEQ ID NO: 676387 - DNA, 644 bp, Homo sapiens
tgcttgttatcacattgcatcaggctttttaagtttcatcataagtataactaactcaagaaagatttccttaactctctagactaggttaagcaccttgaaagctaccaccaaatcactcaataagccctcttttgtaacacttaaggtacttgttactagtgtaagctctatgactgaggaaaatgttcatcttgctttccaggactttcaatcaatatttcttgaattgcatcaatatatcttaatcatatactaagggcattcaataaagtttttgcccttcagccttatctgaaagcaaagatcatacaaaaccttggctccttagaacacttacaatagtagaaatgtagggcaatacaatcttttagatttttcacaaaaatagatctgtgtgtaattttattttaactctaaggcacaccwttgaaattaagcctgagatgatctttatgattcttccacaagcatccatttatctcaccatggaaccactgtccccctccactatggtagataaagcaagaaaagaaaatggtcaagagcccaagtgaagaaaagcaccagaatactgcagggagaaggcaggagaggaagagatgctgagtaggaatttctgcctttaattctcccgaatgctc

SEQ ID NO: 676388 - DNA, 1463 bp, Homo sapiens
tccccaaagaaactgctgctgtttatatgcttaattcaagggatgaataacataagagaaagcatcatgcatatgtactgatcattaatgaacagtaacatcatgtggcatggtttagctgtgtccccacccaaatctcaccttgaactgtaataattcccatgtgtcaaaggtggagccaggtggagataattgaatcatgggggtagtttcccccatattgttctcatggtagtgattaagtctcacaagatctgatagttttataaatgggagtcctctaaacaggctctcttgcctgccaccatgtaagacgtgtctttcttccccttcaccttctgccatgattgtaaggcatccgcagccacatagaactgtgagtcattaaatctttttcctgtataaattacctagtctctgatatatatttattagcagtgtgagaacagactaatacatcatctatttgttaagcattaaaaattgcccagtgaatgttccagcttcatgctaagttctttgtttcaagggggatgttggggtacaggccactgggaaaagaaatgtctaagactatcttcaacagcttggcatcttatatcactggaccctaagacattttcctctccacacatggatgatatctatcatgcctacagaagcttgtgcccatttcattcactatattttagctaatttcttcaagttgaataactaaattgtactatcagtttagttggggaaaatcaacatggatttttgtggatattctttttaataattttattgatcttcatttttggagtaagaaaaaggtatttaatcatattattttctattgttcatcaaaatgtagtctatgataaaagggtatccttaaagccagtattgaacaaattagtaaccaagctatattagtcagggttctctagagggacagaactaataggatagatgtatatatgaaggggagattattaagaagcactgactcacacgatcacaagatgaagttccacaataggtcatctgcaagctaaggagcaaggaagccagtctgagtcacaaaacctaaaaagtagggaagccaaaaatgcagccttcagtctctggttaatgtccaagagtccaaaagttgaagaacctggaatccaatgttcaagggcaggaagcatgcagcacatgagaaagatgtaggctggaggacacagccagtgtagtccttccatgctcctttgcctgctttaatcctagccatgttggcagctgactagatggtgcccatccaacttgagggttggtctgcctctcccaatccactsgttcaaatgttattctcctttggcaacaccctcaaagacacacccaggacaatattttgcatctttaaatccaatcaagttgacactcaatattaatcatcacaagtctaccccttgtcaactcgaacccatatacatttc

SEQ ID NO: 676389 - DNA, 1463 bp, Homo sapiens
tccccaaagaaactgctgctgtttatatgcttaattcaagggatgaataacataagagaaagcatcatgcatatgtactgatcattaatgaacagtaacatcatgtggcatggtttagctgtgtccccacccaaatctcaccttgaactgtaataattcccatgtgtcaaaggtggagccaggtggagataattgaatcatgggggtagtttcccccatattgttctcatggtagtgattaagtctcacaagatctgatagttttataaatgggagtcctctaaacaggctctcttgcctgccaccatgtaagacgtgtctttcttccccttcaccttctgccatgattgtaaggcatccgcagccacatagaactgtgagtcattaaatctttttcctgtataaattacctagtctctgatatatatttattagcagtgtgagaacagactaatacatcatctatttgttaagcattaaaaattgcccagtgaatgttccagcttcatgctaagttctttgtttcaagggggatgttggggtacaggccactgggaaaagaaatgtctaagactatcttcaacagcttggcatcttatatcactggaccctaagacattttcctctccacacatggatgatatctatcatgcctacagaagcttgtgcccatttcattcactatattttagctaatttcttcaagttgaataactaaattgtactatcagtttagttggggaaaatcaacatggatttttgtggatattctttttaataattttattgatcttcatttttggagtaagaaaaaggtatttaatcatattattttctattgttcatcaaaatgtagtctatgataaaagggtatccttaaagccagtattgaacaaattagtaaccaagctatattagtcagggttctctagagggacagaactaataggatagatgtatatatgaaggggagattattaagaagcactgactcacacgatcacaagatgaagttccacaataggtcatctgcaagctaaggagcaaggaagccagtctgagtcacaaaacctaaaaagtagggaagccaaaaatgcagccttcagtctctggttaatgtccaagagtccaaaagttgaagaacctggaatccaatgttcaagggcaggaagcatgcagcacatgagaaagatgtaggctggaggacacagccagtgtagtccttccatgctcctttgcctgctttaatcctagccatgttggcagctgactagatggtgcccatccaacttgagggttggtctgcctctcccaatccactcgttcaaatgttattctcctttggcaacaccctcaaagacacacccagracaatattttgcatctttaaatccaatcaagttgacactcaatattaatcatcacaagtctaccccttgtcaactcgaacccatatacatttc

SEQ ID NO: 676390 - DNA, 1470 bp, Homo sapiens
cttgaggccaggagtttgagaccagcctggccaacatggtgaaaccctgtctctgctacaatacaaaaattagccggacgtggtggtgggcgcctggaatcccaggcacgtgggaggctgaggcaggagaatcgcttgaacccaggaggcagaggttgcagtgagccgagatcgcactacactccagcctgggtggcagagtgagactccgttcccttccccccgcacccccgctgccgcccccgcccccaaaataattcattttctgagagaaaagagaaaatccacccctttcacttacgctgttcccaaacggcctttaccgtccacagtgggcgttagaccggcccaaatgtccctccccaggggtgagtggcgctgccctgttggaagccctgaccacgccccagctctgcctttgctgattggtgcagtggaagacacctgacagcaactgggccaatcgagtctcttgctctgaaattgaatcctgcagccaggcgtrttggcggctgccgttaaagtcccaactatgacccagactgaggtgggagcatctctggagcccaagagtccgagtccaacctgggcgacgtagtgagaccttccccccacccgcccaatctcttaaaaaaacccaaactgagactaagacgctcaggtttggtgtggactttccttctgaacaaagaagacataaactttgggaatggtcacagggcagcagtgcttatccaaccacaatctctctaaaatgtggattctgatcagcagttctgggtggggccgagactctgccttcccagcatttccaacaagccctttgagctgtacagtctggaaaaccctaaaatatttctagcttctggttcaatctctctttttttttttttttgagacggagtctcgctctgtcgcccaggccggactgcggactgcagtggcgcaatctcggctcactgcaagctccgcttcccgggttcacgccattctcctgcctcagcctcccgagtagctgggactacaggcgcccgccaccgcgcccggctaattttttgtatttttagtagagacggggtttcaccttgttagccaggatggtctctatctcctgacctcatgatccacccgcctcggcctcccaaagtgctgggattacaggcgtgagccaccgcgcccggccggttcaatctctttttgagatccagctgcgtgcctgcctataattctcccttatgcctatatccttctaaacaaagtctcccctctggcttgaattatagccaaagtagggggtctgttctaagcaaacgaacagtcctatataacggaaaattaacttgccctatactgggacttcaccaaacaggaaaaataaaccatggatggaacagagcttcctcccacatcccaccctaccctccctccctcagtgggccgttcattcattcctcagatctgttgagcacc

SEQ ID NO: 676391 - DNA, 2229 bp, Homo sapiens
catctcctcaaaatgagaatatgtgcgttcaaattttaattaattttggcagaatcattttcaaaatggctgtaacagttcacattcccacttagctaagtttgctcacatcctctccagagctggattttattatgttaaagatttttctgccaaagtcatgtgtacaaatggcaccttattttttaaaatctggacttgtattcccataacagccagtgacgtttggagtggtatcattcgtctgacctatgtggatccccatctcctagcacagagcaggtgttgagggcatatgcgctaaagaaatgctacttacccgtgtgaatttttaaatgccgctccatgtccttcatgccataagcagtcttgaattggcaacctaaaaaaaaaaaggaaagattaattacaaaggaaaacttagtaacttttagcatggagaaaactggtagaaacatccttaaccaagtgacaagagttaacaccacggtaatgggaaaaagagatctcatgtgccttcatatgtgatgaccgggaaaaacacaccgtcattttgtggttcctgccaaaactgcataacctgaatctgatcataaggaaacatcaaataaacccaaactgaggcccttttgacaaaaatcactggcctatacttttcaaaaatgtcaagcttatgaaagataaatgcttaactgttcttgattagaggaaatgaaagacataaaatctaaatgcaattagtgatcactggttggagcctggatcagaggggaaaaatgtcattcttttgatattggtagaaaggacatcggtgggacacttgatgacgaaatctgactaaggtcagtaggttagataatagttcctataaatgttaattttctgatcttgatgattgtcctgtggttatttaaaagaatattctggtttttaggaaatacacactgaagtatttaggaataaaggggcatcacattgtcagcaactttcaaatggtttggggaaaactatacttgtatatatatttgtatatatacaaagaatgacaaagcaaatataataaaatggtaacatttggggaatctagatgaagggcatacagggatttttttggtacaatttttgcaacttttctgtacatctgaaattatttctgaataaattaaaaccaaagtaaggaaagaaaaytcttactggatatcttcctaagctatagcataggaaaaaaatttatagcaacctgaaattttcacgagttccacttcaaaggcctatggctagaaaagtcttagaacccagaggcagaatgaccacagacagtgggagataggttgtatgtgctgatgtaaatgccagggggctctgatttttatgccaggtagtttggaacacatccatgagcagttgtcaggaactcatgaggaggagccctggagcctggttaaatatcacaccctctacacaagtaggacataatgctgcctttacctggatagcaacagttaagccttttctgagcaggtggtgttgtgggctttttggtgcgtgacttggcagggagagagatgacagtggctgtctggttttcattactttccgtgggcaggtaagtttgatagccatgttcaaaaacaaattctggagctgaaactaaaagatatggtgattattaattttcttaatataaatgcccgctagctatggtgtctgcctactttcctttgtagagagaatgcatgtactagtttgctttcccagcctcccttgcggcttcacagtgatcatgtgacccagttctagctaatgagacactagagagcatccgctgggagacttctgcaaaagactttcctccctgatttaaaatagcatgggggggcagggtgggcagggcagatggtaaaagaagcagttgagaaaagctcatcttgctgccctggctgccctacttcctgtctttgtatatgctggagtgatgatgtgatgcctggatctgtggcagccattctgtaaccataagggtaaacatggaaatcagatgctgagtcagagctctgaagccacccaaatctatacttttttcttttttttttttctgagatagggtttcattttgtcacccaggctggagtgcagtggcatgatcacagctcactgcagccttgaccttccaggctggagcaatcctcccaccttagcctcacaagcagctgggactataggcatgca

SEQ ID NO: 676392 - DNA, 2229 bp, Homo sapiens
catctcctcaaaatgagaatatgtgcgttcaaattttaattaattttggcagaatcattttcaaaatggctgtaacagttcacattcccacttagctaagtttgctcacatcctctccagagctggattttattatgttaaagatttttctgccaaagtcatgtgtacaaatggcaccttattttttaaaatctggacttgtattcccataacagccagtgacgtttggagtggtatcattcgtctgacctatgtggatccccatctcctagcacagagcaggtgttgagggcatatgcgctaaagaaatgctacttacccgtgtgaatttttaaatgccgctccatgtccttcatgccataagcagtcttgaattggcaacctaaaaaaaaaaaggaaagattaattacaaaggaaaacttagtaacttttagcatggagaaaactggtagaaacatccttaaccaagtgacaagagttaacaccacggtaatgggaaaaagagatctcatgtgccttcatatgtgatgaccgggaaaaacacaccgtcattttgtggttcctgccaaaactgcataacctgaatctgatcataaggaaacatcaaataaacccaaactgaggcccttttgacaaaaatcactggcctatacttttcaaaaatgtcaagcttatgaaagataaatgcttaactgttcttgattagaggaaatgaaagacataaaatctaaatgcaattagtgatcactggttggagcctggatcagaggggaaaaatgtcattcttttgatattggtagaaaggacatcggtgggacacttgatgacgaaatctgactaaggtcagtaggttagataatagttcctataaatgttaattttctgatcttgatgattgtcctgtggttatttaaaagaatattctggtttttaggaaatacacactgaagtatttaggaataaaggggcatcacattgtcagcaactttcaaatggtttggggaaaactatacttgtatatatatttgtatatatacaaagaatgacaaagcaaatataataaaatggtaacatttggggaatctagatgaagggcatacagggatttttttggtacaatttttgcaacttttctgtacatctgaaattatttctgaataaattaaaaccaaagtaaggaaagaaaattcttactggatatcttcctaagctatagcataggaaaaaaatttatagcaacctgaaattttcacgagttccacttcaaaggcctatggctagaaaagtcttagaacccagaggcagaatgaccacagacagtgggagataggttgtatgtgctgatgtaaatgccagggggctctgatttttatgccaggtagtttggaacacatccatgagcagttgtcaggaactcatgaggaggagccctggagcctggttaaatatcacaccctctacacaagtaggacataatgctgcctttacctggatagcaacagttaagccttttctgagcaggtggtgttgtgggctttttggtgcgtgacttggcagggagagagatgacagtggctgtctggttttcattactttccgtgggcaggtaagtttgatagccatgttcaaaaacaaattctggagctgaaactaaaagatatggtgattattaattttcttaatataaatgcccgctagctatggtgtctgcctactttcctttgtagagagaatgcatgtactagtttgctttcccagcctcccttgcggcttcacagtgatcatgtgacccagttctagctaatgagacactagagagcatccgctgggagacttctgcaaaagactttcctccctgatttaaaatagcatgggggggcagggtgggcagggcagatggtaaaagaagcagttgagaaaagctcatcttgctgccctggctgccctacttcctgtctttgtatatgctggagtgatgatgtgatgcctggatctgtggcagccattctgtaaccataagggtaaacatgraaatcagatgctgagtcagagctctgaagccacccaaatctatacttttttcttttttttttttctgagatagggtttcattttgtcacccaggctggagtgcagtggcatgatcacagctcactgcagccttgaccttccaggctggagcaatcctcccaccttagcctcacaagcagctgggactataggcatgca

SEQ ID NO: 676393 - DNA, 1446 bp, Homo sapiens
accaatttgggtgttttatttcattttttttttagatggagtctcgctctgttgcccaggctggagtgcaacggcgccatcttggctcactgcaacctccgcctcccgggttcaagtgattctcctgcttcagcctccctagtggctgggattacaggcacacaccaccacacctggctaatttttgtatttttagtagagacagagtttcaccatgttggccaggctgttctcaaacttctgacctaaggtgatctgcctgcctcggcctccccaatttttttttttttgagatgcagtctcgctctgtcacccaggctggagtgcaatggcgtgatctcggctcattgcaatctctgcctcctgggttcaagcgattctcccgcctcaacctcctgagtagctgggactacaggtgcctgccacagtgcccagctagtttttgtatttttagtagagatagaattgcaccatgttggccaggctggtctcacactcctgcctcaggtgatgtgcccgcctcggcctcccaaagtgttgggattacaggcgtgagccaccgcgcccgaccaactgggtgtttgtatgcaatttgatgccagagtagccactcatccccaggtgagtgtatgtgtgtgtgtgtagtggaccttggaccaacctgggtgtgtgcatgtgatttgatgctgcagtcaccactcattgccaggggtgtgtgtgtgtgtgttggtgtgtgtgtgtgtgtttgtgtgtgtgtgtgtgtacagtcagattgaccctgggccaacctctgtctcctctcactagctatagggccttgaccaagtcacttctctgctcttcagttcttttgtcggtaaaatggggatattgcagtgatctcagagcttagatcttgttgttctagtaaagattcaagggaaggataaggcatactgcaagtcgggcacactgcaagttcttgagaattctcagtggacattacggtaactatgcataataggttattatttatctgtattcaggtttggcataatgagtggcatgggccttggggaatctcagagcaccctagaagaaggtgaaacgccccacatctgctgaggcgggatgactcataaccttggggggaagtgcttccagtagaggcgtgacttgcccacgccccaagaatattctctagtccctcttttcaccgagaatrcagcacgggccacctctttatgtgggggtcttatgtctaactttttgcaagagctcagggcttcagcctctaccctggtgtggccattaaaatcaagcctcctgtttagtgagatcagaccctgtccccgataccccaagaagctcacagcctcacacacctgctgcagctttcaggtttgttttctggctccaggggatttcccttctttcctgcatgttcaggtgtgcatctgagaattg

SEQ ID NO: 676394 - DNA, 618 bp, Homo sapiens
ccacccaggctggagtgcagtgttgctatcatagctcactgcagcctcagactcctgggctcaagcaatcctcccaccacagcctcctgagtagctgggactacaggcacgtgccaccacgactgaccctaccttttgaattttgaatcatgtgactgtgtgattgattgattgattgattttattttttatttttttgagacggagtcccactctgtcacccaagctggagtgcagtggtatgatctcagctcactgcaacctctgcttcgcgggttcaagcgattctcccgtctcagcccccgagtagctaggacagaggcgcacaccaccatgcccggctgattgttttgtatttttagtagagacaggctttcaccgtgttggccaggctggtctcaaactcctgacctcaggtgatccrcccacctcggcctcccaaagtgctgggattacaggcatgagccactgcacccggccatatttttaaatgtaaataaaattgaattttgtaataaataataacaaatgcctcatttatgccagtcgatatctttcaactctctttttcagtttagcaactctgtgaaatgggtatgggaaaataaattatcctca

SEQ ID NO: 676395 - DNA, 625 bp, Homo sapiens
tacaggcgtgagccaccacgcccagcctgattttggtatttttatagtttcattttttacatttcaatttttgacccacatgaaatttatcctggagtatgaggtatgaatgtaactaacttttcctgcttggccatccagttttgccaatactccttattgagtaattcatctttccccttcctattagaaatgccacctgtatcagccattaaatgcctgtatgtactgggactatttctgtcccattggtatatccatcttttcatatgctagtacaacacagttttactataagtttacactattctttgatagacaaaacatctggaaaggttggtagccctttattactcttattttttggaatattcctatttgtggttgcatgttttttcaatgaagtttttaatcatttgtcttttttcccacaaattcaaattgtataatttaaatatatttaaaacactattaaatatatattgatttagggtaaattgatatcttgatgatgttgagttttttattcaagacctcagcrtgcctttccatttgtccagattttcttgtgcctgcctcaggagccttttaaggttttcttcgtatgcattttgcatacttcctt

SEQ ID NO: 676396 - DNA, 635 bp, Homo sapiens
agctccaaaccactcacccggcgtagaaacacacaacaacaacaaatcactgggataaagagcagagaacacttatttcttgcaagtggttatttgttgacttatagaaaaggactggcgaaaaactattctgaaccaaattacttattgatacacagtcaaaacaaaagtctctctatggtggttcctggggacgcagtaacagctggaagacttttatggttcataaaattgtccttgtgatacagataaactcactcattcagggaaccattttaagatgacaccaccaaagtttaacccgtcatctactctgagctggctttattttgtacttttaacctcctgaagtgaggcctgttcaaggtcaccttgtctcagaccacagtaagaaaatagctgtgtggttgctttgctatctccctacagtagagacacggaggccttggcctgcacaccacaggagtgagcaccccacaytggaatcaggagccacactccagaggcagcgataccagatgcttcagttacccagaccatggcatggagctatactatgacaaaatgaaggtcagagtaggtgttcaatccaggcacagtggctcacacctgtaatcccaacacattgggaggcc

SEQ ID NO: 676397 - DNA, 593 bp, Homo sapiens
tcctagttcttgataaaggagtgggacatatctcccaatgcttagacagagtagggaaattccttgctgttattgtttcttttctccattctctcacacccaataatctaattgtggtggtggccatgacaataatggcagtggggctgcaaaggaacctaaaactctaaggaagcgtgtactagagttcttcagagacaccgaaccaataagagatagatagatagatagatagatagatagatagatagatagatagatagatagatagagatttattataggaattgattcatgtggwtatggaggctgtcctctgatacatcatctgcaagccggagaaccagaaaagccagaagtgtaattcagtctgtgtcctcaggcctgagaaccagggggaactgacagtgtatctcccaatctgagatccaaaacctgagaaccagggggcttgggatgagttgctggtggtaagtcccagattccaacccaagaactaaaagctctgacacttgggcttagacctgctatgataggattaacgtcactataagaggaagaaacaccatgtttcttctccatgtgagaataca

SEQ ID NO: 676398 - DNA, 593 bp, Homo sapiens
tcctagttcttgataaaggagtgggacatatctcccaatgcttagacagagtagggaaattccttgctgttattgtttcttttctccattctctcacacccaataatctaattgtggtggtggccatgacaataatggcagtggggctgcaaaggaacctaaaactctaaggaagcgtgtactagagttcttcagagacaccgaaccaataagagatagatagatagatagatagatagatagatagatagatagatagatagatagatagagatttattataggaattgattcatgtggatatggaggctgtcctctgatacatcatctgcaagccggagaaccagaaaagccagaagtgtaattcagtctgtgtcctcaggcctgagaaccagggggaactgacagtgtawctcccaatctgagatccaaaacctgagaaccagggggcttgggatgagttgctggtggtaagtcccagattccaacccaagaactaaaagctctgacacttgggcttagacctgctatgataggattaacgtcactataagaggaagaaacaccatgtttcttctccatgtgagaataca

SEQ ID NO: 676399 - DNA, 839 bp, Homo sapiens
atcacatgcagccccttggccttggacttctaagcctccatgactgtaagaaataaattaattttctttacaaactactcakatattctgttagttttaggtattctgttataagcaatagaaacagactaacagaaaacagtgcatgaactttcctcaacttatatagttgaagtggtgaggaatgtttgatagacattatataaagttaatatatcaagaaacagtgtgctaaaatacaataaaattaaacatattatttcaagttagagtagaattccaacaaaaatcaagaaggaagggaagtgggacatggtgtgagctaagtttttaactttttcacagcaaggggtcacaagttactgactaatcaagaaatagatgtgtgagcacattctacagagtgagggtgtttcccgtgagaataaccagaaccaaagactgactggtggctctggaaatggagtgtaaaaggtgactttcacatctttgattcctgtccttctatactgtttgaatttactttgtttcctatccttctatactgtttgaatttattttcttaccaaatacttcacattcataacttttatagaaagttcacataattggtagcatctataagttgacattagcctatgttcgccaggttttagtagataagcttcataagcatcaacgcctccagttaatgaacggcaaggtttcacttatttcataaactggcacttcacacttaatgcttcctcttgaaataaagagtaggaaccagtttataaatcactacattggtaataaaaactatataacgtgagctaaaatactatgacttatcctta

SEQ ID NO: 676400 - DNA, 839 bp, Homo sapiens
atcacatgcagccccttggccttggacttctaagcctccatgactgtaagaaataaattaattttctttacaaactactcagatattctgttagttttaggtattctgttataagcaatagaaacagactaacagaaaacagtgcatgaactttcctcaacttatatagttgaagtggtgaggaatgtttgatagacattatataaagttaatatatcaagaaacagtgtgytaaaatacaataaaattaaacatattatttcaagttagagtagaattccaacaaaaatcaagaaggaagggaagtgggacatggtgtgagctaagtttttaactttttcacagcaaggggtcacaagttactgactaatcaagaaatagatgtgtgagcacattctacagagtgagggtgtttcccgtgagaataaccagaaccaaagactgactggtggctctggaaatggagtgtaaaaggtgactttcacatctttgattcctgtccttctatactgtttgaatttactttgtttcctatccttctatactgtttgaatttattttcttaccaaatacttcacattcataacttttatagaaagttcacataattggtagcatctataagttgacattagcctatgttcgccaggttttagtagataagcttcataagcatcaacgcctccagttaatgaacggcaaggtttcacttatttcataaactggcacttcacacttaatgcttcctcttgaaataaagagtaggaaccagtttataaatcactacattggtaataaaaactatataacgtgagctaaaatactatgacttatcctta

SEQ ID NO: 676401 - DNA, 1405 bp, Homo sapiens
taaaatcccctattgcaaatcctatacatatttcaatgcaattcttatacatcgatcttaatcaaatttataaatgtacaatcctgaagacagtgtactagatatgcactataaaatatattgcagtaaggaaacagattaagttcactgtcaaactgtctgacttccttaacaaatttaataaagataaatgtcaatatgaacaaatttgttaggtaccttaggaatctttcaaaactatttagatataaaataaaattatagtaataaaatattgargagaaatatcatttttagtgaatatggttagaaagaacataagaagtgagatcaaattattttaattaaaaaaataggccaggtgcgatggctcacgcctgtaatcccagcattttgggaggccgaggcgggcggatcacaaggtcaggagattgagaccatcctggctaacacggtgaaaccccgtctctactaaaaaaagtacaaaaaagaagttagccgggcgtggtggcgggcgcctgtagtcccagctacttgggaggctgaggcaggagaatggcgtgaacccggaaggcagagcttgcagtgagccgagatcacgccattgcactccagcctgggtgacagagtgagactgtctcaaataataataataataataataataataataataataataatagactgactcaaatctaccataaagcacctctactcattttggaatatgtacgtggaattttgcttcaatagctgaaatctaaaaacactctttctgttgcatttgattattcaatcatgataaggtaaatgtaaacagactgtgtagcactctatcacctggagtgaacttagaatttacagcttagagtacatgactaaaagaggaatggagtggaagtgggcagtaggtgtctttggggcaaaaattctataaactggtgttatctaaactatcacattactttgttaaattattgtttcatcacgtatgacctttgtgatttgtcacacattttacttctacatatgcacataattgtaatttttttaactttaaaaagtcaattatgtttaagaaaatttttaaaataagaatgaacgtatgtgatatttactgtgatatttactcgtgtatttacgatttctgatgcccttattttctttacatacatccgtgtatccacctgttaccattttccttctgcccaaagtatttatcatctataccagtgaagaactgttggttcaactgttgtatgtctgaaaatgtgactctttttctgcctccattctgtgaaaaaaaaattgctgcatatagaatttgaggttaacatggttttgtggatttttttcagtattttaaagatgttgctctaatatttctggtttgctttgttcc

SEQ ID NO: 676402 - DNA, 1405 bp, Homo sapiens
taaaatcccctattgcaaatcctatacatatttcaatgcaattcttatacatcgatcttaatcaaatttataaatgtacaatcctgaagacagtgtactagatatgcactataaaatatattgcagtaaggaaacagattaagttcactgtcaaactgtctgacttccttaacaaatttaataaagataaatgtcaatatgaacaaatttgttaggtaccttaggaatctttcaaaactatttagatataaaataaaattatagtaataaaatattgaagagaaatatcatttttagtgaatatggttagaaagaacataagaagtgagatcaaattattttaattaaaaaaataggccaggtgcgatggctcacgcctgtaatcccagcattttgggaggccgaggcgggcggatcacaaggtcaggagattgagaccatcctggctaacacggtgaaaccccgtctctactaaaaaaagtacaaaaaagaagttagccgggcgtggtggcgggcgcctgtagtcccagctacttgggaggctgaggcaggagaatggcgtgaacccggaaggcagagcttgcagtgagccgagatcacgccattgcactccagcctgggtgacagagtgagactgtctcaaataataataataataataataataataataataataataatagactgactcaaatctaccataaagcacctctactcattttggaatatgtacgtggaattttgcttcaatagctgaaatctaaaaacactctttctgttgcatttgattattcaatcatgataaggtaaatgtaaacagactgtgtagcactctatcacctggagtgaacttagaatttacagcttagagtacatgactaaaagaggaatggagtggaagtgggcagtaggtgtctttggggcaaaaattctataaactggtgwtatctaaactatcacattactttgttaaattattgtttcatcacgtatgacctttgtgatttgtcacacattttacttctacatatgcacataattgtaatttttttaactttaaaaagtcaattatgtttaagaaaatttttaaaataagaatgaacgtatgtgatatttactgtgatatttactcgtgtatttacgatttctgatgcccttattttctttacatacatccgtgtatccacctgttaccattttccttctgcccaaagtatttatcatctataccagtgaagaactgttggttcaactgttgtatgtctgaaaatgtgactctttttctgcctccattctgtgaaaaaaaaattgctgcatatagaatttgaggttaacatggttttgtggatttttttcagtattttaaagatgttgctctaatatttctggtttgctttgttcc

SEQ ID NO: 676403 - DNA, 1389 bp, Homo sapiens
ttatattcagttctagaatttgaaaaatatcgtattcagaaatattcacttcggatttagttaagtgaaaaaaaataacagaaatgctcttttgttaacatttgatttatttaaagtccttaactgcaaatgatcaagaacattttccacggcttaaaatctggtattatttttgttatttaaatcaaaatatttttaattacaatcacattgataaaaattaacaatttaatttgtaattttaaccatcatttaaagcaatttcagctgtaaagaaaaagaataaaccatgcaataaattaacattgagaaagcaaagagaaataataatgaaacccgtctggctatactaacaccatgtccaactgtggaaagtgcataacactggatgaaacaagcacacgatggcaatgattaaaatggccactatcaataggatttttgaatcttggaccacgttttgaaatccagctccctataacttatctctcctccaacattgtaatattcccttttactgaaaaaaaaattctttaaatggtatacactcatagaaactaattttatgtgttatgtgacctcagaatgacatgaccatggcactctgcaaagcaagaagcagagttcttgagggcaattcctgaggaattgattcccagggccatctgtgggtagagaggacaaaggggttggggtccttgtaactttcggtcaagcaactcttgagaatgtatcatgtatatcacctatctattacctctatatgttatgtaaatatacggaggatgtctacacatctgagcatgtgcataattaagtccatacacaatatacatgtatttcatttaaagacatctgctatctgcatgtatcagaaatgtaaactgagaagcaaatggctctgatgtttataatctgtttatgtcttgctatataacagcagtattgtctttcaatacttttaagagcctctagtgtatacttgtttcttcaccatttcaattcttatggttaagagtattgccacagacctgtaaactcgtagggggtcaggtaaggagggggaaaaagcacaaacaaatattttacaaacttgaccatcttccttttttgtttttttaaataaccctccacaaactagaatgtctggaggggaaagagggaagaaagagaggggggcaaggaaggaggagaatttcatatatacacttgtggatcattaaacttcgcaggaaaaaaattggtttggggttgtctttgtagtaatatacacaatgaattttgaatacaataataaagtaacagtcttttgcactgggggaaaggtwgtgcatgaaaaatgaaataaaaatagttgttgggattttattatgctgttgacggtttggt

SEQ ID NO: 676404 - DNA, 2002 bp, Homo sapiens
taccacccacctactttcctcttaaacatttggatattttagcacagaaaatctgagatgatttaattacctcacttgcatgytgttgacaactgaagatgagatgacattcatttaaattctaagcttaatttattccaggccatgtttttaccaattttcattaatggtaatgtaagaaaaggttcaaaacttataaactagattttcacaaaactaattttgagttgaaagttggagtataatctcatcattgggttactggagagtagggcaaagagaaagacactgactagttgtgactattattcttttttgtaccactttttctgtggatacttgtgtagttaagtatgacttctaaggttgccttctgctgccttttggttgttttccaaagcttagaacaggacaagaggagtccttatgataggaatcctattctaagtaaagttctcaccagctgtgcggacattatgaccctggaggttctgccagaggtagttcattgctcacatattacttgcataagattctagctacatgaagggctggtagatcaggctattggagggagaacagtagctgtgctgtgtattttataaccgcacaccacaatggaaaaataaaataaggtgcgtcttttttaccttcagccaactgagacgaagattttcttaaaaggaccattttgggaactagacctatgccctccttaagtttggggaacacaggagttagtatctgatgttcaatggaagaatctaaagaggaagggagagggtaatagagcaaagagaacaaggtgcattgcaagctgactgtaccttcattaaatgtagagcaagagagtgtggaccagacattgcctgccatgcccgaagggagctgttccagggctgtcttcgaagagacccagccaatgaggcaggagaatggcgtgaacccaggaggcggagcttgcagtgagccgagatcgcgccactgcactccagcctgggcagcagagcgagactctgtctcaaaaaattaaaattaaaattaaaattaaaaaatagaagagacccagccaagaggaccagtgtccaccgaggaagaagtccagttgatgataaagaaggcattgttcttgtcaagtgaacaagtttggacactccagaaggacccctctaagagatttaagaataccctagaaattggtcctccactcggatgagatgatggtccaaagccagattacaacagttccttcattgacatggtgcttttcttcaccaaaggagtgcacaagacacctttctgaagatttcacaatacttaaaaaaaaaaatgaactctcctcagagtgtcttttataaatgtatgaggtagaataaaaaattaaataagcagtagaaacttatttaagacagttccactctggcaagacctttatttttcttattactcctctctcctccatgcacccaaccctatagcaaccatacgtagctgctggtgaggaggaagggaccctgaggaagaaggaagaacccagtctacaagtgaatggagagagagaagagttaagattgctgaaggactggtggtttactatagcacggatggagctttttatttaccaaaatgactcttcttctaactgaaggaacattaaaaaaatgacgtgttttgcaaaagacttaatccaggatagaaaaggggatagcacagaagaggagtttgaaggagcagaagaaaaaaagaataaaattattttctgttcacactctgccaagtccagttccttcaatccatagattataaattactgttttaaatgagtttctaccgctacatttataaaaaactctgagcaagtcttcattttttttttttaagtgtcgtgaaatctttcagaaagatgtcttctgcgctcctttggcaaacaaaagcacaatatcaatgagggcatctcttctacaaggaaaagtcatgttaaaaaaaggactgcatcggcaga

SEQ ID NO: 676405 - DNA, 572 bp, Homo sapiens
tatagggatattcctttgaattaccttgtggctctmtgtttatataaatatattattagtttatgtttatatatttagcttatatgaatatatacttttatatattatctacataagtacatgtatatttatatatcatatatagcaaataatatatagtatatttaaacatcattacatttgtggtcttcggttttgtgtgtgtgtgtgggacttttctttatttaaaggcctagcttctcaataaagatgcatacatgagtcatagtattagaagctcaagaataaatcttcactgaataacggactgaatccttgtacatcagaagtcccattgctctttctttgacttacacattttggggtctacaaaaatagccatagtgaaagttcaaagtaactaagaagttaaaaaggaaaataaatcttgattttttatgacctttggcaagagatatgtgaaacttagtaaccaggtaggtcatttttcactgccctttttcttccagaaaattgtcattcttaaaatgtacatttgaaaacaatcctagctattttaaataatgccgaaa

SEQ ID NO: 676406 - DNA, 630 bp, Homo sapiens
ttagcatagccccatttgctgggatgacacacagttaaaagaaaaaaaatagaaatctttccggggaaaacctgcagcccagactacagaagaaccaggggccagcagaggagacgctgggacggtggctccacagggttcaagaaaacatgctcgcgtttcatatctacagaattatcacttaaatgaatgagacaaaaatacattctgaatccctgagactgtcagaaggagtcacacacaagatcgtctctgaaaataccactggaggaagtattctgcaaaaaaaggaaaatgatcagaaattayaccagatacctgggaaaatcccacagtaagtgtaaaacttagtaaagttccctatggaccaaataatcaaacccttcaccccagacaaatcatgtctgtggcaatccagagctgaaattctaggttattccagtgtggctggtgtgtgggaggccagaattcctgaaggcacgctggggtacttgttttctttggaggtgggaggcatttttcaggtcaatatactaagctcttgaaaaacataaatgcttgttttgagtcaggagcagtcaccagggaatgtgtagcttccagagcagctgactataccagttttctccc

SEQ ID NO: 676407 - DNA, 2088 bp, Homo sapiens
ggtgtgaagacaaggccacgtgaggccggaggacagtgcaggccaaaccgaggccaagcgaccactcctcatgaggctgcagggaccaacccggcacgcagagaggcacgaggtgacatccgaggcagggagcacatccagggccacgaaggatggcattgcggagagaccgggcgccgtgtgctctccaccctcagagccacccccagaccctgctcgcccttcagtccccctccagcaggtgcggcctcacctctttccctgcccccactgcatgcagcaggtgctccataggtgctcctgctcatgtgagaggctggtgcagctccctctctctgctggctgacggcagacccaggggtccccgcccagggtcactccaggcaggaggcgacactcggcacagtccttgtctcctgagatgaactcttgagatgaaccattttccttttaaattgaaaaagaaatgaagtgttttgcattttattaaagcagacacggctgcagccgggtagggctcccaaggactcagccaagcttgggtgctgggactttccggtggtcactgtcagagaatccccaagcctggggacatggccccggctggagggaaggagggggagcggatggaaacagaaccaacacccgcaggacgcagctccaggcaggggacggggggcggtgtagggggcactggttcagggtaactggggggctccaaggaggaggcggggctggaggtggactgggaggggccaggaagttcaggaaggttctagaagagagtagagagggaagaaggcaggtatggggatggcatagagagccgccctcggagggtcccagtgctgctgggattttcccgtgggccatgcagacttcagggcaaggagcaccacagttggggggtccgcgggcagcagccatgagggaggaggcggccggggctgcaggaggaggtgcgggcccagtggaggggaggggctgcaggaggaggtgcgggcctggccgggtggaggggctgcaggaggtcctggacagacaagctcacaggagcaagtgcggaagcccagctctgtacacacggaagaagcttccggttagaatccttaaaccggcagcttgtgggttggtctgagaagatccaggtgcttacaactggtgtgtgtcttaggggctcctcctcagtgaactcctgttccgcctttgagagcacctgggtctctcagtggtgtggacatctgaggttggtggttggggcaggtgggtgctggaaggtgagaggtgcctgttgtctgcccctcagggacccctggtgacctggtggttctgagtcctgccaggagtggggaccgcgggcggccagactccgggttctgcccacagactggctatttccctgggcccccttgttctacttttgggcctcagtttccaattcttcaaaccagcaggttgatgctgtgggcccttcctacagcacagtggtaccgccccagagccaggggaaggaggcgaggagggtgtggaccaggcgcagggctgtgtggggtcagctcccgggtgtggaaggtgatggaggggcagagagtgaggagcaggagctgaccgggacaggggctggagcggggctgtgctggcatgtccacactggacacaggatgaggccatctgggaagtgccagaaggtgattccaagacctccaggccatgaaggatgagggagccctggaatccccggcccrgcgcccaggcctcagtatgctcaaaactgacaaagttcttatagctgctaagcccagttttgggccccaaggagatgaccatgggcttgtcaaggtcccctctgctggccaagacccagcccaggaggaagagggctctgcccttgtcgtttgtttaaattgtgaaatacacagcataaaatgtaccatcatcaccatttaaagcatgaagttcagtggtttaagtacagcacattcccactgttgtgtgaactttgccaccgtccatctccaggactttcatcttcccaaactgagactctgcccccattaaacactcacccccatttctccttcccagccc

SEQ ID NO: 676408 - DNA, 2088 bp, Homo sapiens
ggtgtgaagacaaggccacgtgaggccggaggacagtgcaggccaaaccgaggccaagcgaccactcctcatgaggctgcagggaccaacccggcacgcagagaggcacgaggtgacatccgaggcagggagcacatccagggccacgaaggatggcattgcggagagaccgggcgccgtgtgctctccaccctcagagccacccccagaccctgctcgcccttcagtccccctccagcaggtgcggcctcacctctttccctgcccccactgcatgcagcaggtgctccataggtgctcctgctcatgtgagaggctggtgcagctccctctctctgctggctgacggcagacccaggggtccccgcccagggtcactccaggcaggaggcgacactcggcacagtccttgtctcctgagatgaactcttgagatgaaccattttccttttaaattgaaaaagaaatgaagtgttttgcattttattaaagcagacacggctgcagccgggtagggctcccaaggactcagccaagcttgggtgctgggactttccggtggtcactgtcagagaatccccaagcctggggacatggccccggctggagggaaggagggggagcggatggaaacagaaccaacacccgcaggacgcagctccaggcaggggacggggggcggtgtagggggcactggttcagggtaactggggggctccaaggaggaggcggggctggaggtggactgggaggggccaggaagttcaggaaggttctagaagagagtagagagggaagaaggcaggtatggggatggcatagagagccgccctcggagggtcccagtgctgctgggattttcccgtgggccatgcagacttcagggcaaggagcaccacagttggggggtccgcgggcagcagccatgagggaggaggcggccggggctgcaggaggaggtgcgggcccagtggaggggaggggctgcaggaggaggtgcgggcctggccgggtggaggggctgcaggaggtcctggacagacaagctcacaggagcaagtgcggaagcccagctctgtacacacggaagaagcttccggttagaatccttaaaccggcagcttgtgggttggtctgagaagatccaggtgcttacaactggtgtgtgtcttaggggctcctcctcagtgaactcctgttccgcctttgagagcacctgggtctctcagtggtgtggacatctgaggttggtggttggggcaggtgggtgctggaaggtgagaggtgcctgttgtctgcccctcagggacccctggtgacctggtggttctgagtcctgccaggagtggggaccgcgggcggccagactccgggttctgcccacagactggctatttccctgggcccccttgttctacttttgggcctcagtttccaattcttcaaaccagcaggttgatgctgtgggcccttcctacagcacagtggtaccgccccagagccaggggaaggaggcgaggagggtgtggaccaggcgcagggctgtgtggggtcagctcccgggtgtggaaggtgatggaggggcagagagtgaggagcaggagctgaccgggacaggggctggagcggggctgtgctggcatgtccacactggacacaggatgaggccatctgggaagtgccagaaggtgattccaagacctccaggccatgaaggatgagggagccctggaatccccggcccagcgcccaggcctcagtmtgctcaaaactgacaaagttcttatagctgctaagcccagttttgggccccaaggagatgaccatgggcttgtcaaggtcccctctgctggccaagacccagcccaggaggaagagggctctgcccttgtcgtttgtttaaattgtgaaatacacagcataaaatgtaccatcatcaccatttaaagcatgaagttcagtggtttaagtacagcacattcccactgttgtgtgaactttgccaccgtccatctccaggactttcatcttcccaaactgagactctgcccccattaaacactcacccccatttctccttcccagccc

SEQ ID NO: 676409 - DNA, 2088 bp, Homo sapiens
ggtgtgaagacaaggccacgtgaggccggaggacagtgcaggccaaaccgaggccaagcgaccactcctcatgaggctgcagggaccaacccggcacgcagagaggcacgaggtgacatccgaggcagggagcacatccagggccacgaaggatggcattgcggagagaccgggcgccgtgtgctctccaccctcagagccacccccagaccctgctcgcccttcagtccccctccagcaggtgcggcctcacctctttccctgcccccactgcatgcagcaggtgctccataggtgctcctgctcatgtgagaggctggtgcagctccctctctctgctggctgacggcagacccaggggtccccgcccagggtcactccaggcaggaggcgacactcggcacagtccttgtctcctgagatgaactcttgagatgaaccattttccttttaaattgaaaaagaaatgaagtgttttgcattttattaaagcagacacggctgcagccgggtagggctcccaaggactcagccaagcttgggtgctgggactttccggtggtcactgtcagagaatccccaagcctggggacatggccccggctggagggaaggagggggagcggatggaaacagaaccaacacccgcaggacgcagctccaggcaggggacggggggcggtgtagggggcactggttcagggtaactggggggctccaaggaggaggcggggctggaggtggactgggaggggccaggaagttcaggaaggttctagaagagagtagagagggaagaaggcaggtatggggatggcatagagagccgccctcggagggtcccagtgctgctgggattttcccgtgggccatgcagacttcagggcaaggagcaccacagttggggggtccgcgggcagcagccatgagggaggaggcggccggggctgcaggaggaggtgcgggcccagtggaggggaggggctgcaggaggaggtgcgggcctggccgggtggaggggctgcaggaggtcctggacagacaagctcacaggagcaagtgcggaagcccagctctgtacacacggaagaagcttccggttagaatccttaaaccggcagcttgtgggttggtctgagaagatccaggtgcttacaactggtgtgtgtcttaggggctcctcctcagtgaactcctgttccgcctttgagagcacctgggtctctcagtggtgtggacatctgaggttggtggttggggcaggtgggtgctggaaggtgagaggtgcctgttgtctgcccctcagggacccctggtgacctggtggttctgagtcctgccaggagtggggaccgcgggcggccagactccgggttctgcccacagactggctatttccctgggcccccttgttctacttttgggcctcagtttccaattcttcaaaccagcaggttgatgctgtgggcccttcctacagcacagtggtaccgccccagagccaggggaaggaggcgaggagggtgtggaccaggcgcagggctgtgtggggtcagctcccgggtgtggaaggtgatggaggggcagagagtgaggagcaggagctgaccgggacaggggctggagcggggctgtgctggcatgtccacactggacacaggatgaggccatctgggaagtgccagaaggtgattccaagacctccaggccatgaaggatgagggagccctggaatccccggcccagcgcccaggcctcagtatgctcaaaactgacaaagttcttatagctgctaagcccagttttgggccccaaggagatgaccatgggcttgtcaaggtcccctctgctggccaagacccagcccaggaggaagagggctctgcccttgtcgtttgtttaaattgtraaatacacagcataaaatgtaccatcatcaccatttaaagcatgaagttcagtggtttaagtacagcacattcccactgttgtgtgaactttgccaccgtccatctccaggactttcatcttcccaaactgagactctgcccccattaaacactcacccccatttctccttcccagccc

SEQ ID NO: 676410 - DNA, 1195 bp, Homo sapiens
ctcctggggaggttcttaaaaactgcacatttccaggcacccctccccaaatattttgactcagtggatctgggataggagtctgtaagaggatcaagggatctgagggctgatgagggaaaaaatatgaccatgagaggcagtaacatacaagtttttttggtggcacttgcccaggatcacatgacaggggaagtgcctcatagcactagactatcagaggcttatagggaaggggccatcacccagaagagaaggagggacagggaactacctgaagaggggatatcagagaggggcttacgtgtctaagttgtgtcactcagcagcacagcggtgagcctctgggacagaaaaccaaaaggcaataatgggttgggggtccttgtaaytactaggccccattttatcaaggtgtgagcaattgcatgagttttcttgggtcatgcaaagcaggtaggctctaaatagcttttaaaaatctacttgtttgggctttaaaaaataattagatgtgtaaaactcttgggtttggcactgtcaggcttttgaactcatttatatgacagagtgggaccacattcgaggagataactctgttgtggtatgttccagccacattttaaggaagaaaataatatttcaaactccaagtgctgggctctcttcattgtagcccagccaactcaaacagtggataagtatgccaggagtcagtgtccgtgtgagcacatgctggccaggcctcgggatctgggttaggatcgcaaacatgttttcttcatcttcatgaggacaaattctttttatacaagctggacttcttcaatcattctttatgaacaaagggagaacaggaaagctctgtttaatgaacttcccaatccagttaggagtaaaaagtagaatacacaccacatttggagcactttatgttaggattccgcccaaaatataccatagttgcatgaaaccgtaagctcactggtagctggaactgggtttgttggagggaccatcataatcactgcctctaaagcaaggcctttccaatgacagtagtgagtaaatgagcatggactaaataaagaacacaggaacatctaagttaccgggctctacatattcaagttgttgtgctgagaaatctgtctggagccatgaacttcaatcagttctcccatcgtccctgcca

SEQ ID NO: 676411 - DNA, 697 bp, Homo sapiens
aggaggctatttttttttatcttgacacaaaatttgccacctccaacctcaaactgctcaacccacagctccctccaagcccacccaggttttaaaatgtgctccaagtctcagcattgtggtcagacagtgcagcacctgctgctgagtttagggttctactcatctccagccctacccacctcctacccatgaaagagaaatataagagttctaattgcagttgctaatattgtgtttcataataaaaatgaaaacataatttatttttaaaggatgacctgcaaattttgcttcccttttcctcaatttgcccttgtgcaaaaaccgtggtttgttgctgtcctagttaactccttactgctagagacaggccctatctttcatggtaacacacacataggtaattttttttttttttttttttttttttttttttttttttttttttttttttttttttgagacggggtgttgctctgtcgcccaggctggagtgcagtggtgcgatctgggctcactgcaagctccgcctctctggtttgcgccattctccygcctcagcctccccagtagctgggactttaggcgcccgccactgcgcccggctaattttttgtgtttttagtagagacggggtttcacgtgttagccaggatggtctcgatctcctgacctcgtgatccgcccgcctcgg

SEQ ID NO: 676412 - DNA, 640 bp, Homo sapiens
ttctggttctagatccttgaggaatcgccacactgtcttccacaatggttgaactaatttacactcccaccaacaatggaaaagtattcctatttctccacagcctcgccagcatctgttgtttcctgactttttaataaatcaccattctaactggcgtgagatggtatctcattgtggttttgatttgcatttctctaatgaccastgatgatgagctttttttcatgtgtttgacggccgcataaatgtcttcttttgagaagtgtctgttcacatcctttgcccacattttgatggggatttttttttcttgtaaatttgtttaagttccttgtagattctggatattagccctttgtcagatggatagattgcaaaaattttctcccattctgtaggttgcctgttcaccctgatgatagtttcttttgctgtgcagaagctttttagtttaattagatcccacttgtcaattctggcttttgttgcaattgcttttggtgttttagtcatgaagtctttgcccagggaaggggctaaattttaaccatcatattccatcctgtttttaactttttaaaatctgtcctcttacaatgagacttctcctttgagtcagactattttagaaaaaaat

SEQ ID NO: 676413 - DNA, 640 bp, Homo sapiens
ttctggttctagatccttgaggaatcgccacactgtcttccacaatggttgaactaatttacactcccaccaacaatggaaaagtattcctatttctccacagcctcgccagcatctgttgtttcctgactttttaataaatcaccattctaactggcgtgagatggtatctcattgtggttttgatttgcatttctctaatgaccagtgatgatgagctttttttcatgtgtttgacggccgcataaatgtcttcttttgagaagtgtctgttcacatcctttgcccacattttgatggggatttttttttcttgtaaatttgtttaagttmcttgtagattctggatattagccctttgtcagatggatagattgcaaaaattttctcccattctgtaggttgcctgttcaccctgatgatagtttcttttgctgtgcagaagctttttagtttaattagatcccacttgtcaattctggcttttgttgcaattgcttttggtgttttagtcatgaagtctttgcccagggaaggggctaaattttaaccatcatattccatcctgtttttaactttttaaaatctgtcctcttacaatgagacttctcctttgagtcagactattttagaaaaaaat

SEQ ID NO: 676414 - DNA, 640 bp, Homo sapiens
ttctggttctagatccttgaggaatcgccacactgtcttccacaatggttgaactaatttacactcccaccaacaatggaaaagtattcctatttctccacagcctcgccagcatctgttgtttcctgactttttaataaatcaccattctaactggcgtgagatggtatctcattgtggttttgatttgcatttctctaatgaccagtgatgatgagctttttttcatgtgtttgacggccgcataaatgtcttcttttgagaagtgtctgttcacatcctttgcccacattttgatggggatttttttttcttgtaaatttgtttaagttccttgtagattctggatattagccctttgtcagatggatagattgcaaaaattttctcccattctgtaggttgcctgttcaccctgatgatagtttcttttgctgtgcagaagctttttagtttaattagatcccacttgtcaattctggcttttgttgcaattgcttttggtgttttagtcatgaagtctttgcccagggaaggggctaaattttaaccatcatattccatcctgtktttaactttttaaaatctgtcctcttacaatgagacttctcctttgagtcagactattttagaaaaaaat

SEQ ID NO: 676415 - DNA, 666 bp, Homo sapiens
gcaattttctagtcattatgcacaaaactgcttcatcaaattccccattcagcatgcacattgccaaaaaaatcaaaagccaaaagcaagttgcaacctgcagcccctattattcttttactttttaaaatatgcaattctttcgaagagtttgaataccaagtgttctttttgttatttagacaaaactttgcaaggaattttcctcattttctagagctcagtattcctagaaagttaaatcccaggggaacttcgaaaatgtcaggagctttttaagtggtgtgaaacccacttacaccttatttgttataacctttgatatggaaatagcagagtggatatataaagaaaaaaatccagtaccaataggaatacatcgtttgtgatattgtccatagtcaattcctggtcagatgatactgctgaagattcaaaagactggggttccatcccacatgggcaattttttttcctctatggatwatgaccttcaccttggtcccagattttgcatagatatgactataaaaagggaagaacaggtgaatgtagaagaatcaaggcaaatctgtctgcattactagaaaaataattcaaaatcaatggttgccaaggactatccaagtaaatgtaaatgtcttgataatatctgtcaagatatta

SEQ ID NO: 676416 - DNA, 1105 bp, Homo sapiens
tgtgccagatattgcaagatgctaaggcaaaacagttaagagacagacactattataatattaaaaaaaataagttggaaacattgatttttttattttaagattttgaattctttgaggatagaarttttatcttgcttacccaaaaagataagtactcagataaagcttgtggttcaatatataactatatacatacataaataaaatttttcttcatgacattttgaaattttgagttcagtttgcatatttatatttccctttgaaaattttcctcaagtgggcatttattgaagtgtacatgcaccactaaattattatccttactgttcagtagatctgagttataagccaggaggaaagagcatgctctatgtcacagcagagctggctgttgcagcccagttcgtctccctttggaatagcgataaagtgtgtattttctctaactgctagagttaacagagaagtcttggaagaggaaatggagcttcagaaacagagcttagttttgatttgtttaccaattaaaagaactaagatatctgagtcagttctatttgagatcataattggcctttttaaaaaacttaaataaggatgggtaaggaaagatattaaaacaatcgttaagaaaaatcttcaaaatatttgttaaacatttaattataaaatttaattataaaaatttgaaacccttactagagttgagaaagtaaaatagtgaatcttcatggacaagcgcccagctctaatgatcatcaactcatagccaaatttgtttcatctatagtcttacccacatctcctctttctgttaaccacttagattgtttcgaagcaaactctatctgtaaatatttcagtacaaaactttaaaataactcttttttggccgggcacggtggctcatgcctgtaatcccagcattttgggaggccgaggtgggcggatcacgaagtcaggagtccaataccagcctggccaacatggtaaaaccccgtctctactaaaaatacaaaaattagccaggcatggtggggggcgcctgtaatctcagctactcaggaggctgaggcaggagaattgcttcaacccggga

SEQ ID NO: 676417 - DNA, 3160 bp, Homo sapiens
ggcttaatgcctttaattgagctttgtaaatctgatgaaaattcagaacaagcacttgttcacatgactttcctaaaaaaaaaaaaaaaaaaaaaaaaaaaaaaacaaacaaaaaaacagtttaggcttaacatttggggaatatggagacttattttttgaagatcctattttatttagtgccttgaccatgaaaaatctaatcttacacttaaaaataacctatagaaatgatagaggaaggagctgaaattctctcactgaataacatgattatataaactacagctgctttcacctccatttgctgttttaaggacttcctctcatacaggcagtaacaccaccagctcgagatgctaagtgatgctttaacccttgccactttcttattggcttttgatttttgccataagcaggtctttttgtctcagtgagaactaattagtgcttatgttccacttaatgcagtagtaaaagatttaaaagaagtggaacaaaattactacagtatattttcaggtactaaagttcgagcaaaatggaataaaggccaggtggcggtatctacaacctgtgctaatggctccatcaacagatgtttaatgtacttagagttattcttcacatcctactgttgctaatacatttcctcccatacctcccctcaacacaaaaattttgagaggaaaggaaacattaataaccccaaactgtttaattttaaaggatatttaaatcttaatactagtcataaggtgacctatttgaccactggatggcttattgcaggcttcaataattttgttgccatcattagtaaaagtcgttaaccaagaaaaggcttaaatatgtatggattttctgctttatttacccttggattgcgtactgctttgaaattatttttccatagaacaggaatacagagatgctatgcagtgatgttttaggcttggatgcagaggaggctggctgtgaaaagggtgctggcctgccagtaagagaccatgctttctgtccagagtttctaattctgcaagtcagttcatcaagtcagatgaccaccttgtaaacatcaggccatcagtaaacatcagggcatgtttttcactataatgggaaaaagaatgaagaggtgactcccacttggagcagcacgttctccagtgaacacattgggacatttatttatatgatgatccaccctmtgggttgctacataacagagaataggggactgagaggacaagctgcatgacagaaaatgttctgtgagagagagaggtaagcaggcaggataatttgggagcgtggtggtagtggtcttctaagggctccctagagcaactccaaggggatgaaacaagggaggtagtgaataaatgtggaccagccaggagaggagcctcctacccagccagctacgtggccagagagttgttgtcatagttctcatcaccctccccatttcattttctttattgcttttctccatcctactaaattgtaaaactttacaaatttttaatatttttatatggtggcaggaacccatacagcaaaaagtgcctggggccagtgaaagtcatgatgcagccctgcttatgcattcccatttgacaaatattaatctgttctatgattgaaggtattctgattgtaggttacatattataatttggttaattgagaaataaacataagaatagcatgtggatctcctataataacacactttaagttagatgtcaacaacaaccagagaaggaatagtttcatctctaaggttacattgagatggaagagtatatggtggttgaaaagcattggaaaagaagtcaagatactacctccagttatttctgatgaggctttttccagttatgaaaggttggaaaggtcactcagccttcgtcattagaatgagatgatctctcctttctactttcctttctaaactgtaaaaaaaaatgtgctctcattcgaagggttgggtttgggtcttgcttgagggaatgcccacttccatttctgtttgtagtcaaggacaaagaacaggttaaaggagaagcaaaattgaggaacaaacgtttttgccctaacaaagattaaaatcacagaaaagctctatttaatgtgagatcctatttctacttagtaatgttaacaattaccacttatagtataatcaatgtgggttagatataataattcaggtaattaagaaatgaacttgagaagaggaaaggcatcttaacacacaattacaggatgtgggttttccataacactcaacaatatgaaaaatatcaactgttagctttgaggggagagagagctgctccattgagaagagagggacgtgctgacttctagcaggcctctataatgaataatgaggcaaaattgaagagactaaagtagaagaaaggtgaagacattaaaacaaggttgtatttgagagacgaaactaatgacttaacacaaagtgcaaataatgactatgaaaaaagtgatgtgaaacagtgggaaaacacatgataaaaatatttaaaagaatgttttataacacatattagctcatgtaaagacagtactctgttttgtagttcataggttacctttttgttgtttagcttttcttgatcataatatccttggaaaatatcaaaaacataaagaagaaaaaagcaccacaaatcttatactatagtacatattacttatatttggtatattcccttgcagattatacatttaaaaataaaatttagattatactttgtaaacagttttacgtccttctttttccaaaatattattttcataaagtctttaaaaacttgttttaaatgggcctatagtaatttgttgttgaatgaaaccattcctctgtcgttaaacattacattatttcaaaactttatttcaaaaatgtcactattcattctataatgatgtgcaattagaagtcacagacttgatgttcacatagccacgtgcatggatcttaaatctataatcctgaatgaaaaaaacatggaaagcagaacgagatgaataacataaaaccattaatatatgtaaagttgtgtgtataccaaatgagaattcatcttctataagaacatagaaacaaagggctcagcacaaacat

SEQ ID NO: 676418 - DNA, 659 bp, Homo sapiens
ttatttattaaaagacatacattttgatcttgaaggcatagttttgagttaaagaagtatcttttaagtaggaatatttcttgcaattaataagttggcacttattttatggttctgattatatttttattttaaccattagagggcacattagttcaagagaaattaatgaaaaagcacaacaataagacggaaataggctttgaagtggggggcagaaaaactttatatatttaactatgcttattttcattcatttcattgtcatttgcagtataatttatccagaaawttttttcaatctgaaaaagaattcaagtatatatagtttcatataagaaataactcttcacttttttctgctagctactactccttggagaatgaggttgacctagttgcatttgacaaggttgactgctatgtgaccaaagaggacctaataaatcatggcatttgaagaacatcctgagttcacaggtacgtatgatcaagttattatgaaataagtatgaagtaagcaaatgccagtccctggtcttgtagttaataataataataaaaggcacctaagtgtgaatgaatgcagctcagcaactaggcttcgctgcaaatatttataacctttaaaatttggtacaaattacagagagaacaat

SEQ ID NO: 676419 - DNA, 611 bp, Homo sapiens
ccttactgtcacctgtagcaagaaggaacaaatttgtgattttttttgtgcgtgtgaaaataaatgtatcccagtgatatgtatgattatcacattgatgattttacctcctcttgatgctgactgagagcacaaactggaaacaagagatatgtttgtcttaccattttcttgctatttgtcggtatcattaccattttctttaayccatagcttgttcgaaaagtctttttaagtcatttgcccattttgtggtggttggtttagttaaaactattatctctaaatccagagtactgacatatgtaaactgttctaacgtgctcaagcaaatgaatgactaagagatctaaattaatgtgtatattaaacattaaaaatctttacctactttcttattttttaggtaaatacaaatagaagttgtaacattttattcctacccctcaatgactcatcttgctaatcccctgggcacccacattttatttcagagaccacggctttgagtactagaaaacaaacacaagtgatttaatgggaggacaggtgaaattatgaagtttaatttgtctttgggattgtatttgtggctttgagtattcctttga

SEQ ID NO: 676420 - DNA, 610 bp, Homo sapiens
actaggtcttgctaaatgacaatgctttatcctcataaaagtaggtattagggaagtgagagccaagagcaagaaaaagttgatttcatacatattttttttgagatgtagaagtagttccagaaattcacagtaaggagttgaaggatattccactcactgaagagctatcttttgtcatacttgcaataaaaaacaaaacaaagcaaaacaaaatacttcagattctcatagtaactaatcttgagatgagaagagataaaagacaagtgatagctcatccactgtgaactttctgatacagaatatatttttcctctgtcttaaasaaaagacaccaaggtaataagaactttcacttgatatgcatactggacaagagatcattttaaacaaatcagcacaaaatccagccaaagaaatgttctgacttctagttcagtaaaagacctctaatgtgatcaggagcaatagtgatcagttaatcaaagtcagttaatgttaaaaaaaaaaaaaaagtcagtttatgtgaagaataaaacaggatctatgttgtatgtttaacttaagacctaaaatacgcagtctgtcaatcactgatctatgtcca

SEQ ID NO: 676421 - DNA, 608 bp, Homo sapiens
ctaattcatctccagatttttgagtacgacttccccaaacacatcagattcactctgcttttaaattactgtgcataaaaagtattattaaattatggaaattcatcctcagactttcaattatctcaagtttatctctaagaaataaacatttagcaataccttttaaagttgccaaatgttcagactgcagacagaagcrctgagtgtggttggtggtgctatagcacctatagtttccccagatgtaatttaggaatagaaaaggatggcctgtagaaattccttttctgaccagtatctttacaggtggccaatacacattcatatgcaatctcactggagagattagtacacctgtgatatctattagtgtctgtgatatctattagtatctgcgatataggtctgagatgcatttctgtggcagctgtgtaattttagaattctcagtaaattgtattgactccaggaagagacagttgcatggatggtgtcattaaaacatgtcactggaagttacttacatcagaagggacaacagagacgcttaaccctcacaattgcattcttaggtagtaggggggcaaatagccaatgttaatgtg

SEQ ID NO: 676422 - DNA, 1379 bp, Homo sapiens
tgcattttacttacaatttcttctttttgtagcaaacaggagagcttttttccaatagattttcttggagacttgcaagcatttcatagagtctagacaagttggattatgttctttatctccatatctatagatttttgtaaacatttctgatatgatctcatcttcccttggttaaaagtttcctctgtagcaactgtcttttgaaatcagttcacaattgatgatgtcctcaattaaacttcatctaatgaaaaacagacttatttaatattttgaaaatcaatattgatggtgataaaggaaactgatcacttgactctctctgatgacaatttttaaatttaggtcatttcttgccaaaatgacaaaaaaggctgaacaatacgatgaatttaaaaatgcaatcttatttactaaccctcttctattaatagaaaaaaaattatttgatatttaattcatgacaaattattaaaagaaagtgacttacagcataggatatcataaatagcctgataattggaagatatgagactggtccaatattttcaaaactgaaactattattcatccatatataccagccaatttcatagttatttacatgtttataaaacatattcataatattttagtgctatgcttatattatactaatgagattaatgtggcatttttagattacaatgccttttaatcagctcccttatttgtcttgggtgataatttactattatacgatttcttaaaatattggaaaattttttaaatgcttatagtttttgaaatttatactgtatgtcttgataagttcygtgttctgtcattctcttagcatcatggcctcaggttacctaacccttatggggagctagctcactgaaataagcaaaaattctgcaacagataggcattaggagtaattgaattctacttaagtgaacaaatactctccctgaagaagaactatttactctaaaacatctgtgttagtatgttaccactctacatgttcaaggagataaatatgagataaattattcattttctttccatggtggcaatagtccataaattataccaaatctctctatctggtataattataaagccaaatatatataaattgtaatatatacttattatatataatgtatgtatttggtataattatatatataatatatatttggtataattataaaattatatatatagatacacacacatacatatatacaccagttacaagatatagatgaaagattatagatatgagattagatgttaatatgattttcttttagtaagttatgatcaataaagatagtatccacactgtgtcatgggattatttttctcttctgcctggtaaa

SEQ ID NO: 676423 - DNA, 658 bp, Homo sapiens
tggtttggctatgtccccacccaaatctcgtcttgaactctagctcccacagttctaacgtgtcctgggagggacccattgggaggtaactgaatcatagggrcagttctttcctatgctgttcttatgatagtgaataagcctcatgagatcggatggtttaataaagaggagttcccttgcaaaaactctttctttgcttgccaccatccacttaagatgtgacttgctcctccttgccttccaccatgattgtgaggcctccccagtcatggggaactgtgaatccattaaacctctttattttgtaaattgcccagtctcaggtatgtctttattagcagcataaatatggacaaatacattgcacctatgaaattaaattataatagacacagaatattattacaacatctgcctctaatcaccttgcagaccatgtataaaaacaaatgtaggagacctgaaggttttcagttcttttgaagaaagtttctttgtctgttggaaagttgcctgcagaaatacacaacaaaatctcatctagtaattgttttctctctaaaccatttgcttacacatataggcattaaaaacatgatgactatctactgcataaataagtctgtaattcagagatttcagatatttttcaaaa

SEQ ID NO: 676424 - DNA, 643 bp, Homo sapiens
gtaaactcaggtaaataccagtaatctccctggattgaaaagatcagaattaaaattctggaaagtttagataaactttggaatttgtagagtaccggagttgaaggaatagcacagagaaagagcttcacaagtctgaatagaaaagccgttgagtttttcctcaataaaaagctgtgcatgcataaggtgaaattccacaagttaaaacagacaacagctggaaagtcctgacttgaataatttccagaaattacaaagggtgggaagacatttaaagtctaaccaataggttgaaaaactcatttaatccttctctacggaaaaatctgtcagactttatctgaccaatcaggttgatagatttttctgtagcgaaggattaaactgatctataagtaatatagctgcctgtctaaatataattcaaatcttgytaatgtaggacaacaaatatagacactcaataccataatattcacagatacctactatacagtgaaaaattattagatatgcaaagaagccaaaaattatgacccataaaatgatggataaacatatgccatgctaacaacagcaagaagaaagatgtagtaactatattaatttcagacaaggcagatttgagaataaggaaaaa

SEQ ID NO: 676425 - DNA, 1493 bp, Homo sapiens
tttattcattaatagaatatttttatggctctctttccttttcaatgtagacaaaaatacctctgtttatgtgttactttctcacaaaagaagaaatttcgttaaaataatatatgcctcagacaaaagaaaactaataaataagacctaaccttttcttaaaaagcccatgacttcttaaaaccacaaatttctgctgagttagtgacaaaacagagaaaactctatcttttttaatatataatgatgtgttttcactgtaaaatataaagtttgattgccaggcaataacttctaattggcataagtgatcttgtaaaaagagatattcaagtatctattctgaataagttcttggtagatttaagtacaggaggaaggggagaagttaaacatatttttgtctttgtattgtgttaaataatttatggtttttgaataggattatactcaaatattgagagaaaaatatattgctcgatttcttctattctgttttcaaacaatgcaattataaatccttttgtaaagattaattcattttcaagtataataaagaatcctcagatatacataagccagtaggtttcagaaaaaaaaataacctttgtataaatacctgatacataaacaaacacataaatgaataaattctatatgtgggtttttaaactttaaactgagtggtaaagaagcagtaaattggagaaagccacatcttggtaactgtgtaccctacatttgcttttggtatgcttcactgtcataggccccataaaacctttcataggctcctttatttattgtcacacaacaatgcttgaacatagcagacagtagatttattcctctttactattatgccatattacatttaccccagggtcaattattatttactgagtaatatctatgtgctagacactatgttatatgccaaggatgtaatattgaataagacactgtgcagatcttcccagggaagtcattgagagtggatggaggaagacacagatgctgggctgaaaggggaggaagctgaggacactatatgggactaccatgcatctagactcattcttagctcctgttggctcctggggaaggggtaagtttagcaggtaaggagcaacccactcttgccacaggctttggaaatcttgccagtaggaggagaccctacaacccccatggagtggtcagggagaggtagctaaagaagtggtaggggcagaactccagctgatgcagagcccataggatttggtgtgggggctggtgatgctcattctccagggctcattttgcacccctaggagactttagttttagggaaactatggggcctaaactatgtagrgtggtcttacccatgagatgggacaggtctggcctgagtataccatggtctgctggcctctcctggggccccagcctggcagtgcctgcctgtagtgcagccacaaacacccaaatgtagagcctcctggagg

SEQ ID NO: 676426 - DNA, 615 bp, Homo sapiens
gttttgaactgactagggagggtagcacctgcctcagatggtaccaacaattctatttcactgggtagtctaaaactagcttatagcttaacttaacttgtgtatgtgaatttagggatgaaaacttttttgtttcctyttgggaaaaaaaccccacaaaaatcaacactcctttatggatacatcagagcttttaaaagaattgttaactctaggaaggggaaatatctgtgtcccgatttcttagttgccttgaaaatcatgtactgaactgtaaccactaacttgactggatgaattgcagtttgcttgtgtgtagagagtgtattgcttcctcagatttcactgttttcatctccttttccatcttagtctttattccttaagaccaaaataccctttacaaatgctctagaagatctgtattgtgtagaatgatcatgtatttataaaaattttacaagtttagattataaaatgaaaaagaagatcgtgtgttttgtgggtatttttcatgtttggatattttttctcccttcactgaacccttccgattctttcaaactattgccaggtagtgtttttagggtttttaattggactattaatatgaac

SEQ ID NO: 676427 - DNA, 601 bp, Homo sapiens
gaatcaaaacctgtgctttctcctttctgtttgtgtgatcaagtacagaagtactcaaacggatgttcgtgttttggaggtggtgaattagtagcgggcaatctatgaaccaattagtcaattcaagttatcaagcataaataacaaatatacaaaattcattggatggtgcaattaatggtttaaaccatcartttcaattgtaattttcagttatatgttggatatcatgtgagtggattctacacaactgtctcaacgtatttattcaaagaatagatgcctactgtcatatatgactagctgctgaaataactgaacatgacaatgctttgaccctctgcattgttttatgtgatgtttgagctgttagaggaatcacaaaagatatattttaagtgttgaagataattaataggggttataacttttttctttttttttttttttaagatggactctcactttgtcacccaggctggagttctgtggcgcgatctcggctcactgcaacctctgcctcataggttcaattaattctcccacctcagcctctggagtagctgggattacaggcatgcaccaccatgcctgggtaatt

SEQ ID NO: 676428 - DNA, 601 bp, Homo sapiens
gaatcaaaacctgtgctttctcctttctgtttgtgtgatcaagtacagaagtactcaaacggatgttcgtgttttggaggtggtgaattagtagcgggcaatctatgaaccaattagtcaattcaagttatcaagcataaataacaaatatacaaaattcattggatggtgcaattaatggtttaaaccatcaatttcaattgtaattttcagttatatgttggatatcatgtgagtggattctacacaactgtctcaacgtatttattcaaagaatagatkcctactgtcatatatgactagctgctgaaataactgaacatgacaatgctttgaccctctgcattgttttatgtgatgtttgagctgttagaggaatcacaaaagatatattttaagtgttgaagataattaataggggttataacttttttctttttttttttttttaagatggactctcactttgtcacccaggctggagttctgtggcgcgatctcggctcactgcaacctctgcctcataggttcaattaattctcccacctcagcctctggagtagctgggattacaggcatgcaccaccatgcctgggtaatt

SEQ ID NO: 676429 - DNA, 609 bp, Homo sapiens
aattatctgctccaagatcaagcatctagtaaacagaagaaccaatacttgaatctctctatttgatattgttaccacgatactcggatgtctctatgacatcttagggtattctcttagagaatagagcctagaacagctgcctaggaaaaggtatagcatttcacagtcatagttgctgcatatctttgaaaagacaatgatgatatcagcaaagtggagtcatctcctactctggtaattctctgaaaagtctgtttccagttcagagaatagatgggcctcagtaataaactttgtccgaattacagagatgtgaagaaaagggaacccttatacactattggtgggaatgtaaattagtacaacccctatggagaacagtttggcgtttcctcagaaaactaaaaatagggctaccgtatgatccagcaatccccactgctgggcatatacccaaagaaaggaaatcagtatatcaaagagatatctgcactcccgtgtttattgcaacactgttcacaatagccaagatttggacgcaacttyagtgtccacagacagatgaatggataaagaaagtgtggcacatgtacacaatcagccata

SEQ ID NO: 676430 - DNA, 1231 bp, Homo sapiens
cttgggaggctgaggcaggagaatcacttgaacccggaaggcggaggttgtggtgagccaagatcgtgccattgcactccagcctgggcaacaagagcaaaacttcgtctcaaaaaaaataaataaaaaataaaaagtgaaaacataaaatctttaaaaaaaaaaatcaaagtgatatgtggttgctataaaaatttaaaccatacagaagtgaagtcaaatatttcttcaccaaaatctttgccaaaagaagcatccactcttcccagtttcttgtggcctgtgtgcacatgagaacgcgtgtgtctgttgtgtaggtggggcctggcctggctcttgtggctgcgtatgttgtggtttgtgtcctgagctaggaagcctgactgagggcaggtggggactcaggtctggctaggtcagcccgcgatgcctgctaccatggctcagcctgtgccctcccaatttccatggaagtgctggagggtcttgtggcagcctggggcctggctggtgtgggaaagtctrtttcccacctttagtttggactccgtgtgtgttgttcctcctcatccctctgctcttttctacttagcttattgggttgagccctggagagggaagcaggactctggcgcctttgtttacccccacttgatctctactctagaaagggtctctggtattcttggcctagatttattccaggcaataaatgagagggatgcggtcagatcctcaggtaggccctgtgggctacacaaagtcatcctgggtggcatcccctgcagctcgctcagtgttgcctgaggggatgtggtaggtggcacctctcagggccatggcaaggctcaggtggatgtgaagggctatggtgggggcgagagaggggccggtgcaagtggctacccagagacttttctctaaggtcatcgagctggttaagaagtatggcacaaagcagtggacactgattgccaagcacctgaagggccggctggggaagcagtgccgtgaacgctggcacaaccacctcaaccctgaggtgaagaagtcttgctggaccgaggaggaggaccgcatcatctgcgaggcccacaaggtgctgggcaaccgctgggccgagatcgccaagatgttgccagggaggtaagctgtcttcttgggggttgggacaggttcccgggaggccaggcccgtgtttctgatggaggagggttcctgggtgggtatt

SEQ ID NO: 676431 - DNA, 660 bp, Homo sapiens
agttaatatttttgactgtcaagaatcaatctaggctgggcgcagtgactcacgcctgtaattccagcactttgggaggctgaggcrggcagatcacgaggtcaggagatcaggaccatcctggataacacgatgaaaccctgtctctactaaaaacaaaacaaaacaaaattagccaggcgtggtggcgggcacctgtagtcccaactactcgggaggctgaggcaggagaatggtgtgaacccgggaggcggagcttgcagtgagccgagatcacgccaccgcaatctagcctgggcgacagagcgagactccgtctcaaaaaaaaaagaaaaaaaaaaaggaatcaatctaattatttcactttgtgtcagcttatccaactggtataggtaaaagaactgtagacttggaattagaaggaattgttagaagttcctgattccctctcttacttgccaagggtgacccaaggcatagtaactgttagtgtctgtttccctatctgtgtagtggggataatgttaaccttacaaaattgttggaaaatttcagtaaggtgatatttgtgaaagtgctttgtaaagttgaaagcctagtgccctacttgttgttgcgttatgactttgtaattaattatagtgaagggaatatgtctag

SEQ ID NO: 676432 - DNA, 1367 bp, Homo sapiens
caggcatcccaagcctgtggggggcagggagaagttcccaggccctcaagagcacagagatgcccaggtctacccctggacctgggcagctgcagctgaatccagggcctcctgcctcccacaactcagaagctgcgtggctcctgcttatcctggagtcctgggcccactttcctgctgcagccggcgtcttggcagtggccactctccatgtgccgctgctgccatcaccaccaacacaccaacactcacccgcgcgcgcgcacacacacacacacacacacagagttagtggcttaaagtaaaacgaactcattatttctcactattctgcaacctgtgctgtgttctattggggcaggaatattctagatagctactttactcatgtgtttggcacctccactaggatggctgaaacaatgggggggctggctaggcatccttctcatactgctcagggactagccatggggcaaacttgtagagtgatcagtcatcctggtttgtcaaagactgtaggctttcctgggatgtaggcctttcagtactaaaaccagggaaattttggcaaaccaagatgtgttggtcatcctatacttggacattctcacaacatggtgcttccaagggagtcaaaattcttaattggctcctaagaggaagaagcagaagctgccatcagaactgatagagaagaaagtgatggccgccatcttggtgcactgtcaactccggcaccctttgctgaggggtcctgacccagtagaaggtacagcatgaccttcctccactgcagtccttgaaagaccattcctctcctgctgggattccacaagcctgtgattgctttgaagcagaggatgttggaagcaatgcttcttggctgattctgataccagtgggctaggggaggtctccaaatgccagcgggacgttgaccctggatggtgcccgggctcttgacaccttcatgagaaggaattcaaggataagtttgaaaatagtgaaaatacagagatttgttgcaaagcaaaaagaacacactcaagacgtggggagtgtgggtatgtacttgagagagagagtcatgtgcaagagggtttggtgctcctacctttatgggtttctttaaccaaagtctggaatattcatgaaaattcctggaaaaagatggagatttcttggaccggtgccacccatttttacaccaaatatgggtgttcccagagctccatggtgctgatgggtgtgtatttartatgttaatgagcacataatgaagtcctaggtgaaacttaggtcaaatccagtgccatgttgggtccagtcagtcttagccagcttggtccacaccctggttttca

SEQ ID NO: 676433 - DNA, 1121 bp, Homo sapiens
tttttcaacccttgaaacccttcttgcctgaaccttctctaaatttcccaagagtggacatgacgctcagactggcaaagtggccccggacacaggcagcctcctgacatcagtgtgtgtgtgctgtaacagtttgcgtacccacctcagttttctttctgaactcatgcagcctctaatcactggcacaagcaagcccagagctagccattctcatgactctaactcccatggcagtgatctgcagaggagggaatgtcatgtttcagaaccacctgggacgcttcagccatccacgcatccctctcaaaagttctggcgcccccgagttctgctgccactgttccatcccttgagtacattagggtgtgtaaaaggttgaaaacctctggctaaatagctaccacgtatgaccatcttaagcctccttatgttagttttctgtggctgctggaaatgaccaccaactgggtggcttaaaacaacagaaatttattctctcactagttttgggaggccacaggtccaaaatcaagacgacagcagaggctgcaggagagattttgttcatgcttcttccagttccaggtggctgtctgcattcacggggctgcatgactctcctctttgcttccatggctacatggcctcttcctattctatgtgtctctcataaaggacactcctcactggatttactgctctcctggataacccagratgatctcctcatttcaagatccttaacttatatcagcacacagccttgagtcaaatagttaacattcacaggttccaggaactgggacacagacatatggttttttgggaccatggtttacttcaataaactccttgaggacaccatatgagtcaggttcatcaaatttatgtcaagagaaatttattctcttacgtcactcatacaatctagcttaaaagcaccccacataatatttactgaatgaataaatgaaggcctgaaattcgtgtccattgctttaagctatgagacagctagatatattctaggcaatagcaacttgtaaggagaggttagagagttcaatttgaagtaaaattatacacagatttagaaaactgcgtgataaaaactttta

SEQ ID NO: 676434 - DNA, 599 bp, Homo sapiens
aactgagttttttctctggagaggagtgccaattctggaaaaggtgactgagagacatttaaactgtgttttcagctccaaggaattgaaaagacaacaattgaagttcaaatcccaataagcggtgaaactccaactttggttagaaccttaaaaggctataccttaagagaaaaggccagctagaagtaaacccaccctccctcttacagactaaacttagctgtaaatcatctcaatccctaaaattaaactaacgtgatctcagattactggggwcctcattcctttgccagaaaatattataaatccctcagaatgaaggtaacattatcctagtcctcaaattatttctgtaatttttcatgaacaaggacaggctgtcaataaaaaaataaccatctaaatgagggaacataacaacgtgaatgaaaaaccacagacagtagaaacatacccaaagaagttctagataacaaagatttcagatacacatttctaaataactacacttgggatatacaaggagagaaaatgtcataaattttgtcagagagttaaaaactacgaagaaatggaaattttagaaatgagaagca

SEQ ID NO: 676435 - DNA, 599 bp, Homo sapiens
aactgagttttttctctggagaggagtgccaattctggaaaaggtgactgagagacatttaaactgtgttttcagctccaaggaattgaaaagacaacaattgaagttcaaatcccaataagcggtgaaactccaactttggttagaaccttaaaaggctataccttaagagaaaaggccagctagaagtaaacccaccctccctcttacagactaaacttagctgtaaatcatctcaatccctaaaattaaactaacgtgatctcagattactggggtcctcattcctttgccagaaaatattataaatccctcagaatgaaggtaacattatcctagtcctcaaattatttctgtaatttttcatgaacaaggacaggctgtcaataaaaaaataaccatctaaatgagggaacataacaacgtgaatgaaaaaccacagacagtagaaacatacccaaagaagttctagataacaaagatttcagatacacatttctaaataactacacttgggatatacaaggagagaaaatgtcataaattttgkcagagagttaaaaactacgaagaaatggaaattttagaaatgagaagca

SEQ ID NO: 676436 - DNA, 711 bp, Homo sapiens
ttttagagaatggttttttatatttgcatttagctttataatcaaacataccataattgcttgacatctctattttaactrttttttaacagtttcagtctttttctttgctatgattaccccaattttagctctttattttgtgcttttctgccaataagaacacatctttagatagacacattgattctgcatctttgaatccctgaaatttaggaagtattttgcgttattttcattcataaaatacacatgacctaccttccttccttccttctttccttccctccttccttcctgtctgcctgcctgccttccttccttccttctttccttccttccttccctcttttctttcttttttgagacagagtctggctctgttgcccagggtggagtgcagtggtgcaatctcagctcactgcaacctctacctcctgggttcaagggattcttatgcctcagcctcccgagtagtagctggcattataggtgcacaccaccatacccggctaatttttgtatttttagtagagacaaggtttcaccatgttgggcaggctggtctcgaactcctggcctgaagagatccaccctccttggcctcccaaagtgctgggattgcaggctttagccaccacaccaggcccaaattacatcatttatttctgacatttagagttgacagtgaaaatttagatcagcttgatg

SEQ ID NO: 676437 - DNA, 711 bp, Homo sapiens
ttttagagaatggttttttatatttgcatttagctttataatcaaacataccataattgcttgacatctctattttaactattttttaacagtttcagtctttttctttgctatgattaccccaattttagctctttattttgtgcttttctgccaataagaacacatctttagatagacacattgattctgcatctttgaatccctgaaatttaggaagtattttgygttattttcattcataaaatacacatgacctaccttccttccttccttctttccttccctccttccttcctgtctgcctgcctgccttccttccttccttctttccttccttccttccctcttttctttcttttttgagacagagtctggctctgttgcccagggtggagtgcagtggtgcaatctcagctcactgcaacctctacctcctgggttcaagggattcttatgcctcagcctcccgagtagtagctggcattataggtgcacaccaccatacccggctaatttttgtatttttagtagagacaaggtttcaccatgttgggcaggctggtctcgaactcctggcctgaagagatccaccctccttggcctcccaaagtgctgggattgcaggctttagccaccacaccaggcccaaattacatcatttatttctgacatttagagttgacagtgaaaatttagatcagcttgatg

SEQ ID NO: 676438 - DNA, 711 bp, Homo sapiens
ttttagagaatggttttttatatttgcatttagctttataatcaaacataccataattgcttgacatctctattttaactattttttaacagtttcagtctttttctttgctatgattaccccaattttagctctttattttgtgcttttctgccaataagaacacatctttagatagacacattgattctgcatctttgaatccctgaaatttaggaagtattttgcgttattttcattcataaaatacacatgacctaccttccttccttccttctttccttccctccttccttcctgyctgcctgcctgccttccttccttccttctttccttccttccttccctcttttctttcttttttgagacagagtctggctctgttgcccagggtggagtgcagtggtgcaatctcagctcactgcaacctctacctcctgggttcaagggattcttatgcctcagcctcccgagtagtagctggcattataggtgcacaccaccatacccggctaatttttgtatttttagtagagacaaggtttcaccatgttgggcaggctggtctcgaactcctggcctgaagagatccaccctccttggcctcccaaagtgctgggattgcaggctttagccaccacaccaggcccaaattacatcatttatttctgacatttagagttgacagtgaaaatttagatcagcttgatg

SEQ ID NO: 676439 - DNA, 711 bp, Homo sapiens
ttttagagaatggttttttatatttgcatttagctttataatcaaacataccataattgcttgacatctctattttaactattttttaacagtttcagtctttttctttgctatgattaccccaattttagctctttattttgtgcttttctgccaataagaacacatctttagatagacacattgattctgcatctttgaatccctgaaatttaggaagtattttgcgttattttcattcataaaatacacatgacctaccttccttccttccttctttccttccctccttccttcctgtctgcctgcctkccttccttccttccttctttccttccttccttccctcttttctttcttttttgagacagagtctggctctgttgcccagggtggagtgcagtggtgcaatctcagctcactgcaacctctacctcctgggttcaagggattcttatgcctcagcctcccgagtagtagctggcattataggtgcacaccaccatacccggctaatttttgtatttttagtagagacaaggtttcaccatgttgggcaggctggtctcgaactcctggcctgaagagatccaccctccttggcctcccaaagtgctgggattgcaggctttagccaccacaccaggcccaaattacatcatttatttctgacatttagagttgacagtgaaaatttagatcagcttgatg

SEQ ID NO: 676440 - DNA, 1050 bp, Homo sapiens
tatctcttaaatacaataaatactccatccctaagtcagaatgaaaatgtaatgttataatgcagattcatttaacagaaaacattttttaaccagaactcctaaatcataaaaaagataaagtgataattaagttacacgagacgtctaatacatgaggaaagcaaatactcacatctgagtttatctttctctttgagtttcttggcttagaaggatagatgtttgaatattgaatatagatcttatacattatttggcactcatgctaactttctcacaaagggtagtattattttatggtatttatggcattatattatgccataatgaagtaacttcattacttagtggtcaattctctacattaaaaacctaatgcagctttgtgacccaatcaagaagttatcggtccttttaaaatctgtttttggcaaaatattatacctaaattactctcctaaatttcacactatattttaacctctgtattaaaatgtaatgttctgtatattcgacttaacatatatatttaaggtgcattcacactgtattgctatcaatgcttcatccctttgaatagtcaattaatattccattggttgggctgggtggctcaygcctgtaatcccagcactttgggacaccaaggtgggtggattgcctgaggtcaggagtttgagaagaccagccaggccaacatggtgaaaccccgtctctactaaaaatgcaaaacttagctgggtgtggtggcagatgcctgcaatcccagctactcgggaggctgagttaagagaattgtttgaacccaggagatggaggtagcagtgagccgagcttgtaccactgcactccaccctgggtgacagagcgagactccatctcaaaacaaaaacaaaaacaaaaacaaatcaattttgtggctatatcacatttctatattcagtcatccattggtggacacttgggttatttctactttatggctgttataaataatggtgctgtgaacattcatgtgcaagtttttgtgtggacatgcttcaactc

SEQ ID NO: 676441 - DNA, 1050 bp, Homo sapiens
tatctcttaaatacaataaatactccatccctaagtcagaatgaaaatgtaatgttataatgcagattcatttaacagaaaacattttttaaccagaactcctaaatcataaaaaagataaagtgataattaagttacacgagacgtctaatacatgaggaaagcaaatactcacatctgagtttatctttctctttgagtttcttggcttagaaggatagatgtttgaatattgaatatagatcttatacattatttggcactcatgctaactttctcacaaagggtagtattattttatggtatttatggcattatattatgccataatgaagtaacttcattacttagtggtcaattctctacattaaaaacctaatgcagctttgtgacccaatcaagaagttatcggtccttttaaaatctgtttttggcaaaatattatacctaaattactctcctaaatttcacactatattttaacctctgtattaaaatgtaatgttctgtatattcgacttaacatatatatttaaggtgcattcacactgtattgctatcaatgcttcatccctttgaatagtcaattaatattccattggttgggctgggtggctcacgcctgtaatcccagcactttgggacaccaaggtgggtggattgcctgaggtcaggagtttgagaagaccagccaggccaacatggtgaaaccccgtctctactaaaaatgcaaaacttagctgggtgtggtggcagatgcctgcaatcccagctactcgggaggctgagttaagagaattgyttgaacccaggagatggaggtagcagtgagccgagcttgtaccactgcactccaccctgggtgacagagcgagactccatctcaaaacaaaaacaaaaacaaaaacaaatcaattttgtggctatatcacatttctatattcagtcatccattggtggacacttgggttatttctactttatggctgttataaataatggtgctgtgaacattcatgtgcaagtttttgtgtggacatgcttcaactc

SEQ ID NO: 676442 - DNA, 615 bp, Homo sapiens
tggcctctgcagggagcttcacagaggtgagactggtgccatctgtctgcttcagaccaccccaggctctgcgtaccctcacagtcccctctgcgctcctctacggggtggggaagcccttcccatcaggtcagcaccagcctggccaccttgtttctgctgccccctcctcttcaggcccccagaccagactttagttacttgctgctgccgggcagaactggaggccttgtcttgcacaacctccacaacctccaggcatcatctcagctgacagtgaygccatcctggggacgaccccccggatcccgggctctcctggaagcctgtgatgctccttcaccacagcccctgtcccttcataggtcccataagccagtggtgcagggatccggcctttctctcctgtgtctgcctcctgcagaaccatgagcagcttcagggccgaggcagtgcctttccatccgtgaatctcctgatccatcagaatactcgagagagagtgatgcccaagaaatactgactgagtgtattcatgaaagaattaatgttcttacaggatcacttgttgttgaactgacctgacatgtgtatagtgatctcatgaacaagagg

SEQ ID NO: 676443 - DNA, 615 bp, Homo sapiens
tggcctctgcagggagcttcacagaggtgagactggtgccatctgtctgcttcagaccaccccaggctctgcgtaccctcacagtcccctctgcgctcctctacggggtggggaagcccttcccatcaggtcagcaccagcctggccaccttgtttctgctgccccctcctcttcaggcccccagaccagactttagttacttgctgctgccgggcagaactggaggccttgtcttgcacaacctccacaacctccaggcatcatctcagctgacagtgatgccatcctggggacgaccccccggatcccgggctctcctggaagcctgtgatgctccttcaccacagcccctgtcccttcataggtcccataagccagtggtgcagggatcyggcctttctctcctgtgtctgcctcctgcagaaccatgagcagcttcagggccgaggcagtgcctttccatccgtgaatctcctgatccatcagaatactcgagagagagtgatgcccaagaaatactgactgagtgtattcatgaaagaattaatgttcttacaggatcacttgttgttgaactgacctgacatgtgtatagtgatctcatgaacaagagg

SEQ ID NO: 676444 - DNA, 661 bp, Homo sapiens
taagaaactttatttctttattactatttattatttgtttagcattaagtttacccaatttgtatttcgtaatcattctgtctcattcaccaatatagtttcattttatacttgctattgttttttcttttacatatgttattattctctaaaattccatgcacttctatgatgtttattattcaagaatatgctctttaaaaataaattaaggttgttaatgaaaagacagaatacataccagaatccagtgataaggaatatcagaagcatcwagacctaaataaaatagttcccttgcaggaagtttaatactaagtcctgaataaagacctcggaattttatatactacggaaatttccaagaaggaacctaagtagttaataatcaatttccagtgttgcaattttatttcattattcctgactgaaattatgaatgtattttaaatatatactttcagacaatatctgttttcatttagataaaagattcctatttgatttttaaagaattacaattaatttcacttaataatatatactgagattacaattaaataaaaaacaatatctgattattgaatatattttctcaaatttatagctttgttatacaatatttttcttgggaaaaaatatgtaattttataaagaaaat

SEQ ID NO: 676445 - DNA, 633 bp, Homo sapiens
cacaaacttaaccaacttctgacatgtcattgtcagtatgctgaaatccacatgtgtatattttctgattttaggcagaagtgaatattacattcagagaggagatctttttaytgctttatcattgcataatgtcctggatatatttgatactgctcacagctccaatacacctgtcactgcacctcactgctaatacaatgacagctcagtggtcatgtgttccaagccaatgtcatgcaatactgtttttcgctactcattctgagttacagtcagcattaaaagctatgctcagacttattctggattagtttcctccagagatgcacatcactaatatgtttgattttaagaagttgtgatgagtattatacggaagtagacctgtgtatagtattttcagtatttgagattataacctggtcaatggggtcttgagtaccatccaggatccaaacagaggagatttaggcttcctaaatggcttgataatgcccatcttcttcatgattacattagtacagaaatatgtaagtaaattattaattatttagagctaaaagtaccttaaaatgaaaaaatgacatacagagttatatattgaactcatttagaagatattttactctg

SEQ ID NO: 676446 - DNA, 633 bp, Homo sapiens
cacaaacttaaccaacttctgacatgtcattgtcagtatgctgaaatccacatgtgtatattttctgattttaggcagaagtgaatattacattcagagaggagatctttttactgctttatcattgcataatgtcctggatatatttgatactgctcacagctccaatacacctgtcactgcacctcactgctaatacaatgacagctcagtggtcatgtgttccaagccaatgtcatgcaatactgtttttcgctactcattctgagttacagtcagcattaaaagctatgctcagacttattctggattagtttcctccagagatgcacatcactaatatgtttgattttaagaagttgtgatgagtattatacggaagtagacctgtgtatagtattttcagtatttgagattataacctggtcaatggggtcttgagtaccatccaggatccaaacagaggagatttaggcttccwaaatggcttgataatgcccatcttcttcatgattacattagtacagaaatatgtaagtaaattattaattatttagagctaaaagtaccttaaaatgaaaaaatgacatacagagttatatattgaactcatttagaagatattttactctg

SEQ ID NO: 676447 - DNA, 1784 bp, Homo sapiens
tgatgaaatttattgctgtaaatctttgaaacatggatgaccctgtgatactacattttgacaaaaccctcactaatttggaatcatcacttatgtgtcattcttggctggtgtcatcaagggctttgaggttcacagttcattgtcttcaaaattctatgtaataaaattacaaatatattataatgtaaagagtcagagctatgatccgattgaatatctccatcacctctctggagacctgctttcttagaaatgtagaagtatgctatgtacataaacagtttatcaatcagggaaagtaaaaggaaaaagaagcaagaattgcagtagctttctaaatcccactcattcatgaagtttaaatattttccttttggaaaaaaatgctaagatgctaattgtggaagttgcttttcatgcaaataaaacctagttggcatcttctgggactataagaatactattagcatagaaccttgccatgataaatatttagaatgtgatttccaattgtaaggttagtcagtatatctggaaatagatatatgacttgattaggaagcttacagtttttttcccttctttttgcattacgctttatttaaaggggattttgcagacttttctcataaagaagaattgctggtaattttagtgccaatatttggctgaaagaaacagcacattttttctctcatcctacctcatatctagcacacattttacaaaggtacctgaggattgaagagattggtaaaaagccaataaacttcatgacatgaatacacttttcccaacaaaagaagtaattctcatgaagctaaagcaatttaattccaatcatggaatttgttattgagctgctccctgataacaggtgacaacattcgtaacaggattggcaggaaaggagccagtagaaaccacttctgaccatctgcagttacctagtagattcctattaaattactgcagcttatctgaaaaatttaagctttctatttaaaagtgagcaagaggaagaaagaaccagttagaaggaaaatgaaggctcatgcaagatcagccttcaaatctgacaggcacagagagtccattgaaggattaaaggtgaccttctttgaggacacgttcctgttctcctacaccctgtcacactgcccctgcagaggcagaagcaagtcacaaggtccaggttatgcgagtgctgggatgtggggcctgctggcccagtgctttcatggaagcatgcataaaaccccacttgctgacactcaggcctctgggctgagttgagggccagcacttagacttactttattttaattctagctttgtccctctagctagcygcatgggtgattcacttaatctgtagatcagtttctaagaagacttgttgtgaggatcggatataaagtacctagaacagtgcttggaatcagcaaagttttgataaatgatgatgatgatgatgaagaggaggaagaggaggaggattaaaagaagtaagcattggctagggctagcttttccctaaactttgaatgaacccgactcacaacccagatgaaggtcctttcttcttggcactggattagacattacaatacaccttcttgtttttataagaagattttatgcacacgcatgcacacacacacacacacactcacactcatcatttctgtcattctagccttacaccaaagttcttaaaaacaaagaatggcagtcttacaaaaaattgaggcattacaaaacccatttggataatatca

SEQ ID NO: 676448 - DNA, 625 bp, Homo sapiens
aatgtgatcgtcatacatatccaaacacaaatagttctttccatctaattttgttgataaatttggaaagatgatcaccagatacagaagaaaagccacagcacattcataatgctttgatggcactgagcctgaccttgcagagagaggaggttgatgtgcggagcagattgagagctgatttcccatgcccgtcgacgagtctggctagcctcctagactgtttgtagcagggaatttcagtgcaacctctggcctctctatccagcaaatttgcatgcatccgctggctgaattttcacatttcactgaatttccatgaaaaatgcgtttagagcagtatttcatacctgaaacacttttacatttagaatcactgaattttagatcagaaagctaagagaacatttaytcctatccatcatttaacagatgatagcaatgaaattcaaaaggttaagtggcttttctgaagccgtgagatttttttgtgtgtgtgtgacaaagcctagacattctcaatgttggttcagagctctttcatttccactctaggatgattctttattaaatagcttatagtattaaaatctgttaaaatgctggtgtatctagactttttaaa

SEQ ID NO: 676449 - DNA, 625 bp, Homo sapiens
aatgtgatcgtcatacatatccaaacacaaatagttctttccatctaattttgttgataaatttggaaagatgatcaccagatacagaagaaaagccacagcacattcataatgctttgatggcactgagcctgaccttgcagagagaggaggttgatgtgcggagcagattgagagctgatttcccatgcccgtcgacgagtctggctagcctcctagactgtttgtagcagggaatttcagtgcaacctctggcctctctatccagcaaatttgcatgcatccgctggctgaattttcacatttcactgaatttccatgaaaaatgcgtttagagcagtatttcatacctgaaacacttttacatttagaatcactgaattttagatcagaaagctaagagaacatttactcctatccatcatttaacagatgatagcaatgaaattcaaaaggttaagtggcttttctgaagccgtgagatttttttgtgtgtgtgtgacaaagcctagacattctcamtgttggttcagagctctttcatttccactctaggatgattctttattaaatagcttatagtattaaaatctgttaaaatgctggtgtatctagactttttaaa

SEQ ID NO: 676450 - DNA, 611 bp, Homo sapiens
caaagcaaaggggccctgtggtggtcatctggggggtcttgaagagccagggggatgagcgcatggtatccctttgatgcactggtcaggggtgatgtagggaaatgcagagatggaagctctgccaagagttaagccaatgaggtttgttagataaagccctcagcacagtgctaggagcacggtgatgactcaatacatgatagctgctctcctgttaggaatgggccagactcctgataagagccaggatggaatagacagaataggaaaggacagggtgaggcatgccaggtaacctgggtctcccctgcaagtgctgtgtgttctctgaggatcaccaagggaaaactagaaagcagggtcaggatggagtggggtttccatccctgaacacctgcagtgggacctaggcatccctctctgttgggaggcacatgtgttctccaggctggaggcaygggctggaagcttctggatctgactctcgcctgcagctgctccagcagcatttgagcacagtggggggctgggtcttgctgtcctcagcattagcaagccagggagcagttcccctcgtactgtgttaagctcctttccatggaagagat

SEQ ID NO: 676451 - DNA, 646 bp, Homo sapiens
ctcccctgtgacctggattgcctggctccccagtaggaatgtgtattgtggagacactccccccactcacatactgggaattcacatcagttttctgcttgacctgcagtgcaagctgctgcccgctcttatttttcaaagtatctgaagtttctttcacttttgtgttaagctcctgtgttccttcttgtataaaagttcacagtatgaatctctacacactattttgttatttccaratggatgaggtatgctaacaaagcctctaatctgccatttttgagggaaaaaaaaagattgctgatataaaaatttcctaggttagtaaattttcagagcagctaactttgggaatcattatagtattgttaatgttttagttcactaagaaaaaaatataaaatgaactattatctattatcattttttcataaaaggaaaaacaaaaacattctaacagtaaatagtaggaattatctcagaataaaagacaggtttttaaaaatgaatagcacattactatttttctcttttttatatgcaccattgtaaacttggttggaaatcagtgtttggggattactggtatagacataaatgtatctgaaacttaggggaagataggatcataattgcccagattggc

SEQ ID NO: 676452 - DNA, 646 bp, Homo sapiens
ctcccctgtgacctggattgcctggctccccagtaggaatgtgtattgtggagacactccccccactcacatactgggaattcacatcagttttctgcttgacctgcagtgcaagctgctgcccgctcttatttttcaaagtatctgaagtttctttcacttttgtgttaagctcctgtgttccttcttgtataaaagttcacagtatgaatctctacacactattttgttatttccaaatggatgaggtatgctaacaaagcctctaatctgccatttttgagggaaaaaaaaagattgctgatataaaaatttcctaggttagtaaattttcagarcagctaactttgggaatcattatagtattgttaatgttttagttcactaagaaaaaaatataaaatgaactattatctattatcattttttcataaaaggaaaaacaaaaacattctaacagtaaatagtaggaattatctcagaataaaagacaggtttttaaaaatgaatagcacattactatttttctcttttttatatgcaccattgtaaacttggttggaaatcagtgtttggggattactggtatagacataaatgtatctgaaacttaggggaagataggatcataattgcccagattggc

SEQ ID NO: 676453 - DNA, 772 bp, Homo sapiens
taatatattatcctggattttaaaaataatttctgtacatgtattcttatctagatgtacaaaaaactatgcaggagcaaagtgaccttgaaagcaaggtcagtgtaactgaaaaatctgactttagaagggtacaaagaaacatgctaagaaaacccaccctatatttatgttaacaatatgctraagtatgaatttttattttattcaaatcatacatctcccacctttatttgtaggtgaaactagcacataatgttttatgccaaaatgaaattcaaaatgttgttgccttttgaggacagtattaaattcatcattgtacttaatccttacatgatatttgctatagccacagaacattcttagacactatgattcacaaaacatttaaattgcatatttggcttgtaatatattacatatttaaaagaattactatttttctgaataccattaatactaataatagcatcacagtgactaagagtggacttaaataaaggctggcttgaaactcaggtctgccatttattagcaagcttctaaaaattctgagcccttagttttctcacatgtgaaatggagaaaataaatctgcaaaattaattaaatctgtccattcatatttttctctccagtgtatattaactggcattcctcgttaggccagaatgtgctctcaaccatgctccaaatccgctttgtgccaaccccactgccagaaccctttctaccttgagaaccagaaaaggaaacattatgcctggca

SEQ ID NO: 676454 - DNA, 1182 bp, Homo sapiens
caaactgtttaaagctcagccattgaagcactctacaattgtttttgccatctcagcaagtaataattgttttgaaggtctgaagccctggatctctttttccttagtgactaaggtgatactgtcaagtcaggcaccctcccagagttgaagctccgggcaccaacccacaaaacatttctcagcaacttttgcccttctctacattaaatgagttgatttatgattcagtttgcaaagtaatactaaatgataccaggtggtaatggaggagctgtgaaaacaccacaaccaccatcctctccagatgccagactgggccagtctcctgttccagaccctgctgccttttggagaaaagttaacactaagccacttacaaacataacrtggtacagcaggtgctgagtgaagcagaacaaagaatcataaagcattagctgtaggactagccccagtatcgatacctccaccaaccctaaagggagggaggtggcacattttagcagagaatactggatttggaattagaagccttttgtttttgcctaggtccctgcccctgggacactggccaactcatttaacctttcttgattttctaacttccccatttctttatttgcgagagaagtgtaacacttcaactcaatgtttgatgaaaaattgaggtatggaaagactccactgactgcaaagcactgttcaaaagatactacaatatataaataaaaatactattgtcagtgtgatcatgaggggcaggtgatgccagccaccatttatggctgaaagaatactggttgacagatgtaaaaggtttgggaaagttccaggtagcaaagccaggacacctacatgtgatagcaactctggtaacaagtccacagccttccttagacacaactaggacaaccaccagacacctcaacaaaagccagaggttcaaattgataacgtagtgtcctttccaacaggtcagatcagattttagtgttaaaagatttcttgctttttcccacatgcttataaataagctttatccttttttttttttttttttttttaaattcagatgagagcctacccttctcagtcatactgaaactcctgatacattcttcacatggcttcaggatactggttgtatttccccattctctcaaaaacatgggatccaaa

SEQ ID NO: 676455 - DNA, 609 bp, Homo sapiens
cctgaaaccaattccctatggatactcaggaataactattccctctcaggcagagggatagggcctacctccatatatgattactgattactgagtagaaaatttgtaagactttaaaagtccaacaagctatttacatttctggacaaaattgcaatagggactggtttttcctcacttgttttaaataacraaaaggcagacaaaatgattgaaaaaagtttccagacattggaaaagaggcacatgagacagagatctctgagaaaagagaaatgtgacccctacaactgccccagcttcctgcctgaagtatgttttcaggctacaccacagggaggggaacccggaaagctctgcagtccccttgaattgaggaaacaactgagaatttgaggaggccaagacaactaggatatgcagggtggagtactagagaaggaagaactctgctgatctgtagacagctctcctcaactcttcaactgagtatgaagagcaaatgctcacacaactacctcaggccaggtacagaaccactggcaaggagcaggtgaatcaattactggaggggactagttcccattctcagtagccagagtggagcta

SEQ ID NO: 676456 - DNA, 678 bp, Homo sapiens
tgggatttaaatgattaatggagttagagaaacactatttttcttaaattacrtgaagaattaatgctgtggttttgcttatttgctgtctttttgaaacggcaggaattaagcagtgacattagatacctatgaatttgccatcaatttgtctggcaaagaatagcccacaataatgtggacatttctgttataagtaggcttacaaagttgatttagcaaaaataccatacaactgattacattttgttgtaagaatactaacatacagccaggtgtggtcttacacctataatcccaacactttgggaggccgagcgggcgggtcgcttaagctcaggaattcaagaccagcttgggcaacagagcgaaaccctgtctctacaaaaaatacaaaaattagccaggcatggtggcaggcgcctgtagtcccagctactcgggaggctgaggtgggagttggcttgagtctgggaggtgaaggttgcagtgagtcaagattgcaccactgtattccagcctggggaagagaaccagaccctgttaaaaaaaaaaaaaaacaacaaaaaacaaaacaacaaaaaccaaaaaacaaaaaccactaaaatgctactctgccaaataaaatgttgaatgaaaattaaaattaatgtcaaatcaaatgcagtaacattcact

SEQ ID NO: 676457 - DNA, 1203 bp, Homo sapiens
gggggctgttatggtagtacagggagaaatgatggcgatctggattagggtggtggcagggggatgttgatgcattttagaaatattgaataggwataatcaacaggacttgatgattgattagatgtgggagatgagagagaggaaagaaccaaggatgacatccagacctgtgacttgtacaactggatttttgtaagttagtcttgtatccagccacctcgatgaattttcttgtagttctaaagcttattgtacatttgcttagattttctaggtagacaattatgttgactgcaaataaggatggtttaggttcctctcttcatttttattgatgtagtatcagtgaacgtccagtcaggaaaaaagaaactgctcttggtatttcaagcaaagagatgtaatagatgagattaggtgcttacaaactggctgggagtgtggagtggtgaaagtcaggggaggctgctgctagattttaggttcaccattgcagttgttgcctttcacatcaagaagttgctgttgccatccaggtcaggaaactgacactgatagtcacagctgtcctacagcagtgaacagggtaggtgagagggctggctgccttgaggattttataaatcatttctgagagtgcccaagtatctacaagccactaccagagagaaaaagagagtcgtatagcttgcttctgactccctcccatctccaaattgtaagcaagtgcatctcattggctggatgatcatagtaatgtgaaggtaaaggagtgtggggcgagtagctcccaggcttctagccccagtgataaagggcagggatggtagaaataacggcggcaaaaacaagacaacaaaaaccaatatccagtgcagttttgccttcattttctgggcctaccttttgtgtgcaagacactcaaaacactttcaaatgagttaaactctctaggttcttctctcaccacttctcccaggtgcactatgttctggaagacgcacagaatgtcatgcaactttctaaatgtatgtccatgcctttgcccttgtggtaccacctaaaagttacctttcctctgcctgtgaagactcttcctgttccttcagcgcccattcactccttgcccccttacctgcatcaggcaggactgatgcctatcttcactatttccactacactgggttcacagttctatag

SEQ ID NO: 676458 - DNA, 652 bp, Homo sapiens
tgactaaaagcttggtgtgtagtacagcagattctcagtcatttttaatttactctaagggtcaagagttagtaaatatagaagtccatgtgactttggggctttcattgggcaaaaccacaagttttggcggaaacagataaagataagcacttattcttatttggcatagatagttccttccttctgcatcctactgctattttcattttatmgatggaatactttgaagcacgaaaaatcattatatcttgaaataatttttaaaataatccaataacaaactcagaactactgaagaataataaaggtaagacaatacatattaaacattttaagggtaacatttttgggaaattgactttttttagctttatggaatattattatcattattatcatgatcattattatttccattctacataggaagaaattgaagcacagagaagttacaggttagccaggagaatacctattttccagaacttttgtggggtattaacagtacttaatatgtgttaatttacatactaacttaggtaacaagcgtgtgttaagaataagtatataaaatgtgtttttggattcaaattttattttaaatgtgatagatagaaatatttttgctaagatatataattatcctcca

SEQ ID NO: 676459 - DNA, 652 bp, Homo sapiens
tgactaaaagcttggtgtgtagtacagcagattctcagtcatttttaatttactctaagggtcaagagttagtaaatatagaagtccatgtgactttggggctttcattgggcaaaaccacaagttttggcggaaacagataaagataagcacttattcttatttggcatagatagttccttccttctgcatcctactgctattttcattttatcgatggaatactttgaagcacgaaaaatcattatatcttgaaataatttttaaaataatccaataacaaactcagaactactgaagaataataaaggtaagacaatacatattaaacattttaagggtaacatttttgggaaattgactttttttagctttatggaatattattatcattattatcatgatcattattatttccattctacataggaagaaattgaagcacagagaagttacaggttagccaggagaatacctattttccagaacttttgtggggtattaacagtacttaatatgtgttaatttacatactaacttaggtaacaagcgtgtgttaagaatawgtatataaaatgtgtttttggattcaaattttattttaaatgtgatagatagaaatatttttgctaagatatataattatcctcca

SEQ ID NO: 676460 - DNA, 2075 bp, Homo sapiens
taaatacatatgcacacgtatgtttattgcagcactattcacaatagcaaagacttggaaccaacccaaatgtccaacaatgatagactggattaacaaattctccttaattttaatattttttcttttttctgcatttctaggaagtttatattcttttcattgatttcaagttcatcacttaggaagttcaagattatctgttttttcttttaattcagacttttctttaactgcattgtaatagaaaggctgtaagacctaaacaatctgggtttttatctcacctttgttcttaattaatcatgcactcttaggttcttggaaaagttttcattgtactgagcttgaggtgcctgctgatctcagtggaaatgccaagtagatggttatgtcaagccttcaatagcagagagagctttcccttactcagtcatggagttgcactgggatctagagatggaagtatgagtaagtttctgcctcagctgaagaatgtggagaaaattaacagctgacaggtgcctctagcaccttggctacctgagcttcatcagtgtggtaaaccacttagtcctgagaacaccgggtagcagctgtgactcctagcttccttcatttctatcacattctaacttaaggttcctttctacaaggtaggagacctggtaaatcaatccatgctaaggtgttattgggcagcctcattagtaacattagctgcattttaacagggtcttcctggatttaaagagatagctcaagtgagtgactctaaatgaaggaattttgagcatctctgaagggcagtggaggagggagttggtgttccttctccctatctacataatagtcaatgtcaaatgcagacataatgtttgaaattttgaattattagaaaaacaatggaggcggatctttgtctcatgagttaatctttaatctgtgtatatgattcaatcttcaatctgtgtgtatcattttgttttgtttagcaacttaccaaccacattcgggataccctaccaaacttcaggaacaaactacagggacagttgctctccatagaacatgaagtagaagcctacaaaaatttcaaaccagaagacccaacaaggaagaccaaagcattgctgcagtaggtcacctttcccttccttggctcagcattttaatctaatttctttagttttctattgccttagtctatttgtcacgttgcttcttaggtagcaagtaaactatatgaggctatctatatgatacaagataactcttgaatttttatgctttgttgaacaagaattattggtattattctgttattatcaacttaccagttgagcatcctcatgcccatttaaattgtgtttttaaaactggattaagtgagtaaaaccattagggatgacccagcaggaatttttgtcccttgtcttagaagtgggtaaatacagatgcaaatatcatttgtatttttcagctgtttctatggatgtcaattgtacttattatcctttattccaattatttcatgtaacttatttgtgtgcatttttcagtggaatgagaaccaagggtttaatttaaaagttctaacaataaggctgtagtttttttttttccttttacataatgattttaatgtagtcctttgaaaatgtaaatgtgaaactgccaagcatcttttcaccccttcatgatcttcccatcttatctttgggttactagagttattcctgtggtgtcttggggtaggatagcagagaattgttagagaattcctagctctttatatcttacactttcttctctccttcaaatccttctgtctccatcagttcctttatcctgtgctgccacttgtgtcaagtccctctcaacaggaaggctcccctgcccagcacacactgcaggatacccraggtctacctccgaagatgatgtttggcacctcttatggcgcacttttctccccagcagcgtggcaatcaaagcatccttcaattggcattcaaagtgcacactataatttctttctttgtgaggagattcccaaatgctcaaatatttaa

SEQ ID NO: 676461 - DNA, 627 bp, Homo sapiens
tggagtgcagtggcacaatctcagctcactgtaacctccgcctcccaggttcaagcaattcttttgcctcagcctcccaagtagctgggattacaggcatgtgcaccaccacgcccagctaatttttgtatttttagtagagatggggtttcatcatattggttaggctggtctcgaactcctgacctcaagtgatctctccaccttgrcctcccaaagtgctgggattacaggcataagccaccgtgcccagccttttttttttttttttttttcgaggcagggtctcactctgttgcccaggctggagtacagaggtgtgatcatggcacattgcagcctccagctcctgggctcaagcaatcctcctgccttagccttccgagtaactgggactataggtatgcaccaccacgcccagctaactttaaaaaaaaaaaaagttgctagaaacagggtcttgctatattgcccagctggtctcaaacttctggcttcaagcaatactcccgctgactcagcctcccaaagtgctggaattacaggcgtgagccacagcgcccagccctcaggtggggtctattctgtttttggatttccacctcctagacctgtcctgctgaggct

SEQ ID NO: 676462 - DNA, 1270 bp, Homo sapiens
atggggttagtttctttactcggtacctgaatttcctcatctataaaatggggatgttgtactaccccattggttgccgtgggaattaaatgacttaatgttcgggaaatgcttagaacagtgcctgacatatagcaaggactatatcattagataaaataaaagtgtgactaaaactgatccacagcaatggcaattttattacgaaaacatttttatttggatcatgagagctacatatttttcactttgatctggtgacatcagtctgagtgttgagtcagcttgtctgccataagctcttctatccaagttgrtgtgggagaaaacatctcctgggtggcaaaccagtttttgaaaatcagacatgcagaaaagcacgtctctcgtcttgagaagcactcttgggtcattatcccacatttatgtcatatttcacagagaatatattcttggtaggttgtaggcaaatcaaatcctaaggtaagtctattattatttaaagaactctggttgggcatggtggctcacgcctgtaatctcaacacttcaggaggccaaggcgggtggatcacttaaagtcaggagtttgagaccagcctggccaacatggtgaaaccccgtctctactaaaaatacaaaaattactcgggtgtggtggcacacacctgtaatcccagctactctggaggctgaggcatgagaattgcttgaacctgggaggcagaagttgcagtgagctgagatcacgccactacactccagcctgggcaacagagcaaaactttgtcttgaaaaaaaaaaggccggtgcagtggctcgcacctgtaacccgaacactttgggaggctgaggtgggtggatcacctgagatcaggagtttgagatcagtatagccaacatggtgaaaccccttctctactaaaaatacaaaaattagccaggcatggtggtgtgcacctgtaatcccagctactcgggaggctgaggcagaagaattgctggaatctgtgaggtggaggttgcagcaagccaagatcgtgccactgcactccagcctgggtgacagagtaagactccatctcaaaaaaaaaacctagtaagtgtgtttctatacacacacacacacacacacacacacacacacatgctctctaaagcaaatgcttcataatataatacttacctttactatgtgtgatgcacgtgttttctattctatcctttcatttaaaggtggccatctaatttattaacttgcttgttgtgg

SEQ ID NO: 676463 - DNA, 1270 bp, Homo sapiens
atggggttagtttctttactcggtacctgaatttcctcatctataaaatggggatgttgtactaccccattggttgccgtgggaattaaatgacttaatgttcgggaaatgcttagaacagtgcctgacatatagcaaggactatatcattagataaaataaaagtgtgactaaaactgatccacagcaatggcaattttattacgaaaacatttttatttggatcatgagagctacatatttttcactttgatctggtgacatcagtctgagtgttgagtcagcttgtctgccataagctcttctatccaagttgatgtgggagaaaacatctcctgggtggcaaaccagtttttgaaaatcagacatgcagaaaagcacgtctctcgtcttgagaagcactcttgggtcattatcccacatttatgtcatatttcacagagaatatattcttggtaggttgtaggcaaatcaaatcctaaggtaagtctattattatttaaagaactctggttgggcatggtggctcacgcctgtaatctcaacacttcaggaggccaaggcgggtggatcacttaaagtcaggagtttgagaccagcctggccaacatggtgaaaccccgtctctactaaaaatacaaaaattactcgggtgtggtggcacacacctgtaatcccagctactctggaggctgaggcatgagaattgcttgaacctgggaggcagaagttgcagtgagctgagatcacgccactacactccagcctgggcaacagagcaaaactttgtcttgaaaaaaaaaaggccggtgcagtggctcgcacctgtaacccgaacactttgggaggctgaggtgggtggatcacctgagatcaggagtttgagatcagtatagccaacatggtgaaaccccttctctactaaaaatacaaaaattagccaggcatgrtggtgtgcacctgtaatcccagctactcgggaggctgaggcagaagaattgctggaatctgtgaggtggaggttgcagcaagccaagatcgtgccactgcactccagcctgggtgacagagtaagactccatctcaaaaaaaaaacctagtaagtgtgtttctatacacacacacacacacacacacacacacacacatgctctctaaagcaaatgcttcataatataatacttacctttactatgtgtgatgcacgtgttttctattctatcctttcatttaaaggtggccatctaatttattaacttgcttgttgtgg

SEQ ID NO: 676464 - DNA, 610 bp, Homo sapiens
tttgttatggcaacccaactaagacagttacataaaaatatacaacccattctcaactcgctggccatataaaagagagagtaggttagatttggcccaaggggcataatttgtctacacttgttctaggggaagctccaaaaaagatattttcatccctttctcaaagtctttctggaaagacatttgatcagcccatgccaactttttcctgcagggagagctccagtatcctctggggaccccaaggctttctcaacccactgctaagaagtaagaacaaggccacttaccacatgatcatgatcactaacttcattacaatctcattcaaaatgttgaagaaatccaccatcagcttggcctgatctcccatcttccccatagcgatgccaaaagcaatgaaaaaccctatcagacctgttggrtgaatcacattacatagaaggacaaattacaaaaaatgtactttttctccctcattctttaccattcccaatgtatggagccatgttctcactgctggttaccctatgaattagacattaaaagaacaaagcattatatttgatactgaatgtaactttcccctggataattttggatttct

SEQ ID NO: 676465 - DNA, 780 bp, Homo sapiens
ttagcagttcttagtattattactaagctatgataagtattttgttattctaattttgttattattattcttggttttaataagtattctgttactgctataaggaaagtagttttccacttctttcttcatccagcaaataatgtcttgtgaatagcattaatataattgcaattgtgtttctggagtgagcctgccaatgaattaacctgaaaatgcttcttggctatagggactaaagctgttgaacatctgaggcttgtacagtgttggctcagttcatgcaactaagcttctttcaagaggaaatataataaactgatgaaagagattgscttccagagtcagactaactgtgatttacatactgcttaagtcacttaccaagtgaggttgcaggcagatcatttagctctcagtcttagttgtccatctacacagccttttgataagacatttcttccccttagtggacccagggtgagtttcaagggcatgagagacctgtgtagtcacttatggccctgcactcaaggggtcctgtgcttggtttaatcctctgcttcagttgtcttaaaattcttaataattttatctttgaacttgtgttttataagggaagcctgatgggacaatagagaacatgtgtaactagtggagataggtgtgattatgtgtatctgccattccttactgtgccatttgcatacaggttcctgatggctcatgcacaaagaatttgggtaggcctagaatgcttggaaagtcagtgagactcaa

SEQ ID NO: 676466 - DNA, 659 bp, Homo sapiens
ttttgcatgtgggttcaggaaccgagttaaatagatttttctcaattacaataactttgcattgcttgggctttttaattgaatgactttcttgtcctctttatttagttcttacctgggttgttagatttgactgtctatgtgaaattttactgtaagcctccttgaacactgctttgttgatttgtcttctctttcttagtttaatgaatcactctaacagatttttttgggaaagattttgrcgtttctttaaaagtctgaaaccatgtagaattacttggaggcaatgaaaatctattgaggccatatgtcaggtgtatttttaaagtataatttaaagattatagtgtttatattttctttatttttgatattgttctgggcaatgatttttttggattcgactccaaacctcaggcaacaaaaccaaaaatagacaaatggtattacatcaaacaaaaaagctcctgcacagcaaaggaaacaaataacagagtgaacaggcaacctgtgaaacgggaggaaatatttgcaaggccatacatccaataaagagggaatatctaaaatatataaggaactcaaacaactcaataacaagaaaacgacctgattaaaaaataagcaaacggcctaaacagacatttctcaaaaga

SEQ ID NO: 676467 - DNA, 1339 bp, Homo sapiens
caatttcctaagcaagattgaataattgtgataatagtggctattcttagtcctggcagtgtctctagtgtttccctattaaatatgaggtagattgttagctttgaacagatgttctgtatcatatgaatgaagtaacctcctgtcctgggcagtgctgttatttgtgtgattgcttctaagccttaaaaataatttaaaaatttggaagataatgagcaatacatattattaatatattgaaattaaaagttttaaagaggacatggcgatcatgtcttatctgtcgaaagaaaaatgtgttgtatatgtactcatttctagaatatctctagaaggaaatactactaatcaccctttctgccaaggcaatatatggtgtctaactgkctggaagcttaggaaagagaactgggaaagagatatcaggtttggaatggtgcccactgggtttgaaaagtcaaagcaacgtatgattgcatcagagaagcccctctgtgctgtggtccatgtagtgcagagtgtacaggccgaaggcatcaggaaggctgtgcatggctctaggaggcagcagtgcacttgatgtctctctctctctcttttttttttcggggggatggagtcttgctctgttgcctaggctggagtgcagtggtgtgatctcggctcactgcaacttccgcctcccgggttcaagcaattctcctgcctcagcctcctgagtagctgggattataggtgtgtgccatcacacatggccaatttttttgtatttttagtagagacggagttttccatgttggccaggctggtcttgaactcctgacctcaggtgatcctgcctcggcctcccaaagtactgggattacagatgtgagccaccatgcccggcccacttgatgtctctttatgcctgaagagatccaacaatgaggcataatataatggaaatgggccaagtgtacagagtctgactgttataaagaaagagaaaagtaaagagcagtaatggtcctgtgcgagaaatggaagccaaatctgtgttctgagccccttttgaaaaaattgtactaggtcaagacagttaggaatcaaagccgagtgcatctccttaaagggccatcaggcaagcaagaccggaagcagacatggagagggtgttgtaccaacttctacttaaaaagatggtgttgtttttaaatgcaggaataagtgtgcgtttttatcaagtttcttttgagaatctattggaacaatcatttattttcttcttttcttcatatactatattcattacttactattacaacatttttggatttctggaagacattcttac

SEQ ID NO: 676468 - DNA, 668 bp, Homo sapiens
attttaaatgttaaagaatttccaattcaaccctcttattttatagattaagagaatgggacctaaaaaataaaaatgggccaaaattgatacttaaaccttattgatatcttacattagaacgtgtttttaccatttcatagcagtttaccctactgtctgttgatcacagaaggtaacattatatccattttatcctcatacttttcccctgacacacccatttagcagccgtcctggaattagaacacagacttcctgacttccagtcctatcctggcccaataccatcatgattcaggatagctatacactgtattctttaaccagcccctcgaatggactggaagaagctatagaaaagaggtttgtgaagtctggagtgcctcaccagcaggaccagaaagtaattctgtgatttagcaaatgaacgctgtgaagacmcaatgaatagaagaagggactgaaggagactttggaggctgtcaccctttaagtttcatttgcaggatctgtgacaacacggtatctgtcagagagagactgacatcttggttggtaaacatctttgacacagttaaggcaggtcttacaggatctaggaagggtggagggatttgcaggctgttggaaatgccagaaagtcttagagtttcaggcccttttaa

SEQ ID NO: 676469 - DNA, 610 bp, Homo sapiens
gtgtgtgtgtgtgcgtgcacgttcatatgtgtggtgggggctaatgtaactgagactggattcaaaccaagtcatgctgcatctgtggtagaagagatatttatattcaccccaaatcttcccaagtcctttcctctccccataagctccatgcacgtgcctttcctctatgctcatcactggctttattttcctttcctctctccagctggaatccagagagactctgaatttcttcaggctagtccacccctgcaaggtaactgtcctcttctctggttgtagtcggcaaactctgccctcagtttatttctcccttcttcctaccaccttgactctcattttcctttgtctttcccattctacctacatcatgatatttttctttcttctataacacacttctaaataaacaaacaacaaagagaagccagaagaaatagcaaacttccaagcaatatttttgacagacttttttcccttatcacagcattaagaatctagctataggcaattctgttgtaggtaatgtataaagcaagttacacagatatgatccttartactagaaatttaattcttctaagatgtgtgctccttgtatctctcc

SEQ ID NO: 676470 - DNA, 1027 bp, Homo sapiens
ttttaaaaatgcatagatagcagagttggtttgagggtgataataataatagttgccatatagtaaacatttcccatttactagtcaaagtgctacctatttaatcctcctcaattattctgtgaagtaggttttattactcctgcctaacagatgagaaaactgaggtgtgaagaggctagctaatttgtcaaagatcacacaactagtaagagatggaactaagatttggcttgaatctcataccttggccagagataattcatggaaaaatgcctggcacatatcatgcatttaataaatagaastatctcattctcatcatttctttccttgtcagagagcttttaagaccctcctttccacccaccccagttcctcatacatactcacgaattttagagaccttgtaaatgaagtgagaccacagccaacaaaactggctgctttctagtcaatgtcaggaaagaaaagtccacttccttgatttgaggatcattcaggggttgatatgtatcttatagtggcatgctcagatcccaacatctgggtaacaatagacgagggtaggcttctctgcctaagtaaacacagagaagtggggtgttaggacctttttcctatttaccattgtgtgtcggcattgccttttcaagcccctaagcaagatatgagagattctatataaaaccaaatttgattctgtcctctggatcaaataaatgattacaccctggagggctaaaactattatacaagaagaaagggaagaagagggtaaatgctgagatggggaataattactgccaaaggtgaaggtgattgactgggagtatgatacctgtgtaattgaggcaaagagaatataaaaatctgtgcttgtttctagagtgtgcattcagaggtccttggcgactggtatgtactgcaggtgggtgcttaaatgtttgcttctcttggatctttgcttttataatctgtttttacaaggactatttaaggagtccactttactgctggcagggga

SEQ ID NO: 676471 - DNA, 1027 bp, Homo sapiens
ttttaaaaatgcatagatagcagagttggtttgagggtgataataataatagttgccatatagtaaacatttcccatttactagtcaaagtgctacctatttaatcctcctcaattattctgtgaagtaggttttattactcctgcctaacagatgagaaaactgaggtgtgaagaggctagctaatttgtcaaagatcacacaactagtaagagatggaactaagatttggcttgaatctcataccttggccagagataattcatggaaaaatgcctggcacatatcatgcatttaataaatagaactatctcattctcatcatttctttccttgtcagagagcttttaagaccctcctttccacccaccccagttcctcatacatactcacgaattttagagaccttgtaaatgaagtgagaccacagccaacaaaactggctgctttctagtcaatgtcaggaaagaaaagtccacttccttgatttgaggatcattcaggggttgatatgtatcttatagtggcatgctcagatcccaacatctgggtaacaatagaygagggtaggcttctctgcctaagtaaacacagagaagtggggtgttaggacctttttcctatttaccattgtgtgtcggcattgccttttcaagcccctaagcaagatatgagagattctatataaaaccaaatttgattctgtcctctggatcaaataaatgattacaccctggagggctaaaactattatacaagaagaaagggaagaagagggtaaatgctgagatggggaataattactgccaaaggtgaaggtgattgactgggagtatgatacctgtgtaattgaggcaaagagaatataaaaatctgtgcttgtttctagagtgtgcattcagaggtccttggcgactggtatgtactgcaggtgggtgcttaaatgtttgcttctcttggatctttgcttttataatctgtttttacaaggactatttaaggagtccactttactgctggcagggga

SEQ ID NO: 676472 - DNA, 615 bp, Homo sapiens
taaggaaattgagataccactatgtaatgtagcatttctttttgtttcatttaattttgaatttttattagtatgaattttcttcataatttagggttttatgaatattacagaccctacatttcccaaatcgtagaatgtgaaagtcaaggttgacactttcaggtaaatgatggraggaatctttgtggtctttaccccacacaatcacctgcttaatggttctcacttccctttttatctgtgctgttagttctgattagatcaagggataccaataaatgcaaggtcaataatgtgactccccaggggagctaattacccctgcagagaaaaccacaggcttaatctcaatacatggctgatcatctgcagccatgagccattggacatgggcatatccacaggttccttccttccttccttctttctttccttccttcctcccttccttctttccttctttccttccttccttccttcctgtcttagcaaaggctgacaaaataaaataccacaagctttcttcaaggatggcccccacctctgaaacactgggcaggatcatcctggcctgggaaaaccaaagaggtggccccaccctttgaaaccaag

SEQ ID NO: 676473 - DNA, 236 bp, Homo sapiens
taataacttggataaaataatgtttattcagtttctccactttatttctctgtgaggcaaatagccaaagcaattctgagtaaaatgaataaagttggagggatcatactamctggcatcgaaatatactacaaagccatagtaaccgaaacagcatggtactgatataaaaatggaaacacagaccaataagacagactcaaaaactcagaaataaattcacaagtttatagcca

SEQ ID NO: 676474 - DNA, 189 bp, Homo sapiens
gaactctactccagctccaatagtagtggatggtcatctatttaggcacaaatcttgagtgagacagttaattcttgmaaaaggacattaacctttttttcttttttattatacttttaagttttagggtatatgtgcacaacgtgcaggtttgttacatatgtatacatgtgccatgttggtgtgctg

SEQ ID NO: 676475 - DNA, 592 bp, Homo sapiens
gtggatgcccttctgtattgtatttttactgaattgtttttgagctaaaatgccaaggttagagttgttatccccagctcaagaggtataagttctaacacaaggtaggggcaaaataagcckacaaggaaaggagttaagtcgatattttaaaaaagatctaggaaataagcttttaagttgctgtcctgacctaccaatgacttctcggctctagatgtggctatgctgcactttgttcaagtccattaaactgggggagggggagaaagtatatttctccccctttatttggaggtccctacagcccacccttcttttcttaaagtgtctgacttcgtggtctgcatctgcgttatcagacgtgaacatgtccttgttggcatttaaaattattttagtgggctttgaagggagtaaggctagagttcaaactgacctcttctacagatccctggtcctgttcctgctgctccagatttgcttcccactcagctgctttggcaactggaaaggggaagagggaggcatgcagagatgggtacttgggaaaaatgagaagatcgcttccccccaccggcttcctgctccc

SEQ ID NO: 676476 - DNA, 592 bp, Homo sapiens
gtggatgcccttctgtattgtatttttactgaattgtttttgagctaaaatgccaaggttagagttgttatccccagctcaagaggtataagttctaacacaaggtaggggcaaaataagcctacaaggaaaggagttaagtcgatattttwaaaaagatctaggaaataagcttttaagttgctgtcctgacctaccaatgacttctcggctctagatgtggctatgctgcactttgttcaagtccattaaactgggggagggggagaaagtatatttctccccctttatttggaggtccctacagcccacccttcttttcttaaagtgtctgacttcgtggtctgcatctgcgttatcagacgtgaacatgtccttgttggcatttaaaattattttagtgggctttgaagggagtaaggctagagttcaaactgacctcttctacagatccctggtcctgttcctgctgctccagatttgcttcccactcagctgctttggcaactggaaaggggaagagggaggcatgcagagatgggtacttgggaaaaatgagaagatcgcttccccccaccggcttcctgctccc

SEQ ID NO: 676477 - DNA, 624 bp, Homo sapiens
tgaggccatttacatggtaagtatttaaaaggtaagtattacaggcctctctggaggaggtagccagcccatgggatgttcccagatttaaactaaaaccrtaaaagtgagacttatatttaaaaggtaaatctctttatttttaaagagatgcagcaggttttcatggatagggaattagcatttcaactttatcttcaagaccaacttcaaaattatcactggcattttttccttctctttctatcttttttctttttttttttttgagacagggtctcactctgttgcccaggctggagtgcagtggctcgatcacagctcactgcagcctcaacttcccaggctcaagccattctcccacctcagcctcctgagtagctgggactacaggcatgcaccaccatgcttggctcgttttttctatgttttgcagagatgcagtctcactatgttgcctaggctggtcttgaattcctgggctcaagccatcctcctgctgtggcctccccaagtgttcagtttacaggtttgagccactacgcctggccctgtcttttttcatttaaagaatgagaatatacttttcttccacttcaaaagctatcaagtgttctactactt

SEQ ID NO: 676478 - DNA, 712 bp, Homo sapiens
acactgtgggggaggctgaggcaggcagatcacttgagctcaggagttcgagaccagcctgggcaacatggtaaaacccccatctctacaaaaaataccaaaattagctgagcatggtggtgcacatctgtggtcccagctactggggaagctgaggtgggaggattgcttgagcccaggaggtcaaggctgcagtgagctttgatcatggcactgtattcagcctgggtgacaagagaccccatctcaaaaaacaaaaattatacaaacataataaattacaaaataataaatttagaggtaggtatttatgcatgtatttatgtatacagttaaccctgcctcactgacctttttcacaaaggatttaagataagccaaaaattattttgcattgtaattcaaaattattttattaaagcttatgaatagttttatagatttctagtgtttaagatcgggctccagagattggacaactttatcatactttggggattttgtacttctttttctaccatcctggctaatagtggatttagcttttttagcttaatatgtaggtaaaggcattaaatttgtatctctttaaatgataggcttttcatatttccttgtattacctatcagtatttcctcttaytttaaactacctatcttctctattagtcaagtagaatctgaatattatgtatttgtatctatttttata

SEQ ID NO: 676479 - DNA, 2608 bp, Homo sapiens
gatcacaaattgaaaatgtttaaaaagaaaaggtgttctgacttcagatgcataattataaatgtctggaaccatttgctgccttctttcttttaggtaatggccattatcccagccattgcatatcagctgccttgagttaaaaccttaatattcccttatttgttctcatgtggttaaaggcaacttccactcacagaatgaactatgacattccccaagccgaacaaatcgaaaagttcacagttctataacctcagagttcaatgaatgtaaagtaaggtgttcttacattgattaatgagcaaaaaatactttaatctcctagaggggaagatttgccaagcaaaaacttttttaaataatagaaaaagaaaactcattgataatttctggattcttataaatcagtgaaaatatttcatgcttattagttcagctatatgttcattctaagcaacttaattgatataacttactgtgaacaaaagccatgtgtgaaaatcctatgattgactcactaatagatgaagctcatatttaactgtggcctaataagtcataatgtcatcttaaatttatttaaagttgtataatattttattcaaaggcttttagtctaaaaataaagatgggttttttgtttgtttaatcagatgaagaacgttataagaaaaaaattctcaaaaaagaattttcctatggcaacaaacaaaatggcaaatacaacttcaaggtggaaaatgcaaattacttctgaaagaaaacttggtatcttgggtattcctcaatgaaaaggaagcatgtcataagaaatagaagtctttccccaaacaattaaaaaagttgcttctcaatataaatattactgcatatcagagcacttaatagtgctatttagagattcttcaaataatacataaactcaaatcattaaaacatcatctgagctaataaggtcattaaaaacagaattataattgactttaatatgtttatgaaagaatcttcagcaacatcaaacatacttttaataatactttgttttgcctcctaaggagactttgttgttccttgctcattgctttttttaataaacagctgatttaatgagaattatctgatctacgctattttcctagtgttgttttgagtcccatgttttacacagaagactttttaagatgtattttccattagccccagccctagtgggaaagcatatttaataggcaggtgatgatgaccaataatatgtttgaaattccttttattgttcaggaaattaagaaagtgtttattaattttagaatttaagtcaaatatgcatgctgagattttcaggaaaccaacaacagaaataaaaatagaacatatatcttccaaatccattgagggaaaaagtaaaacctccttgtaaggcacacaatttaatcataaagacatagaaaggataaaaataagaaaaaagtaacgaaaatatcagccaaaataaaagtctgtatgatcagattaaaaacaatcaaaatagagtttaaagcaataaaacaaaatgtacttctgagaaattaagtgggtcactgcttaattagaaaacatacgttaagtattctaaaatcttcccaattaataatatagagtcatagtataagatattattgaaataaatggacacaggcacatacatttaacccattatctcaataattcacagcacaaacaaacaaaaacaaaatgtgatgagagataaaatgaagcgatattagcttaatgtaatggagttgcatagaattctgtagataacaatcaggcaaaatctctaatttaaagcaactgaccaaattgctaaaacataaaaacaaatcacaacaaatacacacacacacacacacacacacacacaaacaaacgaatactttccaggctatgtcctttgacttaaatgaaaataatttagaaatatgtaattaaagatatctatataccaaaaaagttttgagacattatcctaaacaattgattaatcaaaaaagataattgaattagaaaagtttaaagctgaatattaacttaaaattacatataaaagattgagggaggcagctaaattagttcttagagggaaatgtatagccttatattaagaaaaacaaaacaggccagtggctcaggcctataatcccagcactttaggaaaccaaggcaggagagtatctcttgagcccaggagttggagtctacagtaagctaagatcgtgctactgcatcctagcctggatgacagggtaagaccttgtctcttaaaaaaagaaaagaaaaagaaaattttaataattattgcaaagaatatagctagctaacaccattcagcatgtatagagaatatgaaccagtaagagaaaaaatgaagaaaatcatgaacagataataaataaataaaaaacaawcttaaacacaacaggaactggggaagtacaaattaaaatcaaaataagactccatttttatcacaaacataaatacttaaatgttttgcaataggaaatggcaagcatgtgaaagtggaaactcacattttaccagtggtaaagaaaattggcacacagag

SEQ ID NO: 676480 - DNA, 2608 bp, Homo sapiens
gatcacaaattgaaaatgtttaaaaagaaaaggtgttctgacttcagatgcataattataaatgtctggaaccatttgctgccttctttcttttaggtaatggccattatcccagccattgcatatcagctgccttgagttaaaaccttaatattcccttatttgttctcatgtggttaaaggcaacttccactcacagaatgaactatgacattccccaagccgaacaaatcgaaaagttcacagttctataacctcagagttcaatgaatgtaaagtaaggtgttcttacattgattaatgagcaaaaaatactttaatctcctagaggggaagatttgccaagcaaaaacttttttaaataatagaaaaagaaaactcattgataatttctggattcttataaatcagtgaaaatatttcatgcttattagttcagctatatgttcattctaagcaacttaattgatataacttactgtgaacaaaagccatgtgtgaaaatcctatgattgactcactaatagatgaagctcatatttaactgtggcctaataagtcataatgtcatcttaaatttatttaaagttgtataatattttattcaaaggcttttagtctaaaaataaagatgggttttttgtttgtttaatcagatgaagaacgttataagaaaaaaattctcaaaaaagaattttcctatggcaacaaacaaaatggcaaatacaacttcaaggtggaaaatgcaaattacttctgaaagaaaacttggtatcttgggtattcctcaatgaaaaggaagcatgtcataagaaatagaagtctttccccaaacaattaaaaaagttgcttctcaatataaatattactgcatatcagagcacttaatagtgctatttagagattcttcaaataatacataaactcaaatcattaaaacatcatctgagctaataaggtcattaaaaacagaattataattgactttaatatgtttatgaaagaatcttcagcaacatcaaacatacttttaataatactttgttttgcctcctaaggagactttgttgttccttgctcattgctttttttaataaacagctgatttaatgagaattatctgatctacgctattttcctagtgttgttttgagtcccatgttttacacagaagactttttaagatgtattttccattagccccagccctagtgggaaagcatatttaataggcaggtgatgatgaccaataatatgtttgaaattccttttattgttcaggaaattaagaaagtgtttattaattttagaatttaagtcaaatatgcatgctgagattttcaggaaaccaacaacagaaataaaaatagaacatatatcttccaaatccattgagggaaaaagtaaaacctccttgtaaggcacacaatttaatcataaagacatagaaaggataaaaataagaaaaaagtaacgaaaatatcagccaaaataaaagtctgtatgatcagattaaaaacaatcaaaatagagtttaaagcaataaaacaaaatgtacttctgagaaattaagtgggtcactgcttaattagaaaacatacgttaagtattctaaaatcttcccaattaataatatagagtcatagtataagatattattgaaataaatggacacaggcacatacatttaacccattatctcaataattcacagcacaaacaaacaaaaacaaaatgtgatgagagataaaatgaagcgatattagcttaatgtaatggagttgcatagaattctgtagataacaatcaggcaaaatctctaatttaaagcaactgaccaaattgctaaaacataaaaacaaatcacaacaaatacacacacacacacacacacacacacacaaacaaacgaatactttccaggctatgtcctttgacttaaatgaaaataatttagaaatatgtaattaaagatatctatataccaaaaaagttttgagacattatcctaaacaattgattaatcaaaaaagataattgaattagaaaagtttaaagctgaatattaacttaaaattacatataaaagattgagggaggcagctaaattagttcttagagggaaatgtatagccttatattaagaaaaacaaaacaggccagtggctcaggcctataatcccagcactttaggaaaccaaggcaggagagtatctcttgagcccaggagttggagtctacagtaagctaagatcgtgctactgcatcctagcctggatgacagggtaagaccttgtctcttaaaaaaagaaaagaaaaagaaaattttaataattattgcaaagaatatagctagctaacaccattcagcatgtatagagaatatgaaccagtaagagaaaaaatgaagaaaatcatgaacagataataaataaataaaaaacaaacttaaacacwacaggaactggggaagtacaaattaaaatcaaaataagactccatttttatcacaaacataaatacttaaatgttttgcaataggaaatggcaagcatgtgaaagtggaaactcacattttaccagtggtaaagaaaattggcacacagag

SEQ ID NO: 676481 - DNA, 906 bp, Homo sapiens
caaacacagagcagatatatcagcaaatatacattcccatgactaaaaatgccaatcaaagcagaatccccagggacagttgtttggcaattttcataagacacattagacatcacagattccatcacgtgctttctatcctggtgcaggtgaggctgtaacaaatgggagacggattttaatcttagcagtctttgccatgttgtacacaaggtgaaaataaagcctgttactaggttcaatctcttcaggaacacctccagcaaaagggaccctgtcagaccatcttaagcattgcacatgactgtctccattgtaccatttaagccccaaataattctgtgaaccccataagaaatgacaggaacctcttcatccttgttcttcctggcccaaagyggtttcagcagccagaaatcccactgggggttaaacatacaatatacataaatgagaatgagtattttgtgaataacagaaataaaaaccctcaaaagtcaaagtaccatcatttgaatgcacaattttatctacacagccaaggggaagaggacagtagaagggaattatccagctaagtacacaaagcccccatgtcattgtcttgattttagatgtcttactgctacactgatcaccttcacagactcttttcccttcactgtgtggacctaactttaaaaaaagcaacagccaaaaccctctagctaatagactaaaatggaaaccagagtcactttagaattaatttaaattaattcatagctaagttcagctctactgactgcacagtttcaattcttgtgtctacgacatacagctgcagttatattttctgcttattctgagggacaagggagattaaaacatataagttgggctatattattaaagaaaataaagctc

SEQ ID NO: 676482 - DNA, 1403 bp, Homo sapiens
tatcactcaatattttaacacataaataagacggtgcttttagaaaggtatggaaaatctcttttcctccttcaggatgtaaagatcttcagagcttaccatggctttctgacttttgactgatgaggtctttgttgaaaaattattccacaatttgagatcttataggtgaccataatgtatccttctgtgctttgtttaaataattcagttttttgcagggttatatccatatattctttattctatgactggattgtcacttttttgtcaattcttccaattctgttctattattaaacatagcaaaaagactcattctgagacatatttttctgcaactaagaagaatcactgaagtatcatcagtagatctgtctcttcaaaattataaatctgatgtcactatcggagaaatgtgaaatacagagtgtcttataaataaagttattttaaatatttaatgcttttaaatgtaccgacagttaaaattttctaagtctcataattaaaatctcactttatttgctttaaaaagaaacactttgtattagtccgttctcacgctgctatgaagaaatacccgagactgggtaatttatagaagaaagagtttcaactgactcacagttctacattgctcgggaggcatcaggaaacttataatcatggtggaaggcaaaggagaagcaggcaccttcttcacagggcagcagggtgaagtgagtgcaagcacgggaaatgccacatgcttataaaaccatcagatctcgtgagaactcactcaccatcacgagaacagsgtggaggaaacagcccccatgatccagaccctattacctccacctgatcctactcttgatacatggggattatgggaattaaaatttgagatgagatttgggtggggacacagagccaaaaccatatcatacttgtcgtgaaaggcagtaaatataatgttctatgggggcattctttagaagcaactaaaactagacatccataggatataaagtaatcatgaatcctttctgctattatgtctgcagcaggatttggacttcaacctcatacatccacagcctcctctcacaaacacactatttataatgtgcctatgtgaaatttcttcctgacctctgaagttatctacttcactagactgagatcatgtaaatacaaccatagactattactcaactgcacaagaattatgctttttattgtgcaatagcaaatattcactgccccatgggtatgtgcaaatgtgaaaagaaaaaagagaaggccaacacccatactactctgaatgttcactacgccaagcataaattttcttggcttttcccttgagtttcaaactaaattcttttcaataaccattagaaaacaaatctact

SEQ ID NO: 676483 - DNA, 1403 bp, Homo sapiens
tatcactcaatattttaacacataaataagacggtgcttttagaaaggtatggaaaatctcttttcctccttcaggatgtaaagatcttcagagcttaccatggctttctgacttttgactgatgaggtctttgttgaaaaattattccacaatttgagatcttataggtgaccataatgtatccttctgtgctttgtttaaataattcagttttttgcagggttatatccatatattctttattctatgactggattgtcacttttttgtcaattcttccaattctgttctattattaaacatagcaaaaagactcattctgagacatatttttctgcaactaagaagaatcactgaagtatcatcagtagatctgtctcttcaaaattataaatctgatgtcactatcggagaaatgtgaaatacagagtgtcttataaataaagttattttaaatatttaatgcttttaaatgtaccgacagttaaaattttctaagtctcataattaaaatctcactttatttgctttaaaaagaaacactttgtattagtccgttctcacgctgctatgaagaaatacccgagactgggtaatttatagaagaaagagtttcaactgactcacagttctacattgctcgggaggcatcaggaaacttataatcatggtggaaggcaaaggagaagcaggcaccttcttcacagggcagcagggtgaagtgagtgcaagcacgggaaatgccacatgcttataaaaccatcagatctcgtgagaactcactcaccatcacgagaacagcgtggaggaaacagcccccatgatccagaccctattacctccacctgatcctactcttgatacatggggattatgggaattaaaatttgagatgagatttgggtggggacacagagccaaaaccatatcatacttgtcgtgaaaggcagtaaatataatgttctatgggggcattctttagaagcaactaaaactagacatccataggatataaagtaatcatgaatcctttctrctattatgtctgcagcaggatttggacttcaacctcatacatccacagcctcctctcacaaacacactatttataatgtgcctatgtgaaatttcttcctgacctctgaagttatctacttcactagactgagatcatgtaaatacaaccatagactattactcaactgcacaagaattatgctttttattgtgcaatagcaaatattcactgccccatgggtatgtgcaaatgtgaaaagaaaaaagagaaggccaacacccatactactctgaatgttcactacgccaagcataaattttcttggcttttcccttgagtttcaaactaaattcttttcaataaccattagaaaacaaatctact

SEQ ID NO: 676484 - DNA, 802 bp, Homo sapiens
ataatccatatctgtcttaactttctagttttgaaggaagcagaaccctggatcctgcccagacctgatgttgactcctgatttgctttgagttcattaaaagccacttaaatggtttcatttaaatctcacccaaactctactcttcccccaaatcctataatgattatcttgtccttgtttggtgagtgagatgcctcacagttctgtgtgtgatctccctcactgcaatgaatctataaatatgactttgtcgaactctaagttgtttccttgcgcttgtagactgattgaggtaggacatgtgactcttcttcaaaaagtcttctctaaagttcccacgacaaaataggtcctcctaattcgttgtatcatcagcaccttctacttttctttcatagtgtattatatccttcaagaccccaaaggaattcgatacttaagtcaaaatagttggttaaaaatattaatcagttatatctgctccactttgtcggtaatggggtaaagtggaaaacaatccaaatgtccaatacttaaagtttgaagcaggttaaatattccttacctcccatactacatctcatgatgtttgcatggtgcataaaagttttgtaagcctgtagtaatttgaaagattaatttttgaccaatttgaaaaagtttttaagcaagttgaagaaccttgacaaayaagcaaagcaggactgattaactgaattagaaagaaaaaaaacctgaaatggtaaaaaaaaattatttaacacattctttttattgtttagtttcttatgtgtatttt

SEQ ID NO: 676485 - DNA, 802 bp, Homo sapiens
ataatccatatctgtcttaactttctagttttgaaggaagcagaaccctggatcctgcccagacctgatgttgactcctgatttgctttgagttcattaaaagccacttaaatggtttcatttaaatctcacccaaactctactcttcccccaaatcctataatgattatcttgtccttgtttggtgagtgagatgcctcacagttctgtgtgtgatctccctcactgcaatgaatctataaatatgactttgtcgaactctaagttgtttccttgcgcttgtagactgattgaggtaggacatgtgactcttcttcaaaaagtcttctctaaagttcccacgacaaaataggtcctcctaattcgttgtatcatcagcaccttctacttttctttcatagtgtattatatccttcaagaccccaaaggaattcgatacttaagtcaaaatagttggttaaaaatattaatcagttatatctgctccactttgtcggtaatggggtaaagtggaaaacaatccaaatgtccaatacttaaagtttgaagcaggttaaatattccttacctcccatactacatctcatgatgtttgcatggtgcataaaagttttgtaagcctgtagtaatttgaaagattaatttttgaccaatttgaaaaagtttttaagcaagttgaagaaccttgacaaataagcaaagcrggactgattaactgaattagaaagaaaaaaaacctgaaatggtaaaaaaaaattatttaacacattctttttattgtttagtttcttatgtgtatttt

SEQ ID NO: 676486 - DNA, 2176 bp, Homo sapiens
ggatcattcttgttacacagataacaattactcatatccttttatagaacttttcaaagtgttgacattcttttactttatatagaaaatcataagatataaggcatagatataagtatataagatacctttaaagagtttgctttccctgatgtttcttttaatttcttttttactaaacagctagtgaaccaccatttatcatggctgtgaaagaagatgggctttggagtaaaccattaaatagctttggcccaggagagttcttatcctctgatataggaaatgtgtcaggtaaaccccaagtcctctgttcacttgaatgacagatttctactcataagacttcccacatcattcaatgaatcaaaagaatagggtatttttgtatttggtcaatagtgaaaggaaaaaatattgactgaactctactgccagtgattctgttaagaaaatgtcagttcttagataggaacgctatttattaagtcacaaaatgtgaggttgtttctagttttatgcccaccaggaaggctttgatataatgctgatgtattaatctaccaatgccatctcacattaacagcctatcttgttccactaagacagttatacttaaataatttactgtgcatttgctataagacaggagcagaaactgctgcatagagttctaaataaggtataaggaataattggttgacaaagaggattattaagtaatgaatgggtaatttgcctggaaggcgttagaaggaagaaaagtcttcattctagggtgttataacagtgatcttgcctgaagatgacatcttccatagttatctaattgtttattgatttatttggccattaaaagtacaacagcatttctgaccaacataggagccaaatgtaggtaatgtggcaccaatggagagaatgccactttggcattggctgagtctgggcttcctcttgatgtatctgtgagccctcaggcagaacacatgatctcaccttgtctcaggtttaccatctcaaaaatgagaataattcctacttcataattttgttttaggaactaaatgagatctgtaaactgcctgggacaatgtttggcaaagaggagatgctcgatgtgtatccactgttctccctggtttcaggggttaagagtttgggaaacattatttaaatattcttgacagatcaagttctagtgaatatgtgtcagtgtgttgtttaaaattatgttgaggtgcagatgtgatttgttgactcattatgtttttgttggtatgtatgaaaaataactgctaatcattcactttattttgagacatggattggtataacaacagcctctactacagtgacacgaaaggcgacgtttttgtgtggctgctgaatgggacggatatctcagagaattatcacctacccagcattgcaggagcaggggctttagcttttgagtggctgggtcactttctctactgggctggaaagacatatgtggtgagttaaagcatggcattctggatgctctagaatgatacttatccacttcagtgacttgcacaccaatttcttttttttttttaaatacctgtgcaccacttatgctattatttatttaatgtttatctttaaaccaagtcacttaaacattttttttttctttttttgagacacaatttcaccctgctgcccaggctggagtgcagtggcgccatcttggcctctgcctcccgagtagctggaattacaggcatatgccaccatgcctggctacttcttgcattttcagtggagatggggtttcaccacgttggccaggctggtctcgaactcctgacctcaagagatctgcctgcctcggcctcccaaagtgctgggattacaggcgtgagccaccgctcccggcctcatctcacttttaaaatatgtttttttgtaaattaaatttgttatcactatttgttgaattaggtattttttccccaataatartttaaataaatacatgaaaatgctcacctgagcgttggttcttggcaggaacatggcatgctccaaaagcatgattcaaggcaactaagtgaagagactattttcaaaggtgtgcacagggctagggaaaatgaacaaatgatggtgaggcatcctcacggtttacaagtgtgcgaagaca

SEQ ID NO: 676487 - DNA, 1179 bp, Homo sapiens
gtggccctgcagggccgcctgtggccactagagggcaccaggtgctcgcagggccgcgcacagcttcccggcctggggcaagctcatttcaggcatctggttccttcctctcctccagggaattcccagggctttcggtgtttggagaggagaggatactggctggcttggcactgaggagcctcgactggcactacttatcatttcccgggcgtgtttagcagtttgcagctcatggtgtcctttgtgttctggtcacaggtgctctcagagcagccagagtgggcgtccctataacagacatggaaactgaggctcagagaggtgacgtggctttctcgtggcctcagggttagccacatgcagcaagtgccccatcttctggtttggggcaggaaggcaagrgtccccaaaggctggtggagaaggctgcctgcgggtgatgggggaggggcagggcaagtggacggtggtgagggctgagcccaggagcccagggtgcgcagccccttttcgagagggtgggggtgagggagaaggttgagaccccgcacagggacacagacgtgggaaaaaggctgggaatcccggccgagccctttgccgacatcatttcccctgccccagcctgaggggtgggtatagaaagacacagaaacccttagctacggtctcaggtgcgcaacatatgacactggggaagtgacactgccaggaaagccaccgagtggccaggtgacctgggcatatcactaaacctttctgagccttagccgcttcatttattgagagaggatcataatatctacctccagcggctaagctagagactaataccctctatctacctatctacctctgaggatcacgtgagcttgcatggccattgtgcctggcacgtgggcatgcagtagagagcccctgctgcggtcctccaccagccccctccagtgcttctaccatctcctctaatgggaattccctcctccagcctaacaaactcttcctcaccctttaatacccaggccactaggacctctttatgaactcttctctacctttccaacatctcccaagcagcctcttccaagcagccttccaaaacccttacatccatgcatggcgatggcaggtgggtctgaatgttccctccagccccctgtgggctgcagtcagtcc

SEQ ID NO: 676488 - DNA, 626 bp, Homo sapiens
aatcccagctaattgggaggctgaggcaggagaatcacttgaacctaggaggcagaggttgcagtgagccaagatggcaccactgcgctccagcctgggtgacagaacaagactccgttaaaaaagaaaggagaggagagaagagaagagacattaagtggagtgggtaagggtgactagcggtgccagtggcgctggcaggggtcacagccagcctcccgggaggctgagacagtgggttttatggttcgcctctctgagatctctgctgcacagtcctctggaggctttagcctgggaaatgcccatgcaaatgaagagggccagcccctccacacttgtgggtaattctcgtcaggtggcatgagagactgagaaaagaaataagacacagagagaaaatatagagaaagaaaagtgggcccaggggaccggcgctcagcatacggaggacctgcaccgacactggtctctgagttccctcagtatttattgattactattttcactatgtcagcaagaggaatgcagtaggagagcagggcgatagtggggagaaggtcagcaagaraacatgtgagcaaaggaatctgtgtcacaaataagttcaagggaaggtactatgc

SEQ ID NO: 676489 - DNA, 598 bp, Homo sapiens
agtttttgctcataattttagaatttccaatcttttattctctttggatttattcttaagtctttccctaatttccctaaacatttaaggttgttaaatgtttaatttgggaaggctaaaaatttaccttgaagtaccatttcagctgcattccacaagttattcagctctaagtattttaaagtttatattatgatttattcgtgacctatgaaaattgacagaccgttagcaagactaataaagaagaaaagaragaagaatcaaatagacgcaataaaaaatgataaaggggatatcaccaccgatcccacagaaatacaaactaccatcagagaatactataaacacctctacgcaaatatactagaaaatctagaagaaatggataaattcctcgacacataaaccctcccaagactaaaccaggaagaagttgaatctctgaatagaccaataacaggatctgaaattgtggcaataatcaatagcttaccaacaaaaagagtccaggaccagatggattcacagctgaattctaccagaggtacaaggaggaactggtaccattccttctgaaactattccaatcaataga

SEQ ID NO: 676490 - DNA, 598 bp, Homo sapiens
agtttttgctcataattttagaatttccaatcttttattctctttggatttattcttaagtctttccctaatttccctaaacatttaaggttgttaaatgtttaatttgggaaggctaaaaatttaccttgaagtaccatttcagctgcattccacaagttattcagctctaagtattttaaagtttatattatgatttattcgtgacctatgaaaattgacagaccgttagcaagactaataaagaagaaaagagagaagaatcaaatagacgcaataaaaaatgataaaggggatatcaccaccgatcccacagaaatacaaactaccatcagagaatactataaacacctctacgcaaatatactagaaaatctagaagaaatggataaattcctcgacacataaaccctcccaagactaaaccaggaagaagttgaatctctgaatagaccaataacaggatctgaaattgtggcaataatcaatagcttaccaacaaaaagagtccaggaccagatggattcacagcygaattctaccagaggtacaaggaggaactggtaccattccttctgaaactattccaatcaataga

SEQ ID NO: 676491 - DNA, 1280 bp, Homo sapiens
gggtgggtgttttgtgcacaaagatgattgaggtttgcttttgctcgatggagaaatcctttgaaattgtgctcccggggagcaagggcagctaagatcagagggaactgtttattcaaaagcacaaggagagaacagtgatccctccccactcacaacccacaccctcctccaaactccaaatgaccacggcgaaacaggcctcgacagcgtcagggagctgcatcctcacgtcttccaaaggatgagatggatgtttctctacccgtgcctccgacaggagttgcagtttactgacagtctaccaggtgctcagtgctttgtatgctttgtttctagtatttactacccactttacagatgaggaaactaaatcatagataaaatgagtggtttaaggtctcgcggcaaggaaatatggcatagtcttaaccccagctctgccaaactcggaagccaatgtttttccactgctgtgttctgtctcaaaggctggctcaaagcgcgcatcttcattattcaaaaaacggaatcagcctgcgggagggaagggcaggaaagcatgccccaggagttgggggttccttttcatttgtgttgtctgtctgtcctccctacccagccctgccggcagcatgggggagggggcatattacaagatccaggggtacttcccagcccacaccaccagcacagcaagggctaggccagggaggcaagggagaagtttgctccctttcctgcctgagaaccagggggtagtcatttgacccccagttctgagctcagcgaragtgagagcagtaaggtagggccctagttgtgagccacgtgccgttgtccagattttgtgatggctttatcctctgtgattgtcccaacccagctgttaggcagctattgtcatccctgggctactggtgaccaacaggggcctagcggctgcaacagacctaacctgacccagctaaaacaaagctccaaaaccaccctaaaaaacgtattctgggagtttctccattttgcgttggtgtttttttgttcctgtgctttctttgttcttcctttgcctgtctgctctccctcaagcttgcccttcatttttgccgtcatcatttttattgagcacctactatgtgtgagaccctctgctagatgtgcactgtggaggaaacacgcttcttgaattccaacgcccactctcccccggggagttgcagcattcgactactctctgcttcctaagtgcagtttctgccttacaagtccggccctcgggg

SEQ ID NO: 676492 - DNA, 257 bp, Homo sapiens
ggtcccggaactggtcattggagacaattatcccatctgtctcttcagccagcttcaccatgaacctgtctccaaaaccacagcaaccgagagagggttgaaaaattacctactgggtacaatgttcactgtttggatcatggttacattaaaagcctagacttcaccactatgcaatatatctatgtagcaaaactgtattggtatcccccaaatctayaaaaataaaagtaaaaaccacagcaaccatttgggac

SEQ ID NO: 676493 - DNA, 3366 bp, Homo sapiens
ttctcttgcaaaagaaatagctaagtatggacactgaacagcattaggagtatggaacttagaggtgcaaagcaggcagggcactgctgtttttttgttacaagctccatgatacgcagagatctaatcacagtccaaatatttgacttcacaagcaatttctttactatttatacattgtcttacaaggcatgtactctcatttaaaaataataatttggggctgggcacagcggcttacactcatatcctagcacttgggaggccaaggtaggcccattgcttgatcccaggagtttaagaccagcctgggcaacatggcagaaccttatctctacaaaaaaatacaaaaatgagctgcgtatggtggcatgcgcctatagtcccagatactcgggaggctgaggtgggaggattgcttgagcccaggaggcggaggtttcagtagttttttttcaccactacactccagcctgggcaacagagcaagaccctgtctaaaaaaaaaaaaaaaaatcattagaattttgttttccttgtgaacagctcagcactgtgacaaaagtgccaccattcagtcatcttcccagttgaattactggcaggtatcacatgggttttctcttgaagtacttgtggtttaacagtttacagcagtgataatctcttacatcataccctctaaactgtcaacctgtttagcaaatatgacatttctagacatttacagtttccactgattttattgtttttaaaaataactaaaggctaaattccatgaagataactgtgcatcttatttgtttctttaatcctaaatgtaagacatctaatgcctcaaaataccacactaaatgcaagggtctcgcgcaatctcactgcaacctccgtctcctgggctcaagtgatcctcccacctcagccctgcccccttccccctcccagccccccacaccaccaccactgccaccaagtagctgggattacaggcacgcaccaccacgcccggataattttttgtatttttagtaaagatggagtttcacccatcttgcccaggttggtcttgaactcctgagcttaaagaatccgtctagctcggcctcccaaagtgctagaattacaggtgtgagccaccgcacccagcctaaatagatatcttaaaggataataaagataaaataccttgttgggttattctgacaatacatgttaaccactgaatacttttgtgtcctttaatggggtatgattcagtaaaattaggagcaaatttaagggcttgtgaatacgaaaacttcccattgaaatgaatggcatatgtgtgtgtgtgtgtgtgtgtgtgtgtgtgtgtgtgtgtgtgtgtatgtgtgtgtatatatatatgtgtatatatatgtgtgtgtgtgtatatatgtgtgtgtgtgtgtgtgtgtgtgtgtgtgtgtgtgtgtgtgtgtgtgtgtatatatatatgaataagactttatcctaatcaggagtttttcagtatcaaattacctttgaaaagccaggtaagatttgtttgacttaaatgcctaggtttcataaatactaatggttagaatgaggctaaaacaagtagtgcctaatgaaattttttttaaaagttagtgaatctggctgggcacggcgactcacatctgtaatcccagcactttgggaggctgaggtgggtggatcaagagatcaagagtttgagaccagcctagccagcatggtgaaaccctgtctttactaaaaatacaaaaagtagccgggcatggtggcacatgcctatagtcccagctactcaggaggctgaggcaggggaatcgcttgaacccgggaagcggaggttgcagtgagccgagactgtgcactgcactccagcctgggcaacagcacgagactccatctcacaaaaaaaagaagtcagccaggcgcagtggctcacacctgtaatcccagcaccttgggaggccgaggtgggcggatcatgaggtcaggagatcgagaccatcctggctaacacggtgaaaccccgtctctactaaaaatacaaaaaaaaaaaaaaaattagccaggcgtggtggcgggcacctgtagtcccagctactcgggaggctgaggcaggagaatggcatgaacctgggaggcggagcttgcagtgagctgagattgcaccattgccctccagcctgggcaacagagcgagactccatctcaaaaaaaaaaaaaaagtcagtgaatctaaagaaaaaatataaagtaaggaacactcaggggcatttagatatgccaataatcataaaggaagcaacgactgccatgtgggaaatataacagcatcccacaacccagtctgtcaccagattgccaaactgaagggcatccagggatggcgggtcatgacctgtaatgtgagctgcactatcctagagcccagcgtttactcagtctatcctttccttcaactcgtactgatcatttggggccttgtacgcccatggtaaggaatccagaattgattctatcaactgcaatgagatgaggctggagagttttaagcaaaggatttataagatctgatttgcattaagcatcaaatgtgctgatgaatatgaaaaggctcagtaaactccaaagtatcaccccagcatattttattgccttgacagagggcagaacaaaacgaagggaagaaaataaagcaaactaaaatccaagtagaattgacccattacaaattatgtggccagtagtcatgactcaggcttcccttatgccccatttagggagatggagaagatcaggtctgatggaaaagggagaggattttggctttcgacatactaagtttgagatgcccattagacatcaaagtggaaatgctagaaggcaattggatatacctacccatccagagctaaaaggagaaacacgaatggaaacagaaacttaggatccgtcagcgtatagagcarttattaataacaatacaagctaatctttatagcagtaagctatgtacttatagctgagaaagtatgtttcagtcactattttaagtgctttatatgtacaactcacttggtcctcaccacaaccttggaaggtcaggtcctatgatacttactttacaaataaataaactgaggcataaacagattaaataacttgcctaaagacacatagtaagtaaataccagagctaggtttcaaacctaggtaatctgactctggaactctttaaagccatgagattgcttggcaagtacagacagaaattagactgaggacacagtatttcaatttaagcaatttcctgaatatcaaatggctggcaaggtttcaggctctgca

SEQ ID NO: 676494 - DNA, 653 bp, Homo sapiens
gaagaagacaaagacgaagaagacgaagaagaagaaaaaacagaacatctgaacagccctataacaagtagagactgacttagtgatttaaaaaaaaacaaacaaaaacaacaataacaaaaaactacccataaagaaaaaccttggacatgatggctccattggtgaacaatacaagacatttaaagaatgatcaattcttcacaaactcttccaaaaaacagaagagaaggaaacatttcccaactcattctttgaggcgagtattaccctgataccaaaaccaaacaaagacatcacaagaaaactacagatgagtatctcatgcatatatacacaaaaatcctgaaaaccctagcaaacaaaatccagacacatacaaaaaggattatactccacgcatgatggcttatgcctgtaatcccagcactttgagacgtcaaggcaggaggactacttaagcccaagagtaygcaaccagcctgggcaacatagtgagaccctgtctctacaaaaattaaaaccaaaaattagccaagcatggtagcatgctcctgtagtcccagctactcaggaggccgagataggaggctcgcttgagcccaggagaggctgcagtgagctgtgatcacaccactgcattccagcctggg

SEQ ID NO: 676495 - DNA, 3158 bp, Homo sapiens
gcagtagtgagctgccacctttatatgccttcacatttgtccacaccctgttaacattccacatgtaagtactgaaaaagtactgcactgactgtttctgcagaaagcaccacttaataccctgaataaagcttgtctctcatattttaggaatgtacttttaatgcttaagaattactttatttttctccttacctattacgtatcttaggttggattccctagaaatagaccctaaaatggcaatttttaggcaagtggttcactaaaggagtgctctcaagagagtcctgtaagacagtgaggaaagcagaatagcacagggaggaaagctaagcaaaggtgtagttttccctgaagtctagccttcatctgattccaatgggagctgtgaagcacgaatagcatctcagaattgtaggacctacaggcatcttgtattcttcccttttatcactcattcattgcctaaagctatccctggagggagggcataacctcccaacttttcccagaaaggcaactgaagacaattctctgtagaagggtacagctcttactagccaacactcatacagctagaagatgaagcactacaggtaaagggcagtggttctcacctgggggtaattttgtccttgggagacacttacyaatgtctgaagatatttttaattaatgtgactcggggttgggtggaggtggtgttgccactggcagctagtgggtagaggccaaggatgctgctgaacatatgcagaagaacttttctacaacaaagaattatgcagtccaattgtcagtagtgctaaggttgagaaaccctgggtaaagggagtctgagtaggacatcaacagtgactgctgcacctttctttttatgtatgccctgggctatatttgtaaactgcagtagcaggagccattcttaagtattgaccagatcaggtgaaaaaaactaaaagctcattcattcattcatgctttttgttttgttttgttttgagatggagtctcactcttgtcgcccaggctggagtgcagaggtgtgatctcggctcactgcaacctccgcctcccaggttcaaacgattctcctgccttagcctcttgagtagctgggattacaggtgcctgccaccacgcccagctaatttttgtacttttagtagagatggggttttgccatgttagtgaggctggtcttgaactcctgacctcaggtgatccgcctgccttggcctcccaaagtgctgggattacaggcatgagccacagcgcctggcctcattcatgcatttattcaggagatgtttcattaggtaattaaagaacacctgctatgtgccaggcactaggctaagcagtggggatacagagagatagtatccgctcttgggaagctcagaaaattaagaactaagagacatcataacccagtgactttgtcaagtttaaaagagagaatatatattaacacaatttgtacaaacttaaacataaatattcaatcatttacccaacaaatattattgagcacctactagataccatatgctattctaggcactggagatatagcagtgaacaatagggaaaaagtctttgccatcaagtagtatataatccaatgggagaaacagctaacaaacactcaaataaatatgtaataacaatttagataaagataagtgctttgaagaactcagaagaaaaaagtagaatagagagtgaattgaggcaggggctgtgggtgccttatattagtaagaatgatcagaaaaagcctctttaaagagatgacagttcaggtgagaccttaatgacgagaaggagttagccatgtgaagatctgggggaaaaagatctatttcaagaagatgcttggcttcatggagaaaccaaaactgttgctagatgtgcgggctggggagtggtaaggtgtgagttcagagaggtgagcagggactgcatcgtggaagcccactagaccactgtaaagagtgtggactttattcttattgcagtgggaagccattggaggtttttaaggcagcattttggcagatgtgtgatagtccagcaaagagatccaatggaggaaaatgatcaccaagaaggacattatgtgcttgccagctgagtctttgacccttcccaaagtgcattatagagtgtctttccattttatttcataactcactttcctaggtaaaatatctgccattggaagagtatgaaaatatagacataaatttaacattacaccttttccagcagcattgcattatttcaaaaatggtgaatgaatattaggtttgagttttaaagggcagtgaatcatttgttatgcccaagtcccaaatcgggacacatcactagaaagaggaagcccatcagattaatgaggaaagttagatattaggtacctaaactgtatttggtgtagtgtttcaaccaaaccaaatcacttttaacctttttatgtatgtaagtcctcattttgacagatgtagcagcataggctgaacaattattgaataatgtatttctagttagtttgggtgtatgcatgtgtgtgtgttcatgcatgtgtgtgtgttcatgcatgtgtgtatagcacagtgactagaggattgaatttctgttaggggataaataaaaagcctactagatgaatagtttgtagaatgatttttgagagctgcttggaacccagagtttacagcctaattacaatcttctgacagacctttagtgagcagtaatcatgaggataggcttgacttgagtttgaatggtactgttgtttattctgctgttcacagagagcagcatataaaatggattattttgtgtgttagtattcttttatgtgttagtagctaatgacatttttgatacattaataggaagcttgccagaagcccaaaggagcttgaatattttgtaggcaagtaatttatttaaaaattagctacggcataacgtgtatatcatagaagcaaacaacattattccactagtaaagagtaggcattgagatgctcttttgatagaatccttttttaagaagtattttcagagctcataaattataaatttggcaaatatggagctcttttaagttgatttttaaagtgaaccatatgtttagc

SEQ ID NO: 676496 - DNA, 611 bp, Homo sapiens
ctttcccagctgctaaaaatataaatatctgtgggtggagtaaaaaaaaaatactaattcattaatatcttactggtggttggccagtcacgtctatttcccccaggaaaggacaaaaatgacctaggaagggcaaactaaagcaggtcagagaacgagagtgcagaaagaaaaaaatgggagatggggtcatcccccagcaaactttgcccattattcttcctttggtacattgcgactacatcttgtattagttattgattcatcacgtttctttccaagagtccacggaaactttcagaactagatttcacaatctagcaccctaagctctgttcaaattgcccataggaagattctctttcctctaccttttctaattaattcctctagctaggtattcttctcaactactattagtatcaggcaaccctttttaccctttagtggttaatcctacagtctgtttgaaactatttcctctttttattcaagtcattaggacttgactgacatgtgctggtgtacgtagattttgttactcttttataaattactgtatcgyatatcttacatttctcagcagagacaatattgaacatcttcacttg

SEQ ID NO: 676497 - DNA, 1265 bp, Homo sapiens
gggtcactaacagtcaaagaaacacaaacaaagtaccattttaattgcttgtattaaaaaactttggaaataataatatccaggaattgccaaagtattatgaaacatgctttgttaacagcaaatataaattgatatggtgttttggaaagcaatctataaatacacattaagatccataaaatattccaatcttttaaatactgtaatcctacttctaagaatctatcctaaggaaataattataaaaacaaaaaataaaacaaaaaatctgtatgtatggacatgtctattgcagtattatttataatagtaaaattgagggcaatggtaaaatactatcagaaaggatcaattaaataaacatgttcatctactttataaaattttatataattgtttttaagatcatggtataactgtgaaatacttagaatttaatataaaatttaaaaaaaagatataaaactttgtataaataataattattatcaggcaaaaatatatgtaagaataaaagactaaaagaattattcccaaatgccatcaataatcgaatttgagtggtaatatcatagatgatttttgccttctgttgacaccttttgactttttttattgtaattttttaaataagaaaaaattaattatgtaggagttgattcatcagtgcacagttgtgattacaggaaaccaaactcctctgaattatgggacttttttgcccaattattctttctgtgaattcaagtgtttcctaaatctgttttgtttgccttaaaaatatcactgtatatctatacacattacatagtgcctctatagttttccaagcattttacagctactcttcaattttattgtcactgcattatttgatttatttttcccatagcagagtcagaaaatttagccttgaaaaggttgttggtgagattgcagagcaaataaaactcacgcactgctagggaaagcaagatggtatagctgctttggaaaacaacttggcaatttcttatccagttaaacatgaacttatcacatgacccagcatgcaatcccatgcctacagatttacccaagagaaatgaacactcatgttcacacaaaatatgtarcatattcctagtaaatttgatcttaatcacaagaaaactagaaacaacctaaatgttcttcaactggtgaatgaataaacaaagtatggtacctccatacaatggaatacccctcaacaataaaaaaaaagaactactaaaatatgc

SEQ ID NO: 676498 - DNA, 632 bp, Homo sapiens
gattaactaattcataaagcttattatctttctactggaatgaaggctccttgtctgtcttagcccctctgtatctcctgtgcctagcatctggtctgagacattgctgctactcaacaaatatttgaagaatgaaagcataaatgatacttataaggtttaacttggatgatgagtagatagaaatgtaatcaaccgaagcagagaatggaagaatagatctgaagaaacaactgagtttagaacttagatttctttgaaatattaagctgaagagtttattacactaaatttacattcatattaattttatatgctgtattgtatatattaactttttacctctcagtaatgaataatattttaattgataatttcataatttttacaagatagccaaataaaattttggccagggagtaaaagatgaagctgataagcattattacacttgaatttttctgggcttcttaattacattattgaaatttaaaaaatttttcaattataaaattagcaagtgatacrgtttcactttgtgtccccacccaaatctcaccttgaattgtaataatccacacgtgtcatgggagggacctggtgggaggtagttgagttgtggaggcaggttt

SEQ ID NO: 676499 - DNA, 619 bp, Homo sapiens
tccagatgtcatagagaatcttctaatcttctaaattgtcttctaattactttaaattttcatttttcccaattaggtgtttaaacatttaaaaattaatccaagtatagtagtgcttttttctgacccagcttgctaaagggacagggctcctgacaactttaaagaatctggatggtctactaaaagataaattcaaatagtgtcattttaggcacagatttgttgttgggggcgcggtgtgagagtggtgatgggtaatatgtgcatggtaacaacaacaataaaaaatttcaagcctcttgccatgtggcctgttgtcccagckacttggtggggggtggggggggtgctgaggcaggaggattgcttaaggccaggagtttgagcccttgaataaccactgcattcggcctgggcaacataatgagaccctttctcttaaatcaaaacaatcaaacatccaacaggtttacaataatgaaaaacaaatttattttaagattaataggggagaagttagcactgtgttttctacagttttttaatttatagtgttggggattttgtgactttttgattgactgattgagacaggctttgtcacccagactggagt

SEQ ID NO: 676500 - DNA, 624 bp, Homo sapiens
gttccactctcatagcctcttagtagaactttgcacccttataattttcaattatctgttgagtatatctattaggctagaactaagtgatcaacttccatgacagcagagactcagcctgtcttagtagtcatgatggtccctggcccataacacagtgccagggacacaatagtacatgataaatttccgtagactrctgaaaaattacagccttgcttatctctgcgcaagtccctaagaaacagggaacacctgtagggttgattggtgtatgtcagggtcacctgtggtatgtgtagcacaggagaacaaggttgagaactacttgctggcctaaataagtaattcccaagcttatttgaggtagcctgcactcctagggatatatcagaatctaagagcaacaattagaagacataaaaatataatggggccgggcgcagtggcttacacctgtaatcccagcactttgggaggccaaggcaggcggatctcttgaggtcaggagttcgagaccagcctggccaacatggtgaaaccccatcgctactaaacatacagaaattagccagccgtggtggtatgcaactttagtcccaggtactcgggcatgtgaggcag

SEQ ID NO: 676501 - DNA, 959 bp, Homo sapiens
caacaaaatacagctgaggttgcaatgtgtcagcaagaatgtcaaggaggaagtcagagggtcaaatcagctggggcttggcccatttaccctaggtggtgttcttaaagactcagtggttcattctgcttggcarcttaaagagccattgaggttcagaactaaaaatgtgtgggccaggaagagggcagtgaatgactgggaccaacttgccagtgtctcccaggggcaccggctcagataactggaagtctggaagctttctcatacgcagccagtcccgtaagcagctcttggcaagactaaaaaaaaaaaaaaaaaaaagaaagaaaaaaagaaaagagcttcccacttgtgtttcttaactgtaactgtgcctaagaatcacgtggtgcttgtcaaagtgcatattcctgagccctactcacaggcacttacacgctcctttcggggttgggcccagagatcagcattttcacaggcacaccaggtattccagaataagatggtctgtggagcacgttttcagaaatgctgccttaaagccttccacgtgtcccagctgtctaatcactgtatgagggtccatgatttaatctattttcaaagacaggggtctggaagtcgtttttctcctcccacattcaatctgtcatctccttctgccactgtgttctaacatttcccttaagtttgggccctctcctcaagctcctcactgaaaagcactgtctaagctggatgcatttcacacgagagcttctgtggttggactgcttaagttaaaccagcctccacgagggtgtccagcagagaggtgcacctgagggattagggcaacaacctaactcgggcctcagttactgcagaattcaatttgccagaggtgccaacgtgaagaccaaaggttgagtcttacacaggtcttcctgttttgtttctttaaaccttgaacgttt

SEQ ID NO: 676502 - DNA, 959 bp, Homo sapiens
caacaaaatacagctgaggttgcaatgtgtcagcaagaatgtcaaggaggaagtcagagggtcaaatcagctggggcttggcccatttaccctaggtggtgttcttaaagactcagtggttcattctgcttggcagcttaaagagccattgaggttcagaactaaaaatgtgtgggccaggaagagggcagtgaatgactgggaccaacttgccagtgtctcccaggggcaccggctcagataactggaagtctggaagctytctcatacgcagccagtcccgtaagcagctcttggcaagactaaaaaaaaaaaaaaaaaaaagaaagaaaaaaagaaaagagcttcccacttgtgtttcttaactgtaactgtgcctaagaatcacgtggtgcttgtcaaagtgcatattcctgagccctactcacaggcacttacacgctcctttcggggttgggcccagagatcagcattttcacaggcacaccaggtattccagaataagatggtctgtggagcacgttttcagaaatgctgccttaaagccttccacgtgtcccagctgtctaatcactgtatgagggtccatgatttaatctattttcaaagacaggggtctggaagtcgtttttctcctcccacattcaatctgtcatctccttctgccactgtgttctaacatttcccttaagtttgggccctctcctcaagctcctcactgaaaagcactgtctaagctggatgcatttcacacgagagcttctgtggttggactgcttaagttaaaccagcctccacgagggtgtccagcagagaggtgcacctgagggattagggcaacaacctaactcgggcctcagttactgcagaattcaatttgccagaggtgccaacgtgaagaccaaaggttgagtcttacacaggtcttcctgttttgtttctttaaaccttgaacgttt

SEQ ID NO: 676503 - DNA, 959 bp, Homo sapiens
caacaaaatacagctgaggttgcaatgtgtcagcaagaatgtcaaggaggaagtcagagggtcaaatcagctggggcttggcccatttaccctaggtggtgttcttaaagactcagtggttcattctgcttggcagcttaaagagccattgaggttcagaactaaaaatgtgtgggccaggaagagggcagtgaatgactgggaccaacttgccagtgtctcccaggggcaccggctcagataactggaagtctggaagctttctcatacgcagccagtcccgtaagcagctcttggcaagactraaaaaaaaaaaaaaaaaaagaaagaaaaaaagaaaagagcttcccacttgtgtttcttaactgtaactgtgcctaagaatcacgtggtgcttgtcaaagtgcatattcctgagccctactcacaggcacttacacgctcctttcggggttgggcccagagatcagcattttcacaggcacaccaggtattccagaataagatggtctgtggagcacgttttcagaaatgctgccttaaagccttccacgtgtcccagctgtctaatcactgtatgagggtccatgatttaatctattttcaaagacaggggtctggaagtcgtttttctcctcccacattcaatctgtcatctccttctgccactgtgttctaacatttcccttaagtttgggccctctcctcaagctcctcactgaaaagcactgtctaagctggatgcatttcacacgagagcttctgtggttggactgcttaagttaaaccagcctccacgagggtgtccagcagagaggtgcacctgagggattagggcaacaacctaactcgggcctcagttactgcagaattcaatttgccagaggtgccaacgtgaagaccaaaggttgagtcttacacaggtcttcctgttttgtttctttaaaccttgaacgttt

SEQ ID NO: 676504 - DNA, 959 bp, Homo sapiens
caacaaaatacagctgaggttgcaatgtgtcagcaagaatgtcaaggaggaagtcagagggtcaaatcagctggggcttggcccatttaccctaggtggtgttcttaaagactcagtggttcattctgcttggcagcttaaagagccattgaggttcagaactaaaaatgtgtgggccaggaagagggcagtgaatgactgggaccaacttgccagtgtctcccaggggcaccggctcagataactggaagtctggaagctttctcatacgcagccagtcccgtaagcagctcttggcaagactaaaaaaaaaaaaaaaaaaaagaaagaaaaaaagaaaagagcttcccacttgtgtttcttaactgtaactgtgcctaagaatcacgtggtgcttgtcaaagtgcatattcctgagccctactcacaggcacttacacgctcctttcggggttgggcccagagatcagcattttcacaggcacaccaggtattccagaataagatggtctgtggagcacgttttcagaaatgctgccttaaagccttccacgtgtcccagctgtctaatcactgtatgagggtccatgatttaatctattttcaaagamaggggtctggaagtcgtttttctcctcccacattcaatctgtcatctccttctgccactgtgttctaacatttcccttaagtttgggccctctcctcaagctcctcactgaaaagcactgtctaagctggatgcatttcacacgagagcttctgtggttggactgcttaagttaaaccagcctccacgagggtgtccagcagagaggtgcacctgagggattagggcaacaacctaactcgggcctcagttactgcagaattcaatttgccagaggtgccaacgtgaagaccaaaggttgagtcttacacaggtcttcctgttttgtttctttaaaccttgaacgttt

SEQ ID NO: 676505 - DNA, 605 bp, Homo sapiens
gtggatgtgatctggcctgcatccctggcctttgatttcatgatccctggctgcatcgaggtctccatctacaattcatgattccttaaattctatggagttggaacaacctttttgtgcatagtcctgcttgctttcttctccatttcttaaaagacagatttgaatcccatccatttaatcctcatttggtaaagtgaggctgggaatcaccatggtgaagaaaaagaaaaagtagaatctgcccatagaaagagaatgagttgtacatcttgctcttttggaatgggatgtcctgtgggaaaggactggatyatttctgtaatttttaatgcaactgtttgcaggcataaatgctcactgagagctcaatagatattcactgatgataagacatgtataaaacagattacagcgtatgttcttcagttaccttctagggtgtttttttgtattggtcactgcttgaacagatccttctattccaccatattagagctctgtggaaatacaaatatttttgttgtaacaacatgctgtaatattgggaattcagtcattgccttttccctcccaagatactttttgctttactttgatgtttc

SEQ ID NO: 676506 - DNA, 623 bp, Homo sapiens
tgagaaggaagcctaatgcagtgcttagcaggaactatagttgcctaaatctctgagttggtagccaaacaagaaatggacctgagattagaatatcattgcgggaaggggaaaggggatgtaacgccaagtgtttttgattgcawcctagaaaaagcagtgttggctgagtgaacaaaggggaatttatgggaaaggcaatgggagctgaattgtcaggaccctggagaaccgggcttggacacatcgagggagtagtaaccataaccattgaacaatctgctcagccagtttcccagtttttttgaccctctgctggacctagctttcaaaatttaatcaggctttcacaattgcatttagcctatatctagcaagtgtctgtattatctgtgaagagttataaagaccctgcactcaaagaggtaagcatgtctatggtacatattaggccaaatacaacacaatcagggctgaggcttcaaaaataaagagaggacacgagggtaaaaggatggggaaagacttcaaaggaaaaacactgcaaatgggcactggaggtggcaggattttgtggggaagtcagaactatttcaatctgcaatggaaatagtgatgatggt

SEQ ID NO: 676507 - DNA, 623 bp, Homo sapiens
tgagaaggaagcctaatgcagtgcttagcaggaactatagttgcctaaatctctgagttggtagccaaacaagaaatggacctgagattagaatatcattgcgggaaggggaaaggggatgtaacgccaagtgtttttgattgcaacctagaaaaagcagtgttggctgagtgaacaaaggggaatttatgggaaaggcaatgggagctgaattgtcaggaccctggagaacygggcttggacacatcgagggagtagtaaccataaccattgaacaatctgctcagccagtttcccagtttttttgaccctctgctggacctagctttcaaaatttaatcaggctttcacaattgcatttagcctatatctagcaagtgtctgtattatctgtgaagagttataaagaccctgcactcaaagaggtaagcatgtctatggtacatattaggccaaatacaacacaatcagggctgaggcttcaaaaataaagagaggacacgagggtaaaaggatggggaaagacttcaaaggaaaaacactgcaaatgggcactggaggtggcaggattttgtggggaagtcagaactatttcaatctgcaatggaaatagtgatgatggt

SEQ ID NO: 676508 - DNA, 623 bp, Homo sapiens
tgagaaggaagcctaatgcagtgcttagcaggaactatagttgcctaaatctctgagttggtagccaaacaagaaatggacctgagattagaatatcattgcgggaaggggaaaggggatgtaacgccaagtgtttttgattgcaacctagaaaaagcagtgttggctgagtgaacaaaggggaatttatgggaaaggcaatgggagctgaattgtcaggaccctggagaaccgggcttggacacatcgagggagtagtaaccataaccattgaacaatctgctcagccagtttcccagtttttttgaccctctgctggacctagctttcaaaatttaatcaggctttcacaattgcatttagcctatatctagcaagtrtctgtattatctgtgaagagttataaagaccctgcactcaaagaggtaagcatgtctatggtacatattaggccaaatacaacacaatcagggctgaggcttcaaaaataaagagaggacacgagggtaaaaggatggggaaagacttcaaaggaaaaacactgcaaatgggcactggaggtggcaggattttgtggggaagtcagaactatttcaatctgcaatggaaatagtgatgatggt

SEQ ID NO: 676509 - DNA, 805 bp, Homo sapiens
gtggcagcgggcgcctgtaatcccagctactcgggaagctgaggcaggagaagttcttgaacccaggaggcagaggttgcagtgagcygagattgcgccactgcactccagcccgggtgaccgacagagcgagactccgtctcaaaaaaaaaaaaaaaaaaaaaaaaaattcccctcgttaatatgtgtttattgttaaaaacttaggacgaaagttaaaaaaaaaaacccacactacttaattacagagatcttcattaacataattctgtatttattttctataggaaaatttttaatgctaactttctagaactcagtcaaaaactactgtaatcattttaatcagctgattaatttgctctagcagcttaaaatgtttttgctccattttactttttctactgcatgatagaaaaattgttgttctgtgaatgagaaagttaaaatttgtgctcaatggcaggaccccagagagatgtttctgggaattgagattcagaggcagcctgcattcagctttcttcaggttacctttattaatgatgcccttgatcagtaaggtggattacttacccattaacacttattctacatcagccttaatgttttagggaaaatatatttactaagctgtttgtgtacaggagtatcacacagtagatgaagcacttatgtttctggaaaaaaagagataaattaggaagctttcagatttgtttataaaagaaatatgaggctaggaaagaagcatgatgacttttgtgatacacacagtgagtcagcaacccattttccagaagtt

SEQ ID NO: 676510 - DNA, 805 bp, Homo sapiens
gtggcagcgggcgcctgtaatcccagctactcgggaagctgaggcaggagaagttcttgaacccaggaggcagaggttgcagtgagccgagattgcgccactgcactccagcccgggtgaccgacagagcgagactccgtctcaaaaaaaaaaaaaaaaaaaaaaaaaattcccctcgttaatatgtgtttattgttaaaaacttaggacgaaagttaaaaaaaaaaacccacactacttaattacagagatcttcattaacataattctgtatttattttctataggaaaatttttaatgctaactttctagaactcagtcaaaaactactgtaatcattttaatcagctgattaatttgctctagcagcttaaaatgtttttgctccattttactttttctactgcatgatagaaaaattgttkttctgtgaatgagaaagttaaaatttgtgctcaatggcaggaccccagagagatgtttctgggaattgagattcagaggcagcctgcattcagctttcttcaggttacctttattaatgatgcccttgatcagtaaggtggattacttacccattaacacttattctacatcagccttaatgttttagggaaaatatatttactaagctgtttgtgtacaggagtatcacacagtagatgaagcacttatgtttctggaaaaaaagagataaattaggaagctttcagatttgtttataaaagaaatatgaggctaggaaagaagcatgatgacttttgtgatacacacagtgagtcagcaacccattttccagaagtt

SEQ ID NO: 676511 - DNA, 625 bp, Homo sapiens
aatgtcagtagtacctccattgatatacccttctctaatgggattctaccagggttggagagttaggaaattgttactttcttcatacatggagaggagcataagtgagccatgtgccattctggactgaggtgccaccatggtgccagcatttgataatagtaaactcatgaccccttattcatagtttggaaatttaaaaaacgctggaaaatgtgacgtttcttcataattcagttagcagtaaaaccttgcctgtgttgatgtaaaggtatttatagtctttatttacctggttttgtgtgaatgttaatgcgcttgactgtagggtgctggcctagacctggcttggggctttatwtagtaaatatgctgtatcactcttctaaagtttgtaacattctatacttggaaacactttggtccccaaaggtttcagagaagagattgtgaacttatatattgaactaaatttttgccaaatttggcttattttgtgtgtgtgtgtgtgtgtgtgtggtttaaggagttgaaagtttaatagaagaaaggagagaggagagcatctccttgcaagagagagagagaaagagagaaacgtctgaaaaagtccaaagttggctta

SEQ ID NO: 676512 - DNA, 1825 bp, Homo sapiens
cattatggttgtataagataacataaaattgccgtataattcagcagttcaactccttggtgttagtcgaagagaaaggagaacatgttcatacagactttatgtgaatattcatggcagtgctattcataatagtcttaaaaactggacgcaacctaattatggtatgtctgtactattgaatattatgtaacaacaaaaagaataaaatgttaatacatgaaaagacatgttgaatcttaatgaaacttttaaaagttatgctaagtgaaagatgtcaaacccaaaagaataaatactgttcaatttcattatatgaaaattgaaaattggcaaaactagtgatataaagcagattagtgattgcctgggctggtagttgagagatggcatttgactacagaaagtaccaggaaactttttagggtgayagtattattattaatatatcttgaatgtggtgggagttataaggttgtgtgcaattatgaacactcatcaaaatataaaattaaaatgagtgacttttcttacaatttattattttgtcattaatttgtaaaattataacttgtaccccagtaaaaacattttaaaaatatatagtctctgccagtttatcttatttgcttctactaatgaagcattctgcagtgtttcatcattaaatataataataaaggattatttttctaagcattttatattcttattctttcagtagtcattatatgactagagaatttggaaaaagtttccttttttcttttttttaaaccatattaatccaatttgcagaccttttatttatttttccaagggcattatttctactatgaaaagactggacaggtttatgggacacattttttttgttttgaatcaaagagcttgtcataatattaaagaaaaccaacaacgttggtatgattcaaaaggagctctctcaaccggctgtctctggtaagacaggcccagtaatgcccacctgcaaggctgttgtgaagatgaactgagaccacctatgtcagatgtagcagacagcatatgccctcagaaggctggtagctttactgtgtttctccataacacttctcatttctcggagacaaggtcagggaatgttttgaaatgtttatttgaaaagtatttattgtgcatatattatttattcatttacttactatgtccttgaaatggagactgtattatacagatattcaggtcagctttaacatatcctttaggcctaatcacttttttctttcaacatgcctaatgtagcataatagttaatagcatagtagtttgacttttaaaattgatttctagggaagaatgtaaatataggaaagcttcctgatagagattatctaaacttaggcataaataataagtaaaactctgaatttaggtatgtaattgtagaatccctttgattataagcaagttgaaaaaaattgttttttacctagatgagtttattttaaaaagttattaagcatttataaaggagccttttttggggtggctcctaattattaccaagtttccaatattataaactctgtgcttgagttgaatattatagtttaggcttctatctcctagtagtgtttccaagcaaacagtttttccagtctctcagaagttcatttcagttaccatctcctcactattcctggagtgtatgttgcttatggtagcagctcaagggacagatgtatgaatgagagcaatccataaatgtttgaattcaaattatagtttttttaaaataaattctgctataaaaagaaatgaaatatttgtccatgctaaaaca

SEQ ID NO: 676513 - DNA, 1366 bp, Homo sapiens
gggctctatgttgctttttttgagttagactctctggcatagactttgtctttgaaagaggatttgtaagtcgctgtttatttattcttttactcattcattccacattcatagagcactggattagtcaggttctccagagaaatagaaccaacagaaatagaaccaaagacatgcattataagaaattgtcttacatgattatggaggctgacgtgtcccaagatctgcagggtgagttggcaagctggaggcycaggagggccaatggtgtagttgtggtctgaaggctagcaagcttgagaccaaaaaaaagctgatgtttaagctctagcataaaggcaggaaaaactcaaagtccagtttgaagactgctgagtaggaataattccctcttatttgggagaggatcagcctttttttctattcaggccttcaactgataggacaaggcccactcacactggggagagccaacctaatttactcagctcattggtttaaatgttaatctcattcaaaaacaccctcacagacacacctggaataatgtttgaccaaatatctgggcaccctatggcccagttaagttgagacataaaattaatcatcacagggaccaacaatgtgtcaggcatattccaagacaccagggacacagcagagaacaaataaacatgagccctgccttcatggagtttaccctttagagggagggtggatcaaaaatcaagtcaatgaataagacttttagtgaaggatgagcattatgatcaagggtggctgtttcattctggtgatcagggaggacttttctgggcaggtgacacttgaatggagacctaattacataaaggagctggccatagaatgtgctgggggtaggggggtgtgttctaggcaggggagtaaccaggcaggactgagcttggtgaatctcaggaacagaaggctggtggggggagcatggttccgggtgggggcagggtaggggtcagtgggggaccagagaaggcagaggacagatcatgcagagcctgtaggctggggaaggaggctgcgtgttattcattcggcctgctgactcaccccagtccttggctaggacagcaaccctgctgaaggaccaggatctaaaagtgtcccttccctcagcaatgatgcccacacttctgtgcctttgcacaagctgttctctctgctgggatgccttccccacgttctctgtccagagattgcccagatatcctttaagacccagcttacattgcaccccctctccaaagcctttccaggattttctgggcagtgagccagcctctcctctgtgcagccatagtcctttgtaaatacactaatgctcaca

SEQ ID NO: 676514 - DNA, 1366 bp, Homo sapiens
gggctctatgttgctttttttgagttagactctctggcatagactttgtctttgaaagaggatttgtaagtcgctgtttatttattcttttactcattcattccacattcatagagcactggattagtcaggttctccagagaaatagaaccaacagaaatagaaccaaagacatgcattataagaaattgtcttacatgattatggaggctgacgtgtcccaagatctgcagggtgagttggcaagctggaggctcaggagggccaatggtgtagttgtggtctgaaggctagcaagcttgagaccaaaaaaaagctgatgtttaagctctagcataaaggcaggaaaaactcaaagtccagtttgaagactgctgagtaggaataattccctcttatttgggagaggatcagcctttttttctattcaggccttcaactgataggacaaggcccactcacactggggagagccaacctaatttactcagctcaytggtttaaatgttaatctcattcaaaaacaccctcacagacacacctggaataatgtttgaccaaatatctgggcaccctatggcccagttaagttgagacataaaattaatcatcacagggaccaacaatgtgtcaggcatattccaagacaccagggacacagcagagaacaaataaacatgagccctgccttcatggagtttaccctttagagggagggtggatcaaaaatcaagtcaatgaataagacttttagtgaaggatgagcattatgatcaagggtggctgtttcattctggtgatcagggaggacttttctgggcaggtgacacttgaatggagacctaattacataaaggagctggccatagaatgtgctgggggtaggggggtgtgttctaggcaggggagtaaccaggcaggactgagcttggtgaatctcaggaacagaaggctggtggggggagcatggttccgggtgggggcagggtaggggtcagtgggggaccagagaaggcagaggacagatcatgcagagcctgtaggctggggaaggaggctgcgtgttattcattcggcctgctgactcaccccagtccttggctaggacagcaaccctgctgaaggaccaggatctaaaagtgtcccttccctcagcaatgatgcccacacttctgtgcctttgcacaagctgttctctctgctgggatgccttccccacgttctctgtccagagattgcccagatatcctttaagacccagcttacattgcaccccctctccaaagcctttccaggattttctgggcagtgagccagcctctcctctgtgcagccatagtcctttgtaaatacactaatgctcaca

SEQ ID NO: 676515 - DNA, 1366 bp, Homo sapiens
gggctctatgttgctttttttgagttagactctctggcatagactttgtctttgaaagaggatttgtaagtcgctgtttatttattcttttactcattcattccacattcatagagcactggattagtcaggttctccagagaaatagaaccaacagaaatagaaccaaagacatgcattataagaaattgtcttacatgattatggaggctgacgtgtcccaagatctgcagggtgagttggcaagctggaggctcaggagggccaatggtgtagttgtggtctgaaggctagcaagcttgagaccaaaaaaaagctgatgtttaagctctagcataaaggcaggaaaaactcaaagtccagtttgaagactgctgagtaggaataattccctcttatttgggagaggatcagcctttttttctattcaggccttcaactgataggacaaggcccactcacactggggagagccaacctaatttactcagctcattggtttaaatgttaatctcrttcaaaaacaccctcacagacacacctggaataatgtttgaccaaatatctgggcaccctatggcccagttaagttgagacataaaattaatcatcacagggaccaacaatgtgtcaggcatattccaagacaccagggacacagcagagaacaaataaacatgagccctgccttcatggagtttaccctttagagggagggtggatcaaaaatcaagtcaatgaataagacttttagtgaaggatgagcattatgatcaagggtggctgtttcattctggtgatcagggaggacttttctgggcaggtgacacttgaatggagacctaattacataaaggagctggccatagaatgtgctgggggtaggggggtgtgttctaggcaggggagtaaccaggcaggactgagcttggtgaatctcaggaacagaaggctggtggggggagcatggttccgggtgggggcagggtaggggtcagtgggggaccagagaaggcagaggacagatcatgcagagcctgtaggctggggaaggaggctgcgtgttattcattcggcctgctgactcaccccagtccttggctaggacagcaaccctgctgaaggaccaggatctaaaagtgtcccttccctcagcaatgatgcccacacttctgtgcctttgcacaagctgttctctctgctgggatgccttccccacgttctctgtccagagattgcccagatatcctttaagacccagcttacattgcaccccctctccaaagcctttccaggattttctgggcagtgagccagcctctcctctgtgcagccatagtcctttgtaaatacactaatgctcaca

SEQ ID NO: 676516 - DNA, 616 bp, Homo sapiens
taatttctgttatcttcagttattccttctgttccctctagttaggattacttgattgttttaacaccccgttctgctccccactccaggtgggctcagcccccttggcaatagtgagggtagggagaatattcaagcagaagtttttcttgcttattttgatcctaggctttgttttcttggtgcgtggttacctttatgtacccacattgactagtagaactgtcaaagctgggtgtatgtgaatttttacctgcactgactgatgacaggagagtccatagggtagaagttagtctgtagcaccccacaagttttgaaacctaccaagttggtttcatacwttataagacctgaaatcctctttttttgattttctttttaaaataattccatttaggtcccttcctgtatttcttctgcaatttttctatttccacctacacggaaccatataaaaccatattaagtaggcatttcctgttgtttcttcagtcattctactttaaaatgagggtcgttgtcttagacaaccttgtttgtagtcctaggcaatcttgtttggtacctgagggataatcatgagaaaatgacaaatcttacagtaatatacata

SEQ ID NO: 676517 - DNA, 609 bp, Homo sapiens
ggatgtgtgtcattctaagttcctgcaacttttcaaacacccctcgggctagcgtgtggctgcacggtgtccatttgtgcaggccaccactcctcttgcatctgggtctagccacctctccttcttgactyaccatagttcattttgtaccatgctttcagaatgagctttctcaaatccaagtctcaccacggttcttcccagctgaaaacccttgtgcggttccctttgcctcacaggataatacatggtgtggcttacggaaccctgcaggtctggccctaggcccctggacacagacctctcaccactcttggaactttagccaggacaaagttttctgtttttagtttcttaccatgttctctgggccgaggagtcccagtgcccacgttcatcccacttgcaggcacccctggacggctgcccccagctccccaactgcctgcattctcccctgccctcctcactctgttggaatagctgagaatagccgatttctgggcagccggcctcctgtgtagactgtcctgtgtagactgtcctgtgtagattgtctgtgtagactgtcctgtgtagattgtctgtgtagactgtcctgtgtagact

SEQ ID NO: 676518 - DNA, 599 bp, Homo sapiens
atcctgcagagttgggattgcatctaaggagaggctggaggaacattcagacatctctcttttttcctcccaaacatcgtcctttggtctgaagacattcagaccttgtccctcagtccagctatgagaaaatgtatccaaattttgcacggtgacactaatagattaaaaataccatgttgagctgaattatagctcgaacattaagacaggtcagtaaagttgtgagattttttttcctttcaaaatttcccatcactgtcataaagctgattatgaaagaaatgtaaactttgtttcaccatcckatatggtttggctctgcgtccccacccaaatctcatcttgaattgtactcccataattcctacgtgttgtgagagggacctagtgggagaaaatttgaatcacgggggcggtttcccccatactgttcgcatggtaaagtctcgtgaataagtctgacaagatctgatggttttaccagggatttctgcttttgcatcctcctctcttcacttgccaccaccatataagaagaggctttcacctcccgccatgattctgaaggctccccagccatgtggaactgtaagtcc

SEQ ID NO: 676519 - DNA, 2468 bp, Homo sapiens
gactctgttccaggcctctcctccaccctctgatcattcgctggaaatctctgytgttcctgggcttgtggcagcagaattccaatcttcacaccgtgtcctccctgtgtctgggtgtctgtgtccacatttcctcttttttctcaggacgcctgtcatactggattaagggcccaccctaccccagtctggcctcatcttaactaattatgtgtataacaaccctatttccaaatgagctcacattctgaggcgctgggggttaggatttcaacatatgaacttttgagggacatggtggaatccataacagccagagactcctctcctgccaagcacatcataaggacctactgcattcaacccactctgcctgtggcactgtgcctctgtgcctgtctagagggccagtctgcccatttgattttattcagaaaggtttcctcaatgcctcccacacatgtggagaacatggaacagaacagagcaggaggcttccctgaagccattctcgtgagtgccatgttccttttcatcacaagacttggttctagcagacacccaagggaggtgagctttttccaaagctcagagagttttcaggctgaaacttcccaccctgcagggcaagcttactttcaaacccccattcagggaggccatttgtggggtctgtctggctctgctggtttgagttctgtctgcctctgagaagccctccccagcatcctccaatctcccagggcccctccaagggtggttctgcctgtgtctcctctcacaccttctcatcccttggactggtcatggcttgtttgcttgtctgctccccactggactgtaggctaatggcgacagggacctggtctcagtcattgctgcatcccctgtgcccagcccagagcttcacccccaactgggacagaaggccacaaactacagcccctgggccatatttcatcccccaaccacctgtttttgtctagcctgtgaactaagaatggtttttacattttttaatggttgggagggaaatcccccaaaagaatgatattttgtgacatgtgaaagtgatatgaaattcaaaggtcagtgtccacaaataaagttttactggaaaatagcaatgctcattcatttatatattgtctatggcttctttagccctacaatagcagaactgagtagatgcaacagaggccatctgtctcctaaaacagaaaatatttataatctgtttccttacagaaaaagcatgtgccaacccctctactagacactggggagatggatgttgactgatgatgaaacaattggataaatggtccccagatcccaggcagctcaagctgccttttgctattagttatttttatatgtgagatcctgaaggcagggattgagtcttcttttccttttttggctccaccaaagggtcagaaggtcttggaaaatgttgatgctgatttgctgccttggacaccaggaagcggtggtgcacggaagggcttgaagacgcgggtgctccttcatcgctggtcggtagagtccttcacccttggtctggaggtcaggctgtggttgctgcggtgcattctctcagctgggagaccatccctgcatgcgctgtgagaggagacatgaggcctgcagacctgctagaagctggggggaacaccgccgggtccactgtcggacaaagtatttgactttcaagtgaaaaccaaacctagggcacaaaggagaaagtatagatgtcaggtactgacagggctgtatttaaacctcatctttggttctttctaattctgtgactttaacacaagctgctgcgcctttgttttctcatctgcaaactggggacagtaatggttgtcgtaggatctcagaaagacgatggatgtataaaaagatgttgagagacatctttccgtatctcaggaattggaatcaatactcagccactcagtaaatactgaatacctgctatgcaccaggcactggttcaggcttgtgggatataccagtgctatagatggaatgtttgtgcccaagattcatatgttgaaacctaatccccaacatgatagtatttggagatgaggcttttgggaggtgataagtcatgagggtggagccctcgaatgggattattgcccttataaaagaatctcccgagagaccctcactctttctaccatgtgaagacacgaaaagatggttatctatggaccaggagacagaccctcactagacactgaaccttgccagtgccttcatcttggacttcccagcctccagaaccatgagcaataaatgtctgctgcttaagcaacccagcctatggtattctgttatagcagcctgcatagactaagacaatcagtgaacaaaacaaagaaagcacctcctctcaaggggcttctattttggcagtggagacaaaaaataaacaacaaacataatga

SEQ ID NO: 676520 - DNA, 2468 bp, Homo sapiens
gactctgttccaggcctctcctccaccctctgatcattcgctggaaatctctgttgttcctgggcttgtggcagcagaattccaatcttcacaccgtgtcctccctgtgtctgggtgtctgtgtccacatttcctcttttttctcaggacgcctgtcatactggattaagggcccaccctaccccagtctggcctcatcttaactaattatgtgtataacaaccctatttccaaatgagctcacattctgaggcgctgggggttaggatttcaacatatgaacttttgagggacatggtggaatccataacagccagagactcctctcctgccaagcacatcataaggacctactgcattcaacccactctgcctgtggcactgtgcctctgtgcctgtctagagggccagtctgcccatttgattttattcagaaaggtttcctcaatgcctcccacacatgtggagaacatggaacagaacagagcaggaggcttccctgaagccattctcgtgagtgccatgttccttttcatcacaagacttggttctagcagacacccaagggaggtgagctttttccaaagctcagagagttttcaggctgaaacttcccaccctgcagggcaagcttactttcaaacccccattcagggaggccatttgtggggtctgtctggctctgctggtttgagttctgtctgcctctgagaagccctccccagcatcctccaatctcccagggcccctccaagggtggttctgcctgtgtctcctctcacaccttctcatcccttggactggtcatggcttgtttgcttgtctgctccccactggactgtaggctaatggcgacagggacctggtctcagtcattgctgcatcccctgtgcccagcccagagcttcacccccaactgggacagaaggccacaaactacagcccctgggccatatttcatcccccaaccacctgtttttgtctagcctgtgaactaagaatggtttttacattttttaatggttgggagggaaatcccccaaaagaatgatattttgtgacatgtgaaagtgatatgaaattcaaaggtcagtgtccacaaataaagttttactggaaaatagcaatgctcattcatttatatattgtctatggcttctttagccctacaatagcagaactgagtagatgcaacagaggccatctgtctcctaaaacagaaaatatttataatctgtttccttacagaaaaagcatgtgccaacccctctactagacactggggagatggatgttgactgatgatgaaacaattggataaatggtccccagatcccaggcagctcaagctgccttttgctattagttatttttatatgtgagatcctgaaggcagggattgagtcttcttttccttttttggctccaccaaagggtcagaaggtcttggaaaatgttgatgctgatttgctgccttggacaccaggaagcggtggtgcacggaagggcttgaagacgcgggtgctccttcatcgctggtcggtagagtccttcacccttggtctggaggtcaggctgtggttgctgcggtgcattctctcagctgggagaccatccctgcatgcgctgtgagaggagacatgaggcctgcagacctgctagaagctggggggaacamcgccgggtccactgtcggacaaagtatttgactttcaagtgaaaaccaaacctagggcacaaaggagaaagtatagatgtcaggtactgacagggctgtatttaaacctcatctttggttctttctaattctgtgactttaacacaagctgctgcgcctttgttttctcatctgcaaactggggacagtaatggttgtcgtaggatctcagaaagacgatggatgtataaaaagatgttgagagacatctttccgtatctcaggaattggaatcaatactcagccactcagtaaatactgaatacctgctatgcaccaggcactggttcaggcttgtgggatataccagtgctatagatggaatgtttgtgcccaagattcatatgttgaaacctaatccccaacatgatagtatttggagatgaggcttttgggaggtgataagtcatgagggtggagccctcgaatgggattattgcccttataaaagaatctcccgagagaccctcactctttctaccatgtgaagacacgaaaagatggttatctatggaccaggagacagaccctcactagacactgaaccttgccagtgccttcatcttggacttcccagcctccagaaccatgagcaataaatgtctgctgcttaagcaacccagcctatggtattctgttatagcagcctgcatagactaagacaatcagtgaacaaaacaaagaaagcacctcctctcaaggggcttctattttggcagtggagacaaaaaataaacaacaaacataatga

SEQ ID NO: 676521 - DNA, 977 bp, Homo sapiens
tgacactatagaatgggaggtcatcaaaggcttgggccattatgaggggagagaagagaggattaagcacaaaatccctgagctaaaggttttacatgtacacacacataattttatttactactcaaatcaaaatgctgtgagatagtgtatcaataacgatgctttcggaatctgacaaatttcatagacaaaaaggcagtaaagacacaaatacattgaataataaaataaatgaaatagataaagcaacttgtatgttacagaaagagaaaagatttggtatctgtcatatggaaaacctgcctttttatttgtccgtggatcacataccaaatgtaagataaatctccctgagaattcataataagatgtgatatggtttggttctgtgtccccactcaaatttcacctctaactgtaataatccacacatgttgtgggagggacctggtgggaggtaattgaatcacgggggcgggtttttgccatgctgatctcatgatagtgaataagtctcatgagatctgatggttttataaaggygagcttccctgcacatgccctcttgctaccaccatgtaagacatgactttgctcctcctttgtcttacaccatgattatgaggccttcccagccttgtggatctgtaagtcaattgaacctgtttcctttataaattacccagtctcgggtatgtccttattagcagcctgaaaacagactcatacaagatgtgactagtctcaagaaggaagtgaacaaagacattggtaatcatataggtaaatctaaacaatcattagcaacaatagtgacaagtgactgctttgagggatacagaaacaaggtgaaattaaagccctgggcatgtaacagtcagcacctacaattggagggttttgaattatgcaggaagaagatggaaatattgaatatagatttaaattgaatatacctcttaaatattaagaaa

SEQ ID NO: 676522 - DNA, 2186 bp, Homo sapiens
cagctttataaagctttgctgcccatagggtaaattcctaaaacctaatctaatttgaggactgcgtttagcattaacctctacgttttcagctgactggatcccgtttttggctcgctgtactttgtgcttcagctgtgtctactgaactccaatgagcttccactgaggaagacaagaccatcagcggatccttacattatccacttagctctcacactgcagctcaagagccccatttgcytctatgcataattaatcccatgggacaaaggacaagcgagttcatatgagcaaatgaaaatccagcccagctgccgtgagaaacccatgacccactttgggggttggggagtagagtcagctgcaggtgcacagaatagtgttcttattattacattttatgcctccaacacatatttggaaagaacccttgtcagctgccagtcatctctttctatattacccaagggctaaggaggaaatcataatttaaaaattaatttcagaagtcatatgtaggatgaaataagtacttaaaagagaatcagtgaatataatttatttagactgaaaaaatattgggacaagaaccaacaatgctgcacaaaacaggtgattctgtttcaggtcctcatcaaggttcagaacatgaggccaaatgctctttgcaaatcttttcacctttcaatttcagtgtctttatgtttaatggtattaacggaggcaatgatgatgataagttttaagtaactattcaacttattggttgatgacaaaatggctaacacatacaatgacaatgaggtttaaaactcagtcagttgtccagtgtgtttctgcaagatgccagacatctgcatgtttccaaattattggatgtcacttcaatgctcattatatatctcagtgttgacatttgagtttcataaagacatggcctataccttatttctctatactttcattccatctttcttattattttatcaatatttcacaggaaagtggttctaagaattggatgtgaagtgcacctgtaaaaccggagagctatttctggctgatcagaatagaagtggttgcttccaatgcatgcgatggcttccacatgagtattgtcttgtttcaaaacttctttgtaatattctgctgctgatgacatattgttcatttcctattctccatcaagagagaagagcaatattttattaatattggacaaaaaattatttttttctgactgatttaagtccattcattcaataagtatttattgagaggctaccatgtgccagactccattctagaccctggggatacaatatgaacaaaaagagaaagtcactgtcctcagggaggtgacatctggtatgaaaggcaaacaaatatgtaatataagagaaggttaagtgctgtgaagagaaacagagaaggagagagagagcagggagagtgtgcttcagaaggggtggcggaaggggccactttggaggaggtgctatttgaaaagacctgagtgaagtgaaggatcaagccctgagcatatctgggggaagctcactctgggcagagggaagagcaaatgtatgagcctgagaggggaacgtgcttgtcacatatgaagaaccacacgaaggtaaatgaggctgggaagagggaaagtggcacaaaaggagatgagaggcagccagggcctttgtaagccacggtgagaacttcagatttttttttttctagttgagagaaatccattaggagaggaataacaatcatatttgcattttgaaagaataacttgactgctgcatgctagacataccaaaataggaaagagtggtagcaggaagatcaaaagtccaggaaagaaaagacagcaaccaagaccaagcttagaaatacatacaaaatgaaaaactaaataaaccttctacagttattatatattctttctaaaatactgataatcataaatgtatgcatctaatgttatcaatgaatgttatatttctcaagtccaccttcaaggccctgttcaggctccacatccttcatgaagatttccctaatgccttcacttcacatagctgtcttctacctctcaacttacatggtgtttattatgtgaacttgttctcattagagaaggactcatacttttcattaaattttaatcatatcaaata

SEQ ID NO: 676523 - DNA, 657 bp, Homo sapiens
cattgctgagctataggtgtagctcatacttacctctatctttttattatttttattgtttggggacaggatcttgctctgtcgtccaggctggagtgcagtggcacaatcatgactcattgcctgctcactgcagcctcaaccttcaggtctcaggtgatcctcccacctcatcctcccgggtagttgggactacaagcacgcaccatcatgcccagctaatttttttttaaattttttgtagagacgtggtctcgccatgttgcccaggctgttcttgaactcctggactcaagtactctgcgtgcttcaatcttccaaagtgttggaattacaggtgtgagccacagcactcagcaacctcagtctttttgatagagcaaacatagactggcaccatgaactttccatctctgaacattcttacctacactctggttcttgtaaccatgccatctttggagaaggcagatgaggcagagagagaggcagaacatgtgaacattgagtgacccacagtagtgtggtcctttcacctgcmtgatctaaatgtgttcacctactgaatctctttccccttgcttcccacttttttctaaaacaattcagtctccatagtgactgtcaaaaattgccagtgctgactatcttgcaagt

SEQ ID NO: 676524 - DNA, 2914 bp, Homo sapiens
tggctctgctttgtgccattctgagccccagagtgaagaagcagcagctacaagggttttgttcttctcatagaggaggcagacatgcacgtatgataggaaaaatacacaatgttactaacaatcgaagctgagtattgacatgccatcatttctgaccgcattctgtcagcccatgtaaatcacatggctaagcccaacattagtgggtcaaggacacatttttgaccttttgtgggaggaaatgcaaagtcacatggcaaatactgtagatataggaagaggagaagaaayggacataacactctctaccaccttctactaaaaaagtatgtggacaaaaatggtatacattgcctctacctaagacatttaatgaaacagtttagtttaatgagaaagagcataaaatctaaaacctaaatgaccataaaaaggatatcttatatgagcttcaggtatttgtaaaatataactggtaagctaactgaagataattgtaaaatataactggtaagctaattgtaaaatatgactggtaagctaattataacttgaagctaataatacaagatataattatcttgtataaagtcataaacttcatacaagataaatactttttctatactggtaatttccaaagtagctttaatgtcagaagcacatgaaatctatgttatataaaatattgatgccagacttttcctttggatattcgactgaacaggcattatatagggtacagatttgtgcatttttaacaagtcctcagatgattctgatattcagcaatatttaaaaactattagtctatgatataatttagtgatgttgtcataaatatattaaattcaaccatttttcaaatatttccaaagagaattttcatgaattctgttttaataaaaatgacaatctaataatggttgtatataatcacttttacagggcagaattctccaatatagcttgaaaaataagattaaaaattacatgcagaattgaaatgggttcatttgagaagttttaatgtgttcaaaatatattaaaatgagatattttcattttaaatcaattatatttaataaggagatatagagtatgtaaatattttataaatattcatgccatattaacattctataagtaaactatcaatttcagtagttcatattgagaagcaatgggaatatattatctacataatttatgatcaagaagaaatgattttgacataattactaatcttttggttgatttttaaaatcatgatcattttttcacatattatttatatccaccatttaattatagttctttggccagttttatagatccattcatgaacaggagcttaaggaggtatgtacaatagtagcaaataataagaagggaaaggagtaaatttggaagatttccaggaagattggagttgagggcaatgaaactaaaataaagatgatacaaatatttaggaatatgacaccaggtgcctgacatttttctacattctgttgatacattgtaaaagaaagacattgtcctacacttttcatcctttgtgggaaaaagtgtggtattgggaatacatttttaagagacaaggtctcaaatacaaaatatcctgcgtcgcaactttacaagtattgaagactgtataattctgggtacctagaatctggaagttgttttacgagcttgattatctgtatttaacatggatttttattttggctcctgtgacaatgaaaaatctttcttagcatgtcagaacaatttagtgatttgaatagtagagacatctatgatcaaatgatacagaaacaatcaatacaaacagtcaaatagctcttattcgaaggagaataaagaaagtcaaatagctaattcagtattgtgcaaactaagcctttttcaattttcagagatctacccgttagctttgttaaagatgatctgggtaactgaggcagttattattttgtcaatgcttaaatgcacttttgggaaaccttaccattttcatgaattataaaataaaatggcttttcattacattgaaaattatattttcttaatctacatctaatttctgtttttcctgcaatgattcatcgtttaccctaatgtcccaagtcactcaactatatgttataataattaatattgttttgtaattgataatacaagaactctatttacaaaatactctcagcccatagctggtttttctggtcctcatgataattctacaatttacagattaggaaactgaaatgtgggaagttaaatatattgtctgagactaggaaacaaactaatgtctgtcagtaactaaagctatgctcttttcattctgtcatggtattatggtgaaaataaggcaggaccttgcccatatttggttcagtcagtattactgtttaagcatacaggtttggaagtgaaatagctatctcacttgaagaaacttagcctaacttttttattcccatttcctcatctgaaaaaatggaaataaacatagtgccaaactgacagctttttggtgagtataagtgagactatgtattcaaaagcaaccaggaagcaatcagtcacactaaaacaaaaactgtgattctccttatataagttacttaaacacgtaatccttatggaagcagagaatggaatggtgattgtcaggtaccatgagttaagtgggtaacagcacattgttgctaattcaacattttgggaggctgaggtgggaggatcacttgaggccaggaatgtgagactagcctgggcaacatagtaaaactccaattctagttgggcacggtggcataaacctgtagctatagctacttaggaggctgaggtggaaggaacacttgcacttggcaggtggaggctgcagtgagcc

SEQ ID NO: 676525 - DNA, 2914 bp, Homo sapiens
tggctctgctttgtgccattctgagccccagagtgaagaagcagcagctacaagggttttgttcttctcatagaggaggcagacatgcacgtatgataggaaaaatacacaatgttactaacaatcgaagctgagtattgacatgccatcatttctgaccgcattctgtcagcccatgtaaatcacatggctaagcccaacattagtgggtcaaggacacatttttgaccttttgtgggaggaaatgcaaagtcacatggcaaatactgtagatataggaagaggagaagaaacggacataacactctctaccaccttctactaaaaaagtatgtggacaaaaatggtatacattgcctctacctaagacatttaatgaaacagtttagtttaatgagaaagagcataaaatctaaaacctaaatgaccataaaaaggatatcttatatgagcttcaggtatttgtaaaatataactggtaagctaactgaagataattgtaaaatataactggtaagctaattgtaaaatatgactggtaagctaattataacttgaagctaataatacaagatataattatcttgtataaagtcataaacttcatacragataaatactttttctatactggtaatttccaaagtagctttaatgtcagaagcacatgaaatctatgttatataaaatattgatgccagacttttcctttggatattcgactgaacaggcattatatagggtacagatttgtgcatttttaacaagtcctcagatgattctgatattcagcaatatttaaaaactattagtctatgatataatttagtgatgttgtcataaatatattaaattcaaccatttttcaaatatttccaaagagaattttcatgaattctgttttaataaaaatgacaatctaataatggttgtatataatcacttttacagggcagaattctccaatatagcttgaaaaataagattaaaaattacatgcagaattgaaatgggttcatttgagaagttttaatgtgttcaaaatatattaaaatgagatattttcattttaaatcaattatatttaataaggagatatagagtatgtaaatattttataaatattcatgccatattaacattctataagtaaactatcaatttcagtagttcatattgagaagcaatgggaatatattatctacataatttatgatcaagaagaaatgattttgacataattactaatcttttggttgatttttaaaatcatgatcattttttcacatattatttatatccaccatttaattatagttctttggccagttttatagatccattcatgaacaggagcttaaggaggtatgtacaatagtagcaaataataagaagggaaaggagtaaatttggaagatttccaggaagattggagttgagggcaatgaaactaaaataaagatgatacaaatatttaggaatatgacaccaggtgcctgacatttttctacattctgttgatacattgtaaaagaaagacattgtcctacacttttcatcctttgtgggaaaaagtgtggtattgggaatacatttttaagagacaaggtctcaaatacaaaatatcctgcgtcgcaactttacaagtattgaagactgtataattctgggtacctagaatctggaagttgttttacgagcttgattatctgtatttaacatggatttttattttggctcctgtgacaatgaaaaatctttcttagcatgtcagaacaatttagtgatttgaatagtagagacatctatgatcaaatgatacagaaacaatcaatacaaacagtcaaatagctcttattcgaaggagaataaagaaagtcaaatagctaattcagtattgtgcaaactaagcctttttcaattttcagagatctacccgttagctttgttaaagatgatctgggtaactgaggcagttattattttgtcaatgcttaaatgcacttttgggaaaccttaccattttcatgaattataaaataaaatggcttttcattacattgaaaattatattttcttaatctacatctaatttctgtttttcctgcaatgattcatcgtttaccctaatgtcccaagtcactcaactatatgttataataattaatattgttttgtaattgataatacaagaactctatttacaaaatactctcagcccatagctggtttttctggtcctcatgataattctacaatttacagattaggaaactgaaatgtgggaagttaaatatattgtctgagactaggaaacaaactaatgtctgtcagtaactaaagctatgctcttttcattctgtcatggtattatggtgaaaataaggcaggaccttgcccatatttggttcagtcagtattactgtttaagcatacaggtttggaagtgaaatagctatctcacttgaagaaacttagcctaacttttttattcccatttcctcatctgaaaaaatggaaataaacatagtgccaaactgacagctttttggtgagtataagtgagactatgtattcaaaagcaaccaggaagcaatcagtcacactaaaacaaaaactgtgattctccttatataagttacttaaacacgtaatccttatggaagcagagaatggaatggtgattgtcaggtaccatgagttaagtgggtaacagcacattgttgctaattcaacattttgggaggctgaggtgggaggatcacttgaggccaggaatgtgagactagcctgggcaacatagtaaaactccaattctagttgggcacggtggcataaacctgtagctatagctacttaggaggctgaggtggaaggaacacttgcacttggcaggtggaggctgcagtgagcc

SEQ ID NO: 676526 - DNA, 651 bp, Homo sapiens
aagtagattatacacatttagcatggttagaaactagatgttactactgagtgttttctccttaataagttagtttaagaggctggggataatttcacggtaaaatggcaacttaaccccagtttcaaacattgaaacttgaaaattttcctttttgaaaaattacatatacrcctggcactctctatctgtgggtttcacatcccaggagtcaaccaacctcagaaacaaccaatcgtggattgaaaatactttgggggggaaaaaataaaaaaaattacgacagtaagaaaatatacaaataaaaaatagtattagaccacatgtggtggctcatgcctataatcccagcattttgagaggccaaggcaggaggatcactttagcccaggaatttgagaccagcctgggaagtatagcaagcacatgtctacaaaatttttttaaaaaaattagctgggtgtagtggtgcacacctgtggtgctactcaggtggcagtactcatgaggctgaggcaggaggatcacttgagcccaggatttggaggttacagtgagctatgactgcaccactgcactccagcctaggtgacagagtgagactctgtctgaaataaataaatagtatttgcatggcattcacattgtatt

SEQ ID NO: 676527 - DNA, 1283 bp, Homo sapiens
tgaagtagatggggacaaatgtgtagacttttggcaatgtatagatatggaaaatgacatctaaaattgcaataaaaatggcaagataaaacacttttatcatagccaagaattcagtagcctaaaagcaattacagcatgaaagcttgcaagtataaaaatataagtcctcagaaacttgctgctggaagacctgtttccagatgttgtgtgtcagtgattctcaaacctgagtgtgcatcgacgtcgcttggagggcagtcactgattgctgggctccagtttcagatttagcaggcttggggtagcccaaggatatgtagtttcaaagttttcccggatgatactgccggcctgggcaccatactgtgagaaccactgatgcttgctgccatgtaagaactgctactgcatgggcccaaatattgtaggaaaaggggcttgataaatgtgatagaaggacatgagttgttttgttttgttttgttttgttttttgagatggagtcttgctctgtcgcccaggctggagtgcagtggcgctatctcggctcactgcaagctccgcctcctgggttcacgccattcttctgcctcagcctcccgagtagctgggactaaaggcacccaccagtacgcctggctaattttttgtatttttagtagagacggggtttcaccgtgttaaccaggatggtctcaatctcctgaccttgtgatccgcccacctcggcctcccaaagtacaagttttgctttttatgtcagatgacgggcttctcttgggagttagggaatctgtcctcctccagttcaatccagcccctcctcatctccgtgctctagggggcacctgtctgagtctaggtagggtaggtagaagagaaaattgtcttttcattctcctaattgtccttttaaaatgtactacaaagggaggtattatatacatagctgtaatattatataacacgttctttacttttcttccagtagaaaatatttgtaagttcaaagttttttttttttaacttttatgactgtctccccaccccccttaccctaccacatgaaaaatttgaagagttaaaaaaaaatgctaaccatccatgtcttccttaaaacaggttcttgcggctcattcttggtggtacattggaggatgtcagtccttggcctcccmctaggtgccagcttttgcaccaaacagccttcctggtagaaaacacatttgcagtgtaccttgggcgggaggagaagcggaaatcattctcagatgttaaaa

SEQ ID NO: 676528 - DNA, 1283 bp, Homo sapiens
tgaagtagatggggacaaatgtgtagacttttggcaatgtatagatatggaaaatgacatctaaaattgcaataaaaatggcaagataaaacacttttatcatagccaagaattcagtagcctaaaagcaattacagcatgaaagcttgcaagtataaaaatataagtcctcagaaacttgctgctggaagacctgtttccagatgttgtgtgtcagtgattctcaaacctgagtgtgcatcgacgtcgcttggagggcagtcactgattgctgggctccagtttcagatttagcaggcttggggtagcccaaggatatgtagtttcaaagttttcccggatgatactgccggcctgggcaccatactgtgagaaccactgatgcttgctgccatgtaagaactgctactgcatgggcccaaatattgtaggaaaaggggcttgataaatgtgatagaaggacatgagttgttttgttttgttttgttttgttttttgagatggagtcttgctctgtcgcccaggctggagtgcagtggcgctatctcggctcactgcaagctccgcctcctgggttcacgccattcttctgcctcagcctcccgagtagctgggactaaaggcacccaccagtacgcctggctaattttttgtatttttagtagagacggggtttcaccgtgttaaccaggatggtctcaatctcctgaccttgtgatccgcccacctcggcctcccaaagtacaagttttgctttttatgtcagatgacgggcttctcttgggagttagggaatctgtcctcctccagttcaatccagcccctcctcatctccgtgctctagggggcacctgtctgagtctaggtagggtaggtagaagagaaaattgtcttttcattctcctaattgtccttttaaaatgtactacaaagggaggtattatatacatagctgtaatattatataacacgttctttacttttcttccagtagaaaatatttgtaagttcaaagttttttttttttaacttttatgactgtctccccaccccccttaccctaccacatgaaaaatttgaagagttaaaaaaaaatgctaaccatccatgtcttccttaaaacaggttcttgcggctcattcttggtggtacattggaggatgtcagtccttggcctccccctaggtgccagcttttgcaccaaacagccttcctggtagaaaasacatttgcagtgtaccttgggcgggaggagaagcggaaatcattctcagatgttaaaa

SEQ ID NO: 676529 - DNA, 1582 bp, Homo sapiens
tgaaggaaatgtgacaacctattcattacagtcagttaccaatatagagagctgttcccaaatgtttagaattagctggactgtctactgtagacacagaatttattttttaaaaaactctctttccgagagtttcagtgctttcagagcactgccttttgtttctttgcctgacgttggtgttttgccaagtgctggtatttggaggtttgatggacagcattcgaagtgaggcatcagtcttccttaatttgttcaaagcctctttatgcagcagctaatccttcctaattatatttctaggaaggatgttcttaactcagacgggaagaagacatagacattttgacattaggatgcacttcactccaagaaaagaaatttgaaaggaaacactctcccaattcccattccttaccccctgggcacaagcaaccattttcccctgccccatttatgaagctcttttctctccctctccattcctctttcattcctgtggctcctatttatctcctggcttaatgaagctattttgaaggagctaaaaaaaattcagaaaaaaccatttccgtgtagtgaggcaggcatttcacaccttaattgctttaacgtcttgaaaggtgaaaggtgacctgtgagtctaaacagttggaaaatttagtgtgcatatttgaaatgctttacataaagttgaaacacttcacagtctccttgattaatttctttgttgccgtgctgctttgtattaatttaatttagtgacttttatgtgaaagtaaatatgtaagtcagtggcattatgtttattagattattttcctttaatattttaagcagactaaatgcggcttctgtcaaatgagtctttaataaataaattgctgtctgtgaagtcttagtggctttgaatggtcttatgaagtgtgatcttatcaccttatgaagcaattttgtgtttcttagttttttttagtgaggttgaacattttccacatttttataagtccttcatattttttatgtggataactaacatcttcacacccttttctgttacatgtgcttataattttctttaatttctaagagctcttttcatattaaagattgtttttatcaaatatttaagaattctccaagggaaggtacttttatgcaaaaaatattattagtactctggttttttttatgctcaaatttggaagaaacgtcttaaattggattgtaaaaaatccccccttgtccatgaggacaagaatacaatctgttactcattgactgggtaatttatttcagaattctttggtcttctgagaggcttattgacttacacagacataaatcgtaatatactactgaaccatctataactttccaagttctctgtgcatttctaactggttgcgttatctctggttcaccatagtgaagatagaatctcagtcctcctggcccccagaacacagattctcaatagttgattcattcattccatcagcagayatttactgagtgccatccacataccaactactgttctaggtactccaattggagggatcaggctaatgtgtctgca

SEQ ID NO: 676530 - DNA, 1741 bp, Homo sapiens
cagatactttttaatttgaatgccaaaccaacataaaggcgaacttgtgggttaggaattctcacctgagatttatgctgttgcttgttttcgtgtttacccaaagcccaaactaagacagatgcgactcctcctgttctctcagcagtgcagtgtttggttttttggtttcccctgcagaaagttttaacacgagggtttctgatctaatcttttaccttatgcagcaccaagctttgtctctgtgccccatgaagcatgttaaaacctgtaatctaggcatccagaaatggcagatgcccctccagggaaaattcctgttctggagccaactcatttccctggattcatgctctctggtcgttcctggcctgtgaagatttctcttactttcttgacatctcagccatattttatattttgtccagcaatcttagttgttttatcctggcaaattttctctggacatcttatcctctgttttgccagaattagagatcctagttaatttattttaaagagttcgagttctgagaagtagaaaatatttggaggctagaccataaagtttcctgtgctgcaaggaacccatagcactgttgaatgactatacgcttgagtctttggaaagactcagatgttcttttccttgtcatttatgacatgagaagtcttaggaaaatgtctttttttttgccagagcctcatctaaccagtggccagtgagcctgggagatgtgtaggatcctctggggctgcttctcgcatctctgcctctgggtgcctgcctctgggcacctgcctgggacatctgcgctcagggctctgcctccagttcccgccctttgtctttttgtccccagcctagttgtgaaatctcatctcctggttcttcattttgctcagtagtttcatttgggcagtctctagctctcacaaacatgtactcgaagagtactgattagtgtgttcagaggttaaattggcctttgtgtgttataatcccactcttctctttgagggtttgatgagagaaaattgaagttctgttcattatcattctaggaagagtaaatggatagtaatttaggggtaggaaaggggcaaatgcatagttgttgcttttactccagtagcatctgacaggagaaaaaaaaaamaccaaaacccataattgttctttcggagagagaaaccccacctgtatatattttttaagctgtaaatactcctgaatgaattttggtagctttggtagctataaggggaaacagtattgtatccatcttgagtgtccttcttacctcttatactacatttatcatctttaattctgctttagactcatcccttgcagtggccacctgtaacttggcagcctgcagggcattgccaaatatatcgagacaccaagtaaaatatcttttgtaaccaaaattaaaatcaactatatttttggctgaccagttctaatcccagacttgtctaaatcattgagaaattatatgttgtgtttgtggggggccataataatataatcatagtcaattaaattaaattgagggagtgaatggaattaaacatttttttttaccctgtatttctttttcaggaatctgagttggaatttgataaccatcagtttattataacagggtcagtactggagtgataatgggttcggaaaggcaggttctgggcaagggaaagctgataatggttgcttacggttgaggtttta

SEQ ID NO: 676531 - DNA, 590 bp, Homo sapiens
agcagagatcgtggcactgcactccagcctgggcaacagagcaagactctgtctcaaaacaaacaaacaaacacacaaacaaaattcaaattggtagacagagtagattggcctccctaatgtgggtggccctaatcagttgaaggcgtaaatagaacaaataaaaagctaatttacctccatgagtaagacaggttgcctcctgcctgactgcctttgagctgatttttttcctaccttcagactaaactgaaacattagctcttcctggattttggacctgttggtcttcagattyacactgaagttcttgggacttgtcagcctctatattcaagtaagccaattccgtataataaatctctttctttctttatacattccatagattctctttccttggattcactttgtcactaatacactttctatccttttttccctgggcatagtcttaaaatatggacatttttagatgagtgactttggtacaatcttattataagtatactttagtgcatgttgattttcagaaacctgtttaagagaaaaatagagctcattttaaagtgagataacatggatagtca

SEQ ID NO: 676532 - DNA, 580 bp, Homo sapiens
tgaaggatggatagaagggacagaggggagcctcttaggcaagagaaatgatgtgaccaaatgcagaatgacaggaatgaatgtagtattttaggagataagaagcaaaatagtccagctatratgtgaaatatacggtgagagataaggttagaaaggtaggttgaagtaaaattgctgcatcttctgattatttgaccaatgattgagactgtcctgttgagaataggaagccagagatttcagtgtggtaatctcatgaagaaagaagcttttggggaagatttatctggtggcagtatatgaggcagactagaggaaactgcaggctgggaaaccagttaggacacagctgttgtaacaattcaggcatgagataactagagtggaaaaagaaggggcagatgccaaactctttataaaggagaaaaccaactaaacgggcttattgactggctatgaaaagcgaaggaaagggaggagacaaggactgctgttgccagaactctaataaattaaaggatggatatattttcatttttatttggccttactttcaaacttaatttaatttttcttg

SEQ ID NO: 676533 - DNA, 2187 bp, Homo sapiens
ttttccagatctcagaatgaccagttacataaaaataggccataaaccatatatttcattcttacggttgacaaacctctaattcacctgaaaatattaaaaagaaagaagacagacgtgacagtggttggaagttgaggataagaagaagttggcagaaataagctttcttcttttggacagcaatgcatgataaaaaaaattaaactaaattcagttcatttccactaactgggacttatttagaaactttaagaaagtctttgaagaatttcaattgagtagtaaataagggccaatttatttcatagtgtggactctcaagacaatatacagcagtgcttctcaaagttaaacagtatatgagtgacctggaaatgaagatgcagatttaatagggctggagagaagtctgagattctcaatttctaatgaattaaattacaaagaggagaaaataaggttattgcttactttatatacattcacaaacacaggctaatcaaataattgtttaaagtattgctctgagaagaattaaattacatatttcataggaaacattttctttacattcggattttatctattattagaataataatagaatcttgactttatgtaactctatattccaaacaactagaaacttttcgatagcaattgttcaccatttaataacatttttccaagatatctaatgcactcaaggacaaaatagctgccttccagtgatttccaatttattcaattttcaggcaatttgtctgcccacacaatgacagattacagttacattcttgccacgctccgaacagctaagccaattgttttcaatcttttttcttcagcaactccatctcttaaagtacttcagagtagttcctgaaaggattcctctttagttaaatggctatacagctctcccatcatccaaaataatcagtggagagatagcaatatttttcattacattaggccaagttgcattgcttccttcatcttgtaatctgatcagaaacaccactatagatccaataattgagtttagagtttcagagaatttgggrtcacagaacacctatgtctattttgtaaagattattgcatattactgaaatagctagtcaaacactgcagtctgcttaaagtatcaaaatagaaatgttgaatgctgtgtctgcacagagttcatttaagcaaagaatctactaggctcttaagtctgttaatgcaaattcctgaatacagttgaccctccatacccccattgtgggtggatttaactaaccatgaatcaaacatatttgttaaaagaaataccaaaaataatttttaaaaagaaatacaacaataaatgcaaataaaaaacaatccttgtaacaattatgtgcatagcatttatattgtattcagtattattaatgtaagtaatctggaaatgatataaagtatacaagagggtgtgtgtaagttatatgcaaatactagcccattttatataagaaacttgagcatctctggcttttgctatgaagggatgatggtggtaggattggtagtggtcctggaacaaatccccagcaggtaccaagggggactgtagaccccaaagctgtttaggaatgagtcacagcagcaggattgaggtaggaatgctccccacagaaaacatcaaccacctgttgatttttgaatctgctcctctcaggcatgccttcaaatgctataacctggagattcaactcattttcatgctgtaggtaggaataggtgattcaattccccaagaaagtgacagagatccctgaaatatagatttaaagttacatagtgtcaaatgctagtcattttctttttgctcgatggtatcctctcagaaaaaccttttataatatttctaattcatttaccagatttatagaatcatcaaattatctatctatctatctgtttatctatagataaacacatctatcaatgtgtttttcaaatattttgtgaagtggctagggtaacaacctatggttcgaacgtattttgtgaagtggctagggtaacaacataatgttcgaacgtatgttcgtatttaaatacaaatgtattttggttgagtgattactcaaggtcactgaggaatccacaaggttaacctcctgactctagaaccattgttatatagagata

SEQ ID NO: 676534 - DNA, 2187 bp, Homo sapiens
ttttccagatctcagaatgaccagttacataaaaataggccataaaccatatatttcattcttacggttgacaaacctctaattcacctgaaaatattaaaaagaaagaagacagacgtgacagtggttggaagttgaggataagaagaagttggcagaaataagctttcttcttttggacagcaatgcatgataaaaaaaattaaactaaattcagttcatttccactaactgggacttatttagaaactttaagaaagtctttgaagaatttcaattgagtagtaaataagggccaatttatttcatagtgtggactctcaagacaatatacagcagtgcttctcaaagttaaacagtatatgagtgacctggaaatgaagatgcagatttaatagggctggagagaagtctgagattctcaatttctaatgaattaaattacaaagaggagaaaataaggttattgcttactttatatacattcacaaacacaggctaatcaaataattgtttaaagtattgctctgagaagaattaaattacatatttcataggaaacattttctttacattcggattttatctattattagaataataatagaatcttgactttatgtaactctatattccaaacaactagaaacttttcgatagcaattgttcaccatttaataacatttttccaagatatctaatgcactcaaggacaaaatagctgccttccagtgatttccaatttattcaattttcaggcaatttgtctgcccacacaatgacagattacagttacattcttgccacgctccgaacagctaagccaattgttttcaatcttttttcttcagcaactccatctcttaaagtacttcagagtagttcctgaaaggattcctctttagttaaatggctatacagctctcccatcatccaaaataatcagtggagagatagcaatatttttcattacattaggccaagttgcattgcttccttcatcttgtaatctgatcagaaacaccactatagatccaataattgagtttagagtttcagagaatttggggtcacagaacacctatgtctattttgtaaagattattgcatattactgaaatagctagtmaaacactgcagtctgcttaaagtatcaaaatagaaatgttgaatgctgtgtctgcacagagttcatttaagcaaagaatctactaggctcttaagtctgttaatgcaaattcctgaatacagttgaccctccatacccccattgtgggtggatttaactaaccatgaatcaaacatatttgttaaaagaaataccaaaaataatttttaaaaagaaatacaacaataaatgcaaataaaaaacaatccttgtaacaattatgtgcatagcatttatattgtattcagtattattaatgtaagtaatctggaaatgatataaagtatacaagagggtgtgtgtaagttatatgcaaatactagcccattttatataagaaacttgagcatctctggcttttgctatgaagggatgatggtggtaggattggtagtggtcctggaacaaatccccagcaggtaccaagggggactgtagaccccaaagctgtttaggaatgagtcacagcagcaggattgaggtaggaatgctccccacagaaaacatcaaccacctgttgatttttgaatctgctcctctcaggcatgccttcaaatgctataacctggagattcaactcattttcatgctgtaggtaggaataggtgattcaattccccaagaaagtgacagagatccctgaaatatagatttaaagttacatagtgtcaaatgctagtcattttctttttgctcgatggtatcctctcagaaaaaccttttataatatttctaattcatttaccagatttatagaatcatcaaattatctatctatctatctgtttatctatagataaacacatctatcaatgtgtttttcaaatattttgtgaagtggctagggtaacaacctatggttcgaacgtattttgtgaagtggctagggtaacaacataatgttcgaacgtatgttcgtatttaaatacaaatgtattttggttgagtgattactcaaggtcactgaggaatccacaaggttaacctcctgactctagaaccattgttatatagagata

SEQ ID NO: 676535 - DNA, 2187 bp, Homo sapiens
ttttccagatctcagaatgaccagttacataaaaataggccataaaccatatatttcattcttacggttgacaaacctctaattcacctgaaaatattaaaaagaaagaagacagacgtgacagtggttggaagttgaggataagaagaagttggcagaaataagctttcttcttttggacagcaatgcatgataaaaaaaattaaactaaattcagttcatttccactaactgggacttatttagaaactttaagaaagtctttgaagaatttcaattgagtagtaaataagggccaatttatttcatagtgtggactctcaagacaatatacagcagtgcttctcaaagttaaacagtatatgagtgacctggaaatgaagatgcagatttaatagggctggagagaagtctgagattctcaatttctaatgaattaaattacaaagaggagaaaataaggttattgcttactttatatacattcacaaacacaggctaatcaaataattgtttaaagtattgctctgagaagaattaaattacatatttcataggaaacattttctttacattcggattttatctattattagaataataatagaatcttgactttatgtaactctatattccaaacaactagaaacttttcgatagcaattgttcaccatttaataacatttttccaagatatctaatgcactcaaggacaaaatagctgccttccagtgatttccaatttattcaattttcaggcaatttgtctgcccacacaatgacagattacagttacattcttgccacgctccgaacagctaagccaattgttttcaatcttttttcttcagcaactccatctcttaaagtacttcagagtagttcctgaaaggattcctctttagttaaatggctatacagctctcccatcatccaaaataatcagtggagagatagcaatatttttcattacattaggccaagttgcattgcttccttcatcttgtaatctgatcagaaacaccactatagatccaataattgagtttagagtttcagagaatttggggtcacagaacacctatgtctattttgtaaagattattgcatattactgaaatagctagtcaaacactgcagtctgcttaaagtatcaaaatagaaatgttgaatgctgtgtctgcacagagttcatttaagcaaagaatctactaggctcttaagtctgttaatgcaaattcctgaatacagttgaccctccatacccccattgtgggtggatttaactaaccatgaatcaaacatatttgttaaaagaaataccaaaaataatttttaaaaagaaatacaacaataaatgcaaataaaaaacaatccttgtaacaattatgtgcatagcatttatattgtattcagtattattaatgtaagtaatctggaaatgatataaagtatacaagagggtgtgtgtaagttatatgcaaatactagcccattttatataagaaacttgagcatctctggcttttgctatgaagggatgatggtggtaggattggtagtggtcctggaacaaatccccagcaggtaccaagggggactgtagaccccaaagctgtttaggaatgagtcacagcagcaggattgaggtaggaatgctccccacagaaaacatcaaccacctgttgatttttgaatctgctcctctcaggcatgccttcaaatgctataacctggagattcaactcattttcatgctgtaggtaggaataggtgattcaattccccaagaaagtgacagagatccctgaaatatagatttaaagttacatagtgtcaaatgctagtcattttctttttgctcratggtatcctctcagaaaaaccttttataatatttctaattcatttaccagatttatagaatcatcaaattatctatctatctatctgtttatctatagataaacacatctatcaatgtgtttttcaaatattttgtgaagtggctagggtaacaacctatggttcgaacgtattttgtgaagtggctagggtaacaacataatgttcgaacgtatgttcgtatttaaatacaaatgtattttggttgagtgattactcaaggtcactgaggaatccacaaggttaacctcctgactctagaaccattgttatatagagata

SEQ ID NO: 676536 - DNA, 1237 bp, Homo sapiens
tcaatggatctccatgtcacacagaatacaatcaaagtctttatctcaacctataaggccatgtataatttgtctatttttatctcttaattttctcaaatcactagctcattatggcaagcaaaactgctcttaattcctcaaaatgttcctggcttacactgtttcaggaatggtgcatatgctttcaaagtcttttctccatcttctctttagtaacctcttcttataattyaaggttctgtttaaatggcactccctcacagaagtcttccctattctacgtggatcttcactacttattttctgaggccctttttgttgttgctttcctgtgaaacacttttcacaattggaaataattttattgatgtgtgtgtttattttctcatctatgttcaatacagtggggccatttctccctcctcgtaattgtatgtctgatgccaacacagtgactagtagggagaagaaattcaataaatattttctaatgaatggataaaatttttcgatgaattagtggctatatttttgacagcatacctcagttacaatctactccagattgtatccttctgaaactattattttaaatacagtttgaagtactgcttttattatttttctattaaattatcttcataaattactgaacatataattgtataaagatgacttccagttttgtcttagaaaattatgcagaaaaatctatcttacacataaaaagaaataaattttaacttacaatgtgaatttttaatgataatttaagaagctttttaatgagcttcaacacaaggaacaataattaactagctctgttttgaaaaaaagatttttttatctcttttggattttaatgttttctgcaaataacactttctccagatgtccaatatcctatctattctgtaaagttttctttttgtatattttgttcaaactcatctgtacacaaacgtacattttaactacatttcagggagatggccctttgtgtggacaatatcatattgttggaccacagctatgaatatgcttctgaggatattgccaatttcttttgctaagcattaccttggtcttagtaattgttctacttatgcaggataaaaagtgaaaatgccaagtcaactgtacgattaaatgtgctcaagagacagacattcagatatctaaatgttaactttattagaaatagattttagtagtaataattagtgatcacact

SEQ ID NO: 676537 - DNA, 1089 bp, Homo sapiens
tcccagctccattttgttgtggtttgacttaagtgagtcaacttctttgctggtaactttaacatttcccccttttgaccaagacttttttctgaaagcattgctgattaatcagcctatagttaggttttgattgtttcttggtgctggagtggacctttcccagttagtctgatcctgcatcagagatgaatggccagcaactaagagcggatgtcaaaacccttttagtcacatttaagaaacaaagaggttcagaaggagtggctctcaggataaatctgcctggagttcattgctaagttcaattttgtcagttccataggcattgactaccatttggaagttctggaccagtgttattctgttagatgcatcatttctgcagaggttggacaggaaacagataaaaagtttaaaaagaatgatgcggtacaaaattaatagtaacatgataatattgtctatgaacatggacccaaaggcagccaactaatgaatcaaaagtctatgtgagactgagtgagatctgttgtagccataaagcctgtcttgctattttatgcaattaggtcttgacttccccagagaaatatattcaggtacagcatgtagttattagcaatggcacagacattcttgttcaaccagtagataattgagagttatctcatcctgttctgttgtgttatctacggctactcagcaagatactttaatgagcactgctgggcggcaatagcctttgcagtgaagcctgcartgaaacccaaggtggcaaataagtcattagggatgttgccatagttacccactgggtggactaaaggatcccttaggtcatgtaaagatgtgggtttgacacgacagatccaaaacttcattcagttacggaagctactgaatgtgaaattctaaccacagcgttgttctgccaagtgaaaaatgtaggcataagcaagaaaaaaaagataagaaggacaagagtccagttttgttacaatgtcttgggaaaagctttccacactgtgatgtcatcaacttcttactctggtttgtagtttgaatgttcctgggtatagcatgggg

SEQ ID NO: 676538 - DNA, 1089 bp, Homo sapiens
tcccagctccattttgttgtggtttgacttaagtgagtcaacttctttgctggtaactttaacatttcccccttttgaccaagacttttttctgaaagcattgctgattaatcagcctatagttaggttttgattgtttcttggtgctggagtggacctttcccagttagtctgatcctgcatcagagatgaatggccagcaactaagagcggatgtcaaaacccttttagtcacatttaagaaacaaagaggttcagaaggagtggctctcaggataaatctgcctggagttcattgctaagttcaattttgtcagttccataggcattgactaccatttggaagttctggaccagtgttattctgttagatgcatcatttctgcagaggttggacaggaaacagataaaaagtttaaaaagaatgatgcggtacaaaattaatagtaacatgataatattgtctatgaacatggacccaaaggcagccaactaatgaatcaaaagtctatgtgagactgagtgagatctgttgtagccataaagcctgtcttgctattttatgcaattaggtcttgacttccccagagaaatatattcaggtacagcatgtagttattagcaatggcacagacattcttgttcaaccagtagataattgagagttatctcatcctgttctgttgtgttatctacggctactcagcaagatactttaatgagcactgctgggcggcaatagcctttgcagtgaagcctgcaatgaaacccaaggtggcaaataagtcattagggatgttgccatagttacccactgggtggactaaaggatcccttaggtcatgtaaagatgtgggtttgacacracagatccaaaacttcattcagttacggaagctactgaatgtgaaattctaaccacagcgttgttctgccaagtgaaaaatgtaggcataagcaagaaaaaaaagataagaaggacaagagtccagttttgttacaatgtcttgggaaaagctttccacactgtgatgtcatcaacttcttactctggtttgtagtttgaatgttcctgggtatagcatgggg

SEQ ID NO: 676539 - DNA, 979 bp, Homo sapiens
cactcacctatttttagacctcagttgaatgctggttaactgaaaccagggaaaacagccatgtacccggggttggggggggcgcggggggaactaaacatgctttctttattctgaagttctgaaaatcctaataattgagtaactttattctttccctgtgtaactccaggcaatttattgaacctctatgcacctaagattcagggatgcaatgagaatgataaaactgctctatcagctgatttatgtgagaattaaatcagccaatgcatgtaaattccttaacttggtccctcacagaaaattctttaatgtgttaaccaatactctgtatgaagtgaatgatatcatgtatattattttgcaaactcctattttgcatataggtgcagacatagcttcaggtaaatacatgcaaactaacttatcttttaatatcttaaaatttttccattataaggatacaaaaactattctaccaattacctgttgaagaaactcatgtttaattcyggtttattttgccatcataaacaatgctgtgaaagcattcttgtatatcgaggataacatatatgcctttacttctgtaggatagattctttttaaaaatattttaacttttattttaggttcaagggtggacttttaatctaggtgctgagactagcacatatgtatacttttgcactatgaaaatatcaataatttttttctccaagtgcagtaacttacagtttcactaaagtatataagattttccaggttcattgaaattccctaagaaatactatacactcttatgataaaaaatatatgtataaaatttatattagatttccgcatgtatgaatttaataaagcaactttataattttgccagaagcccagcacagtgcctagaatgtataatttcacagtatattttagttaaaatattataattatgccaattgagggatgtataatattagta

SEQ ID NO: 676540 - DNA, 979 bp, Homo sapiens
cactcacctatttttagacctcagttgaatgctggttaactgaaaccagggaaaacagccatgtacccggggttggggggggcgcggggggaactaaacatgctttctttattctgaagttctgaaaatcctaataattgagtaactttattctttccctgtgtaactccaggcaatttattgaacctctatgcacctaagattcagggatgcaatgagaatgataaaactgctctatcagctgatttatgtgagaattaaatcagccaatgcatgtaaattccttaacttggtccctcacagaaaattctttaatgtgttaaccaatactctgtatgaagtgaatgatatcatgtatattattttgcaaactcctattttgcatataggtgcagacatagcttcaggtaaatacatgcaaactaacttatcttttaatatcttaaaatttttccattataaggatacaaaaactattctaccaattacctgttgaagaaactcatgtttaattctggtttattttgccatcataaacaatgctgtgaaagcattcttgtatatcgaggatmacatatatgcctttacttctgtaggatagattctttttaaaaatattttaacttttattttaggttcaagggtggacttttaatctaggtgctgagactagcacatatgtatacttttgcactatgaaaatatcaataatttttttctccaagtgcagtaacttacagtttcactaaagtatataagattttccaggttcattgaaattccctaagaaatactatacactcttatgataaaaaatatatgtataaaatttatattagatttccgcatgtatgaatttaataaagcaactttataattttgccagaagcccagcacagtgcctagaatgtataatttcacagtatattttagttaaaatattataattatgccaattgagggatgtataatattagta

SEQ ID NO: 676541 - DNA, 979 bp, Homo sapiens
cactcacctatttttagacctcagttgaatgctggttaactgaaaccagggaaaacagccatgtacccggggttggggggggcgcggggggaactaaacatgctttctttattctgaagttctgaaaatcctaataattgagtaactttattctttccctgtgtaactccaggcaatttattgaacctctatgcacctaagattcagggatgcaatgagaatgataaaactgctctatcagctgatttatgtgagaattaaatcagccaatgcatgtaaattccttaacttggtccctcacagaaaattctttaatgtgttaaccaatactctgtatgaagtgaatgatatcatgtatattattttgcaaactcctattttgcatataggtgcagacatagcttcaggtaaatacatgcaaactaacttatcttttaatatcttaaaatttttccattataaggatacaaaaactattctaccaattacctgttgaagaaactcatgtttaattctggtttattttgccatcataaacaatgctgtgaaagcattcttgtatatcgaggataacatatatgcctttacttctgtaggatagattctttttaaaaatattttaacttttattttaggttcaagggtggacttttaatctagrtgctgagactagcacatatgtatacttttgcactatgaaaatatcaataatttttttctccaagtgcagtaacttacagtttcactaaagtatataagattttccaggttcattgaaattccctaagaaatactatacactcttatgataaaaaatatatgtataaaatttatattagatttccgcatgtatgaatttaataaagcaactttataattttgccagaagcccagcacagtgcctagaatgtataatttcacagtatattttagttaaaatattataattatgccaattgagggatgtataatattagta

SEQ ID NO: 676542 - DNA, 650 bp, Homo sapiens
gtgcagcatttagagcttgggtcagaaaagcaggtccactacaagtgggagctggttgctatacactgaatgtttgcagtccacaaaatcaatatgttgaaaccctaatctccagtgtgatggtatttggaggtggggcctttgggaggtaactgggcttggatgaggtcatgggggtggaactcatgatggaattggagcctttacaagggaatgaagagacaagagctctctttatgccacgtgaggatacagcaaggccccaatctgcaagccaggaagagtcgtcacgagaaccagaccatgcaggaactctgatcgtggacatttcaacctccagaactgtgatccagtaagtgttgtttaagccacccagtctttgttattttttatagcagcstaagcggactgagacacgtgaaggtggactgagacacatgaagcagtcagtgtggggctgttccttcactatctggtgctgaagctttaagtccacggggcaggaagttgggagaaaagagggcgtgaaatagagaggggttcgaacaatctggaactcttgaggctgagctggttcccacaaggaccaactgggacccattagcccctcttaccacctgttagcctccatctttgattatggaatcgat

SEQ ID NO: 676543 - DNA, 552 bp, Homo sapiens
  misc_feature 2, 3, 4, 5, 6, 7, 8, 9, 10, 11, 12, 13, 14, 15, 16, 17, 18,19, 20, 21, 22, 23, 24, 25, 26, 27, 28, 29, 30, 31, 32,33, 34, 35, 36, 37, 38, 39, 40, 41, 42, 43, 44, 45, 46,47, 48, 49, 50, 51, 52, 53, 54, 55, 56, 57, 58, 59, 60,61: n = A,T,C or G
  misc_feature 62, 63, 64, 65, 66, 67, 68, 69, 70, 71, 72, 73, 74, 75, 76,77, 78, 79, 80, 81, 82, 83, 84, 85, 86, 87, 88, 89, 90,91, 92, 93, 94, 95, 96, 97, 98, 99, 100, 101: n = A,T,C or G
tnnnnnnnnnnnnnnnnnnnnnnnnnnnnnnnnnnnnnnnnnnnnnnnnnnnnnnnnnnnnnnnnnnnnnnnnnnnnnnnnnnnnnnnnnnnnnnnnnnnnccaagctagtcttgaactcctgacctaaagtaatctgcctgccttggcctgccaaagtgctgggattacagccatgagccaccatgcctggccttatttacatatttatttttgagatgaggtctcagtctgtcacccagactggagtgcastgctgctgtgatagataactgtagcctgaagctcctgggctcaagcaatccttctgcctcagcttcccaagtagctgggactacagatgcaaaccaccatgcccagataatttatgagttttttgtagagatggcatctcactatattgcccaggctggtcttgaactcctgggttcaggcaaacctcccatggctgggctctaggcttggctttccaaagtgctggggttataggcatgaaccactatgcctggctggtgctgcaattcaaaatcacctcccttctcaaactagctcc

SEQ ID NO: 676544 - DNA, 650 bp, Homo sapiens
  misc_feature 157, 158, 159, 160, 161, 162, 163, 164, 165, 166, 167, 168,169, 170, 171, 172, 173, 174, 175, 176, 177, 178, 179, 180,181, 182, 183, 184, 185, 186, 187, 188, 189, 190, 191, 192,193, 194, 195, 196, 197, 198, 199, 200, 201, 202, 203: n = A,T,C or G
  misc_feature 204, 205, 206, 207, 208, 209, 210, 211, 212, 213, 214, 215,216, 217, 218, 219, 220, 221, 222, 223, 224, 225, 226, 227,228, 229, 230, 231, 232, 233, 234, 235, 236, 237, 238, 239,240, 241, 242, 243, 244, 245, 246, 247, 248, 249, 250: n = A,T,C or G
  misc_feature 251, 252, 253, 254, 255, 256: n = A,T,C or G
gatcctccccactccgccttctaaagtactgaattacaggtgtgagccagcaaatttatttttatttccaactcatcttcatttggctagtataggataataatagtaatctcaatcttttgctctttaatcatttattcaaaggccaaactcatcnnnnnnnnnnnnnnnnnnnnnnnnnnnnnnnnnnnnnnnnnnnnnnnnnnnnnnnnnnnnnnnnnnnnnnnnnnnnnnnnnnnnnnnnnnnnnnnnnnnncccatgggaatggtgtgttccaaactacactacagtaaaattgatatgatttccattttgcaggtgcagctcaagaaattaagttacttgctccaggcccacaaagctagcaggggagagcatggattcagattcaggtataccattcacctaagcctgcattctttctaatacattacctcacctgtcaaacacagagagttacaattagaaggactgtcttagtccagtcattttatttcaaatgaaaatatactctcrttttatctattttacttatttaataaagaacagatggcccaaagcagttttctttaagtttttctgcttactccttctcttaatataaagaccaaaaaaatactggtacctaatgagagcatttattatttga

SEQ ID NO: 676545 - DNA, 621 bp, Homo sapiens
tatcattttctgtatacttctttttatatgaagcccacccttacctccatacctctgttaaagtaactccctaaactgaaaatatcttgttttctttctcaccacgagctcttttctccacgagctcttttacccaaatattctggcccacattgttcttttccccttgccctcacctttttgtattattattaagctatatttttagagcagttttaggttcaaggcaaaattgatcagagtttctcatgtactttctgttcccacaygtaatacaacctcccccactattgacatcccacgatgacatatcttttacaatcaaaaaacctatattgatgcattgttattatctaaagcccatagtttacactaagtttcacccatgctgttgtgtattctatgggttttaagaagtgtacattgatgtgtattcacacagtacagtatcacacagactagtttcactgccccaaaagttctctgtgctctacctgttccacaaaatcatgtactacgaatcatatagtctttctaggttggcttctttcacatagtaaaattaaatttgttcaatggcttttcatggctttatagctcatttcattttagtgatgaata

SEQ ID NO: 676546 - DNA, 684 bp, Homo sapiens
tgaatcaagggaagaatagatttaggtgggcaattatcagcttctacaaaaatgagtttcattcccttataatttacaatcttactgggaaatcatgtaaggtcaataggtaattataaatagtttgtaaaaggctgtggttgtaaacacagtatgatgttaagcaacaaaacaatgaatctaacctggcttgaggggtgaggaaggcttctaagaggaagtgtatataaaaagagtcctaaaggatgagtaagttgttgatactgaagttgggaggcaggggagtcaagggcgtagaagaagtgaactcagcctgcatgaaggcctgtagacaaggcagggygtgacactactggaaaactacaagaagtctgctatggcatatatataaaattaagtttaaagaatgaattgctggactgtagagaacatggggaaaatggcatgaaatgagatttgagaagctggattacaagggaccttatagaatctataaccttataaccatgcagtcaatattaacctgaagacagtggggaatcatatataagccagccctgtctccatcccagaaggaaacaattttctttttctgttacgtccggagcatctccttattctttagctctcttacccctcatagcctcaagtaacatcccacagagataaagcactttattctcc

SEQ ID NO: 676547 - DNA, 1358 bp, Homo sapiens
ataaccatcttttcatatattctttattctaaatctactaagtagagagaatgcgaaattaaaatgcttagaaccatttctcattggcagttttcaagattaccctggtgttagtactaaatgtgtatacctgtgttagtactctatgcgtatgtgtgtgtgtgtgtgcgtgtatgtgtgcatgtgtaaacatgtatatggaggttctgtctactgggatcacctgactaccagggaaagttgattttttgataccctctcacctcaatcactctgactgatcctttctggccacttcctcttcctccttcctgtactgtactctgtcacaggttaaacaagatctgactctcatatgagcttgctaagctcccttaattattaagtgggtttgataccaaaatyggattaaggtgtcagtctccctagggttgtttctcaagagaggattcttggtgatggaaggccttgaagacccaaggctggaatctctaatgtagaaccaagtggttgaaggattaatcatggtagaatatctggaatatactaaaacctcattgatgtacatacaaggcagagcttttctgtatttatggcttatcaagagtagtactatctaatagaaatatagtgtaagctacacatatgaatggcatacataatttaaaaattttagtagccacattaaaaaagtaaaatgaaacaagttaatattaataatatattttatgtaatacatttttatctaaaatactatttcagcccataatataaaaatttgttaatgaggtattttacattatttttgcaaaatcttctgaatctggggtgtaattatacagcacacctctgttcctactagctatatttcaagtgcccagtggccacatgcagttagtggcttcttattggatatgcacagatatagaatgtcccatgatgaggacagggagcatgttaccttttaaatcttagaacccactgggtatggggagcctgttgtgagacaacctccctcagccagggtggttccatagtatgcattggtcatgcccagcaggtagccggaatcagtgtttggtggaacgtggggctttggaatgccactgtggttggtttcacctcagagggagcagctggattcctatagagccctgaataaagggaattgttcctcagaaagcaagtttttgagcaataagtataggatttcctgggtaatagccaaacctgggcaggttttctatagattggttggcacgtttttttcccccacttcctggagatgtcctagaattagaagataaaagacggccctgtgttaccgtggggaaccataaatggtagcgtttatccaa

SEQ ID NO: 676548 - DNA, 1439 bp, Homo sapiens
tggacaaatattgtctgtgtttcagtacaactttatttattggcaccaagatttgaatttcatgtaattttcatgtgccacaaaatttgatttttcttttgatttttcaaagccgttttaaaatgtaaagaacattcttagcccatagggccatacaaaagtctcgcaggctatagttttgctgaccaagttctacctggttaccagaattagctaagtaaaatataagtctgaacatttcattcgaatgcttaaacccatcaaaggtttgccaacagggactacaagaataaggcttaccttacttaaaatggcttattgattccctcatgaycacaggtccagcatcatagcttgccagttcatagcttgcactgcactcttcagaatgctgacctccttgcagtatcctgtccacactgagatacttctttttgaggccttgacctcccttcctggagtgtctcccatttacctttatttttctctttctttatctctcttcctttcttcttcttctttttttttttttaaatattgtattagaattgttggtttatttgcttcactaagaggtttccctagtgagacacggaacaaccatgtctcgttctattctgtgttcttatcatttcacttcctgcccagggccctgctaaagtaggctcttcataaatatttgctgaatgcatgtatacatgcatgcatgcatgaatgaatggacaaatgaataagtggaatggaatagttaaatgagccaattttgatattttgctaataaccctgaccaagctgttggtgagttcacaggttgaaaccagtacaggcagttcttaacataggaatgtgttgagttccaaaagtttgtttggaaattggttgttcagaacttggaacatgttttcccatataaagatgttataaactaaactatgcttaactattcagcttagtccacaaaaatattatttgaggcatcatgtcactgaaataaaattagaaaataactgaggtgtcaccttttcattttattaaaatattttaagcccacatttcatctcaagaaactctaaaagacattttctggcactgtgtaatgttataaatgaaacaaaactgaatgctggtaaaggcttagtgtgggtaaagcagggagataaagagattgtgaaaattttatgggaaactgagtgtttttaagagcatcaattctttactatttttgttctacttcagaaattatcgttttctttgccatgctcaatgtttatcacaagaactccttttgagatcattggaaagattatggcccttttttgagaatcaaatgtaaagatatatagacacattttagagacctcctccaaaaaaaatcttcaccattcacttccaacctcctttaacaaaattttggtttatctaatttgtttctcttgctt

SEQ ID NO: 676549 - DNA, 1439 bp, Homo sapiens
tggacaaatattgtctgtgtttcagtacaactttatttattggcaccaagatttgaatttcatgtaattttcatgtgccacaaaatttgatttttcttttgatttttcaaagccgttttaaaatgtaaagaacattcttagcccatagggccatacaaaagtctcgcaggctatagttttgctgaccaagttctacctggttaccagaattagctaagtaaaatataagtctgaacatttcattcgaatgcttaaacccatcaaaggtttgccaacagggactacaagaataaggcttaccttacttaaaatggcttattgattccctcatgatcacaggtccagcatcatagcttgccagttcatagcttgcactgcactcttcagaatgctgacctccttgcagtatcctgtccacactgagatacttctttttgrggccttgacctcccttcctggagtgtctcccatttacctttatttttctctttctttatctctcttcctttcttcttcttctttttttttttttaaatattgtattagaattgttggtttatttgcttcactaagaggtttccctagtgagacacggaacaaccatgtctcgttctattctgtgttcttatcatttcacttcctgcccagggccctgctaaagtaggctcttcataaatatttgctgaatgcatgtatacatgcatgcatgcatgaatgaatggacaaatgaataagtggaatggaatagttaaatgagccaattttgatattttgctaataaccctgaccaagctgttggtgagttcacaggttgaaaccagtacaggcagttcttaacataggaatgtgttgagttccaaaagtttgtttggaaattggttgttcagaacttggaacatgttttcccatataaagatgttataaactaaactatgcttaactattcagcttagtccacaaaaatattatttgaggcatcatgtcactgaaataaaattagaaaataactgaggtgtcaccttttcattttattaaaatattttaagcccacatttcatctcaagaaactctaaaagacattttctggcactgtgtaatgttataaatgaaacaaaactgaatgctggtaaaggcttagtgtgggtaaagcagggagataaagagattgtgaaaattttatgggaaactgagtgtttttaagagcatcaattctttactatttttgttctacttcagaaattatcgttttctttgccatgctcaatgtttatcacaagaactccttttgagatcattggaaagattatggcccttttttgagaatcaaatgtaaagatatatagacacattttagagacctcctccaaaaaaaatcttcaccattcacttccaacctcctttaacaaaattttggtttatctaatttgtttctcttgctt

SEQ ID NO: 676550 - DNA, 1439 bp, Homo sapiens
tggacaaatattgtctgtgtttcagtacaactttatttattggcaccaagatttgaatttcatgtaattttcatgtgccacaaaatttgatttttcttttgatttttcaaagccgttttaaaatgtaaagaacattcttagcccatagggccatacaaaagtctcgcaggctatagttttgctgaccaagttctacctggttaccagaattagctaagtaaaatataagtctgaacatttcattcgaatgcttaaacccatcaaaggtttgccaacagggactacaagaataaggcttaccttacttaaaatggcttattgattccctcatgatcacaggtccagcatcatagcttgccagttcatagcttgcactgcactcttcagaatgctgacctccttgcagtatcctgtccacactgagatacttctttttgaggccttgrcctcccttcctggagtgtctcccatttacctttatttttctctttctttatctctcttcctttcttcttcttctttttttttttttaaatattgtattagaattgttggtttatttgcttcactaagaggtttccctagtgagacacggaacaaccatgtctcgttctattctgtgttcttatcatttcacttcctgcccagggccctgctaaagtaggctcttcataaatatttgctgaatgcatgtatacatgcatgcatgcatgaatgaatggacaaatgaataagtggaatggaatagttaaatgagccaattttgatattttgctaataaccctgaccaagctgttggtgagttcacaggttgaaaccagtacaggcagttcttaacataggaatgtgttgagttccaaaagtttgtttggaaattggttgttcagaacttggaacatgttttcccatataaagatgttataaactaaactatgcttaactattcagcttagtccacaaaaatattatttgaggcatcatgtcactgaaataaaattagaaaataactgaggtgtcaccttttcattttattaaaatattttaagcccacatttcatctcaagaaactctaaaagacattttctggcactgtgtaatgttataaatgaaacaaaactgaatgctggtaaaggcttagtgtgggtaaagcagggagataaagagattgtgaaaattttatgggaaactgagtgtttttaagagcatcaattctttactatttttgttctacttcagaaattatcgttttctttgccatgctcaatgtttatcacaagaactccttttgagatcattggaaagattatggcccttttttgagaatcaaatgtaaagatatatagacacattttagagacctcctccaaaaaaaatcttcaccattcacttccaacctcctttaacaaaattttggtttatctaatttgtttctcttgctt

SEQ ID NO: 676551 - DNA, 1439 bp, Homo sapiens
tggacaaatattgtctgtgtttcagtacaactttatttattggcaccaagatttgaatttcatgtaattttcatgtgccacaaaatttgatttttcttttgatttttcaaagccgttttaaaatgtaaagaacattcttagcccatagggccatacaaaagtctcgcaggctatagttttgctgaccaagttctacctggttaccagaattagctaagtaaaatataagtctgaacatttcattcgaatgcttaaacccatcaaaggtttgccaacagggactacaagaataaggcttaccttacttaaaatggcttattgattccctcatgatcacaggtccagcatcatagcttgccagttcatagcttgcactgcactcttcagaatgctgacctccttgcagtatcctgtccacactgagatacttctttttgaggccttgacctcccttcctggagtgtctcccatttacctttatttttctctttctttatctctcttcctttcttcttcttctttttttttttttaaatattgtattagaattgttggtttatttgcttcactaagaggtttccctagtgagacacggmacaaccatgtctcgttctattctgtgttcttatcatttcacttcctgcccagggccctgctaaagtaggctcttcataaatatttgctgaatgcatgtatacatgcatgcatgcatgaatgaatggacaaatgaataagtggaatggaatagttaaatgagccaattttgatattttgctaataaccctgaccaagctgttggtgagttcacaggttgaaaccagtacaggcagttcttaacataggaatgtgttgagttccaaaagtttgtttggaaattggttgttcagaacttggaacatgttttcccatataaagatgttataaactaaactatgcttaactattcagcttagtccacaaaaatattatttgaggcatcatgtcactgaaataaaattagaaaataactgaggtgtcaccttttcattttattaaaatattttaagcccacatttcatctcaagaaactctaaaagacattttctggcactgtgtaatgttataaatgaaacaaaactgaatgctggtaaaggcttagtgtgggtaaagcagggagataaagagattgtgaaaattttatgggaaactgagtgtttttaagagcatcaattctttactatttttgttctacttcagaaattatcgttttctttgccatgctcaatgtttatcacaagaactccttttgagatcattggaaagattatggcccttttttgagaatcaaatgtaaagatatatagacacattttagagacctcctccaaaaaaaatcttcaccattcacttccaacctcctttaacaaaattttggtttatctaatttgtttctcttgctt

SEQ ID NO: 676552 - DNA, 1439 bp, Homo sapiens
tggacaaatattgtctgtgtttcagtacaactttatttattggcaccaagatttgaatttcatgtaattttcatgtgccacaaaatttgatttttcttttgatttttcaaagccgttttaaaatgtaaagaacattcttagcccatagggccatacaaaagtctcgcaggctatagttttgctgaccaagttctacctggttaccagaattagctaagtaaaatataagtctgaacatttcattcgaatgcttaaacccatcaaaggtttgccaacagggactacaagaataaggcttaccttacttaaaatggcttattgattccctcatgatcacaggtccagcatcatagcttgccagttcatagcttgcactgcactcttcagaatgctgacctccttgcagtatcctgtccacactgagatacttctttttgaggccttgacctcccttcctggagtgtctcccatttacctttatttttctctttctttatctctcttcctttcttcttcttctttttttttttttaaatattgtattagaattgttggtttatttgcttcactaagaggtttccctagtgagacacggaacaaccatgtctcgttctattctgtgttcttatcatttcacttcctgcccagggccctgctaaastaggctcttcataaatatttgctgaatgcatgtatacatgcatgcatgcatgaatgaatggacaaatgaataagtggaatggaatagttaaatgagccaattttgatattttgctaataaccctgaccaagctgttggtgagttcacaggttgaaaccagtacaggcagttcttaacataggaatgtgttgagttccaaaagtttgtttggaaattggttgttcagaacttggaacatgttttcccatataaagatgttataaactaaactatgcttaactattcagcttagtccacaaaaatattatttgaggcatcatgtcactgaaataaaattagaaaataactgaggtgtcaccttttcattttattaaaatattttaagcccacatttcatctcaagaaactctaaaagacattttctggcactgtgtaatgttataaatgaaacaaaactgaatgctggtaaaggcttagtgtgggtaaagcagggagataaagagattgtgaaaattttatgggaaactgagtgtttttaagagcatcaattctttactatttttgttctacttcagaaattatcgttttctttgccatgctcaatgtttatcacaagaactccttttgagatcattggaaagattatggcccttttttgagaatcaaatgtaaagatatatagacacattttagagacctcctccaaaaaaaatcttcaccattcacttccaacctcctttaacaaaattttggtttatctaatttgtttctcttgctt

SEQ ID NO: 676553 - DNA, 664 bp, Homo sapiens
cataactccagcagtgccatttattttgtgttccctgatattgtacaacgagagggttccaggaggggtgccatgcacatagattacgtagaattccatctatgggggcagtttctaccccagggttagttaaaaccgtagagggataacatagatgagtaaaatggctttctatgctcaggagacttacaagaattagtttttttcctttgtccccccctcaatattataccacttagaacactagataattctatactactacttgtagaaacagtcaactgagtcctgctaaattaaaaagaaagagacaccactggtttattcctttggttaaaaaaagccctcagaatttgacacagaatcatttcatcctgtttaagattatgtaattttgtccttttgaatttggttattccagaaaatgtacgtttytacttaatgcaaaaaactgtacatctctgaatcatattttcatggtgtatcggaagtgagcttttttcccctttgttttccctgattatccaggtgtcttttatcctatgttgttgtactcccccatttaaaacatacaaatactctctctcatgtttccagaagttatttatcttctttccttgggactaaaatgcatgtaagggtgtaaggttaatgactaggatag

SEQ ID NO: 676554 - DNA, 615 bp, Homo sapiens
catgcctcaacctcccaagtagctgggattacaggcatgcgccaccatgtctgtctaaactaaatcttttcctgatgcttttaaagatttaaaaattttttgctctactttttaaactttccgaaattattttttctgtatactatgatgtaaaaaatctaattttaattttgtccttattaatagtccatcttttatttatttccagtgctacccctctcatagaccaatacccattatatgtgagtttattctatttgattggacaatttacctaatatggcaccaatgctacactattactatarctttattaaatgttttgatatctggtagaacaagttctcccatttacttatttttcacaaatttctttttttttaaatgatagcaagtttattaagaaagcagaggaataaaagaataggcaaagcagccacaaatttcttatattctcttgtaacttacttctctgtgtaacttttagaatagacttgtaaagttccacgaaaaatcttgttgagacttttgtttgatattgtgttgaattcatgcattagtttagaggaaattcacatctttaaaagtgtggattttctcacctacacacatctt

SEQ ID NO: 676555 - DNA, 615 bp, Homo sapiens
catgcctcaacctcccaagtagctgggattacaggcatgcgccaccatgtctgtctaaactaaatcttttcctgatgcttttaaagatttaaaaattttttgctctactttttaaactttccgaaattattttttctgtatactatgatgtaaaaaatctaattttaattttgtccttattaatagtccatcttttatttatttccagtgctacccctctcatagaccaatacccattatatgtgagtttattctatttgattggacaatttacctaatatggcaccaatgctacactattactatagctttattaaatgttttgatatctggtagaacaagttctcccatttacttatttttcacaaatttctttttttttaaatgatagcaagtttattaagaaagcagaggaataaaagaataggcaaagcrgccacaaatttcttatattctcttgtaacttacttctctgtgtaacttttagaatagacttgtaaagttccacgaaaaatcttgttgagacttttgtttgatattgtgttgaattcatgcattagtttagaggaaattcacatctttaaaagtgtggattttctcacctacacacatctt

SEQ ID NO: 676556 - DNA, 640 bp, Homo sapiens
ataaatatgtttgtttacatttattctgttacagttgactactgatggtatttgcaattttaccatttgtaacatagagtcatttgtaaattaatacaaactattttaagcctttgatttcttttaattcctaccttagggcattcactgaaagaatgagattaacttgagggaaagggagaacacagagaatggggtggtaaaaagatattgctataaaagtctttgggtagcagaaaaagactagcattggggcataggaaaagacatggggtagtgacagacaagtgtttgtatcgaaattctgccttaggtggattttgattaggatgggagagagaaagagtgagaatgagaataagaatcacacacgcgtgcgcacacacacacacgcacacacacacgcagagcaagctctttgttacttcatttctgccttctttctatcttcacccaagacaagtgtcttttttgctatgcgaggacttaaactaggcttttttaaaccgaatttgagctatactctgggctaattgattcttgcaagctagtctggcatttatggtgcctgcttttgagaaaagatkcctttgcaaatctgaacaataagcacttaggaagcctcttacaacaaattgac

SEQ ID NO: 676557 - DNA, 628 bp, Homo sapiens
acacttgtctttcaagttacccacttggcccttttccaagtgtattttctttcctttcattcctgttctaaagcttttgaataaactttcactcctgctctaaaacttgccccagtctctcctgccttatgaggaggcaagaattgaggctgctgtagatccatgtggattcactgctgctaacatactttggtgcygtgggactccagtacatttgctgccactaacacctagacgtgcatccacaggacagtgtgtatgtatgcatgagagacagacagagaggaagagcaagacagaaacagacaggccgggatgaaagtaatagaaatcttaagaaagaagagaaaagatcagaaaagaggccaagatactgagaagaaagagggtgaagagggtagcaagagagaggtacagctatttatagcctgtcttatggttgtgtaatacctgtctggctctggctgctgttatagtagcattttatgaaggttatccttccttaaggaataccataagaatttagctttcctacatagttgcaatattgaaaataaggctggtaattgggtcatcttattaggaaggaactatcacgaagcagttcaaagagcttccagttattccc

SEQ ID NO: 676558 - DNA, 1414 bp, Homo sapiens
atactttataaattttgtttagcttgttgattttgcatctgaaatttacattacaataaaataaagataaaatttaatattttccctcagatgcattgccaagtatcccaacatagtttgttgaatatttcttttttctctgctgatttgaaatgccaattttctcatacaccaaatttccatacagatacatggctgtggctctgtccaatattcttttccactgatctgttggcatattcccatgccaccatctatgttcaattactgtaggatgaatatatatagatatatgtatatctatctgtctatatcagagcagttctctctcattgttcttgtcttttaaaattattatagttatccttgctcatttactgttcagcatattttgcttccagtaatcgattgtaagaaatgaatgtaataatttttttaaatggctctgatgttgaaaagactgtaaaaaaatgaagtacacattggccaacttagcataccttttgaaagatattgtttaagattccatattgatcttgcaagatcattccagggaaataagtgtgttattgtggtggatacacccaccacaatctcaccatttgaggatgtatctcatcattttgatgatggctccaaatccaccttattctaacacaaagtggactttgcaatcatagttcttgtccactaattgtgacacgtggattccatcaccctgttgtttctgaggcattctttgcacttgcttccattaggtttatgaaatttgtgaattgggcatttttactgaacttttaatctttcatcatcttcaaacgatcgaataggctaaaaatgctgcagactgtgcaaggctgtgcacctcaatgctagaggaagtctgttaatcagacccgctgcatggatttcatcatttcacctcaagctttaccacaaaggttacatctgctgaattagaaatagggtgataattctcatttgcttctatctcaattcggacttagataaagrcttttaaaaacaaaattaccttctggacactgcttcttgatggactctgcccattttaattacaagagttactgtttttttaggagtcaggagctggattaatatgagttctttcactctcaaaagacctcacacctcatggccttaaatggttaaaacctgaaagagacagagtttaaaatataataattcattacttggcatgagattagtcctcaagtatttccacaaccacttgtacttcagggaaacccccatcaagaacctcattgatggctaaaagacaccgtcaggtaaagaagtaaatacagtccatacttgtaatttggttcatctgggttactggagcttcctctcatcattgcttctcttctgtttctatgcatttatattgccttca

SEQ ID NO: 676559 - DNA, 1414 bp, Homo sapiens
atactttataaattttgtttagcttgttgattttgcatctgaaatttacattacaataaaataaagataaaatttaatattttccctcagatgcattgccaagtatcccaacatagtttgttgaatatttcttttttctctgctgatttgaaatgccaattttctcatacaccaaatttccatacagatacatggctgtggctctgtccaatattcttttccactgatctgttggcatattcccatgccaccatctatgttcaattactgtaggatgaatatatatagatatatgtatatctatctgtctatatcagagcagttctctctcattgttcttgtcttttaaaattattatagttatccttgctcatttactgttcagcatattttgcttccagtaatcgattgtaagaaatgaatgtaataatttttttaaatggctctgatgttgaaaagactgtaaaaaaatgaagtacacattggccaacttagcataccttttgaaagatattgtttaagattccatattgatcttgcaagatcattccagggaaataagtgtgttattgtggtggatacacccaccacaatctcaccatttgaggatgtatctcatcattttgatgatggctccaaatccaccttattctaacacaaagtggactttgcaatcatagttcttgtccactaattgtgacacgtggattccatcaccctgttgtttctgaggcattctttgcacttgcttccattaggtttatgaaatttgtgaattgggcatttttactgaacttttaatctttcatcatcttcaaacgatcgaataggctaaaaatgctgcagactgtgcaaggctgtgcacctcaatgctagaggaagtctgttaatcagacccgctgcatggatttcatcatttcacctcaagctttaccacaaaggttacatctgctgaattagaaatagggtgataattctcatttgcttctatctcaattcggacttagataaagacttttaaaaacaaaattaccttctggacactgcttcttgatggactctgcccattttaattacaagagttactgtttttttaggagtcaggagctggattaatatgagttctttcactctcaaaagaccycacacctcatggccttaaatggttaaaacctgaaagagacagagtttaaaatataataattcattacttggcatgagattagtcctcaagtatttccacaaccacttgtacttcagggaaacccccatcaagaacctcattgatggctaaaagacaccgtcaggtaaagaagtaaatacagtccatacttgtaatttggttcatctgggttactggagcttcctctcatcattgcttctcttctgtttctatgcatttatattgccttca

SEQ ID NO: 676560 - DNA, 1677 bp, Homo sapiens
gacttatgctaatgcggtgggcttaagggatccttaaaccctctggccacaaaaagaaaatatttaaaagactcaaataaattaatctacaattttgcaaagaagtaaacgaattaagctaaggctggaggtaaagcctatgtacttaactcaggttaattcctcataacagttctgaggtaggtaatattcctccctttttatagatattattccctctatacagatacagagtgattataaaatttggccaaggctacacagcttgttgatgccagggttctgattttctaatccaattagaaacatgagtaataagcaagagcctatcaaaactgacctggtagatktgaaaaacaatctaagaatttctaaaactgaaaaatataatacttgaaataataagctcaatgaaagagtcagatagtagaagagcttcaaatgaaccagaagaaaggaaaagaaattatccaggacatagcacagaaagacagaaaatatgaaagagacgttaaaaaagacatgaaataggccaggcacagtggcttaacctgtaatgccagccaaacttgggaggccaaagcgggcagactgcttgagctcaggagttcaagaccagcctgagcaagataatgaaactctgtctctacaaaaaaaacaccaaaattagccaggtgtggtggcgtgcacctgtagtcccagagacttggggtgctaaggcaggagaatcgcttgagcccaggaggttgaggttgcagtgagagccatgttcacgccactgcattccaacctgggcaacagagtgagaccctgtctcaacaaaacaaaacaaaacatgaaatagaaataaggtcctacatatatccaacttgcattccagaaggagataaaacatggagaacaataattgaagaaataataactgaattttaaataattctaaatataatactttttttaaaaaggcaaaaacagattacaaaataggaaatactaaagttggctgggcgcagtggttcatgcctataatcccagcacttcaggagggtgaggtgggtggatcagttgaggtcaggagttcaagactagcctggccaacatagtgaaacccagtctctactaaaaatacaaaaattagctgggcatggtagtgcacgtctgtaaccccagctacttgggaggctgaagcaggagaatcgcttgaacccggaaggcggaggttgcagtgagccgacatcacaccactgtactccagcctgggcgacagagcaagactccatctcaaaaaaaaaaaaaaaaaaaaagagaaaatactaaagttaaaacaacaaaagaacactgttaacttttccatgagatataagtaagtgattcattaaaaaaaaaaaaaaaaaaagggaaaatggttctaggatgtttatttccagcaatctggctgaaaaaacaaacatgccagattaacttctttttaactttcttttaaaccactaagctgacaagaaagcacagaatattcagaggccaaaaactaaatgaaaactgggaacctgaagaggaaaactgaaaaataaagctctctttctctttggtcacataacagggaacaagctatggtttcacagccatacaggaggaagaggaaaagcctaggatacaagtctgtctcgtataaaattg

SEQ ID NO: 676561 - DNA, 659 bp, Homo sapiens
ccaatccctgtcctataagatctttgagagtattgagcttttaggggaaatatacagagattattggaagacagttagaaaagtgccagagtgctaatatctgtcgcagatatgcatgaggtggaagggtaatgtygcttgtctattggcctggtctgtctcccttaaacagtgagcaccttaaaggcagtgaactgcactttattaatttctgcatttttggggctcaaggcagcacacattaagtcaacatttgttgaatgaaagaattaatgtgtgttagagagtatcagtcagaatgaactagattatgctctggttaccaaaacctcactggcttagaatgattaacaaaaggttgatttcttgctcatgaaacaagtctttcaattggctgggagctctaaattatcaacacactggaattggtctgacggagtcgtcaccatctgaaacagtgtctatcatcacggcaaagggagagacagaaatgacaaattgttcactgctcagaggcgacccatatcaaccccattaacatttcattgaccaaagcaagtgcttcctcccttaggaagacaatctgtaagtctgtgcagacctctggtggaggtcccagatccctgggcaatgcacaatattcccatcatcaagtctac

SEQ ID NO: 676562 - DNA, 662 bp, Homo sapiens
tggcaggttactatttatgctgattccttaacaaagttcaagcctccaccatagttctagccttgtcatatgaatgtagcttcaatctctggacaaggagaggatcagttttcctygcttcaaactttacctgtgaactaaagtcctctcatcgttatcttggcctcaacactagaataagcaaaaaaacaaaaacaaaacaataatttagcctgtgaggttagaagtaacctctaacctcagtcagtcatgttagatttccctcattacttataattttgcgaaggcagtttcaagaccagcttccaaaaaatggcatttgcttaccttaaagaaggtgcagagaagggtagcttcaatcaaggtgaagcagagaaggcaaaaggaagcctgaatatgaggctgttccctcaggctgcaagatgaggctgtaaaggaaaggggctgagacttaaagctgggaagggtgccctccagaagaggacacccaggacttgtgtccccatccccctgacccccaagtctaagatgaaagattctgctgggtgaggctgcagagttgagttctggcaaataaaaggaaggctgatctcctaggtgggaaagtatggagcgtgtactcccagctggggtgctcatggatgacctgcatcatttcttta

SEQ ID NO: 676563 - DNA, 662 bp, Homo sapiens
tggcaggttactatttatgctgattccttaacaaagttcaagcctccaccatagttctagccttgtcatatgaatgtagcttcaatctctggacaaggagaggatcagttttccttgcttcaaactttacctgtgaactaaagtcctctcatcgttatcttggcctcaacactagaataagcaaaaaaacaaaaacaaaacaataatttagcytgtgaggttagaagtaacctctaacctcagtcagtcatgttagatttccctcattacttataattttgcgaaggcagtttcaagaccagcttccaaaaaatggcatttgcttaccttaaagaaggtgcagagaagggtagcttcaatcaaggtgaagcagagaaggcaaaaggaagcctgaatatgaggctgttccctcaggctgcaagatgaggctgtaaaggaaaggggctgagacttaaagctgggaagggtgccctccagaagaggacacccaggacttgtgtccccatccccctgacccccaagtctaagatgaaagattctgctgggtgaggctgcagagttgagttctggcaaataaaaggaaggctgatctcctaggtgggaaagtatggagcgtgtactcccagctggggtgctcatggatgacctgcatcatttcttta

SEQ ID NO: 676564 - DNA, 665 bp, Homo sapiens
aaggtctcgctatgctgtccagggtctctaactcctgtcctcaagcaatcctcccacctcagcctcacaaagtgctgggtttacaggagtgagccaccatgcctggcctcccgttttctaactaaagtaacagcgtgttttcatggcacctgaaccccttatctctggggaaacattatcaagatctggtgagtgagagtttcttgagacaagtaaaataatgcaaatagtccttgtcctccttctacggcagagtgcacaagagrgtgcttacccagaagaggtagacgcagggctgtggtacagtcggagtattcagggctcctgtgaccttggaaagctattggatcagagcagatttcagggaaaggaatgaagagcagtagctttgatttcacaattgacttcaggaggcagagattaaagggatatttgatgctttcgtgttgtgtagtcataatcagcagacaagtggcagacaggttacaggtcacaggttcctgtgcatctggcagaggccatagcagttgctgtccagcatcaaacaaatgctgtcctgctttagcaatgagttgggaagacgttccattgagtaaaatgaatctgcactttaaattctactggatgtggaaggtaaaaaagagggaagattcggctgagcacag

SEQ ID NO: 676565 - DNA, 665 bp, Homo sapiens
aaggtctcgctatgctgtccagggtctctaactcctgtcctcaagcaatcctcccacctcagcctcacaaagtgctgggtttacaggagtgagccaccatgcctggcctcccgttttctaactaaagtaacagcgtgttttcatggcacctgaaccccttatctctggggaaacattatcaagatctggtgagtgagagtttcttgagacaagtaaaataatgcaaatagtccttgtcctccttctacggcagagtgcacaagagggtgcttacccagaagaggtagacgcagggctgtggtacagtcggagtattcagggctcctgtgaccttggaaagctattggatcagagcagatttcagggaaaggaatgaagagcagtagctttgatttcacaattgactwcaggaggcagagattaaagggatatttgatgctttcgtgttgtgtagtcataatcagcagacaagtggcagacaggttacaggtcacaggttcctgtgcatctggcagaggccatagcagttgctgtccagcatcaaacaaatgctgtcctgctttagcaatgagttgggaagacgttccattgagtaaaatgaatctgcactttaaattctactggatgtggaaggtaaaaaagagggaagattcggctgagcacag

SEQ ID NO: 676566 - DNA, 890 bp, Homo sapiens
caggcggtaacactggatgtaatgttagggcatctatgggatagggagatcttagcgctggtctaaggaatacaaacatgactttagttggtgtctaaatccatagatgctcagcaccgaactcagtctgacttccagatgctaacaacacaccccaggcaggcgaaggggcatgcttttccatactcttccttttgactggcttgatcacagactgctgctccaaagctggtgttrcgcacagctcctcgtcccctccctgcctgcccagggccagcatcaggggctgtcatcactgggggatgcagagctacctgtaacagcaacaaggaccattgtcaactccgttcccgtctgacacccacactgcacctttcagagctgaccataagggttaccctcacctgcccagctgccagggaagaggagggctgtgggcttcattccgaatcaccagataaactaaactaggaaacctgaggcgagccgcagcctcagtttctctttggtgttgccgcccacagttcccgctgtactggttcagcgtgccagccatcctgaagggctggatggatagggtgctgtgccagggctttgcctttgacatcccaggattctacgattccggtttgctccaggtatgtgctcttggataaggatcactatggatagttggagggaggggacagaggatgcgtcttctatcaagttatatttctagtttccttccttttcttagcaaatatcgattgagcacccactatgtacaaagcaccatgtgctgcacacgggtggacacagcatcgtttctgaaatcatggagctttttgtctggtggggctgcgaacacatccacagcatactacacgcatggcaaacaagggagtggg

SEQ ID NO: 676567 - DNA, 890 bp, Homo sapiens
caggcggtaacactggatgtaatgttagggcatctatgggatagggagatcttagcgctggtctaaggaatacaaacatgactttagttggtgtctaaatccatagatgctcagcaccgaactcagtctgacttccagatgctaacaacacaccccaggcaggcgaaggggcatgcttttccatactcttccttttgactggcttgatcacagactgctgctccaaagctggtgttaygcacagctcctcgtcccctccctgcctgcccagggccagcatcaggggctgtcatcactgggggatgcagagctacctgtaacagcaacaaggaccattgtcaactccgttcccgtctgacacccacactgcacctttcagagctgaccataagggttaccctcacctgcccagctgccagggaagaggagggctgtgggcttcattccgaatcaccagataaactaaactaggaaacctgaggcgagccgcagcctcagtttctctttggtgttgccgcccacagttcccgctgtactggttcagcgtgccagccatcctgaagggctggatggatagggtgctgtgccagggctttgcctttgacatcccaggattctacgattccggtttgctccaggtatgtgctcttggataaggatcactatggatagttggagggaggggacagaggatgcgtcttctatcaagttatatttctagtttccttccttttcttagcaaatatcgattgagcacccactatgtacaaagcaccatgtgctgcacacgggtggacacagcatcgtttctgaaatcatggagctttttgtctggtggggctgcgaacacatccacagcatactacacgcatggcaaacaagggagtggg

SEQ ID NO: 676568 - DNA, 890 bp, Homo sapiens
caggcggtaacactggatgtaatgttagggcatctatgggatagggagatcttagcgctggtctaaggaatacaaacatgactttagttggtgtctaaatccatagatgctcagcaccgaactcagtctgacttccagatgctaacaacacaccccaggcaggcgaaggggcatgcttttccatactcttccttttgactggcttgatcacagactgctgctccaaagctggtgttacgcacagctcctcgtcccctccctgcctgcccagggccagcatcaggggctgtcatcactgggggatgcagagctacctgtaacagcaacaaggaccattgtcaactccgttcccgtctgacacccacactgcacctttcagagctgaccataagggttaccctcacctgcccagctgccagggaagaggagggctgtgggcttcattccgaatcaccagataaactaaactaggaaacctgaggcgagccgcagcctcagtttctctttggtgttgccgcccacagttcccgctgtactggttcagcgtgccrgccatcctgaagggctggatggatagggtgctgtgccagggctttgcctttgacatcccaggattctacgattccggtttgctccaggtatgtgctcttggataaggatcactatggatagttggagggaggggacagaggatgcgtcttctatcaagttatatttctagtttccttccttttcttagcaaatatcgattgagcacccactatgtacaaagcaccatgtgctgcacacgggtggacacagcatcgtttctgaaatcatggagctttttgtctggtggggctgcgaacacatccacagcatactacacgcatggcaaacaagggagtggg

SEQ ID NO: 676569 - DNA, 890 bp, Homo sapiens
caggcggtaacactggatgtaatgttagggcatctatgggatagggagatcttagcgctggtctaaggaatacaaacatgactttagttggtgtctaaatccatagatgctcagcaccgaactcagtctgacttccagatgctaacaacacaccccaggcaggcgaaggggcatgcttttccatactcttccttttgactggcttgatcacagactgctgctccaaagctggtgttacgcacagctcctcgtcccctccctgcctgcccagggccagcatcaggggctgtcatcactgggggatgcagagctacctgtaacagcaacaaggaccattgtcaactccgttcccgtctgacacccacactgcacctttcagagctgaccataagggttaccctcacctgcccagctgccagggaagaggagggctgtgggcttcattccgaatcaccagataaactaaactaggaaacctgaggcgagccgcagcctcagtttctctttggtgttgccgcccacagttcccgctgtactggttcagcgtgccagccatcctgaagggctggatggatagggtgctgtgccagggctttgcctttgacatcccaggattctacgattccggtttgctccaggtatgtgctcttggataaggatcactatggatagttggagggaggggacagaggatgcgtcttctatcaagttatatttctagtttccttccttttcttagcaaatatcgattgagcacccactatgtacaaagcaccatgtgctgcacacgggtggacacagcatcgtttctgaaatcrtggagctttttgtctggtggggctgcgaacacatccacagcatactacacgcatggcaaacaagggagtggg

SEQ ID NO: 676570 - DNA, 718 bp, Homo sapiens
caagcagctagggacagctacgtccttctggactctagtactgtggagataattatttgggactgctttcccctgacagccactgggttgtaatgtggctcgtgctgtggcttttgagaagccatcatttggcagtcagttggaaacgtggaaaastatagtttaggtacacagtttaaactataatttaggcatatttaaatagaggctatataaaaatagaggcatatttaaatagaggaaatagaggctataaattattatagatataagcccaaactctcttgctacagtggttttgttattcattatataggaaaatctacagccatttattttattgtttgactatacttttttacttaattttattattttgagacagagtctcactgtgtcactcaggctggaatgcagtcgcaccatcttggctcaccacaacctccgcctctcaggttcaagcgattctcctgcctcagcttcctgagcactgggattacaggcgcccgccagcgtaactggctaattttttgtatttttagtaaagacacagtttcgccatgttggccaggctggtctcgagctcctgacctcaggtgatccacctacctcggcctcccaaagtgatggaattacaggcaagagccaccgcacccagcctgtttggctatactttaattttgcaataaatccttttagcaaacagtgagctcaaaaa

SEQ ID NO: 676571 - DNA, 854 bp, Homo sapiens
gcctataaccccagctgacatcttgtttgcaacctcatgagaagatccttagttgaggggcaaccaaactcctgacccacagaaattgtgagagataataatgcttattgctattttaagctgcaaagttttggagtaatttgctatgtagcaacagataagtaatacagagagtctctcatgggccgttttcttccgtcttatctgccatcttgccttgatccttccgcttttttcatctctttttcttttttccttgccagagctccccaaacccagtctctagagggaatgctcaaaattactgtatttcactttgcagagtaatttaagtcttcttggtctaaacatctcccatctagattaagcccaagggattccatctttttggaccaaacatacctgttaaggtccaaaacagatattctgtcttcctaccaggcccagtggcatcaggtccagtcagacagctgccagcttgccctaatagaagtagatataggcaaagtactataagagcaaaaaataagaagcatgtaagctgacttgggggcttatggaggaggtaacatttgagctgagtttttaaggatatgtaggagttcatttggtagagaagtgaatgaaagttagttatgcagagtaaaagcaagtaaaaaagctcagaggtgagaaaagttatartcaattctgagaactttaaatatgtaagggttctgggtgacaacatctattagtgagcttggaagctgttgggggctagataatatcagacattgaaagccacacatatcaggagactacagacaacataaatctctgattcactgacttaaaaataagaacaataagga

SEQ ID NO: 676572 - DNA, 608 bp, Homo sapiens
tcaagtcctttgcccactttttaatttgttagtgtatgtttgctattgagttgtatgagttccttatagtatrttgtggatattaactcttcatcagttatatggtctgcaaatattttctcccacactgaatgctgccttttcattttttttatgtgtatacttgacttttaaaatcagtaacaaggtccatacaattcacatttggctgatatgcctcttgattctcttgtaatttgtaagttcctttgactcctttccttcttttaatttatttattaaaaaatggaatcatttgcactatagaatctcccacattctggattttgacaattgcattccaatggagtcctttagcatgttcctgtgtttcttataatccggtagttagatctagaatttgaccagatttaaggccaattttttttagctaggatactgcatgggtggttatgttttagctaggataccgcatgggtggttcatgatatcatgaaaaaagcatgttcttaaagcaatttaagtgacagtacaaaaggttgggtcaggtggggcacggtagctcatgcctgcaatcccagccctttgggaggccaaggcagaaggat

SEQ ID NO: 676573 - DNA, 609 bp, Homo sapiens
aatgaaaacaagatacaacatagcagattctctgggacagagctaaagcagtattaagaggaaagtttatagtacctgtgatggttaatactgagtgtcaacttgattggattgaaggatgcaatattgatcctggatgtgtctgtgagggtgttgtcaaaggagattaacatctgagtcagagggctggggaaggcagacccactcttaatcgcatgggcaccatttaatcagctgccagcgaatgtaaagcagaaaacatgaagtgacgagatgagcctagcctcccagtctacatctttctcccatgctggatgcttcctgccctcaaacagtggacttcaagttcttcagttttgggacttggactcactctccttgctcctcagcttgcagacagcctattgcgggaccttgtgataatgtaagttaatacttaatawactcctatatatatataatgcttaataaactcctatatatacagtttattaagaattatatatataggagtttattttatatatatatataaaacctagaaaacctagaaacctagaaaatatatatataaaacctagaaaaaaatatatataaaatatatatata

SEQ ID NO: 676574 - DNA, 1032 bp, Homo sapiens
tctaaaataaaagcttcccagttcccaaaagaactgttctattggagaactaatcagtatttaaaaggcagagcccacagctcgattaaacatcaagataaataaatattctttccaatgaaatgagcagtagatttgattccctttttctgcagatgaagatcaagtttgcgtaggttaaatataaatatggctacctgtaaaactaatgggtgataagacatagaactaaaagaggcaggataagacacagtttggtatccatacaagaaattggccggacacggtggctcacgtttgtaatctcagcattttgggagcccaaggcaggcagattgcttgagctcaggagtttaagaccaggctggccaacgtggtgaaacctgtctctacaaaagaaaaaaaaaaaaacacaaaaaaatagccaggcatggtggcacacacccatagtcccagctactctggaggctgaggtgggaggatcgctggagcctcggaggcagaggttgcagtgagctatgatggcaccattgcactccagcctgggcaacagagtgagacctcatccaaaaaaaaaaagaagaagaagaagaagaagtcatggaagtgagacagataaaatgaagacatcaagagaagaaaagaataaaggtatctagaaatggctagagatgatgaagtaaactttggagtaaggaaagaatgactagaggaagtgattatagtggtaatgggamcaactccagggctctatcctcacttgctggcttggcaaattagttaaatgctcttacgggtaagtttcctcatcagttaaaaaaagaaaaaaaaaaaagtaaatataccacctcagttacagtgcacagtgcctgacacagcatttgttgtatatattaaatgttagttattattactattattgttgattatagcagaagccaaagaaatacactttgatggtgttactcatgctagacctaagaaacaaattgtaatttaagagatttctggtatagaatgctccaaatgtca

SEQ ID NO: 676575 - DNA, 1820 bp, Homo sapiens
gagagagaactgttactctttaataaagacatgacctcagtgatttagatgttaaggacatttcattaataaaacttttgggcaatccgtttcttcaattttacctcttgtcttctctctcctttcctttaatctacttaggatgtgtataacctagggacagatggaaacctcagtctcattgagtaaaagggaaaagggagggaaggagggaggaggaaaataaagaagaaaaggaggaaaggaaaaatcaataaaggaacaaaagaaaaggtaaaaactgtactacttaaaagagatttttatatatattaaatagcctcaagtaacatgtagtaaactcaaatattctcattctaacaacttattaatattagaaacttctctttaaaatgagtatagatctttccatttttatcaagtgtcaatgctatctggtttgaggctgcattttgaatagaacattaaacaatcctgatggtattagaatctgaagttttaataaagttttcagaatatgaaattattaaaaatgcaaaaataataactcctttgaaaatctatgagggattatttctaatttcacagaatcattagggcactctgtatattcctttgattttagtatctcctagctcatatgtgaaaattttgttgccaagcaagaaggttaatagtgcatgttgattcacttctaggtttggtgttcccaagtaattacaatttttatcttttctttttgaacagaaatgaagtatttctaaatattacacaatctgaattttaatggctacctagggcaaaatggggcttatcatagttccatgatctttttgactatggaaagcatgaactactactcgttaataaaaacatgacctcaatgatttagatgttaagggcatttcattaataaaagttttgggcagtccatttcttgtattttacctcrtctcttttcctataatctacttaggatgtgtatgatctagggacagatggaaacctcagactctttgggtaaacagtcatataaacataaatgcaaaagagaaagcaatgtagtatgtcatgaaatactttcatttattacaataagcacttttttattcacaaacttattttactaacttttaaattatttttgctttttacttcccatttcttctttctggatacatttttttcttcttcctgaagtatttaatgcgctatcatgagggccctgattagaaatatttccaattttttgcgtatttaaaattatcttaattagccctggctcttggttaggggatacggggttcatagttcttttcctcatcatttgaaatacattactctgttgtcttctggctccttaacaactgataataaattttaaaataataataagttgcaatctctaatatatatcagtttttctctacatgccagggatggttctgaggattaagtgagataatatgtgcaaagtgcttaaatgaggagtccaaggcacagaaagatggagtagcaaacaactgagcttgcacaacttagaaatcactgaacagaattcgagtccagggacctctaacaacaaatgtgttgctcatgtgagttgtattgtcctgtagttaacctgcctttatcacctggtagttttaaaggtttttttttttaatttttttcgttagtgttttacctttttactagaaaatgtctatatctaaatagcatttatttctactttatcttctcagcacatactggttttcttaaatctaagtctcatgtttctcttcgatgctgcaaaattcttagtcattatctgtttg

SEQ ID NO: 676576 - DNA, 1107 bp, Homo sapiens
cacccactgactcagggctcagactcagcctctattgtccagagcactggcttggcgtccagcaatgaaggctggagaatgcagcctggattcccctacacacacacacacacacacacacacacacacacacacacacacacacacacaggtgtctactgacctggagtgactggaatagcacctggggataaatgtgacaactgtgcattgaaccctgggtcagggacgttccaatggccaagagagtgacacagccaggaccctggtggacagccagaggggccacttcaggatggatgtggggagagtggaagaggcagggagtaatcctgggrgacagcagggaggaggcacttcttccctatgtccaggagagggcaatagagggaagactgaggctgaagaattgacggctctggacccaggacagacagacagacagacagacagacagacagacagacacgcacacacacccatctctgtctagcaagcagcctcctaagatagctgttctccctatcatgacggtgtagccaccatcctgttgtatactaggagagaacttaacccacctgggggaaaatagctccccaagagctggcaccagtaccactgatggccctgcttcctctgagtgagatgcccaggaggaggagccctagggaagaagtcagggacagggaccaggataccactctgtcactgtgtgaccctcagcaagtcactaacccttggcctcatttttcctgtcttgtgaaagaggacaataattcctacttctcaagattgttttcaagataaaataacattagcattgtacaatgatgcaaatgcctcattaccattattccttaagttgttttccagctctaatgttgtttccaacattacatttaagaccttaggattctgtttcttgcttttgtcatatctcttcccaagtgtcatcactatatggatgttgagggcccccgatgacagtccctttggtaaggtcctcttttgaggaggggagggtacagggtggactcatctcagtgtgaacttggcaagtcactgtccctctctgatcttgtttcctcatctggagaaggagtgaga

SEQ ID NO: 676577 - DNA, 1107 bp, Homo sapiens
cacccactgactcagggctcagactcagcctctattgtccagagcactggcttggcgtccagcaatgaaggctggagaatgcagcctggattcccctacacacacacacacacacacacacacacacacacacacacacacacacacacaggtgtctactgacctggagtgactggaatagcacctggggataaatgtgacaactgtgcattgaaccctgggtcagggacgttccaatggccaagagagtgacacagccaggaccctggtggacagccagaggggccacttcaggatggatgtggggagagtggaagaggcagggagtaatcctgggggacagcagggaggaggcacttcttccctatgtccaggagagggcaatagagggaagactgaggctgaagaattgacggctctggacccaggacagacagacagacagacagacagacagacagacagacasgcacacacacccatctctgtctagcaagcagcctcctaagatagctgttctccctatcatgacggtgtagccaccatcctgttgtatactaggagagaacttaacccacctgggggaaaatagctccccaagagctggcaccagtaccactgatggccctgcttcctctgagtgagatgcccaggaggaggagccctagggaagaagtcagggacagggaccaggataccactctgtcactgtgtgaccctcagcaagtcactaacccttggcctcatttttcctgtcttgtgaaagaggacaataattcctacttctcaagattgttttcaagataaaataacattagcattgtacaatgatgcaaatgcctcattaccattattccttaagttgttttccagctctaatgttgtttccaacattacatttaagaccttaggattctgtttcttgcttttgtcatatctcttcccaagtgtcatcactatatggatgttgagggcccccgatgacagtccctttggtaaggtcctcttttgaggaggggagggtacagggtggactcatctcagtgtgaacttggcaagtcactgtccctctctgatcttgtttcctcatctggagaaggagtgaga

SEQ ID NO: 676578 - DNA, 1107 bp, Homo sapiens
cacccactgactcagggctcagactcagcctctattgtccagagcactggcttggcgtccagcaatgaaggctggagaatgcagcctggattcccctacacacacacacacacacacacacacacacacacacacacacacacacacacaggtgtctactgacctggagtgactggaatagcacctggggataaatgtgacaactgtgcattgaaccctgggtcagggacgttccaatggccaagagagtgacacagccaggaccctggtggacagccagaggggccacttcaggatggatgtggggagagtggaagaggcagggagtaatcctgggggacagcagggaggaggcacttcttccctatgtccaggagagggcaatagagggaagactgaggctgaagaattgacggctctggacccaggacagacagacagacagacagacagacagacagacagacacgcacacacacccatctctgtctagcaagcagcctcctaagatagctgttctccctatcatgacggtgtagccaccatcctgttgtatactaggagagaacttaacccacctgggggaaaatagctccccaagagctggcaccagtaccactgatggccctgcttcctctgagtgagatgcccaggaggaggagccctagggaagaagtcagggacagggaccaggataccactctgtcactgtgtgaccctcagcaagtcactaacccttggcctcatttttcctgtcttgtgaaagaggacaataattcctacttctcaagattgttttcaagataaaataacattagcattgtacaatgatgcaaatgcctcattaccattattccttaagttgttttccagctctaatgttgtttccaacattacatttaagaccttaggattctgtttcttgsttttgtcatatctcttcccaagtgtcatcactatatggatgttgagggcccccgatgacagtccctttggtaaggtcctcttttgaggaggggagggtacagggtggactcatctcagtgtgaacttggcaagtcactgtccctctctgatcttgtttcctcatctggagaaggagtgaga

SEQ ID NO: 676579 - DNA, 3649 bp, Homo sapiens
cagttttttttttaaataaagatgaaaacttttcatctacccctgtctactgctcccacctcaatcctcccttctccacttagccaaacttctttgcttatgctaagaacaacctctgcttgggaaactgaatttggactgggaaaactgaatgaactggtggcaagccacagatttgggcttccttgggtataataattcttgtaaaaggtcatgcctcttgcagagcctgaaagtgatgcctgttcgggccattataagagatatggccttcagttggtccatgaggcctctaagcacccatgagtcatggtttcattcctcacagctgagctattacttgaggttccagagaatagcccctggagtgctatgtaaactcctgtaaaaactctcactgaagaaaagtacctgctgttgtcctgttagcatcctgtatttccttctgagtaagaaaagccattgttaagtatggtctatcatagttctatcagtgtaaactgtctagttgaacctaaaaccttcagagtaaaaagcttataatataatagctaacagtcatggaatatttattatgtgccataatttatttaatttaatcctcaactagccccaagaggtagggactattattatcctcatttgactgatgagtgagaagttgactaacttattcaaagttccatagttggttagtgcaggagcccatggtgcccagggttttctgactctagagccctggcccttaactaccatggtgtcctgaactgctgtttcatgtgtgtgtcttattttctcaacaagaccatactttacttgaaggtatgctgttcattacaatattcctcaagaaggcttagtattagtaccttgcccaccaaacacttgaattaaatattaaaataagaaaaattcatttctaagaagaacatcccctctccaactatgcctaccygattctgatagtttcattattctttatggcatcagtcattctactttgcactctttttttattaaactcttgctatgtgcataacattgtatcttcactaacaccatggattttcttaaatcttagcaacatcatcttctttgcttactgtctactctggaacaagaatatgcacaaagggaaactcacgacctattttgtattaaataattggaaaacttttccaggtcatcagtcagccccaaagagaacaataagctcgcttaagtaaaaccttactcaagtagcattacaagtcttcaaagagctcttcaggcaatgccagaacttatttctagaaggtggatttcttttttagaagaaatgaagccagaatgataatgagagacctatactcaactactcaccaaatcactaattgcaatgatatctgtaattggttcacttgaagtcttcaagggacttacctttcaaaaagggtaggagaagtactgtatccaagttcacatcatccttgactgtgcagacataaagttcctggccttcctcagagttggcaggagaaatactatacattatggatttcatggcattggctataaagaaaacaggctatgactgaggaaagcaccattctcagtgactgtagttttaaaggcacaaaaatataataatttagtcaaaaaaaaaaaaaaacctaaaggatgaagatgactggagtgtaccatggtttaaagtgttttaccccacctgtctgcctgttctctaattttctcttataaactaacaacattctctgtaccaatcggtatcttacaactaatcactattcctgttcaccttataacagctcttgcttctattacatcacagctctgggatgccttctgcttttatacatacttctaccctttattcctctcctaatttcctcccttctcccatcccccatccaaatcctcaagtcatccttctcatcaatagtgtacaattcttttttctggactttcatgtttataaatcgtaatttcctagccctacctcttgggctgcttataaaaggaactattgtagattgattggattaagttatctgaagcaaatcttgagtattttcaccctacttgtataagatttgtacagtgtgcttatctgggaaggcctagtgtggcccacaatgttagcaaggaaaaggtatgtacctcgtaaaggccaagtaatgtcatgttggagaatgagcttcagcagctggaccagggtagaactctgggaagctaagcttacctgagagggtttcccacttgctgttttcctcttcctccttttgtaggacatgaaagagcaacacgtccttagagagaaggtcctggcataggacctcacaataaagtgggtttccaaagcacctgtgaagggtagctgcagggaggtaagtaagggattgcacattagagatgaccactttaggggagccaacctcgaaattcatgaagggttagagacagatatctatctcctttccataccagactctagtaaaacccttaaagggttatgactaaggagtaaatgacaggttgaacttagcaatgacagtttgggcagctccagtaccccagttattccaagtataccaggatgaatctgtacatgagacttgtcagaacaagatgcaacacacatcacataacattgtttcctgtgctaggctgaggcacatgaactatcaggaacctgagagccaaagtgagatgactgctaatctacgtaggcaagggtttagagtcccaagcaaggcctatcttaagagagggatatgttgagggattagacagatcttagtgttccattccaaaatactctgcagggtgggtagattaggagaagtgacagaggataaataaaacaaattgtggaccagtgaatttttagcttgttcactactggaaaccccataaaccctagacctctgaaggcttttgagatccagatgctggtttcaaatgatatattctgtggtaagggaacaggaaggtagggttaaaaaaataaagaaattggaaccaactcaagaacacgtggatataattcctggggatatgccactggtgagggccaccttaatgtatttagtactttaaaatatacaatgcaatctctcatataccatctcctttaaaattcacataaaaacatacagtaatataattgttatttcacaggtgaaaaagctatgactcagagaggctaagtgatttgctctaggacataaaactactaagtgtcaggttcaatactagaattcactctcctcaaaaggagaaagcctgagttttggtgttgaaagaatttcacatcttggtcctaccatatatgtatatgtatatcctcaggttattagattagaaaacaatcctaggtctgactatccacaaaatataacagtaacccaattcagaaagccactgccttcattaccttcacaaataagaggtcactaaaaaggcagtgaagttgttcttccactatcccacaaagctgtctttgtaggcactcttgccggtaataggctgggcatgtatcaatctcaaagaagatggccatgagggtctggatggcatagaagcactgcttggaatctgcttccttcagcatcaatggcaacaccctggtgaatatgactatggtcatcag

SEQ ID NO: 676580 - DNA, 1795 bp, Homo sapiens
tagtgtatcctttctaatgttgatggacatttgagttaatttcagtttggggctactatgaatacaactgctctgaacattcttgaagatgtcttttttgaacataatacagccattcttttgagcatatacctaggggtggaactgctggttcacaggctaagtaaatgtttaggtttagtacaagttgccagttttccaaagtgactgtatcaatctgtacactggtgttaaagcctagtatctgtttttgtaaatactataataaaasatgctgattaaattgattaaattccctaatggctatttacattttatggctgccagtcaatgtgacagcaaagagacagcagtgacttacgactggagaagcttctacacattgatgttgtgtgccgtgtctttcactacaaactaaaaactagacccagtgactcttctgtgtattcaccacatggtttgttttggacgtatgtccatgggtagcaaacattcccagaagcttaaaagtagggtaatttttcttgtctgcatatcatttcctttcttccaagaacattcaagatgcaagaaattattttaatcacgtgaatgttctaccaaataaaacagatttgggctctttcctataaccaaaagtaataataagaaggaggattctgaggtggttcatatggattctcagggcacagaatccaaatctatggggttgcatttacgctactgttgttattggcctttaaaaaactgattatgttctgagtatttacagcatttcatttatagaagttacctctgagatctcccaagagattactaatgaagtaacgaaagggggccaaatacaaatcaactttggtcacctcacagtctcctcctctgtaacacaagagactcagaaagcaaaatggtccagaagagatagtgctgggtttggagtcagaagatccaggtttaatactaagatttgtgcttacaatgtgtgctactgtataaagttgaccctttgtatctgtgggttcacatctgtggatcagccaactgtggatcaaaaatattcagaaaacaaattgtgtctgaacatgtacagactttttttcttctcattattctctaaacaatacaggatagcaactatttacagagcatttacaatgtatcagaaattacaagtaatcttagcctagtatctttcctagaatatatgccagagagctgttaggtattcttgtctaaacaggtgattaagtaacttgcggatttaaaattccttgctgtagctacgtacaccagccaagttaacgtggacttacctccattttagttcttccactcaagccacaaatctacacacaaacactcagattaatttgaattttgaaatactaatttatagcaggaaaaatgcccacagccctgaatgtgaaaagacattcatgttaattatatagcatagcctgggcttcttattaagtgagtaatcctcaaaatagggattctccaaataattctctacaataatgaataggaagtcacaacggcaatgctaaccttcttgtgaaatataatcactaccagatatgttgtgcctgacacaactccaagtattgtatgtgtttaacaaggcttcacaataaccctaagaggtacctaaattatgcttcatttgcaaatacagagacactcaaaaaggtaacttcatttggtcaaggccacccacaagattatgagctgttagggacaaaatcaaacctggggctgtgtgactccacagttcatactcttaatttcttca

SEQ ID NO: 676581 - DNA, 1795 bp, Homo sapiens
tagtgtatcctttctaatgttgatggacatttgagttaatttcagtttggggctactatgaatacaactgctctgaacattcttgaagatgtcttttttgaacataatacagccattcttttgagcatatacctaggggtggaactgctggttcacaggctaagtaaatgtttaggtttagtacaagttgccagttttccaaagtgactgtatcaatctgtacactggtgttaaagcctagtatctgtttttgtaaatactataataaaagatgctgattaaattgattaaattccctaatggctatttacattttatggctgccagtcaatgtgacagcaaagagacagcagtgacttacgactggagaagcttctacacattgatgttgtgtgccgtgtctttcactacaaactaaaaactagacccagtgactcttctgtgtattcaccacatggtttgttttggacgtatgtccatgggtagcaaacattcccagaagcttaaaagtagggtaatttttcttgtctgcatatcatttcctttcttccaagaacattcaagatgcaagaaattattttaatcacgtgaatgttctaccaaataaaacagatttgggctctttcctataaccaaaagtaataataagaaggaggattctgaggtggttcatatggattctcagggcacagaatccaaatctatggggttgcatttacgctactgttgttattggcctttaaaaaactgattatgttctgagtatttacagcatttcatttatagaagttacctctgagatctcccaagagattactaatgaagtaacgaaagggggccaaatacaaatcaactttggtcacctcacagtctcctcctctgtaacacaagagactcagaaagcaaaatggtccagaagagatagtgctgggtttggagtcagaagatccaggtttaatactaagatttgtgcttacaatgtgtgctactgtataaagttgaccctttgtatctgtgggttcacatctgtggatcagccaactgtggatcaaaaatattcagaaaacaaattgtgtctgaacatgtacagactttttttcttctcattattctctaaacaatacaggatagcaactatttacagagcatttacaatgtatcagaaattacaagtaatcttagcctagtatctttcctagaatatatgccagagagctgttaggtattcttgtctaaacaggtgattaagtaacttgcggatttaaaattccttgctgtagctacgtacaccagccaagttaacgtggacttacctccattttagttcttccactcaagccacaaatctacacacaaacactcagattaatttgaattttgaaatactaatttatagcaggaaaaatgcccacagccctgaatgtgaaaagacattcatgttaattatatagcatagcctgggcttcttattaagtgagtaatcctcaaaatagggattctccaaataattctctacaataatgaataggaagtcacaacggcartgctaaccttcttgtgaaatataatcactaccagatatgttgtgcctgacacaactccaagtattgtatgtgtttaacaaggcttcacaataaccctaagaggtacctaaattatgcttcatttgcaaatacagagacactcaaaaaggtaacttcatttggtcaaggccacccacaagattatgagctgttagggacaaaatcaaacctggggctgtgtgactccacagttcatactcttaatttcttca

SEQ ID NO: 676582 - DNA, 897 bp, Homo sapiens
cctgcttagttttcttaaaatgagaatctatagttgtatttgctagtatctgcctaaagaatttctagaaggtgacacataaaaagaagaacaacgatgacctattcgggggaactgggtagttggggcacaatggtaaaaggaagacttttccctatatgcttgtgtgtactggcttttgaacaatttgactattattcacacataaaaattaaacgtaaaaaaaagygttatggcccatttcttaaaaaggggcagctggaggctgggcgcggtggctcatgcctgtatttccagcactttgggagattgaggcaggcggatcacctgaggtcagggagggatagccttaggagaaatacctaatgtagatgacaggttgatgggtgcagcaagccaccatggcatgtgtatacctatgtaacagacctgcacgttctgcacatgtatccaagaacttaaagtataataaaaataaataaataaataaaagagagacagaaagagagagagaaaaaaatggcagctggaaaagaatcaagagccatggacatatatgtccctttatgtctcatccttcagccctatatctactccaaatttcaaattacatccaaataatgcatttttctctttctctcttctttgaactaataataggaaatgtgatgttatctcacaatgctgaaaaataaaggagttaaaacttaatgctgaaaaaaaaagtagccaaacagcctttcagaaagaatagagcagaggctccacgacaatgagtacagctgtggtccgtggcttcttgaaagagttctgctgctgacaccatgaaaggcatggctgccactgcatatctggtgccactcaagacattttctaatagagacatttcctgagaat

SEQ ID NO: 676583 - DNA, 897 bp, Homo sapiens
cctgcttagttttcttaaaatgagaatctatagttgtatttgctagtatctgcctaaagaatttctagaaggtgacacataaaaagaagaacaacgatgacctattcgggggaactgggtagttggggcacaatggtaaaaggaagacttttccctatatgcttgtgtgtactggcttttgaacaatttgactattattcacacataaaaattaaacgtaaaaaaaagcgttatggcccatttcttaaaaaggggcagctggaggctgggcgcggtggctcatgcctgtatttccagcactttgggagattgaggcaggcggatcacctgaggtcagggagggatagccttaggagaaatacctaatgtagatgacaggttgatgggtgcagcaagccaccatggcatgtgtatacctatgtaacagacctgcacgttctgcacatgtatccaagaacttaaagtrtaataaaaataaataaataaataaaagagagacagaaagagagagagaaaaaaatggcagctggaaaagaatcaagagccatggacatatatgtccctttatgtctcatccttcagccctatatctactccaaatttcaaattacatccaaataatgcatttttctctttctctcttctttgaactaataataggaaatgtgatgttatctcacaatgctgaaaaataaaggagttaaaacttaatgctgaaaaaaaaagtagccaaacagcctttcagaaagaatagagcagaggctccacgacaatgagtacagctgtggtccgtggcttcttgaaagagttctgctgctgacaccatgaaaggcatggctgccactgcatatctggtgccactcaagacattttctaatagagacatttcctgagaat

SEQ ID NO: 676584 - DNA, 1459 bp, Homo sapiens
tcagactagcttctttcactcagcaatatgcatttaagattcctccatgttttcttgtggcttgagagctcatttatttttattactgatattccattgtatgaatgcaccctagttcattcttctactgaatgacatcttggttgcctccaatttttggcaattatgaaaaaagctattgtaaacacttgtgtgcagggttttgtgtgtacataagttttcgactcattttggtaaatacctatgaatatgatttctggatcatatggtaagagtatgttcatgtgcagtgggtggcttgcctgtaatcctagcactttgggagggcaaggtgggaagatgagagtggttatctttgtaagaaactaccaaactatcttccaaagtatttttggaattctcaccagcaatcaatgtgagctcctgttgctggatagagttttccttaatggcttaattatactaatagaggtaaaactcctaatttgaatggaaaatttcatgaaagaaccacattaatttccccaaaaaaaacctctgtcctacaaataaatggttgaaaaatagcatgatgatatatctaagacctgtcccctcatttgtgcactggattgataagtgtggccatttgccttgtggcrcttcaagaaaattgagtcatttgtctgggtactgtaatcccagcactttgggaggctgaggcaggcagatcacctgaggtcaggagttcgagacaagcctggccaacatggtgaaaccccgtctctgttaaaaataccaaaaaattagccaggcgtggtgttgggtacctgtaatcccagctactcaggaggctgaggcaagagaatcacttgaacccgggaggcagaggttgcagtgagctaagattgtgccactgcacactgcactctagcctgggtgacagagcaagactccatctcaaaaaaagaaaagaaaagaaaattgagtgatccttctttgtttagaaaagttataaacaggaatgacaaatgctggctcattttataaatactgtgtcatttctcctatttaatatttaagtgattaaattcagcttgactgattttattgtttattgagcacatactacgtgttaggtgttgtagatacattattatgttagtcttcacagcaactccatgaagttggtattatcttcattttacagttgagaaaactgaggcttagagagaaaagctgcccacgcttgtaactagcttttctgtcacttccagtgattacgaattccaaacccttctctagttctgaccatcacctagataaagaagatgtactatgagcacacatctttattaaaaaccctttcaggagacagaaaagcaattcaggagcacagcccattttaacgtaatttgtttaattattcccaaaataacaggcctcgaagcattaaaagagtcattgacaactgtataca

SEQ ID NO: 676585 - DNA, 869 bp, Homo sapiens
agacataatcttatatttaacttattttagaaagttaaataaattgattctatttatttttgtaatgtgaagtacactaggtttagtcttttcagtaataaaatggcaaaactagcccttaagcttcatggaggaagcattcactataccacccttttagcttaaaagaaaaatcagtgtatgacgcagcactagagcatgcacctttacctcctgaaagactggtcccttgtgtgtaagtcaatcgttttgaataataatctcttcagacatggtagattaaatcagagaaagtctgctatatatgcattttgacatctggtaacccggatttgcaaccagcttttgccacttactatgtgctatgsgcaaacacagaaacttctgtgatactgtaaaatggagctaaggacagctccttcggggttgctgtgaaggttaaagaggcaagttaatagtgcttggctttagagagtagctttctcctttgcattgcctgcgggatgggagaccggccagttaatactctggatggtggagggcttgcttctctgtatttgctttgcaatctttactccttcaggagaacacactgaacaccctattttccactgcattctctttcttttcagagtctgatgtgaatgctacacagggagaaaatcagccagatctagaggatctgaagatcaaaataatgctgggaatctcgttgatgaccctcctcctctttgtggtcctcttggcattctgtagtgctacactgtacaaactgaggcatctgaggtaagtctgcagacctctgcagtctttacaacaaatgcatgacatcgcattctctccctcctctctttagtagattcttagga

SEQ ID NO: 676586 - DNA, 579 bp, Homo sapiens
tatgttgaagttcttacccccagtacctcagaatgtatatctgaatacaaagtatttaaagaaatagttaagttaaaaggtggtctttagattgaaatccaatccaatatgactgatcctctttaaaaagaggagataagaacacaggcaggcaaatatatagtgggacaagatgcggcgaaaacacagggaaagatgactatctgcaagtctaggatagaagtctcaaaataagcaacccttccaacacccagactcagacaagtagcccccagaactgtgagaaaataaatgtgtgttgcttcagctatccagtgtatggtactttgttatgtcagccctagcaaactaatatactgctagccaccatatatatatacatatgtgtatatatgtatatatatgtatatgtgtatatatgtatatatgtgtgtatatatgtatataatgaagagctcgtttatagttccactgagtttttcctgtgtgtgttgcaggcatctttgaaacagcagtatcagcaatttagagtcagcatacatatatatatatatatatatatatatatatatrtatata

SEQ ID NO: 676587 - DNA, 3862 bp, Homo sapiens
ttcgtctacataataagaaccttggtctccaccttatcttaacccagacacattcctttctattgattccaggtctttaggtcacaacttaactctttcaaccaactgccaatcagaaaatctttgaatccacctgtaacctggaatccttcccctttttgagttgtcccatctttatggaccaaactaagtacaccttccatataccagttaatgtccttatgtctccctaaaaccatataatcccaagctgtagcccaaccaccttgggtacatgttgtcaggaccctgtggggttgtgtcatgggtcacggtcctcaccttgtgctcagaataaacctcttcaaacattttacggagtttggcttttttcgtcaacatgagcctctaacagttggttactggatcatcctgaggaatcaaggccatagcacttaaagacccataaataatcctacatgatattcactgtgtattctatgtaggtgtaatttccaagctaaaacataattaaccccactaatagacacaacaaacatcctctgtattatcagcacgcacacagggctttctctgctgcgagtggacttgtgtccttacttataattctggaatcttctctaggggagaggctggtctaatttctctctattgacccagggcaggcaggaaacaaggcacactgtggaaagaatgtttgaatgttcaggcttctaagtgacagaaaagcagcttgtctgaaaaatgatttttttctggcttctaaccagtgttaattcacttggaaaccaaggcagttttctcccctttactgaactctggatttcttttccaatcaaggcccctgacaccaaagaaggaaatggagcgtaaatcaggctacagagtggctgccattcattcgggaagccttattgttttccgtcctttgttcccctctagacccttgccaatccccaggccgcgaggccctctgaagccctgagcctggagcggtaggagacgggggaactgaaacgccgcggaaccagaggctgagggagcggcgcgatggagggaggaggagcgacggaccggcaggcctagctccggggctgcggcggctgaggcgcggggatggagcccctgcgggtgctggagctatacagcggcgtgggcggcatgcaccacgcgctgagaggtgagagtccatctagcacccctctctctattcgctcacgggggctggttggagcacccgcgccgggaaggggcggagcggcgagacgcaaggggcggacactgtggggcggacactgtggggcggccctcggttgtcctggaaacagctcctgcgcgccgccgtgtccacccctccagacgctgactcccttctcctggcgccgagtctggctcgaggggccgcacatggcgcctcaaagggcccagttgggagtcgggattcgcaaggcagtaaatcaacctcaaagggtatcaaaggggcgagaccctcgcctggtgccaagcccccattctaagtgtgcagccaccgagaagcatggagactcggtccttcatcctggggggcttcccagctggggagggagggagtgtcaggggctcccctggtgagagatggatcttggaagggataatagctacaattcaaggtagaagtttgcgaatgctaaataggatggtagaggaagcttgaagaacttggacgtctgatcgttggaaagaaacgtgtcttctgtagttctgcgtttagatgccagagaactgagttccagcttggtggcagtgtgacgttgggctacttcgtgaacagtgatgaacctgtttcctggttttaaaagagaatgattattataaggattaaagtctgtcaagtgcttgttagtgcctgatacattgtaaccactccaaatattatacattattatcactattactttaaaacgacatcacgagatattatcaagcaaactattacttttatgcacgtctttgattttgaggtttttgatttctttcatgctgagttggaactgaaagttttacttttggtgatattcactcaaaattatttattgagctcctattctgtgccagattttgtgctaggagctggggatacagaatgacaaacaggctttgaaggtgcatgtttattcttaaattactaagacaaccaccgaactgaaacttccctgcttccttatttaggaccaagagtaacaagagtaactgtaagatacagacaatatttaatgggtttagcgtataagttttttgagcagatttattgagtttcaattctagactaggttaatgatcattaagtttttagtacttgtttgccggctatctttatttctcattttaaaacttagcagcatcaaagcaaaactctagtactatttactctttgttaattctctaaagtgatataatgtccgcgttttcccatatcttgaaactccttaatgaattgcttagtactttatcataagctgtaattcagccattccttaagtgtcgaatatttagatcattcttcagtttttttgcaagtacagtgtgctacagttacattcttgagcataatgccgattttctctttaagcatgtttactaactgttggaattaattcaacagtaagacttaactgtgtgctagttactaagtgaaaaacagaatttttaaggcttttgagagagaggatagcaaattgcttttcagagatttttgagtgccttaactacatattcatcagggatatgtattatcaatttttaatccttgctaatttgttaggggaaattgtgtaattttaagtgacagttttgggattaatgaaagagtaaaatattttctctcctattagccaatgcaatgtgaatttgtacacgtttttctattgccagttctactgttgtgaatccaagctattawgttctgtaatttaaattattaacatagcttcccagcttctctccttacttccattctgcctccctactccgttttccttctagcaggcagcatgatcatttgcacagtaaaccagatcatgttacttcgttgcttaaatggttgcttttgagattgtaatcacagtcccatcttaacaggcttgtgagttctggcttctgtcttctcttcaattttatctgccactctcccttcagcatcccgcttcaccgtcaacacccaaagctgaaattctaattaaacgattccctgaattctttcctcagcctttcttgtcgaggcttactgtttttctttctctctactcctcaaaccctcgaagttcttcgatgttctggcctttgcttttgctgttgcctcatccagagtgctccctaaccccagactttttcactctagcttcggttcacatttcatgtcttagttcatatattggccttccctggctgaccctgtgatccaaagcaactttcctgcctccctgtacctctctgctctctcatcttttcggtggaaatctgcatattagggatatagactcttaatcatattgatgcaaatatttttccacacttgtttgccttcccatgttcacttatttgatgtactaaagtttaaaatttacctgtaataaaatgcattgctcctttccaggtggtttttaatataataataaagactaataacagcagctaactttagtgtttattagggatcttttaaattcaggtccttttttaagtatgtaataaactagttagcggtagaactggtattttaacctaggtctacctacctgaccttttaactatgctatgttgccgttgttctggttagaactactaacttccttggatctatacattaaataatataataagcagc

SEQ ID NO: 676588 - DNA, 3862 bp, Homo sapiens
ttcgtctacataataagaaccttggtctccaccttatcttaacccagacacattcctttctattgattccaggtctttaggtcacaacttaactctttcaaccaactgccaatcagaaaatctttgaatccacctgtaacctggaatccttcccctttttgagttgtcccatctttatggaccaaactaagtacaccttccatataccagttaatgtccttatgtctccctaaaaccatataatcccaagctgtagcccaaccaccttgggtacatgttgtcaggaccctgtggggttgtgtcatgggtcacggtcctcaccttgtgctcagaataaacctcttcaaacattttacggagtttggcttttttcgtcaacatgagcctctaacagttggttactggatcatcctgaggaatcaaggccatagcacttaaagacccataaataatcctacatgatattcactgtgtattctatgtaggtgtaatttccaagctaaaacataattaaccccactaatagacacaacaaacatcctctgtattatcagcacgcacacagggctttctctgctgcgagtggacttgtgtccttacttataattctggaatcttctctaggggagaggctggtctaatttctctctattgacccagggcaggcaggaaacaaggcacactgtggaaagaatgtttgaatgttcaggcttctaagtgacagaaaagcagcttgtctgaaaaatgatttttttctggcttctaaccagtgttaattcacttggaaaccaaggcagttttctcccctttactgaactctggatttcttttccaatcaaggcccctgacaccaaagaaggaaatggagcgtaaatcaggctacagagtggctgccattcattcgggaagccttattgttttccgtcctttgttcccctctagacccttgccaatccccaggccgcgaggccctctgaagccctgagcctggagcggtaggagacgggggaactgaaacgccgcggaaccagaggctgagggagcggcgcgatggagggaggaggagcgacggaccggcaggcctagctccggggctgcggcggctgaggcgcggggatggagcccctgcgggtgctggagctatacagcggcgtgggcggcatgcaccacgcgctgagaggtgagagtccatctagcacccctctctctattcgctcacgggggctggttggagcacccgcgccgggaaggggcggagcggcgagacgcaaggggcggacactgtggggcggacactgtggggcggccctcggttgtcctggaaacagctcctgcgcgccgccgtgtccacccctccagacgctgactcccttctcctggcgccgagtctggctcgaggggccgcacatggcgcctcaaagggcccagttgggagtcgggattcgcaaggcagtaaatcaacctcaaagggtatcaaaggggcgagaccctcgcctggtgccaagcccccattctaagtgtgcagccaccgagaagcatggagactcggtccttcatcctggggggcttcccagctggggagggagggagtgtcaggggctcccctggtgagagatggatcttggaagggataatagctacaattcaaggtagaagtttgcgaatgctaaataggatggtagaggaagcttgaagaacttggacgtctgatcgttggaaagaaacgtgtcttctgtagttctgcgtttagatgccagagaactgagttccagcttggtggcagtgtgacgttgggctacttcgtgaacagtgatgaacctgtttcctggttttaaaagagaatgattattataaggattaaagtctgtcaagtgcttgttagtgcctgatacattgtaaccactccaaatattatacattattatcactattactttaaaacgacatcacgagatattatcaagcaaactattacttttatgcacgtctttgattttgaggtttttgatttctttcatgctgagttggaactgaaagttttacttttggtgatattcactcaaaattatttattgagctcctattctgtgccagattttgtgctaggagctggggatacagaatgacaaacaggctttgaaggtgcatgtttattcttaaattactaagacaaccaccgaactgaaacttccctgcttccttatttaggaccaagagtaacaagagtaactgtaagatacagacaatatttaatgggtttagcgtataagttttttgagcagatttattgagtttcaattctagactaggttaatgatcattaagtttttagtacttgtttgccggctatctttatttctcattttaaaacttagcagcatcaaagcaaaactctagtactatttactctttgttaattctctaaagtgatataatgtccgcgttttcccatatcttgaaactccttaatgaattgcttagtactttatcataagctgtaattcagccattccttaagtgtcgaatatttagatcattcttcagtttttttgcaagtacagtgtgctacagttacattcttgagcataatgccgattttctctttaagcatgtttactaactgttggaattaattcaacagtaagacttaactgtgtgctagttactaagtgaaaaacagaatttttaaggcttttgagagagaggatagcaaattgcttttcagagatttttgagtgccttaactacatattcatcagggatatgtattatcaatttttaatccttgctaatttgttaggggaaattgtgtaattttaagtgacagttttgggattaatgaaagagtaaaatattttctctcctattagccaatgcaatgtgaatttgtacacgtttttctattgccagttctactgttgtgaatccaagctattaagttctgtaatttaaattattaacatagcttcccagcttctctccttacttccattctgcctccctactccgttttccttctagcaggcagcatgatcatttgcacartaaaccagatcatgttacttcgttgcttaaatggttgcttttgagattgtaatcacagtcccatcttaacaggcttgtgagttctggcttctgtcttctcttcaattttatctgccactctcccttcagcatcccgcttcaccgtcaacacccaaagctgaaattctaattaaacgattccctgaattctttcctcagcctttcttgtcgaggcttactgtttttctttctctctactcctcaaaccctcgaagttcttcgatgttctggcctttgcttttgctgttgcctcatccagagtgctccctaaccccagactttttcactctagcttcggttcacatttcatgtcttagttcatatattggccttccctggctgaccctgtgatccaaagcaactttcctgcctccctgtacctctctgctctctcatcttttcggtggaaatctgcatattagggatatagactcttaatcatattgatgcaaatatttttccacacttgtttgccttcccatgttcacttatttgatgtactaaagtttaaaatttacctgtaataaaatgcattgctcctttccaggtggtttttaatataataataaagactaataacagcagctaactttagtgtttattagggatcttttaaattcaggtccttttttaagtatgtaataaactagttagcggtagaactggtattttaacctaggtctacctacctgaccttttaactatgctatgttgccgttgttctggttagaactactaacttccttggatctatacattaaataatataataagcagc

SEQ ID NO: 676589 - DNA, 655 bp, Homo sapiens
attgagcatttactgtatcctaggcgttcgttayctatattctttttagagaccagtttatgcccttggaaattgaggtccctgcatcctcaggactaagggtaatgctgggctatgtggcctttctgtagcccctgctgaaagtgaatagctaaattgctttttctcttctcttctgccaaggaaagcttcagggctggtgcgaggttgtgggttgaggggctggagaagctgtattagctacctcatgacatcaacatgactttaaatagactttctagagacgttccggaaagattactcatgccttaattttctttctcaaggtcctcctcaaaactccaaattgcattatactacctgacataacatctttattttccattccttgtagattccttcactgtgctcctttttttttacattaatttgccatatttctctcttccaccacttctctggctctggtatgtcttttggtattttgttgaaaaataaattctcctaagatatagtgtcaaggacgtgataatttcatagatctccagcagttcctatccgtattttggctggtggtctcttatatttagtctggtgttagtaacaataataatctaaggtatgtcttgacacaaagtaaattttgtttggacag

SEQ ID NO: 676590 - DNA, 616 bp, Homo sapiens
catgaataaagtctaggcaaagtaatacatcaaagtactgaaaacacatcctcttcctctgtttcaatgaaaagatactcacgaatccctttcccaaattctgcctcctttttgagaattactactcttggatcactcaagtgatggagctcacataggcaaaattctatagaattatattcactttgacatttttaattatacattttcaaaatctatatatgtaacttaaaagtaaagaattttggagattgtagatttaaactgtatactaagaaatatcaaggcaactagtctttggaattcaagttaagattttgacagaattgacaggtttgctttttaaaacttatctgtaagtttaaccttttccttagaaacaataaccaccccccaattctattttgagaaggcaagttgaattagtgtcagtaatatcttagtacatccatttctcttaatagaaataactttttaagttatgcagtaggtcctaattttataacagtctaaaatatgtgcatcaatccatgcaaacagtgcatttgcttattggctttgaaaatctgttctttcctgagraagaaatttcagttcatcagtttttggatcacca

SEQ ID NO: 676591 - DNA, 645 bp, Homo sapiens
cttaatattggagccctcctttgcagcacacactataaaacttccttttaaggaaaaaaataatcttaacaatgtgctttatgaatacttcagttgttaactcttcatggtgtcatggttgaatacaagtctaatatatagcaagttttatatttttttgaatacttttaaagtgagatcacattatcttttatactgattcaaacttttaactactgataaaatttacccatggtaaaaattctgttataggcaattgaatrtctggatttgagaaattatatttgcttaatatatttaatcattttaaggaagtatcttgatgaacctgagtataaaaataaaagttttaatgattctcctgttttattgtaaaattgactttgttgttttgtcaagcttcttttgcatttttcactatatttcttttatattgtcatttattgtttatactcttatgattttaagggctcaaaaatgacagacaccctgaaaaatatcctgatctgttgaatgttaacctttttttcttttcaaagtttacattgcccttattgagccaatatgtagtctattgcacagagccattttgccctgtgcactttgccactgtgtgttacagcagactgtatgtccatcgagttt

SEQ ID NO: 676592 - DNA, 1224 bp, Homo sapiens
tgatctcgaactcctgacctcaggtgatccacccgcctcagccccgcaaagcgctgcgattacaggcatgagccaccgtgcccggccgaaatgggaccatttttattatcccgtcatgactctctctgagataagaccttctcttggccttgtaagttttattttaacagtgacaaaacacaggaatataaaaggaccagtcttgttggcaacatgtggtttcaaggagtctgacttttcccggcctgggtctctggaactgctgcagactctaagagcccactccccagaacgaccctccatgccctgcgtcctgatgactttgactcctgaccctcaaggttgtccagtcttggctggcttggctcttcatgagaacttcaattctttatttttagttgtattttttctacccatgtgatggaaaataattcccgtccaatgatggggatggaagggttgaggaggtgggtaggaggaagaactttccaaagaaaaacaaacggaattgattttccaaggtctgtgcctacatgggtgtttttccctctaaaaacatagcaggctgagttgattgactttaattatattgacttacagttcttgattgttgttactctttccctggcatctttgggagaaattatagcttgcttttactctgaaataaagatgtttccctttttgcatggtctggtctaaatgcttaatcatatgggaagaaaaagagaagccagtggattggccttatggaaatgaacgttagaggataaacagttaggggcttgatgaaatgttcaaaggcttttcttgctgattttcatgattgtctttattcacgctgttgtcatcctgccagcccaagtacagctgcgtctgtgatgctgggtggatgtyttcacccaacagccctgcctgcacgctggacagagacgagtgcagcttccagcccgggccttgctccacacttgtgcagtgtttcaacactcaaggctctttctactgtggggcctgtccaacaggtacattctcagggccacaagccaggctctgcatgccaggttggcgaggtgccagaaccaattttctttcactattgatgagtaagaagacaattcttaggaggtgttcaaatccagttttgtgtcctggttctgctcgacgatctcactgctatcacaattccacgtcaaaagggggaggcttgtccaaaactgtgctaga

SEQ ID NO: 676593 - DNA, 446 bp, Homo sapiens
ggaggcggaggttgcagtgagctgagatcgtgccactgcactccagcctgggtgacagagtgaggctctgtctaaaaaaaaaaaaaaaaaaaaaagaaaaagaaaaataatagtgattgtgttgaactgggttaggttcctggaataaagtaatcattattactgagaggagaggtatcagccgaagctccttctgcctacccattagtaaaagattaaaatayggaggaggagaaaaggctcttatattcaaatgccgtttgtacgtaggtgcatcaaaaagtgttgctcttcatttgtagactgacaagataatggagaagattgagttcccaggttgtcctgtattttttatcaccataaatctcagccccttgcagcagtgtgaaaaagacaatacgcatttccaagtccattagagaggaatagagtcaatgcaattattc

SEQ ID NO: 676594 - DNA, 1750 bp, Homo sapiens
  misc_feature 643, 644, 645, 646, 647, 648, 649, 650, 651, 652, 653, 654,655, 656, 657, 658, 659, 660, 661, 662, 663, 664, 665, 666,667, 668, 669, 670, 671, 672, 673, 674, 675, 676, 677, 678,679, 680, 681, 682, 683, 684, 685, 686, 687, 688, 689: n = A,T,C or G
  misc_feature 690, 691, 692, 693, 694, 695, 696, 697, 698, 699, 700, 701,702, 703, 704, 705, 706, 707, 708, 709, 710, 711, 712, 713,714, 715, 716, 717, 718, 719, 720, 721, 722, 723, 724, 725,726, 727, 728, 729, 730, 731, 732, 733, 734, 735, 736: n = A,T,C or G
  misc_feature 737, 738, 739, 740, 741, 742: n = A,T,C or G
gagttagacacacaactaaccataaatgcaatgtgataaattgtgtaaacaggtgtgtataccacttctccggaaggcagggatgatgtcatctctgtatccatgtatctacaattaacatatacatatgctcactcaaagatggctaaatcaaattcacaacattggatctatgatcttttcagtctcaatgaacagtaatgaatcttcagtgacagataggctcttgcaaggtgctgtattatgacatctgctcattccacatcctatgacttttcagaaatgttagaaacagccaagagctaagcaaagtatgcagcaaagtaggaagccaagagcaacaggcctagtccacgatgaaacattagcccatacactgccaggtattttcaaactatgccttacagagaatgactcacttaaaagtcttgcatatacaggtctgcttttagaaataagttcccacaccttcagcctttatcacaaacaagatttttcactgattgtacatgaaaagcacaccatacttacctcactggtggccaggcaaattaaacatgataatgtgtgtgaaagcaccatgcacagcatctattacactgcaggagctcaagaaatatttgaatctggatctgaagcaccnnnnnnnnnnnnnnnnnnnnnnnnnnnnnnnnnnnnnnnnnnnnnnnnnnnnnnnnnnnnnnnnnnnnnnnnnnnnnnnnnnnnnnnnnnnnnnnnnnnnttttgagaatccaaggaaaactgagaaaaaaaaaaatggcatgcctatacatacgtaccaatgtgcattcaattttggaggacgctggttcaggatacttattttactgaggggaaactgagggctagagaggacagttgatttgctgcagatcacattgctgtgcatttcactcctgtactgggggccttctactatttgctgcctcatgattcagagtgagataaaggcaaggagtcattggcaacagaagccagaaagctttcccctgaggctctctctgaggatcttggatttgcttctggaagcttagctctggagaagagcagcattcaggacaagcgaacaggtctggaacttgcttgggctagtcgcttcacttgagtgctttagtttcctcatctgtaaaatgggttaatcacagtaagtaacatataaagtggtgagaattaaagcattactatgtggaaagcatatagatcaatgtttattgaataatgtgtgtatatactctgtgttttcatttaattttctgccgtgtgtactttcctgtcattaaaatagtctttagaaacacggttttagggactgtacaaagtctttgcttcctgaattttgaacttggagaacagaagataaggaagggccaagtgagaaagagaagatgaaacaaaatacctgatgcttcttgtttgttgtaggaaataatgaggaaagaaaatagtcctcagactcacagcaggraacagaggactagaccatgaccttgagatccaggcagccagctgactgaggggtgtgtgcactcaggtgtatgccacacaccctccacatacacacacatgtgttctttgtcttagggaggaacaaggaacatttttgtcttggcattggattaagtttctatttctcaaaaatcatttcataaatataaaaacaccaaagctacagattgttgcctgttgctgcagttgatttctctttccctttctctctctctctctctct

SEQ ID NO: 676595 - DNA, 594 bp, Homo sapiens
aagtgtgtttgaatttaatttacagttcacaacaattttaagtctcataatagttgtattgcttaaatgagaagaggaaaacctctctaataccaaattggtggagggagtgttataatcttaaatcacctccaaaaatcataatacgtgatctctggcagttcttcagcctgagctatagcaaaatcgtctcttcattaataacttgtgaaagccacaccttcccccacctcaactatgctctgcattctaccagtttttaattcttttttcccttgcctctcattgcctgaaataaggcattggcaagtaagaggaaaaaaagaataaatttaagtccttctctatcccaacccaatatgcaccagtctatagaattacrattagaaaattgtgtctatggcatgtatcacacaacacaacctctgcaatttattagtgcaatgtgtgcacctaaagtctcacccaaacatgaaaaagccctgaacttagcatatttagctaaacagcccgtactccaaagtgatatgatttcagacaaccacacaaatttgaactagagtaggcagagttactttataagatcttaatgga

SEQ ID NO: 676596 - DNA, 642 bp, Homo sapiens
agatgtccattctcctccctgtccctgccccaccacttgcatttaccccttttattttattcatctcagcatactctgaaatggtcttgcttattttgtgtgtgtgtgtgtgtgtgtgtgtgtgtgtgtgtgtgtgtgtgtgtttaactatgagctcgtgagaacagggattttcttttaaactgctgtgtacctggcacaacatttgtcccctagtatgagcttggcatctttggggctgtaaacaggcttgagcactgacatggggcctggagaatgtggtttctggctaggcagctggaacawtctacaaaatctgaggggaaagctgtccttaccctaaacctggggaggtccctaggttcaagtctgcaggaaggggatctggttcaggagaaggccgtcctgtgaatttgccccacccaccaagctcagctggagcagggcctctgaaggaggtgccctctgtgtggctctgctgtggtgttggttcatgaaggacatgggaggggggcaggacaggagaggcagctcttcctggagaaaaacacacccagcccaagttggagccctcctgtggcattgggtggggaggattcccgccatcagttctctgtccatgggtgctagtctcacccctgc

SEQ ID NO: 676597 - DNA, 615 bp, Homo sapiens
tgcactttactatgcagcattattgtacaatctcttatttgttaaaatacatatggcaatatgggctcaggaaggaatctagaaaatacaaatcaaaatrtgcactgtcctcttggtatgatagaattgcatgggagtttttttgcttatctgtaatttctaatttttaaatatgtatttcttaagttattaaatatatattaaagaggggagagtttctttgccttgagaatcaagttcttgacgcaaacccctaaatgttaactatgaccccatcaatgtgagcttaccatgttctaggcattttgcatgcagtagctgattcatctcctgaaagttagatcttttatgcccatttcacagatgcaaaaaccgagacacgaattaccttgctcaatgtcacaaacatctctgtaattttaagaaggacaggccaagcacacctttctccatttttggttctaggtagtccgctttacaggagtgtgtttaccagccttctgtgtgtgcctgggtatgtatacgagcacgttaatcgccacactactgaggtcttcaactcaactatagagaagagtcattttacctccctcaactcaagattaatgtccttca

SEQ ID NO: 676598 - DNA, 650 bp, Homo sapiens
tatataaatgaaatccatttaaattttgtgacccttgatgaaaatatttcagcaaattattatttaccacaaaaaaatgaaggcaggtggtataaagtaaaagatattttggtacagcataacattattctgtaggccacacaatttaacttcttggttactgtatttagatctgtattttgtagtttcatcacttctaattagttaaatgtaatatttatggttatttctataaaatatttgtggacctacttttctaatgttgtttatgacatcttgaaataagataactcccttcaggaaaaaaaatttattagttgctagttttttgttctgaaaagacctcagaattttttggctcctctaaatatcgtgtacatcatggtgtttttgtyactgaaataccagggacttgaagtcctgttgcttgctgcatagaaagcaaatcactgagtattgccagagaagaaggctttaatcaggtgctgcagttgaggagatgggatatcagtctcaaatccatctcctcatctgactgcaattgagagactatgtagcagggaaggaatgtagctatatgctatatatacaggaaaacaggaatgagggaggagtagggaagaggtgtttccatttcttgatattagcct

SEQ ID NO: 676599 - DNA, 609 bp, Homo sapiens
gggtgttgagtagttactgcctgcaggacctcaaaccactgtaattaagtggctaggttacatatgacccagcaatctcactgctgggtatatacccaaaagaagagaatcagtatattgaagagacatctccactcccttgtttgttgcagcattattcacagaagccaaggtttggaagcaatctaagtatccatcaacagatgaatagataaagaaaatgtggtacatatgcatcatgcagaactattcagccacaaaaaaaggatgagatcctgtcatttgcaaaaatatggatgttactggaggtcattatgttaattgaaataagccagrcacagaaagacaaacatcacatgttcttaactatgtgtgggatgtaaaaatcaaaacaattgagcacatggagacagagagtagatgcatagttaccagaggctaggaagggtaatggacagtataggaaaggtgaggatggttaatgggcacaaaaactagtttgagagaatgaataatatctagtatttgatagcacaacagggtgactatagtcaaagtaacttaactatgcatttaaaaataactaaaagaggataattaagtggtttg

SEQ ID NO: 676600 - DNA, 609 bp, Homo sapiens
gggtgttgagtagttactgcctgcaggacctcaaaccactgtaattaagtggctaggttacatatgacccagcaatctcactgctgggtatatacccaaaagaagagaatcagtatattgaagagacatctccactcccttgtttgttgcagcattattcacagaagccaaggtttggaagcaatctaagtatccatcaacagatgaatagataaagaaaatgtggtacatatgcatcatgcagaactattcagccacaaaaaaaggatgagatcctgtcatttgcaaaaatatggatgttactggaggtcattatgttaattgaaataagccagacacagaaagacaaacrtcacatgttcttaactatgtgtgggatgtaaaaatcaaaacaattgagcacatggagacagagagtagatgcatagttaccagaggctaggaagggtaatggacagtataggaaaggtgaggatggttaatgggcacaaaaactagtttgagagaatgaataatatctagtatttgatagcacaacagggtgactatagtcaaagtaacttaactatgcatttaaaaataactaaaagaggataattaagtggtttg

SEQ ID NO: 676601 - DNA, 996 bp, Homo sapiens
agaaagattgagttatatctcatgataggtaatgcttaaggccaagcttcgtgtttaaaattctttattatctctaatagtttataaaataatttcccaactgtaagaacaagagagaaataaatgtattatatttagaatacatcaaaatacatctactgatgtgacagtacatttaactaaaaaattgcaaaacagatttgtgttttttaatttcagactttatatgaacactatagtggtggtgaaagtcataattcttcatcctccaagacttttgaaaaaaaaaggggaaaaaaatgatttgcagttattcgtaatgtcagataccacctataaaatatattggactgttatactcttgaatccctgtggaaatctacatttgaagacaacatcactctgaagtgttatcagcaaaaaaaattcagtagattatctttaaaagaaaactgtaaaaatagcaaccacttatggcactgtatatattgtagacttgttttctctgttttatgctcttgtgtaatctacttgacatcattttactcttggaatagtgggtggatagcaagtatattctaaaaaactttgtaaataaagttttgtggctaaaatgacactaacatttcaaagttgtaaggttgttttctttaagcaaatgtattgttggcatggcagcaaaattcttaattagtaaaaagtagattagggaagatgtgagactagaccttagtaaatgaactttgaaaaacaaatcctgaagggtttgaattccaaaatagacttcctaattatttccggcaccgataacagtctataattttaggactgaacttggctctttcaratattcataacgtctgttgtttttggtatttagaatatcatgctggattctgtgttgtaagctgtatagggcatgccctcactgtatgacttgctaggtaatggataattgtaaatgtggccccagagtctcttgactgaatctgatag

SEQ ID NO: 676602 - DNA, 634 bp, Homo sapiens
caagctcctctgggggtcttgggttgggatatacttgcttgggggagaaaatgggagactatctagaaggaaggtctgatttggagggatgtagcgctggcatggtagttgctatgtccgcctttcractggttgctatggggttgagccccagttcgggcaaatgtatgttcccggagaaaagcattttcagtcggcaattcctgacccaccctttgaaatgacttgattcagatactgtttatgaagcactttccgttctgaaatggggcctaagttcagggtagtgttcttttctgctgtttcatttgactgtaacgggagttacacaagtaacacagggtataatttgacctaattgattccaggcctcttcattgtcgctctaacatcttcctccctttattaaattcacatcagttcacatttcccttcgttaaacttccagttaaactcttgcagagatgagaatgctttctgcagataacttcagtaatggaagcacctaattttctgtttgggtgataaaaagcctctggtgatgaaaatatttactttaaaaaactgggattcttaactaagtgaaaaatatatatatgaaaattactgttctgcaaatagttagaacagggta

SEQ ID NO: 676603 - DNA, 627 bp, Homo sapiens
tctatctctatggatttgactaggcttgctacctcatataagtggaattatacagtatttgtccttttgtgggtggcacatttcacttcacacaatgtcctcggggttcatgtggtaccatgtgtcagaatttccttccgttttaaggttgaagagtattccatcataggtctgtaccacattgtgtttacccattcatccgtcagtggacatgtgggttgcttccagcttttggctattgtgaataatgctgccatgaacatgagtgtacaaatatccgttcaaggccctgcttttaatgcttttgcatatatatccagaaagataattgctggatcaatgctaattttatgtttgtttgaggaattgccacactatttgctacagtgctgcaccattttgcattcccatcagcaaagcacaagggttctagtttctctaaatctttatcaacacttgtcagaaaatgcccatacttttaatacatctctatgaagtagggctgaagaaggagaggagttactggtcaccattgcctgcacagcggccatgcccacctatgatayatgagccattcacccgctgacaggcagacgaccctccacacaggctgccttgctcttaacc

SEQ ID NO: 676604 - DNA, 1362 bp, Homo sapiens
tctaaataaataaataaataaaaagtacttggaaggggctgactgtgaagcgttaacaatcctttccactcatcaccacaatcatttgtgccacggcggtgcttctccaagctgtcaggtgggcaacagagtagctttctctgctcttgcagggaatttcagctcagggtgcaggtcccttccggtgggggctactgagcaggctgcagacagctgtggcctgtgtaggctgcgggcrctctcccatgctgtcagctctgctcaggacatgggctcagtcttgacagggcagaggcagaggcagagcagcctcattgattaaacattcgtcttctggaaactataccagggtttggacggactgtgctttgcaaagaatgttttatgaacatcaccgtttcgtattcttactgacagaggcagctgagccgcagcggcactcccatttcctgtaactccgcacagcctccagcaggccgggcctgggaatgagcccagggcggagctgccgcttcagagagctcagctggcaagccagcgcccttgctggaccaaggcatcttgttttcaagcttcccctctggagccctcactcatcctaatgctttctgtccacacaataccccctggctctaaggaacaaggaaatggcaaattagatttgcttgtctctgttgacctgaagaaagccttctctactgaagactaattggcaaattctgttttagggttcagcccaagtacttctgactgactctcacagactcacagaaaaatatgttcgagggtggagctggaggagacagtcaaggtcacacagtaggagcctgagggcagaggcgggctcctctccttccaaccctctctgtctctttcaccttccctgtgggaagaggtgggctcgcctcaaccctctgtttctttcaactttcctctctggggagaggtgggctctcctccactctctgtcttccccccccaccacccctctcttgtgcattcttctactttgcactactccatcagctgctggcccttttcctctcccctgatcacctctctgccacctaagcctgcaaagagctcctgcacacccacgagaaccttctcggataaggtggctgtcggcagtggtcggttaagctcctgagagactgtgttccctgttggggttgatgcagagttgggtgcaccttcggagacttccatttgcaaacatccctttgctaacttaaagataacagccctagaggtggctttactgggaagctaatgatgcttcaggctcctttacttacacagcctctttccaaggcctcgttctctgcatattgtttgttttttcttaaaggaggtctccca

SEQ ID NO: 676605 - DNA, 1476 bp, Homo sapiens
taccgacatagtcacttgctgtgtgactctgagcaagtcactttctctccccgagccttggttttctcctctggaaaatgggtcaaataatctttcccctctgagacgcgttgaaatgattaaataaagtgatacacaaaaggcaaatcctcacccgtagtaagcactcatgaatcttaccgtcctcatcacgtaaggacctggtgcaraaaaagaccagtcactgcttattgggcatttattctgtacaaggtttagttataagagatttacatatattgcctcattgatattcaccgctgccctatgggtgggcactatcatttctcccatttttacacatgagtaaactgaagttcagagaggttaagtgacttgcaccatgtcacacagcttggcacccagtaagtgttcattgtgactgtcgcgtgaaatgtgcaatacagcaccaagcacagaattagagctcaggaaagaaagaattctgctaggcacagtggttcacgtctgtaatcccagtatatgggagaccaaggtgggagaattgcttgagtccaggagttccagaccagcctggacaacatagtgagaccctatctctattaaaaaaaaattagctgggcatgcacctgtagttctagccactagggaggctgcggaaggaggatcgcttaagtccaggagttggaggctgcagtgagctatgatcacatcactgcactccagcctgggtgaccggcgagaacctgtcactgaaacgaaacgaaattattcccatggaagtgagatccagaaggcagggtgggactcaagctctaaggagcagctgggaagagggaagaggcgttaggagcgttcacagcggtccgcggcaggtgcaagggagggaaggcgagggggtctggtggagcctgtctacactgggacctcagcggtctcccaacttggaggcttgggagaagaggatcccgcctgtggttgaccgggggcgcacaggcggaggaggcgttaccttgggcgggagggcgaagaccaccggcagcagcgcgagcggcgtgaacagcagcaccagcagccgccgcgcgctccacaccttcttggccgctgctgccagcgccgccatcagcgcgatcgcctggcggtacgggccggcccgggactgccccgcctggccccggcgccggcttaaagcctgggggagggtcggggaggggactgcgctggggaacccgccctctccctgctcctcctggaggaaaagggtggtgcctgcgcccctgggaccgggtgaaagaggcccgggaacgttggagaaagttaggcactagaattagcaaacgggaccccagccgcagggcagtgtggccttgcctcttggcttcccagcaatgtggcctggggcagctggcttatcctctcctcgcctctgtttactcgcctgtgagatggctgaggatgacaaggcgaggattaagg

SEQ ID NO: 676606 - DNA, 583 bp, Homo sapiens
ttctacttcttttttctttcctcctccatgagtattgttatgtttactaaaatatttgtaattttaaatgtcattgcttatttaaaggcatgtcctggtcattatggaaaattcaggcaaaataaaaatgaaatgtaagctcatcagatagagaccgtctccattaacacttgctgtataacatttactattcttcctaacttcccccacatttgtttttatttcttcttcaaagcagttagagattataattagattgatttctatagtgccttgtttattcatcctcagtattgtgataagtggatggagcaattgctcacaaaagaaagaaaactgatgatatttaaacaaagtcctgygaacattattaaaatttcaataacataactttaagcttgtatataataatatttaaggtttacaaggcaatttcccattcacaattgtataaacctgaaatctttttcttccacttttattttggattcagagggtacatgtgcatgtttgttacacaggcatattgtgtgatgctgaggtttggggtatggatgatcccatcactgaggtagtgagcata

SEQ ID NO: 676607 - DNA, 1625 bp, Homo sapiens
ccacaccccactttccatctagccaaaaatccagactgtaagctctgttgtatcccagcacatagcacagtgcctggcacacraaaaggtgctaaacaaatatttgtttaatgatggaattttattcattaagccttgagtagagaaacagaacacataggccatctttctgatggcatacttcctctaccatgagaaggctgcgaaacgtaggaaagtgtgtgcatttttaatgattaaactacattgtatccaatgataataaatagtaaattatccactaaacataacaaaaatgtcaggactttaaaattatattattctcttcccatacagacattagcatgggatgacagaagctaattttaggagtcacctctactgcttaaatgtgtataaatcacactcctaaaaatgagactttcataccgaaataaaactgaaatttgccaatacacctcagagtaaaatgttatttaaggattagtaaaacatttattttcctagcatgtgaataggacacttgttctcataattttccttcacgtccttctccagaactgaatcttctggcatctggaagagattctttcaaatgcattcatacacctgcttcaaattcagactccccagcattggttaaagggagctcttccagatgatgccagaaggatggggctgcggtcaccagggcacactttgctaaggaaagagtggggtctgtccctgtcatctgaaatgaaccaaaggaaaagaaagatgctacttgaatccaattaataaagtgatgttattatcacttacaagtttaggaaagtgtgtgccccatgtcaaccatttacaataattacctttgccctaggtcattttctcttaccttttagcagagacgctcaagaaacattctttgtaagactatgttctttcctactgtaagtatgtttcactcagcaaaatctcagggcctcaaaggggcacttcccagagaagctcagacttggcttcaggttgcggcaggttccagagggaggcagctggcagcagtcaggggcctgggtttcatgcctgagccaggaaaagagtttccttcttctcatccaagggccagaagagggctgctgtcaaggaccctcagaacaccattaggcaaacatgcgtggagcacttgctgggtggaccccaggcactataaagcaggcctggggttttagtgatgaaaagataaggcccctgacctcaatgagtttacaggctatcatggagagggacgtacaaggaactctcaacaccatagcaactgctccagtggaggcacataaaatatataaataacatataggagaggggaatccgtgggtcagtctgggaaggaatctgggaaggcttcatgggctgggaaggttgttaaagaggcagatttgaattgagacctggagcatgaatgtgagactgtgagattgtttggctactcaaatattttttgaatactttttaagtgcttggtgctgggtatacaagtgtgaacagagcatacttggtctctgtctttatggggtttacagtctaatgaggtgagcaataaataaacaatgaataaatctaacattacttattttggtaaatgc

SEQ ID NO: 676608 - DNA, 647 bp, Homo sapiens
tcagagtagacttagagactccctttcctcaaagtctttacggcattttctttgtactttctgatcgctcagttgtcatttgtcatttgttattgtctcattgcccccacttgtccgtaacttccttgaggacaaggaatgtgtcttactccccttggatttcttttcttttctttttttgagacggagtctgactctgttgcccaggctggagtgtagtggtgtgatctcmgctcactgcagtggcgtgatctcagctcactgcaacctccactttctgagctcgagcaattctcctgcctcagcctcccgagtagctgggattacaggcgcccgccaccatgtctggctaatttttgtatttttagtagaaatggggtttcaccatggtggccaggctggtctcgaactcctgacctcaaatgatccacctacctcagcctcccaaagtgctggcattacaggtctgagccactgcacctggccaaccttggatttcttaaaaggaaggggttgtatcttgattaaggtgtgagtggtcaaatgtcaatgcagtgttattatatgtcatttttcaaaggacacatccaaattcagccagtgacatcctgggttgacacttgaaggtctgctttaatgatcttgaa

SEQ ID NO: 676609 - DNA, 2281 bp, Homo sapiens
ggtcgtgacatcatgacatctacaaaaacggtagaaaaacccaggtttggtgcggggagtgggggcattgtaattacgtctccaaatgctaacagctgtggcagcgcatgctctcttagcctctgaagaggtctctgggcgctcacacttgaaaaaccatgaggttggaacaatcatgttaatgcgcctttttggttttggtgaaaatttcagacagtgtgacattaattatttgtctttgcacagaatgatgatgctaaagccagccccatacagtcctgatgctcagtacttccagcatgggctctgtccaccctgctctctgggtctacatccagcccttcagttttcactaggcaaatctgaggtgagtcaactgagtttgcaaaatgtgcttattagcaggtgtgggatgttctactaccttcttcagagccacagcattcctgttccttcccacatcatttcactaagggtctgaccaactcatctcccaaccattcaagacacaggagaattaactgcaggccttcacacatggaagtcagtcacagtgcgtggagaagggaggggcgggaggggctgagtgaggagtggatgtgagcaggtcccctggcagctccaaaccccagtagacaagaacagcttccagtgccatccatttcaattctcatcttttgttttcaaagagagcttccagtgttttaaagtttgaaaaccactcatctagttttattccctttttactcaaataaggacactgaggcacagaaagtgaaggagacttgctcagggtcacacagcgagccggggattaatatgcaaatggatctcatgtttccagaatcccaggccagtctccttctgctgcatagtacagaaggtgatgccatcccaatatwttagacatggaatggcaggcttacaggcggaaagttcacttccaacaaggactccaaaatgtaatgcacaatgtgagcggtgtgaaagtgtgccttaaaagttgggatgagtcttgataagagtccctgaagcctgtggattggcaacatctgcctttacatagttttgagatgaccctgagtagcagcaccgtggagtagagaggggaccaaggagggccaggtgccctgagctctgctcctctttcagaggccttcaggccttgggcaagtagcttctcctctcagagcctggtttcttcatctgctaaaggcagggacattaacacctgtcctgccccatctcccagagttgggatcaagctttatgaacttaaaggactgtgcatagtaagggctctcaattcttattttaaaattgtaatcacctaaggatctatttttttaagataagatagcaaatattctcctttcttttttcattaaaaaagaaaaaaaagagagccttactcttgggtgaggtcaaaatgtttgtaggtaaaatatattctactacaatctaattccacagtctggagataacacctgacccctttttttacaatttgatcgtcagaagcctggtatccaccgcttctaaccacctgtttagagaatgctaggctaggccaagcacagtggctgatgcctataatcccagcactttgggaggccaaggcaggaggatcatttgagcataggaatttgagaccagcctgggcggcaacatagggagaccctgtctctacaaaaaaaaaaaaaaaaaaaaaaaaaatagctgggtgtggtggggcatgcctgtggtcccagctactcaggaggctgaggtggaacgatcactcgagcccagaaagtggaggttgcagtgagccatgatcacgccactgcactccagcctgggtgatagagcgagaccctgtctcaaaataaaattttaaaaaagagaatgctaggctaacaaatggatgctctggtctccaaagacccagccaaggcgctcctgagtctggtaaagcatcccacctaaaactaaatctccttcaaagggaaaaagttaggaatagaagagctacagccagctgtccacacgttggggtaaagcaatggaatttgtttctgagggaataccattttagaaagaacactaagaccacacttcctgttattttcccaaaaggccatcttaatctaggatggcagggctaaaagggacattgataacatccagttaaaatgccatactcacagatgaagggaccagggcccagagaggggaagggatctgttcaggtcacacagcaagttacagtcaggcagaggacagctgggaccctcatccc

SEQ ID NO: 676610 - DNA, 2281 bp, Homo sapiens
ggtcgtgacatcatgacatctacaaaaacggtagaaaaacccaggtttggtgcggggagtgggggcattgtaattacgtctccaaatgctaacagctgtggcagcgcatgctctcttagcctctgaagaggtctctgggcgctcacacttgaaaaaccatgaggttggaacaatcatgttaatgcgcctttttggttttggtgaaaatttcagacagtgtgacattaattatttgtctttgcacagaatgatgatgctaaagccagccccatacagtcctgatgctcagtacttccagcatgggctctgtccaccctgctctctgggtctacatccagcccttcagttttcactaggcaaatctgaggtgagtcaactgagtttgcaaaatgtgcttattagcaggtgtgggatgttctactaccttcttcagagccacagcattcctgttccttcccacatcatttcactaagggtctgaccaactcatctcccaaccattcaagacacaggagaattaactgcaggccttcacacatggaagtcagtcacagtgcgtggagaagggaggggcgggaggggctgagtgaggagtggatgtgagcaggtcccctggcagctccaaaccccagtagacaagaacagcttccagtgccatccatttcaattctcatcttttgttttcaaagagagcttccagtgttttaaagtttgaaaaccactcatctagttttattccctttttactcaaataaggacactgaggcacagaaagtgaaggagacttgctcagggtcacacagcgagccggggattaatatgcaaatggatctcatgtttccagaatcccaggccagtctccttctgctgcatagtacagaaggtgatgccatcccaatatattagacatggaatggcaggcttacaggcggaaagttcacttccaacaaggactccaaaatgtaatgcacaatgtgagcggtgtgaaagtgtgccttaaaagttgggatgagtcttgataagagtccctgaagcctgtggattggcaacatctgcctttacatagttttgagatgaccctgagtagcagcaccgtggagtagagaggggaccaaggagggccaggtgccctgagctctgctcctctttcagaggccttcaggccttgggcaagtagcttctcctctcagagcctggtttcttcatctgctaaaggcagggacattaacacctgtcctgccccatctcccagagttgggatcaagctttatgaacttaaaggactgtgcatagtaagggmtctcaattcttattttaaaattgtaatcacctaaggatctatttttttaagataagatagcaaatattctcctttcttttttcattaaaaaagaaaaaaaagagagccttactcttgggtgaggtcaaaatgtttgtaggtaaaatatattctactacaatctaattccacagtctggagataacacctgacccctttttttacaatttgatcgtcagaagcctggtatccaccgcttctaaccacctgtttagagaatgctaggctaggccaagcacagtggctgatgcctataatcccagcactttgggaggccaaggcaggaggatcatttgagcataggaatttgagaccagcctgggcggcaacatagggagaccctgtctctacaaaaaaaaaaaaaaaaaaaaaaaaaatagctgggtgtggtggggcatgcctgtggtcccagctactcaggaggctgaggtggaacgatcactcgagcccagaaagtggaggttgcagtgagccatgatcacgccactgcactccagcctgggtgatagagcgagaccctgtctcaaaataaaattttaaaaaagagaatgctaggctaacaaatggatgctctggtctccaaagacccagccaaggcgctcctgagtctggtaaagcatcccacctaaaactaaatctccttcaaagggaaaaagttaggaatagaagagctacagccagctgtccacacgttggggtaaagcaatggaatttgtttctgagggaataccattttagaaagaacactaagaccacacttcctgttattttcccaaaaggccatcttaatctaggatggcagggctaaaagggacattgataacatccagttaaaatgccatactcacagatgaagggaccagggcccagagaggggaagggatctgttcaggtcacacagcaagttacagtcaggcagaggacagctgggaccctcatccc

SEQ ID NO: 676611 - DNA, 2281 bp, Homo sapiens
ggtcgtgacatcatgacatctacaaaaacggtagaaaaacccaggtttggtgcggggagtgggggcattgtaattacgtctccaaatgctaacagctgtggcagcgcatgctctcttagcctctgaagaggtctctgggcgctcacacttgaaaaaccatgaggttggaacaatcatgttaatgcgcctttttggttttggtgaaaatttcagacagtgtgacattaattatttgtctttgcacagaatgatgatgctaaagccagccccatacagtcctgatgctcagtacttccagcatgggctctgtccaccctgctctctgggtctacatccagcccttcagttttcactaggcaaatctgaggtgagtcaactgagtttgcaaaatgtgcttattagcaggtgtgggatgttctactaccttcttcagagccacagcattcctgttccttcccacatcatttcactaagggtctgaccaactcatctcccaaccattcaagacacaggagaattaactgcaggccttcacacatggaagtcagtcacagtgcgtggagaagggaggggcgggaggggctgagtgaggagtggatgtgagcaggtcccctggcagctccaaaccccagtagacaagaacagcttccagtgccatccatttcaattctcatcttttgttttcaaagagagcttccagtgttttaaagtttgaaaaccactcatctagttttattccctttttactcaaataaggacactgaggcacagaaagtgaaggagacttgctcagggtcacacagcgagccggggattaatatgcaaatggatctcatgtttccagaatcccaggccagtctccttctgctgcatagtacagaaggtgatgccatcccaatatattagacatggaatggcaggcttacaggcggaaagttcacttccaacaaggactccaaaatgtaatgcacaatgtgagcggtgtgaaagtgtgccttaaaagttgggatgagtcttgataagagtccctgaagcctgtggattggcaacatctgcctttacatagttttgagatgaccctgagtagcagcaccgtggagtagagaggggaccaaggagggccaggtgccctgagctctgctcctctttcagaggccttcaggccttgggcaagtagcttctcctctcagagcctggtttcttcatctgctaaaggcagggacattaacacctgtcctgccccatctcccagagttgggatcaagctttatgaacttaaaggactgtgcatagtaagggctctcaattcttattttaaaattgtaatcacctaaggatctatttttttaagataagatagcaaatattctcctttcttttttcattaaaaaagaaaaaaaagagagccttactcttgggtgaggtcaaaatgtttgtaggtaaaatatattctactacaatctaattccacagtctggagataacacctgacccctttttttacaatttgatcgtcagaagcctggtatccaccgcttctaaccacctgtttagagaatgctaggctaggccaagcacagtggctgatgcctataatcccagcactttgggaggccaaggcaggaggatcatttgagcataggaatttgagaccagcctgggcggcaacatagggagaccctgtctctacaaaaaaaaaaaaaaaaaaaaaaaaaatagctgggtgtggtggggcatgcctgtggtcccagctactcaggaggctgaggtggaacgatcactcgagcccagaaagtggaggttgcagtgagccatgatcacgccactgcactccagcctgggtgatagagcgagaccctgtctcaaaataaaattttaaaaaagagaatgctaggctaacaaatggatgctctggtctccaaagacccagccaaggcgctcctgagtctggtaaagcatcccacctaaaactaaatctccttcaaagggaaaaagttaggaatagaagagctacagccagctgtccacacgytggggtaaagcaatggaatttgtttctgagggaataccattttagaaagaacactaagaccacacttcctgttattttcccaaaaggccatcttaatctaggatggcagggctaaaagggacattgataacatccagttaaaatgccatactcacagatgaagggaccagggcccagagaggggaagggatctgttcaggtcacacagcaagttacagtcaggcagaggacagctgggaccctcatccc

SEQ ID NO: 676612 - DNA, 1321 bp, Homo sapiens
tctgcccagctgtgggaacccaggaaggtcacagctcaagcatcagtgtcccatctgccaccggagaggttatgggtctcaaatgccagcctctgaggcatttggtcccctcacctcctggacacaaatagaaaactcactgagtcctgcttgcatttacacaccgagctggtcttgtgatgtctccccttagcatrgctttgttcaatgtccctctgcttgtcacagtgccacttattatgctctgtctagactgcctaacaaggccgggtgcagtggctcacacctgtaatctcagcactctgagaggctgaggcaggcagatcactggaggtcaggagtttgagaccagccttgccaacctggtgaaaccccatctctatgaaaaatacaaaaaatagctgggcgtggtggcgcatgcctgtaatgccagctacttgggaggctgaggcaggagaatcacttgaacccgggaggcagaggctgcagtgagccgagattgtgccactgcatgagagagtgacagtgttgcaacagtgagagagactctgttgcaaaaaaaaaaaattttaataaaaataaaaaactgcctcacaaaactgaatgcccaggacggggaaggtgttgctgagcagacgccctgtggaaaggccaagggtgttactcagccatggacacagtgaaagtgggtgccacccacaaccattcccaaagcttggctctataaatcctggacccctgagccatcaatttgaacacccatgtatttatgccaaagcatccttcccttttccagctgagctacaatacgaattcaagactcctggccatctccatataccctctgcttcagagacattattaagctacttataattaggaataataacgcctgcagatgcattttaatacaacccacaaaaggagctgtgtgggtttcttcgttccccagcacgaaagcaaacaactcttcccctgttgtctagatccaactgcttcactttccaacagctgctctgacagatgagggacaggcagaaggtcagagtgagctgaccgacttccaggcacaaaggacaaaaggatctgaaatgtggagggactcattggaggtccccggcagctggctgaattgtctggctctacacagtggggaaaccgtgagaaagagggagatgtctcctttcaaacctgggcactggaactttcctggctctgacatcatcttttttcttcttcttttttagttttattttactttaagttctgggatacatgtgctgaatgtgcaggtttgttacataggtatacatgtgccatg

SEQ ID NO: 676613 - DNA, 1321 bp, Homo sapiens
tctgcccagctgtgggaacccaggaaggtcacagctcaagcatcagtgtcccatctgccaccggagaggttatgggtctcaaatgccagcctctgaggcatttggtcccctcacctcctggacacaaatagaaaactcactgagtcctgcttgcatttacacaccgagctggtcttgtgatgtctccccttagcatggctttgttcaatgtccctctgcttgtcacagtgccacttattatgctctgtctagactgcctaacaaggccgggtgcagtggctcacacctgtaatctcagcactctgagaggctgaggcaggcagatcactggaggtcaggagtttgagaccagccttgccaacctggtgaaaccccatctctatgaaaaatacaaaaaatagctgggcgtggtggcgcatgcctgtaatgccagctacttgggaggctgaggcaggagaatcacttgaacccgggaggcagaggctgcagtgagccgagattgtgccactgcatgagagagtgacagtgttgcaacagtgagagagactctgttgcaaaaaaaaaaawttttaataaaaataaaaaactgcctcacaaaactgaatgcccaggacggggaaggtgttgctgagcagacgccctgtggaaaggccaagggtgttactcagccatggacacagtgaaagtgggtgccacccacaaccattcccaaagcttggctctataaatcctggacccctgagccatcaatttgaacacccatgtatttatgccaaagcatccttcccttttccagctgagctacaatacgaattcaagactcctggccatctccatataccctctgcttcagagacattattaagctacttataattaggaataataacgcctgcagatgcattttaatacaacccacaaaaggagctgtgtgggtttcttcgttccccagcacgaaagcaaacaactcttcccctgttgtctagatccaactgcttcactttccaacagctgctctgacagatgagggacaggcagaaggtcagagtgagctgaccgacttccaggcacaaaggacaaaaggatctgaaatgtggagggactcattggaggtccccggcagctggctgaattgtctggctctacacagtggggaaaccgtgagaaagagggagatgtctcctttcaaacctgggcactggaactttcctggctctgacatcatcttttttcttcttcttttttagttttattttactttaagttctgggatacatgtgctgaatgtgcaggtttgttacataggtatacatgtgccatg

SEQ ID NO: 676614 - DNA, 2320 bp, Homo sapiens
catgtccgttgttgggaccatcattccccgccaggctgaaatgtgattttccaccccagcttcgtgacctacaactgctttgattcctgctcatttccaaacctgttcctccagctttctcttgatcctgtaaatacaattatcctcccaatagattatttaaaaaaaaatgtttgctaaagacacagtttattttgcttacaatggggaaccctggtaaagtcaatgactcttgctataaagctgtgccaaactaaagttgtctcttttatgctacataaggcagaactgcaagctcctaaataaccgaagttcttctgtgagagagatgggcacctcggctgaaagtgcccttctctctggatgagaatgcagactgaactctgaaattctcataatccaaagacacttttcctgcaaccaggtgctgacaatgaggactgtccctttaactggccacactgaaggcctgcacaacaggccctttwtagagaatcttgttgcaaaggcttccaagtgtgagttgtgaatcaattgcaaaacacacctgcctgagccttgaggcaaaccattgatatttaatggtctaatggtcatcctccacattgaggcctgtccctgtattaaagcacctggaccaagctttcttaagctcatccaccatataaaatgcattctcctccaaattatgatggagtcacactgccttcatctttatagaggttgcacacaaaatgctgctggaacaatgaatgatgccattgctgagcagccatgtagagagaccagattatcccactgagcttcggttccacgtctacacaatgggagggaaaaacctatatctcagagagattgtgacactcaggtgagctaatggatttaactgtaaagacctacacagacatgcaagagtataattatgtcattccatgtccttcaacatgagatcaagtaataaattccctctgcaatttaattctaggaaaacactctctttgctaaaatagggatccatgtggtccctgctctcagaagaaaagataacattggcagccagggctcttttacagaaagtgatggaaacccaagttgaaatagtgttaggtcaaaaggggatttattggctcatgtgaccagaagagggcaggggtgagcctggccttaggaatgactggaactgggaaacaattaatcgatcaatccctctttcattctgtttcccctagtctctcacgtttgtgtctctctgcatatcgcctttgttctctccatctacacaagctttctctgcatgctgaagagcatggctccaaacccttcagaccctcttcagcttagtaaccatagaagaaaaagaatcttcttctccagcttcaaactgaaacagcctggggatgaactgagattggttctgggcccaaaccaatggtttatttcctttagccatggaaataattttgatgtgtagcagagtgccaattgtctcccaatatccattttccccttctagctggaacctccatttttgggctggtcatattgctgcccagttaatacatttcccgacctcccttgcaaataggtgtggtcatgtgttcaagttctgatcaatgagatgtaagtagaagagttcagaagtatttctggaagcccgtaaaagggagagattgctcttttatcctccttctcctcctttctattgctagaaatgtggatgccatggctagaactcagcagccatcctgtactgtgaagtggctttggggatggaagctacatgtggcagaagaacaagacagaaagagtctgagcccctgatactatgtcttttccttacttgtcttgaactgcctcctctgcacacttttatgtgagagaaaaatatacctttatcttggtttagccactattatggaggctctatttgcaaccaaatctaatattaagtgatatgcaactcaggttaggggcagaagaaggagctggggtgaaaacatctcaagaaacacaaaacaatagctgtgagggtggcccagtgtctcccttcctgccctggccattaggaacctctcagctgtctggaggtgtccagccaccatgctcccttcagcctcattctctaatgtcctccttttccattctgtggttagtaccaatcctgagaaaagtatagccagggtataaaataagaactactttccaacaatgtacttcacgaagcccttgtcccctgaggtgttctggagtaaaaacggatttatggtcaacaatttggggcggggtggggggaggatactgcctactcccccattagaga

SEQ ID NO: 676615 - DNA, 1106 bp, Homo sapiens
tggagtagtctcagattccctttagtatgtttgattgattttaatgatcagtgttgaataatttgtgttatttctccactgcaacttgattatactgaacgtgattatatgcacttatcatctttacacccctattacctagaatactgcatagcacacatcagtctttcaaaaaaaatttgttgaatgaatatgtgttcaaggctacagattcaatagagaccaaatataacccaggaataaaacccaggactcccaaatctgtgtggtgattcagttcaaagtgcaatagacagagaaggaaaatgtcttcattttctattttgtgacataatctttctatcctcagaaggtttcactttttgttttgtgacataatctttctgcactcaatttccttctctgtaaaatgaagaaccgagattacatgatccatcagcacttcagctgattctctgactctyggcttttaatattaatatctcccccacttatactatagcatatcccacaggatataggataataaaatcctctggcttataaataagtatgtattttatgtttcagaggtcaattaatgccacagaatgcctttaattgtattactgctcttatttatttttgtttaaagaaggaatatttaaggctacatttgtaagtaatgaaagaaagtataatacttgcaaaacataaactgataacattaattgaggagtgaaacatattccattatctcttttgtatttactgctctatctcattatgaatcctttcatcctatatgtgagacatccatatccaagaacctgaagatgatggtctgtcttgagatataaatcactctgccaagtgttctttttacctatgtactatgaccacttctctgaactcaaatagaaacatctagtgagtattcagttcttcttcaacgtaatggagggtttcttataatgtaatgaaatgttcgttaacttttttttttttttgctgcctgtatgttcagtgtctataatcagcacaattagaagtaacaaaagctctttgagaaaactgttctgtatgtttgtctgttttgttaagggaagagcagcaatataataata

SEQ ID NO: 676616 - DNA, 1470 bp, Homo sapiens
tttattagtgcttatctctttaattgaatgggagctccttgaagatgagaatcatgtcttcagaagtaaagcttaactatttatcctcatttgaaaatggattgttctagatcacaggaatttcctgggtagctgagagtttaactctttgaggatggcacacagatatcctcagataaattggttctgactattgtaccacaacaccccccaaccttgagccctgacacatagcagagtctagagggggttaagtcagtatgtccaacactgctgagacgtgcaagggtttctgtgtttcttaccacagagcaatcccacatctcctacttcttcgctaacttctacctctcctctttgggagtcagtcctttgcttactatcatcaaatctaatccctcaacagcccctgtaactgcttcttatcattgacactcttcctatttctctctgcaggcttcatccacctcttccttgtctcctctcaaacacatcttggctcttgtgtggaaatgtgtggcctccccctctcaggttgcagcatcgggggtcctccctccttgggtcctcgggtccccactgtcacttgcccttactccccgaggaggttctctttctctagcttgaggccggttctcacgctggaccatgatcataagcctccagataatagaagttttcaccctccttctaaatgacctccgctcctgatagagaattaaaggtgttcgatattccataaaaaactggctggttgaccctgcgaagtagttactgaagaaacttcttactgctcaggactatctttggcttccgcatataaaggatcagtgtgagccacagaaacttccccaagctatgcaaggttgtgccaagttctgtggggaatagaaagttttaggtgagttggtttgatttttgtaatttcctaaagacatttgacatcagaagcttctggggctccagatgtctgggtctctgtggcatgacccagcgtgaggcaagatgccgagagaacagacatcgctcgttctgcagccctctgcagataattagcatggctaagaagcaaacaaattcctgcctactgctctatgtggctcttgcggaagtctgggagagagggactttttctttctcagtcgaggcacgtggaggtgactsgggagagaggcagggaagatgaaaacgccgacttgtgaagccacaccgcgacatgctctgtgaacttctggtttgcaaatgaaatttctcccacagacaatgcaggcagcatcaagccctgattgaagacacaactcatgaaagtctccaattcagatttggaaaaacctccagccactgaaggcagaaggcagagctagaaataatgaaccacattaactaagaaatcgcaaaagccatctctattagacagctgtgcaggtcaaaaggaaaccagacaggagacatcaagaggaaactcaggct

SEQ ID NO: 676617 - DNA, 724 bp, Homo sapiens
tcgaggctggcctaagcaacatagcaagatatcatttctttaaaaaaataagtgagcaaataaacaataaaaatcctaccatcgtccaaatgtcacctcaaagtttactctttcttcaaagcctgttttgatgctgtacttcatgcccccaaccactgacttataccaattggatataactgtctcttcatttgagccccctaccatggcacgtgctttgtatttgagctattgtgtacatctttacccctccctctcgactctgcrgggcctgggagcaaggactccaaatcatgattgcctcctcactcagtccagcacacagctgagtgcgccctatgagtgttttccacctgagttggccacactcaggctctatggctaaaagggtcattgcctggagagtctaaacatctatattaaccatcctaggcatctcagtgcatcttgtcctgcagggaactaggctgaagagacgtagctcgaataacttctatttatttatttcttcagaaaagaagagaacggcagtgtcaactcacctctggtctcttcttgttagcaagttcaagagacacttggcgatattgactgcagaatacaaagatgaaattcaagggttcctagagggtgtctgtccgtagaaacaaaggacatcctcatcttgaaaacgtaagtagtagatgtacagtcatgactcattcccttcacctcctaagtcttg

SEQ ID NO: 676618 - DNA, 645 bp, Homo sapiens
ccagagcattccagaaaatatggctttgccccaggacagagtctggggcttcttggtaacacccccctgaactgtgccatagcattattcacacccatggaaagccatggcagtcacctgccagccaccatctgactcagccaaggactctctactttgtggggaaagagattccttttgggtgggatatttgggggattttttcttttcgcttgtgggagataataggaatcaaatccctagaccctaacttagtttagactcaaatgacacctcagcctttccacaaggacccagggacaaggacagtggaccacggcgtgattgtccgcctccttcctcccgtgaccatggcaggccctgttcactgaccccagcactgtttctcactgagattggacgctgcctcggaatccttcttaacacggcgtccctggcagccagtactgagaaatttgctttggctcacaataaaagaaggcctcaagttataagctacacatccctgggcytttttttcttttcttttctttttttttaaataatgagaaaagatcttgcagaagttctaagcccaagtttttatgctaatggtcactattcagaaatcatattataactgggtctgtgggatttttttaaaat

SEQ ID NO: 676619 - DNA, 2116 bp, Homo sapiens
gtggaccctctaaaaagtaagatcaggtccaagagggtcctaaaataatagtgccatctgtcaagtctaatgttgttttgttgcacagagcaattcacttttcaggcagaagtcaattgcctgtcwcaacacagtgtcacccactgtgtgcaggttagattctagtgcactgagagcctgtctgcctgggctgtaggagtgctgagttgatttactcattctcttgcataaaatttcaacttccctgtggaatctcattttccattgccttcccatgtgtcttagtctgttttgcattgctataagggaatacctgaggctggtaatttatttttaaaaagaggtttatggccgggtgccgtggctcatgcctgtaatcccagcactttgggaggccgagatgggcggatcacaaggtcaggagattgagaccatcctggctaacacagtgaaaacccgtctctactaaaaattcaaaacttagccagacacgatggcaggtgcctgtagtcccagctacacaggaggctgaggcaggagaatggtgtgaacctggaaggtggagcttgcagtgagccgagatcgcaccactgcactccagcctgggcgacacagcaagactccgtctcaaaaaaacaaacaaacaaaaagaggtttatttggctcatggttctggaggctgtacagggatcatggtgctggcatctgcttggcttgttgtgggggcctaggaagcttccaatcatggtagaaggcaaaggggaaacaggtatgtcacatggtgagagagggagcaagaggaaggaggaggagccaggctctgtttaacaaccagctctcacatgagctaatagaacaagaactcactcattaccatggggagggcaccaagccattcacaagagatctgcccccttgacctaaacacctcccatcaggctccatgtccaacactggggatcacatttcaacatggaatttggaggggacaaatatctacaccgtatcaccttgtcacttctgagctgagtcagtacatctccaattttaaaaataagtaaaataatgtcgggaggaggaaaagtatcagctctttctaccacccaggggatatctaggaattcacaggatttgctaatcgaagagaatctacttgggcacttagtaaacatctaatctgcacctggcacggggctagcaacatagtccaagaggtatcagagcatctgcttttgagccctcatgccccaaagctgagtacggctgtgttgcatttagagagactggtcatttgcaaaggggtgatgggaggatgtctggagtggacagtggagctatcagcaggcttttcacctgcaccccctcaggaccgcctcacccagggagtaacaatcctattcagaccatgtcccagagcacagtcctgcctgtctctccaccagggactcccaaagtgtgagccagggaccagcagcctcgacatcacctgctgctttgctgaatgcaaattctcccatctcacccagacctactgagtcagaattgccggggttgggagccagcagtctgtgtgattacaagcccttcaggtaattctgatgcatgctcaagtttgagaactattgctctacgtgacttctgtggctgaattcttgctcttacacagtttcaatgcacagagatggcctttgactccagggagccctgtgctagggaatatttttccaaagcgtcctgaatagcccctttcacgttcctgggaggcggcctgatgcagcagataagggtgccctgaagccagatggtccctgtttagatcccagctgccatgcacaagcttcacctcattggctgggccctctggctctttgaggccagttgccttatctgtgaagtgacaatgataacaatggcaacaaccaaatagggtagctgaagatgacaccttgggagccgaccacatagtaatcactcaagccatcctaggtaccaatgacctttttttttgagacgctcttgtcacccaggctggagtgcaatggtgctatcgcagctcactgcaatctccacctccccggttcaagcgattctcctgcctcagcctcccaagtagctg

SEQ ID NO: 676620 - DNA, 655 bp, Homo sapiens
taaatggaaagaaaactataaatgcacctaaaattcctcctggaaggtcgcctaccaaacatctcagtgtcagcagtcccaggctgtttgattttcttctttgtattttctcccttttctgtgacaacatgtattattttattgaagtaacgtttagtttttaaaaagtaaaaaagtgaaaccatcatgttatttgaaaataaactacatctcccggtgaaaacctggatgaatctcttaaatgtgatgttgaacaaaagcrtgcaggcatgaaagagtgtgcactgtcagattgtttgcaagatattcaaactaaagggccaaactaattcatggagatggacgtcggtgttgtattcaccttggggggtccactgggggtgtctggggtgctggttatgttctttttgtttttgatctgggtgctggttatatgggtgtgttcacctcatgacaattcaccaagctctatcataaatttgtgtgggttgattttggttttttaaaacattgaatcaaaatactatttatctgtattactaagtatttcggtgcccctttaggttatatgcccgagcaagtgcctcgcttgcctcaccctagaccccgcccggcagggatgggaagaatcattgaggctgtgttatccaatcat

SEQ ID NO: 676621 - DNA, 655 bp, Homo sapiens
taaatggaaagaaaactataaatgcacctaaaattcctcctggaaggtcgcctaccaaacatctcagtgtcagcagtcccaggctgtttgattttcttctttgtattttctcccttttctgtgacaacatgtattattttattgaagtaacgtttagtttttaaaaagtaaaaaagtgaaaccatcatgttatttgaaaataaactacatctcccggtgaaaacctggatgaatctcttaaatgtgatgttgaacaaaagcgtgcaggcatgaaagagtgtgcactgtcagattgtttgcaagatattcaaactaaagggccaaactaattcatggagatggamgtcggtgttgtattcaccttggggggtccactgggggtgtctggggtgctggttatgttctttttgtttttgatctgggtgctggttatatgggtgtgttcacctcatgacaattcaccaagctctatcataaatttgtgtgggttgattttggttttttaaaacattgaatcaaaatactatttatctgtattactaagtatttcggtgcccctttaggttatatgcccgagcaagtgcctcgcttgcctcaccctagaccccgcccggcagggatgggaagaatcattgaggctgtgttatccaatcat

SEQ ID NO: 676622 - DNA, 3282 bp, Homo sapiens
aggtgacacagctctgtcattttgccaacatggtcttaagctgttgctagcacaaagatgaaatcacttggaatgaaaaatatcatattgcatggatgaaaatcaccataagctagagtggggagtgattttccggttgttccctagagcagctttgacttccatatctctctagactgatggagagctgagtcagccttgcaggagctgcagtgggggtttctccatctcagttagaaaatgtgagaaatgaggagaagtccttaggggccggggtgtcaggctgcagtctcaccattactttccttccacatccttctggtcaaacggaatttggttgtgtcctcctgggagtgaacctgaccaaggtcactggaaatgtggtacaggagccctgaatttaacactcagccacgtcagatagaacctgaatgttgtgtctgggtggctctccaagaggcacaggctgtgggcctttctggattgggggacccaatataaagacggaaggatgtgtctgggttccttaggaacaaggccatacaaataacaagcttcaggaagggggcaagtcctagcaagaggcccccagcacggttgagtggtgtggcccctcagtcctggcttagaagaggccgatgcctggagcttacatgagcaagagaaggagttggggccacctgtgttgtcgttgagcagcctggcagcatgctctgtgtttccctctccattgctgtgtcacagactacccccacccatacacacacattgagccgaggttcaaaaggagggagacgtgatgcccaaaagccacaagtacagcctgagaggagtgacaaggaccagctcgcgagcgcctgtgtatttggccgtttggagcctctgtggtcattggctggaggctgtgtcttgactcggtgggcaggagcggctggctgttgccagtggtgccacctgtgggagtggcataaggcctgatgctgagtgcctccccatgatcaccgctcctgctgggcttggggactgcctgtggtcagaattggatggggcagcacccagcggaggccactctcctgcgcgggtggcggcacatgacctggacaccctctgagcaccaggcctgtgtccatgcaccgtggccttggtccaggtggctgtcatctccctagctcatcctgactcctggcctcacccctccgtggcccctctggcatggctctcccagcctcggatggcaggtgctctccccagaattggcctctctctgctccaggggacagggatcctgccacagtgctagcccctcccctccatgtctggcagcagggaactgtcgacaagggggctacgatgccacccccagctgccagcaggaaggaccccaggcacagcctgcaggtctgaagtgggtgacagtggccagaggttctcacaggtcgcaggacttcagtggagtgaaggttggaaattggttacaaaggccatgccttctgcgtcacagccatttcacatttcaatttgtgattctagtggctttttttggcccctctaaagtagcaagtgggggttatgtgagagaaacaaagcttaatctaaaaatgtctgatcttaaaatatcagcgacagacaaagctatcaatttctgttaaaaacaattcttggttgtaaggggaaaccagagtgtacacaatgcatttcatcaacatgcagatactcaggcagtaattcaagagggctctgaagtcatctgttcctttattgaaaactccaggtggccgggatgaaggggtcagtgaacagtctacatggtagtgtccatttgaattttcttagaaaccccattattttacttattttttttcattccctttcttgttttacaaaggattttaggcagcataaagataattaattccttcattagtcatatttagtttctgcccactatgataaagttagttttaattaaatcaattttctcctgcgctgcagggagcctgcttattttgatcagaattgaatctcattctgggaaaccttgtgccccagtctctgagattctccattttattcatcttcagaaggtccacgctgagtttgatggtgactaatgttgttttcattttgaaattttattgctcattaaaaaaaacacacacatttgttgactttaaaagtgaatagtttttgtttttccttttaaaatcctttgcctttttaaaatttttttaagacagagtctcactctgtcacccaggctggagtgcagtggcgcgatctcagctcactgcaacctttgcctcctgggtttcaagcgattctcgtgcctcagcctccccagtagctgggattacaggcatgcaccaccacacctggctagtttttgtatttttagtagagacagggttttgccatgttggccaggctggtcttgaactcctggcctcaagtgatccacctgcctcagcctcccaaagtgtttggattacaggtgtgagccactgcaaccggcccccaatttttttttattaaaaatttttctagagatgagatctcacaatgttacccaggctgttctcaagctcctggcctcaagggatcctcccacctcagcctcccaaagtgttgggattacaggtgtgagtgagccaccgcacacggcccagaatttttttcagaattgtgtgtttatgaactttctccataaggacaaatattgagtcttgatctctgtgtcatttttcagctacttcctgagaagttcccccatgacaagmagaactgtgaaacccattttccaatagcagagatgaacccctgcatgtgaggctccggccctgcggcttggtggtgcccttgcttctgggaggtcagcctgcctctgctgagggctattagtatatattctggtcaagcgtccttaaaacggggacttcttgagggcctgagcctgccctgttctcacatgagcgagtctctggggtctgcttgaaggggactgtgtacttccatctctggccagtggatcatttgggtcctgcttcagggtcaccccaagtatgcaaggccaggcaggggccaagaaacccaggcaacagacgttcaatcttccaggacaaccgaaactatatagtttcaccctgcatgtatacagctaactaaccggtcctaactcagtcatctccggtcctatccattaaacttcttgagttttccaagctgtctcccttctcgggttcattttccctgatgctgtcgtagggtaggcacgcctgttctggt

SEQ ID NO: 676623 - DNA, 586 bp, Homo sapiens
gcaaaattaaccaatttgccagcaactgggatcagcttcaaggcccctactgtgtagaaacttaccacaagatacctcactggtgcctctataccataacgccagcggcaccaatgaggtatctggtggtaggcttgtatatgccttttctgagcgtcaagcttcagctaatacattcattcaaggccttataattgtctagttttccacacaacattgcygttgacaagaatacattttgcagttttaacaatgggctaatatccactagattcacctagagcctacatttcccagcctcccttgcagctagctcttctcaaaggaatgtaagtgaaatatgcacaactttgcagtcatcttcttaaagagcttgccttggagttgctgccccctttccttcctctgtcaaggattgacacaagtttggaaggtggctgcggagaatggcaaagcttcctcactagcctgggcctcccgatgccttcacagagcagagctatctgtctttcctagatgcaagagaaaaaataatttatatctgtttgagccactgtattctgtgttattagaacagcctggtttg

SEQ ID NO: 676624 - DNA, 567 bp, Homo sapiens
cactgcactccagcctgggcgacagagcgactccgtctcaaaaaaaaaaaaaaaaaraaaagaaagaaagaatgaagagccagagccaggcatagtggcacgcctgtagtcccacctactcaggaggctgaggcgggaggatcacttgagcccaggaattcaaagccagcctgcgcaacatagaccctgtctctaaaaatgaattggttataaaggatgaagaaaggaaggaggaaagggagagagagaagcccttatagagtgggtgcatttcttgtatgtggggccactttgtaagaacaggatttttcaaactgggcccatactggtatgtgtgaaatcaatttagttggttatggccatttttttttaaaaggaaatatcagtgatcactatagtgtaagtatattgtttcgtgaaagccatcttagttatgtattatgtctgtatgtgtaagattgtgatataaaatgtatttctgtggttaaatattcaaagaaattggagaaccattgctacaaggggacagaggactccgtgtgagctctcctgccttccctgaataaa

SEQ ID NO: 676625 - DNA, 1835 bp, Homo sapiens
actaattcagaatcaaatagagtttttgagcatttgactatttttagaatcataaaattagttactaagtattttgatcaaagcttataaaataacttacggagatttttgtaagtattgatacattataataggacttgcctattttcatttttaagaagaaaaacaccactcattttataaaatatagtacagctactataaggcttgtttgatcccaaatggtgcttatcttgattgcacattcagaacaaggatattattttcagtgattttgtgagatcagctgaaccacttatgataataataataaaaaagactgctttgccctcacgtcagttgtacatggcatggaactttaaaaattttaatataaactttcatccagttagcttcataacttttacgttccagaattttgtttattttcctgtcaatgaaagcaatttttaaagataccagtgggacaggtttggttttttaaaaatctcatgtgttcaaattaacataaatattacacgtcaatacactgtacatggtggtaatagactctaagcaattgccaagatgtattctatttttatgaagtgtatatatattaccttagtgtgcattttctatataatatcttgatggactcttttataaaattattttataaaaaacaatgttacactaaaatcagcctaaataaattttcacaactttttttcataaccttttgaagaacctaaaattcgtttccttgcagctaaaacagggattaaatttaaagtcgtacacgtaaacagacacacaatcatgagaccccttgagagagaggtagtattactcacattgtataggtcaggatcctaggacagaggtaacttatgtaacttccttaagacaggacagctagtgagtggcagaaatgtcataccttccctgtcatgactcccactgcatgagttttttcatctacctaaacagcattttttatatcttatctcaagtgaattcatcttgtgtgatattaaactagtgaaggcctaattgtgacctatgattgaaggatttttaacctagaaacacgttattcaaagaaacctggaaaaaaatatccactccatagtccagctgtcaggcaagtgattgactaaatcagtgtttaccaaagactgttctacagaatactagtctagtacaggtgtttttagtcacaagcattctatgatcaaacaagtttgaaaaatactacataacatatcctcctattaaagattatctatcgacactaacaaagaaacttttagaagttccgcagtgaacaggatgaatttattcaagccaacattttctgaaagatttaatcccaaatcttttttccctaatacattatctcactgaacacttggggaaatgctgatgtaatacagtcaagacgtctgcttcatgcctaaatccttagaaaggacatttttataactaagtactttggtaaacaactccaacacctgaccctgatcattgagcttctttctaaaattaaaccacattagttttgctcatttcctctgtgcaatattctacaagcatagaaattgacaggacagtgaccagacacgagctactgcatagtcattagtaggaacaaacttctggttactacagtatttgatttggaaattcctatttggggagccagaagatccagccagagtcttgactttaaccaagtacttctgacaacatttccttgaaatttatcttaagcatgccagtggttgagcagaggtaggcaatgagatcaatcaccaaccctgaaagttcccttaggatacacrgcagggtgg

SEQ ID NO: 676626 - DNA, 479 bp, Homo sapiens
aagctttatgagggcagatgtcttcttacttacttctgcattcccagtgcttagcatgacatttaatacactagagactatkaatgtgttatttgttggattaaactgaaccgaactagttactttccaggtggattaaagggagtttcttctgtagagggaagcagaaccatatctaaataaatgaagtatggttctctggagtagatgtgacttccatagaatggaggccggtagtaaaggaagttctccaggatatttaggggcaaaagaaaactacaacccaatatcccttatcaacatagttgcaaaaatgctcaacaaaatactagcaaaccaaattcgacagtatattgaaaagatcattcactctgatcaagtgggttgcattccagggatgcaaggatgttttaacatacacaatcaataaatgtgatacatcacgttaacagataggacaaaaatcatatgatcatttc

SEQ ID NO: 676627 - DNA, 614 bp, Homo sapiens
tataggtggtgtccgagcctggagcagggtaaggggcaacacacaccgactgcagatgtccatggaccacccagcctcccttccgagggcccagtggagtgccggggagggtacctgagatagtctctccggcagagcttccggcccagtttgtagtagaggcgccgccccacctcacccagccggcagccacagaggtcgcagctcaggcagtcctcgtgccagtactggtcgatggccttcaggaagtagcggtccccratgttctgctggcagccgccgcatgtcagcagggatggggggatctgcagcacctcatccactggttccctggagagaaggccaagcatcagggacagcctcaccagagtgagaccagcaccgagggtccgagatcgttttgggccagacagggcatctcacctgactgcctttcagtgacctaagggagaagggacaggacaacacatcccttggccagactgcagagtcccaaccaaccttgggttaagatgggaaagagccagaccttactccctagatgtctaagaagtaaacacagggcaccaagaggcatcaaaggcaattgcaggtggcactgtgcccctgcccat

SEQ ID NO: 676628 - DNA, 614 bp, Homo sapiens
tataggtggtgtccgagcctggagcagggtaaggggcaacacacaccgactgcagatgtccatggaccacccagcctcccttccgagggcccagtggagtgccggggagggtacctgagatagtctctccggcagagcttccggcccagtttgtagtagaggcgccgccccacctcacccagccggcagccacagaggtcgcagctcaggcagtcctcgtgccagtactggtcgatggccttcaggaagtagcggtccccaatgttctgctggcagccgccgcatgtcagcagggatggggggatctgcagcacctcatccactggttccctggagagaaggccaagcatcagggacagcctcaccagagtgagaccagcacygagggtccgagatcgttttgggccagacagggcatctcacctgactgcctttcagtgacctaagggagaagggacaggacaacacatcccttggccagactgcagagtcccaaccaaccttgggttaagatgggaaagagccagaccttactccctagatgtctaagaagtaaacacagggcaccaagaggcatcaaaggcaattgcaggtggcactgtgcccctgcccat

SEQ ID NO: 676629 - DNA, 653 bp, Homo sapiens
ccattttccattcttcctactgaaggaatacttggaggaaaatcccatatcgtaaggccattgttacacgaaggacatcaaataggcctttctttccttacctgaacatttttataagagtaaaattgatttggataaagttgatttgaggaagaaaatgaagtgggggcaatgattatttcaaagagagtggaaggcaattaaacagacactgacatctcaatccagcaattgttaataggctgtgacacgtgttctttcgttaatacgccatgcatagcatctcctgttcactttgcttcactggaatctgaatacatttttacatttaaaaataaataactttgctaaaagaaaataaaggagtggaaggaattattctagtgtcccccacatgggacacagcaaacacttaatacgtgttgatttataataattagcaagtgttctctggaaccttacttaaacacaaatctatttcttaaaaatctattatgtttcaaaaaacagaccttcttccawctgtaaaattcccaaagggagtttcctcctgggtaccctgcaggtataaatccatgtctcctatttctaactggtactaacttaccaggcgaccttgtgtcctaattggtctgtgcccataaagcccagca

SEQ ID NO: 676630 - DNA, 598 bp, Homo sapiens
ttcctataagattaggaccaagaagtattctaatccccccaacctttttttttttttttttgagaaatggaagctttccaaaagaaaaatgactttcctaaggacagaagagtatgacaaacagaatagtgctacccttcccaaagatgtttacctgtggctgggtgcggtkgctcacgcctgtaatcccagcactttgggaggccaaggcgggtggatcacgaggtcaggagatcgagaccatcctggctaacacggtgaaaccctgtctctactaaaaaattcaaaaaaattagctgggcgaggtggcaggcacctgtagtcccagctactcgggaggctgaggcagaagaattgtgtgaacccgggaggcggagcttgcagtgagccgagatcgtgccactgcactccagcctgggcgacagagcaagactccgtctcaaaaaaaaaaaaaaaaagtttacctgctaatccccagaagctatacatttgttaccttagatgcaaaacaaccttggtggtgtgattaaattaagatctggagatgggaagtttctcctggagcatttagttgggtccaatgtaatcacaagggtcc

SEQ ID NO: 676631 - DNA, 598 bp, Homo sapiens
ttcctataagattaggaccaagaagtattctaatccccccaacctttttttttttttttttgagaaatggaagctttccaaaagaaaaatgactttcctaaggacagaagagtatgacaaacagaatagtgctacccttcccaaagatgtttacctgtggctgggtgcggtggctcacgcctgtaatcccagcactttgggaggccaaggcgggyggatcacgaggtcaggagatcgagaccatcctggctaacacggtgaaaccctgtctctactaaaaaattcaaaaaaattagctgggcgaggtggcaggcacctgtagtcccagctactcgggaggctgaggcagaagaattgtgtgaacccgggaggcggagcttgcagtgagccgagatcgtgccactgcactccagcctgggcgacagagcaagactccgtctcaaaaaaaaaaaaaaaaagtttacctgctaatccccagaagctatacatttgttaccttagatgcaaaacaaccttggtggtgtgattaaattaagatctggagatgggaagtttctcctggagcatttagttgggtccaatgtaatcacaagggtcc

SEQ ID NO: 676632 - DNA, 634 bp, Homo sapiens
ctcatgcatgcacaagtgaatttgcatacacaagcatacatgtaccaccaacttgaaagaatagaatgtaaatcagtaagacaataactctctcgccaacctaggaatataactgacaccttttctatgataccttttctaagcaatttcaggaaaatggaaaaggagtggaagcatataaagtttttccctcttaatatgtgcgtaatataaattagaggcttattgtttgaattatgataatttatatagtttatatgcctatgttttatcagctgcagtataaaatgtaatcaataactyttcttgcttgatatgggattctaaaaagattataggaaaagaaactatgataatattatccatatagtataaaatatcctagagtccttgattggcaagagtaaccaaatattactgtacattataaaaccacacagaagttgattatccatgcagcaaaaaattatttcacatctgttctacacagctctttgctagattctaagattttgtaatgtgaataagacatggtccctgcacaaaataaatttattatatagaagtgaataaacaaatttggtgcttttagaaaataagatgtaaaggtataaagcatcaaggagaacagtta

SEQ ID NO: 676633 - DNA, 2413 bp, Homo sapiens
aaatttcatcattacagatgtggaaaccaaggtatggagaggtgaaaagttttctaactggactctcaaaagctactgcatctactgtctttatccaggtcaaccatcaaaaagtcactaaatcagtatttctaaaactttgtttttattatgtgaagctcttaaacttttaattgtagacacttttaaatgtgtctgcattgcacatttactgataataatattatttatcattcattgagggtttattatatgtgttaacaactgttctaagaatgtaagccaaaatttgaaatttgcatatattagcaagtgctttttactttttcttcttttattttgttttaaacaagtgtttattcaagaatagttttagatttatagaaaatttgcaaaaacagtatagcaagttcccatataccccacactcattttcctgtattgttaacatctcatattactgtggtaccattgtcacaactaacaaataaactttagaacattattattaactaaacttcatatattattattattgattaaactccaacagatttcattaattctcctctaaagccccttttctgttccaagtgttttagatggaaaaaatatataaggaaaatctacttttctttaatgtctcgtaacccacattaatttactgttttatcaggctttctcttcaagtatttctgtaatcccaaggggcatttatatgccacacatttatcttctggttcttgtgtctcccctccctgagccacgtcattatgaatacttcttcacctgtccccttgtcgtctggtaacatgagccagaccttccacaatatctctttaggttctggctcccactggggaagccaattcatctgctctagttggaagacaaccaatattgaaaacagttccttgtgaatcttttgtttctgttgtggcatgaagtataaaagagccaccttattaatggaatgaagctaaaatattaaacaatcttcagatcttcaattcaccttcaatatctccctctttctatgtacccactctccagatcaccaaatcttaatacatcctttgcaaaatctttgggcttatccatcctttgctttttattctgttgtgataatagaccaaagtttctttccttccttccttctttccttccttccttctttccttcctccctccctgcctccatctctcccttccttccttccttcttttctccctccctcccacctcccaatctttcatttcattcattctgtctgtcagggatatctgaatcttgctttgtttcctaatcagatataaccttcacctttaaagacatacatgttactattgagcagcgtgggagttagacataaattgtaagtggttgacataagtgactggagttattattctccttttaaaacataacttccaagaaatagtccagcgattaacagtgacccttcccacattttcaagatttagcatggtattttcttcacttatgaaataacttgcacacacaagatgtattattggctaggtaagctggttactggtgaagtgatagaacgtcagctatcagcagggttgccattggttacactcatgacccgtttgaaataattagatgtaaaagactagaacaagtttatgctcacaatcttggaattacagtcatttagattatggcatgacgtaaagaaatgtagagtctttctacttaggtattatatttcaaggtttgtttcagtgtgtatgaaatgagcatggactaaatattctttgcacatcagaagtgccctttgttatttctttacagtaatctgggtcctgcgtaatgctaggtagatacacattcaatcagatgtaaaaaaaaatccttcaaaatatacatttgcagagaatgagcatgtaaagtaagagtgtgaagtctaatcaattgtctcctctgccctttttgccattaaggcaagtttatttctagtttaaccagaatgacggaagtcagctttggtatgtttgtgtggtgttagtggtcacataatagacctgtcgtatggcacatctgagtgccaatcctgttttgcaaacatctattgtagttgtagtttttttcttttcttttcttttyttttcttagaggaaattacctgggtcctggttagacatctccagttattttaaaacatgatggattagcagagaggagagaattaaaatacttttttgttttctctgacaaactttatgtccatttcttttagggaggaagcattgctactggtctctatcagattggtaggactttgaaacactttcaaggttcacagaggttagtgaatggggcactgaggaataagaaacatgcacccttcccacctcttttcttctctgatctcttctctcctccc

SEQ ID NO: 676634 - DNA, 1174 bp, Homo sapiens
ttggttgtcttaacttggggagaggagagaggtgctactgctatctagtgagtagagcccagggatactactaaacatcctacattgcacagggcagatgacacacaacaaagaattatccagccaaaaatgtcaatagtgcagggtttaaaaaaccccaatttaggccaggcgctgtggctcccgcctgtaatcctagcattttgggaggccgaggcaggcggatcacttgaggtcaagagtttgagaccagcctggccaacatagtgaaacttgtctctactaaaaatacaaaaattaggtgtggtggcaggcgcctgtaatcctagctactcgggaggctgaggcaggaaaatcgcttgaaactggaaggcagaggttgcagtgggtcatgccactgcactccaacctgggctaaagagcgaaactccatctcaaaaaacaaaaaaacaatttaggcctaagttagttgagggattttatgggcaaacagtggcattaggttgcattcccacatcccttttcccacacattgtatatagcacttttggagaatcattctatcactgttttttagctatctaaacaacatttatactcacagcttcatatacagaaattatatttcctttcccccaaaaagagttaagtaaactttcccagtttaactagggtttaaaaaattaaccatcactgtaagacaacggacattcatgaatgtcaggtgctcttgtttacttgtttatccgcattaactaatcccctgaaaaggatgaatgacgcttcttaaaaaattttcttttcatataaaaatagaatttttttaaagatggggtcttgctatgttgcccaggctgctcccaaactcctgggctcaagtgatcctcctgactcagcctcccaagtagctggagctacaggtgtctgccaccaaccacgcccttcaggatgacccttctgaaagaaatgatggcaagattgtatgagtactatcacatttacttatacaccaacttcttttaaaagtaatttgcagtggcattatacaaaagtaaacatttctatactcaaaagtttggctgctcctttgttcttttagttaatgcaagatttcatttagtgccataamctttacctaacaggttaaaacttttaggtttgctctgattactat

SEQ ID NO: 676635 - DNA, 643 bp, Homo sapiens
tgagaatgaattatccagcccttttcaggacagcgtttgtgaggcagcaaagctaaatgttgagaagggcctgaaagaatgatggactgacgctgccaaaaagagaaagggcgggaccttcacagctttgcctaaggccattatgaatttggaccaaataggtattatcatccacacaggcaggacctcctgggtagggggctgccaccttttccaggcacttggaagggtggcctccagctgtggagccacagaactaaatattatagctggcccaggagcacccstttaggctagggaaggaataataatccggcttctccttcctctgaccctgagatttcggccaagtctccattagagattggcctcctagagtgtaaaacagggtggacaagtttggagaatggatctgggatggggtggggaatggcaaatggaaaaaaggcagcacaaactctttattgtcattcagagaatgctgaggtccaaggcacaaccagccagagggttgcttcagcctttcactggaaaagccacattttcctcagttgtatcctcacttcgagtgaggcttctccaaatgcagaaggacagcatcatgacccaggccgagaaagtatgattgcaaaattccatgggc

SEQ ID NO: 676636 - DNA, 1473 bp, Homo sapiens
ggtgttagagcttcaatttcaaccgctctgtgagccccttcataaaccttttgctcctacacacgagagagaaaataatcagttggtaaatggctgccattaagtcacagctgcatttttgtttaaattaacaagttgtacatggtcacagcagtagatgggttgtggggtttcttcccagacacatccttcttttctagagtcctaggccatagcctggtaaagggacaaggcaagtggctgtgtaggtgcaacttgacttctccttgagggctgttggctggttgaccccatggtcagagtcttgtttttaagaattttgtttgttttttgagatacagtttcactccatcatccagcctggagtgcagtgtcaccatctcggctcactgcaacctctgcctctcaggttcaagagattctcgtgcctcagcctcctgagtagctgggattgcagacgcataccaccacgcctggctaatttttgtattttcagtagagatggagtttcaccatgttgaccaggcaggtcttgaactcctgacctcaaatgatttgcctgcctcagcctcccaaagtgctgggattacaggcatgaaccaccccacctggccttctttttaagaatttgaagtgtgcagtgagaatgatgtgcagcgagatgagcagagataactgcaggcatgaaactgtggccacatagagacagaaagtctgagagacagagcaggatcccttagaactcacttccgtttcccttcccagtcaccactaaggctgccggcactctacgtcctgcctccgtccctgagattgcttgcctatctcctaattatccctcccctcctcttttgtttctaaacaagttaaactgtggtttctgctccttacgacaaaaacccctcatcttagatggcaccaaaaaaggaacaaattcaattatccaccaaatccagacagaagcaccgatggtggattagaataccactgcaaggccaggcctggtggctcatgtttgtaatgccagcagtttgggaggccaaggcaggcagatcagttgatcccaggagtttaagaccagcccgggcaacatggccagagcctgtccctactaaaagtacaaaaaaacatagctgggcatggtggcatgcacctgtagtcccagctacttgggaggctgaggtgggaggatcatttgagcccaggatgttgaggctgccgtgagctgtgattgcactgctgcacyccagcctgggtgacagagtcagaccctgtctcaaaaaaaaaaatcgcagcaaaactggcacaaaaataatcatgtgattcaaaagctattttaaaataaggtgtgaggccggggaggtggcttatgcctgcaatcccagcactttgggaggccaaggctggaggattggttgaggccaggagtttgagaccagcctgggcaacatagtgagaccttgcctctacaaa

SEQ ID NO: 676637 - DNA, 636 bp, Homo sapiens
ttttcctttctttccctaacgaagtgagtgatgagactggctcttttgcatatttgcagggagtaagcattgtctggattttcactgagtttacctcagcaactttttaaaaactttactccaaagggagccaatgtgcccttcctttgacgtagaaaactattattttaaaattctgccattcggcattactctgatttttctgaataattagactcaaaacactctggtttattcccatctcaaaggtcttagggcagtggatgccgcctttgcttctgtttgctgcagcctgtttgagtggcaggctctttgccctcgttggccagtccccayattctggtgacgcttttctcctgcctcttggcccccagtcacattttccatggtgactctttcaacctcagccttcacgtttcaagtcatgcatccactttctgttttcctgtttcagtagacccccctctgagtttactgagcactttgagaccacttggtaccagggcacagcctcctcatctccaaacgcatgggttccatcacaagcgggcctgatcgcacatggcagctctcgtctcccagttattgcatgcacatgtgtgtttggccaggttggctttaggttcattaaaggca

SEQ ID NO: 676638 - DNA, 2628 bp, Homo sapiens
atttcattatttgaaactcatgtatgttcagacaatttttattttcataaaagagcatgccaggctgggcgcggtggctcacgtctgtaatcccagcactttgggaggccgaggcgggcggatcacgaggtcaggagatcgagaccatcctggctaacacagtgaaaccccgtctctattaaaaatacaaaaaattagctgggcgtggtggcgggcgcctgtggtcccagctactcgggaggctgaggcaggagaatggcgtgaacccgggaggtggagtttgcagtgagccgagattgtgccactgcactccagcctgggcgacagaacgagactacatctcaaaaaaaaaaaaaaagagcataccaatatcaagtaacataatgtttgcttgctgttgaataacaactttatttttcttattttgtgtattgtctacatagcggaagcagttgaagaatgcaatgttgctaatttaatggaatttgttttactttgagttcaaagacttgacacatttctttttaaatgtcctgattttggttaaaaacaaaaaggaaaccacttctagctctaagggtagttattttttacttcacacatacagtgacattcaactaagaggaactaacaagttattataataaggcatgttatatgttcatttgtttatcaataactgaggattacattctgtgtctaggactcaccacatcatttaatatcacaagtactttagaactaactactcttttatggtttttttgtgtgtgtgaatggctgtgcacaagccagggattttaatgattgagaaatacagagctgtaatattctaaatcaaaatatatgcactgaaagctaccagtagaaactattctgaaatctgcaccaaaaaaaatatatgaacctggtggtaccaagttttgtgttagggattccattgacttagttttgagtgtgtaatagtgcatgttatatgttacagattttaagatactttaaaaatatatktaaaaatataaattcaaataaattattttagactctttgaagcatttccctgatctccagagttttaaagatagaacagtttcaaaatcactctttcagatgatggtggggagattgtggaaagccaaagttttggggttttttgggggggaggcgtgttattatttttacattaggtaaagccaaagataagtttgaattttcctattacctgtacagcttgagaagttcctaatttttctcagctctaaaagaaaagtagacacacttttgttgattcattttctatactacctgtcccatcaactgtcattgcaataaggggtgaatagcgcactgttctcaaagccagatcagctccacgaagatggctgaaactgccttggaggaaagaatcaaatataacttctcagaaaatatgctaaaaaggaaagcagggtctctatatcagttgttccctttagtttcatatctgtattctcatttgttgatgtctatatcattttcctgctgcctttcaaattcattcatcagctcagcagccaagagtatagtctgaaaataattccgcagattcacttcaaagttcttatactcatttattctgtttcattcatattcatattcatttcctcatattcatctctctgtctcttcatctaccttctccccattttccaattacatgaacaatataaaatgtcagattgtcagtcacttgaatattgtctaaaatctgttagtagcatccaatataagttccatgcacatgccattcttactgaatacttcatagcagtaagaataggccaggcagacagatcgcttaagcccaggagtatgagagcagcctgggcaacatgacgaaaccccgtgtctacaaaaaaaaaaacacacaaaaattagcaggacatggtggtgtgtacctgtagtcccagctacttatgaggctgaggtgggtggattacttgagcctgggaggtggaggttgcagtgagctgagattatgctactacactccagcctgggcaacagagccagaccctgactcaaaaaaaaaaaaaaaagttagaatgataacagtttcaatatcaactcattactttctcatctttaaatttaagcaaaccaacatatctctcactcataaagtatctgtatcaaagatattttttctaatatttttaaaattttgaaacacaggttgaaagaatttcaacaaggagcacaatactatctagtttgtgcaattatcgtttttgtatactttatataactctgcatctattatacctctgtggattcatctgtttatctttttgctacatttcaaaagaagctgcagacatcaatataatctctaaattttccagcatgcatatcattaactagagttcactatcttttttgaggtaaaattgatacacagtgaaattgtaagtgcaccattcaataactatgacacatgtctacccttttgtaactcaaacccatctcaagacatggaacattatctcattccagaaagatccttcatgtccctctttagtcagtccatatatccacccacagacaacaattattttcatttttttcctactataagttaattttgtc

SEQ ID NO: 676639 - DNA, 821 bp, Homo sapiens
tcccaaattgtatcaaaagcccacctctaggttaattattgtggctggaggatgtaatccattcataggtcagggctggccaggtgtagtggctcatgcctgtaatcccagcactttgggagactgagatgggtgggtcacttgaggtcagaagttcgagaccagcctggccaacaggatgaaaccccgtctctactaaaaatacaaaaattagccaggcatggtggcgggcgcctgtaatcccagctgctcgggaggctgaggcaggagaatggattgaacccaggaggtggaggttgcagtgagcagagatcacgccactgcactcaagcccaggcaacgaagcgagactccttctcaaaaaaaaaaaaaragagaaacataggctaggactaggcatatgccatgccttgtgacataaactggacatggggaaggggagtgattccccagtgttagttagccttgctcttgtcactagaaggaggaaggaatgctgtgtggcaaggaaaggaattaatgtccacttgagatggatttgagaaggatgtctgcaagcagaaataaagggttaaagggtgcttacattaaaaattttgatagctactgctctcaaaattgtatcgcgatttatattcccagtgccaacagtgtttgaagagtctggctctccagagcctgtagacactggatattgtcagtgttttaaatttcagcagatctgatatctaaaaatggtatctcactgttctaaactgttctagtatggtgttctacgtgaacaccctttcatgtgtttagctggcctttgcatttctttt

SEQ ID NO: 676640 - DNA, 632 bp, Homo sapiens
tgaactgggatatgaagattcaaacggaggtagctgtggggagggagaagcaaatcatcccaagctgaaggaacagcactaggtttgctccaaggcagggatgagcttgttgtgttcagsggagaaaggaagccagcagagctaggagggctggggtgcagcaaggcgggagagagcgggaagagattaggtgggtcccacagatgactgtgccttctgaactttggaagcttcccagtgctcagcataaggtgtggtccacactgactaacacgaacgattctcacctaccatgttctttttcctaagttcatccctaatggcagaaatgttctctcccaacttgaaggttgaggtagaggaatagagtgaaagtaatatttattaagaacctgtagtgctttaggcagtgtgtgtgtgtggcttcatttagttctcataactctgtgaagtagatattagtgtctctgttttacagatgagaaaatcaaggttaagtgacccgtccaaagccgtgtaaccagcacctggactgattgcagaagccttgtcatgcctttgttcgttcatacagccaactggtgtttcaagtacctctgcatttgagggcagaagtgtggccggcaaggacc

SEQ ID NO: 676641 - DNA, 946 bp, Homo sapiens
cagctgacccaggaaatgagattcctgataagcctcttttgcactgaccccatgaggaaagaaacacatccctctctgcccttgtctgattctctttccagccctgcacatctcaaggaataggattttacagttactgacccaaggccacattcagagattaacatttatttcttgaactttcggtgggttcaagctctcggccagacttttcaaattcatcctaaatacaaagtatgtttttgatgtttttagaacaaaagggagacccagagatgtgcagaactctgaagcacacatggatttctcaccctccacacgtccccgtggagactttgggtgagagggtggggaaacttcatacctttgggcaaggagcgcccatcagggaaggtgacgggagtgctgagctctcttccaatgcctggcaccggtgggtagagcctcagtgcctccttaatgcacatggtggtgtagggcatctggtccaggtggttcctgaaacaattccatcctgaacaccagcaaggcctgggcagaccaggggcccctgtggagaaggcagggaaccccatcttttgagccctcactcaccaggtgatggaggctccatcacccaggaggccatggatctcctcccggcacctctcctgatgcttggggtgtgtggccagagcatagaggatccaggagatcccactggctgtggtgtcrtggccctcaaacatgaacgtgtccacctcagcacggaggtccttgtctgacaagatgctcccattctccatctgggaagaccgtggtgaaagtgcagggcttgtctcttgctatgtacttctgggcaaagactcaggcctctcctacacatactcactttggccaagaggaggatgtccagaaaatccaagtgcctcttcctcttgatcttctccagctccccctccttctg

SEQ ID NO: 676642 - DNA, 1264 bp, Homo sapiens
cctgtgtttatgaaagtattattgagccttggtgaatcctaattcactaatgaagaaaaaataggaaccactgatgagtttcatctccaaccattacccacacagaatataattttgtacttttaataaaactgtgagagtaaattgctagtttctacttttccagattttggttttatgggaagacctcagtctgagtccaccaagggagtcaggattttattgttcacctaacgctgtagcccagttttgtttctacaatagctgcaagagattcagtgtttgtatgataaccggccacatactatctggataatcaacttaaatgagatttttttaaaaagacaactacaaatcatcttgcaaataaatatatacttgccaaccatgtaagcattatgagaaaaagtcaagggtgctgtgggagcatatattgcacctacctggggctcaagagttactgcctgaggaagcggcctttgagtgtccatctggagaagggagacattcaggtagtgatggttgtgggggatagagggtgagtgctccaggagaggggatgtgtgtgcaccagccccatggtgggcaggagcattgtatttggaggagccaaaaggcccctggaacaggaaggcaatgttataggtggaggtcagcgagaagcagactccagctcttaagctcaggtgaagattttcatccccctcctaagagcaacagcatgcttcaaagtgttttatgttgcmaagggaccagatgagagtggagagccccaggctcacctgctgccaggcatgtgcgtcggctagttgggcaatgaaaagctggttactattttagtttttcttctcccattctctctctcttttttagagacaggttctcactctttcacccagactggagtgcaatggtgtgaccatagcttactctaaccttgacctcctgggctcaagtgatcctccggcctcagcctttcaagtagctggggctacaggagtgtgccaccatgcccagctagtttttatttttattttttgcagagacggagtcttgctgtgttgtccaggctggtctggaactcatggccgcaagcaatcctcctgctctcgccttccaaagtattggggttataggcatgagcccctggccctggccccatttctctttttaaaaattttctatttggaaataatttcaaattttcagatacgtttcaagaataagaataggacaaagaatacccatgtactctttactcaga

SEQ ID NO: 676643 - DNA, 1264 bp, Homo sapiens
cctgtgtttatgaaagtattattgagccttggtgaatcctaattcactaatgaagaaaaaataggaaccactgatgagtttcatctccaaccattacccacacagaatataattttgtacttttaataaaactgtgagagtaaattgctagtttctacttttccagattttggttttatgggaagacctcagtctgagtccaccaagggagtcaggattttattgttcacctaacgctgtagcccagttttgtttctacaatagctgcaagagattcagtgtttgtatgataaccggccacatactatctggataatcaacttaaatgagatttttttaaaaagacaactacaaatcatcttgcaaataaatatatacttgccaaccatgtaagcattatgagaaaaagtcaagggtgctgtgggagcatatattgcacctacctggggctcaagagttactgcctgaggaagcggcctttgagtgtccatctggagaagggagacattcaggtagtgatggttgtgggggatagagggtgagtgctccaggagaggggatgtgtgtgcaccagccccatggtgggcaggagcattgtatttggaggagccaaaaggcccctggaacaggaaggcaatgttataggtggaggtcagcgagaagcagactccagctcttaagctcaggtgaagattttcatccccctcctaagagcaacagcatgcttcaaagtgttttatgttgccaagggaccagatgagagtggagagccccaggctcacctgctgccaggcatgtgcgtcggctagttgggcaatgaaaagctggttactattttagtttttcttctcccattctctctctcttttttagagacaggktctcactctttcacccagactggagtgcaatggtgtgaccatagcttactctaaccttgacctcctgggctcaagtgatcctccggcctcagcctttcaagtagctggggctacaggagtgtgccaccatgcccagctagtttttatttttattttttgcagagacggagtcttgctgtgttgtccaggctggtctggaactcatggccgcaagcaatcctcctgctctcgccttccaaagtattggggttataggcatgagcccctggccctggccccatttctctttttaaaaattttctatttggaaataatttcaaattttcagatacgtttcaagaataagaataggacaaagaatacccatgtactctttactcaga

SEQ ID NO: 676644 - DNA, 626 bp, Homo sapiens
ggaaagtaataatyaacaactattcttcctaaatgtcttggacatgaaaccagagccaatttcccctaggataatgtagagtatgttaacattacaaatctgtggtttaaataccctccatgttcacagtctgtggcttggcagtgcttggagagaaaaagccacagtttgttgtctgtaacccagtggccatctgtagtgtggcaagaaggggatctcattggcatttctgtcataatgtggcctagttcctaaaacctggcatgaggattaaagtgatgaagggccagggtccaagccggagatgaagcatagcagtacacagggagactctgggggctacccggcattagcccaggaaggacctaaaccagcttccaaagagtccactgccccctgtccagagcaactcactgcaaaattcttcaagggcaaaattgtggttacaacttgatcgtaactttacagttcctgaaggcccaggacatagctgtcagttgcagagttagaatcttacctttaacagtatctggaccacaggagatgctcaatttatatgtgtcataggaataaagtgtctactaaattgccactctgcattttaccaatagaagagcacacaaatg

SEQ ID NO: 676645 - DNA, 626 bp, Homo sapiens
ggaaagtaataattaacaactattcttcctaaatgtcttggacatgaaaccagagccaatttcccctaggataatgtagagtatgttaacattacaaatctgtggtttaaataccctccatgttcacagtctgtggcttggcagtgcttggagagaaaaagccacagtttgttgtctgtracccagtggccatctgtagtgtggcaagaaggggatctcattggcatttctgtcataatgtggcctagttcctaaaacctggcatgaggattaaagtgatgaagggccagggtccaagccggagatgaagcatagcagtacacagggagactctgggggctacccggcattagcccaggaaggacctaaaccagcttccaaagagtccactgccccctgtccagagcaactcactgcaaaattcttcaagggcaaaattgtggttacaacttgatcgtaactttacagttcctgaaggcccaggacatagctgtcagttgcagagttagaatcttacctttaacagtatctggaccacaggagatgctcaatttatatgtgtcataggaataaagtgtctactaaattgccactctgcattttaccaatagaagagcacacaaatg

SEQ ID NO: 676646 - DNA, 708 bp, Homo sapiens
tctaaagaggaggagctttggggagacaaagagaagagctatatagaatacgacctgtaagggttttggagaagggaagcatcactctccagccctccctgtgatgagctacagattgattagggaatcccagaggaactggtacttatttccagcttcctgggaaagatggcaagccgctctgagaacccttgggtatctgaagggcagataaggaagtgaggtagggagcaggggacatagtgttactgcatccaggccaagggcacctgatgtagcccaacctcctaaggaaggctcctgcagctctagggttacgggacaatattgaaaattattctgtgccattgagacagatggagaagtacccgaataagggccagtagaccagagggatttacagaaaggaaaagccatgttgttagctaatattacacagatcatgtgagccagattttatagtaggagatttcggcagtgaaaatcagagaaagggcaatgtctcaaaagctgatgagaaatacatgtcagtagatgtcagcagaggccagaacttgatcaagcacaaaggtcccccctctccaatacacagaatatataacccctccacccctccacccatccacacaccctctccaaccttaaagaaaattcccrgagggaggaatatggagagattataaatcactggattgcaagtgatcaggc

SEQ ID NO: 676647 - DNA, 647 bp, Homo sapiens
attatttattactatgtaatggcattggtaggagatccagactggatggcacctccaattatcaggaacccgagcccccttcttttggttctaccattctcaacttgttgctatcatttcatggtcctagatggctgcccagcaacttccacatcatatgcattccagcaagaagaaatgaaaaatgcagggagaggggttatttatcctaacgttaagtcaggaccaggaagtggcccttggcacttccgtttatgtctgattggccagcacttaawtgcctgctgcgcctggttctgtgggatactggaacgttaggctttagctgggaggctatgcaagagttaaaattccattttccgggatacgaagagaatgctttttgcaggtacaatgagcaattgaacctcatgaactaataatgcatcacattttctttttaaagataataactcaaggtacacattaaaatttatttgtaaaaggtgttaaagtaaaaatcccccttaacattccactccatatccattttcctccacagacttaatcactgttaacattttgatgctttcttctttgtattttcatgtaataacatatcatatttactacgcacctattcaactgccttttttaatcaaataaaa

SEQ ID NO: 676648 - DNA, 647 bp, Homo sapiens
attatttattactatgtaatggcattggtaggagatccagactggatggcacctccaattatcaggaacccgagcccccttcttttggttctaccattctcaacttgttgctatcatttcatggtcctagatggctgcccagcaacttccacatcatatgcattccagcaagaagaaatgaaaaatgcagggagaggggttatttatcctaacgttaagtcaggaccaggaagtggcccttggcacttccgtttatgtctgattggccagcacttaaatgcctgctgcgcctggttctgtgggatactggaacgttaggctttagctgggaggctatgcaagagttaaaattccattttccgggatacgaagagaatgctttttgcaggtacaatgagcaattgaacctcatgaactaataatgcatcacattttctttttaaagataataactcaaggtacacattaaaatttatttgtaaaaggtgttaaagtaaaaatcccccttaacattccactccatatccattttcctccacagacttaatcactgttaacattttgatgctttcttctttgtattttcatgtaataacatatcatatttactacgcacctattcaactgccttttttaaycaaataaaa

SEQ ID NO: 676649 - DNA, 1299 bp, Homo sapiens
gaagtgaatgaaggaggcagctgaggaccctgctctgcagtgtaatggcttggccatctgaattgcccaaggctagctctggatggagatggaatgaagtccactgcccctacaaccacagcagttgtcacagtgggasccccccgggacacatagcaattctgtgcttggggagccgaaattaattatatccattttaggccccgttggttgccagatggattttagaacataggcagagaaattgcaaaatggtgctcaaagataatcaggagaaaaaaaaaaccttttagggtttaatgtatcctattatcaagaatgtctacctctattttatcaaaatatttcctgcttagtaaactcatttttctcttatttgatcttcaagaaagagagaatataaattctctatcatccacatgatcatctttcacatacagaacattttcagccatgaagctgtcctagaagttaagcaatatgacccatcattagttaatatcctttctgtaactgctgatatagctgatgacaatcaatatggttaattaagataaatagtttgtctatgcttctcaccactgaggtaggagaatatttagatagatagatagatagatagatagatagatagatagatagatagacattatacttaaaaggctttttgttttgtattattttttggaatactaagtggtgtcataattatctgaaggcctctaggtaagattagtgagtcaaacacttctggtctgtaggcagcattgattggctgtctctccagcatttattgtcctctcctatcttctttgcagtacccacattttaattcagatactgcacagaatacttcccatttgttcctgtccttttccattctgctctgtcctgaaagaatgaccagcgtgggcagcatcacactgctcctgcatcctcaggcttctggtttgttttaaacaatggggaatcccagtagaaacaggagaaaacaagaatatcagagtgctaatttccctagttccctccctaagctcctctgaggttacctgtgttctcccagggtcattgctcctatcaatatattattctctacaggactcttcctttgcattccagtaagctctccctccctgatttcctctgggcctgggatcaatagcagctctgctcttgctcactccaagttccctggctatgtcttatggttccactattcccccttcacactttgtaatttggccctttgaataaaacaaaccaaaataaaatggacttcacctcaaattaccctcatct

SEQ ID NO: 676650 - DNA, 2429 bp, Homo sapiens
tctctctcagtgggtgaaacaaaagtatgtaccagtctaattattgccggtacacatccaacaaacataaggatcagccttagaatgaactcaacatgtggacagcagaaaagaagaatagaaagaaaccagatcgttgatgtaaactggaatgaatcctgaaacttgtccttttggatttttgcaagctaataaatctcctttatttttatttttgcctgtgtccactggcttttcttttcctggcatcacaatgcatctgaactgatacatgttcatctggtgatttctcacaaattttccagctggaaatagatatgggtaatgaaataaaccaggaaggagaaactcacaagtaaagatcgtctttccttttcggaggctccttgaagtatttccaagtggtggataaaactgtgtgtgctagtgagttcattcagtcactctggaacactcttggtaggaatccagttaagaaattatgtaatccacatgatcctctcccactgcaaactcagctacaacctaatgtcattactggcacagttatcttgtaaacaaaagctcagttctaaatagtatttagcaaagccattatgcacaagtcagatagactgatagtggcctataaaaaagctttttaaatgatccagaaaatgttaagaacctttgagaaaaaaaataaaaataagggcagacaaaaggtagatgatattaattaatatatgataaaggcaaagaaaagttgccaatattcctaaataattacacaaactcaaggggaatatgaaaagctctacaacatctcagaagtggatgtatcaggggatttcagagctgtctacttatcagaaaccatttcagacatagaactgtatatccaaacagagccaaaagtacaatgacagaagtgctttagagtagttaaaaaattatgaaccaagaagaaaggataatattaagagctgaagggaaaaaaatatatttttctattactttataccatgaaacatgggaatatcctaattgatgacccattgaagatcaggatgtcccagagatttgagcaatcagtttctaatgggtttgayaataacgtaactttataattgatggtatgtagaattccataaggcatagtgagattggtatgttcattcatttatttattcaacaaacataaattgagtatcttttatgtgcttgttttaaatgctaagaacataagagttaacaaatatactgaaatagctgccctcatggagcttacattttagggacagacacaaaataaattagataagtaagaaaatatatatacaatgttagtgctaagtgctgcagaaaaaaataaagtatggcataaaggtagaatgttcaaagaagagtggagggtgtttaaaaattttatacaggacattcaggaaagagttcactgagagggtaatgctttgatgaaagacctgaaaaaagttagaaggccagacatgtgaatatgagcaactttcagaattgaatttgcccgcagagagaatatcatggaaaaaggtcctgcagtgggagcttgcctagtaaccttcaggaacatcaaggaatgcatgcaagctgcgggtcagtaagtgaaggggagggttgcagatggggctaggtagttaatgaggagatggggcaaatcatatagggctttatagatcataagaggacttcactgtaagtaatatggaatgctattagagggctttgagcaaaggagtgacatcatctggtttatgatataataagatttatgtgactgttacgttaagagtagcctgaaggcagccaggcacggaagctcacgcctgtaatcctagcagtttgggaggccgaggagggtggatcacaaggtcaggagttcaagaccaacctggcaaagatggtgaaaccctgtctctactaaaaatacaaaaaattagccaggcatggtggcaggtgcctgtaatcccagctacttgggaggctgaggtagagaatggcttgaacccaggaagtggaggttgcagtgagctgaaatcgcaccactgcactccaacctgggcgacagagcgagactctgtctaaaaggaaaaaaaaaagaaaaaaaagaaaaaaagggtagcttgaaggctagagatgatgtctagggtagtaatggtggagttgataagtaatagatttttagattcattagactttttgtaacctacagaaaagtttcaagagtattacacaaaactccctgtatgccttccaaccagattcatcagtttgctgacattttgctccatttactttctttaaccatccttctctatgtttcattatattatgttttctgaactacttgaaaggatgttagagacatcatgccctacaattgctaaatattttagagtctattttctaagaac

SEQ ID NO: 676651 - DNA, 2429 bp, Homo sapiens
tctctctcagtgggtgaaacaaaagtatgtaccagtctaattattgccggtacacatccaacaaacataaggatcagccttagaatgaactcaacatgtggacagcagaaaagaagaatagaaagaaaccagatcgttgatgtaaactggaatgaatcctgaaacttgtccttttggatttttgcaagctaataaatctcctttatttttatttttgcctgtgtccactggcttttcttttcctggcatcacaatgcatctgaactgatacatgttcatctggtgatttctcacaaattttccagctggaaatagatatgggtaatgaaataaaccaggaaggagaaactcacaagtaaagatcgtctttccttttcggaggctccttgaagtatttccaagtggtggataaaactgtgtgtgctagtgagttcattcagtcactctggaacactcttggtaggaatccagttaagaaattatgtaatccacatgatcctctcccactgcaaactcagctacaacctaatgtcattactggcacagttatcttgtaaacaaaagctcagttctaaatagtatttagcaaagccattatgcacaagtcagatagactgatagtggcctataaaaaagctttttaaatgatccagaaaatgttaagaacctttgagaaaaaaaataaaaataagggcagacaaaaggtagatgatattaattaatatatgataaaggcaaagaaaagttgccaatattcctaaataattacacaaactcaaggggaatatgaaaagctctacaacatctcagaagtggatgtatcaggggatttcagagctgtctacttatcagaaaccatttcagacatagaactgtatatccaaacagagccaaaagtacaatgacagaagtgctttagagtagttaaaaaattatgaaccaagaagaaaggataatattaagagctgaagggaaaaaaatatatttttctattactttataccatgaaacatgggaatatcctaattgatgacccattgaagatcaggatgtcccagagatttgagcaatcagtttctaatgggtttgacaataacgtaactttataattgatggtatgtagaattccataaggcatagtgagattggtatgttcattcatttatttattcaacaaacataaattgagtatcttttatgtgcttgttttaaatgctaagaacataagagttaacaaatatactgaaatagctgccctcatggagcttacattttagggacagacacaaaataaattagataagtaagaaaatatatatacaatgttagtgctaagtgctgcagaaaaaaataaagtatggcataaaggtagaatgttcaaagaagagtggagggtgtttaaaaattttatacaggacattcaggaaagagttcactgagagggtaatgctttgatgaaagacctgaaaaaagttagaaggccagacatgtgaatatgagcaactttcagaattgaatttgccsgcagagagaatatcatggaaaaaggtcctgcagtgggagcttgcctagtaaccttcaggaacatcaaggaatgcatgcaagctgcgggtcagtaagtgaaggggagggttgcagatggggctaggtagttaatgaggagatggggcaaatcatatagggctttatagatcataagaggacttcactgtaagtaatatggaatgctattagagggctttgagcaaaggagtgacatcatctggtttatgatataataagatttatgtgactgttacgttaagagtagcctgaaggcagccaggcacggaagctcacgcctgtaatcctagcagtttgggaggccgaggagggtggatcacaaggtcaggagttcaagaccaacctggcaaagatggtgaaaccctgtctctactaaaaatacaaaaaattagccaggcatggtggcaggtgcctgtaatcccagctacttgggaggctgaggtagagaatggcttgaacccaggaagtggaggttgcagtgagctgaaatcgcaccactgcactccaacctgggcgacagagcgagactctgtctaaaaggaaaaaaaaaagaaaaaaaagaaaaaaagggtagcttgaaggctagagatgatgtctagggtagtaatggtggagttgataagtaatagatttttagattcattagactttttgtaacctacagaaaagtttcaagagtattacacaaaactccctgtatgccttccaaccagattcatcagtttgctgacattttgctccatttactttctttaaccatccttctctatgtttcattatattatgttttctgaactacttgaaaggatgttagagacatcatgccctacaattgctaaatattttagagtctattttctaagaac

SEQ ID NO: 676652 - DNA, 870 bp, Homo sapiens
tcggccctgggcttatcttgattaggaggaagtggctatctagttgttccaaatttagagcagaaaagagccggatgtctaagactatcacacagagaaagccttaacccattggggcttttgccctactcaccacttccctgatatctggctgtgtccatcttgacgcagagcacagggagctttgggttacaattttccccttcccagcaagtctgtcctagcttcaaagtccactgagaggctcctttctgtgctaagattgagaagatgctgggcacatacctcctgagagatttcgtggcttatgctaaaggttctgtcatctctaagactgagttcagaatcctgaggctggtggtcaagacccttcaccatctggccccctgctgcccctctcccattgttcatctctactacagtgacagagaagtgtttatgagagtgaactccagggactagaaacagatgttgtccctgccaccaggaagcttacggaatagtaggaaggtagaaattcagcacacggaggggagtacattcgcagcccggcagagatctggccttaaagaccagattggcttcttcctagttgtatgattttggacaaattattttatacctctctgtctttgccatctcatctgttagagggggatattaatattactaataataccaaattcataagatgtttgtgagctttacattatttgatatgtgtgaagcactcagtacaatgtcygctatatacctttgtccctcagtatccatggggcattggttccagggcccctccaaggataccaaaatttaaggatgcttaagtccctggtataaaatggtgtaatatttgcatagaacatgtgc

SEQ ID NO: 676653 - DNA, 670 bp, Homo sapiens
tggcaaatgcaaagaaacacggcctggaagcatgctgagggatggccagatttgtaataatgtggagagaaccgttgaagccaacacacaggctgatacctgcaaaaggaaattatagcatttttcactatatgtaatatttcacaataacaaacattaaaataaaaaaatagcaatagtttcaggttctctgccagctatcttaaaaacattttcccaggaagtcctcacattaaccctctgaatggatattataattccagtgttaccactgaggcaataggctctgaagttaggtgacttggctaatgtcacacaacaaataaatagcaggattagaatttatattctaattccaaagctgaccctttggtctgggtgcacctttgttcttaggagataagtatttcttgatgttaaggtgtttcattgtgattaaacctcttgcacttctgagaaattgaaatcatagagcgtttggtcagaatgtccatggatagaatcagagcatattaaagtcatgggactttttgttttaaagccctccgtggcccccagatctcccccatggtggtcacckgccagggctctgacacggctgcagacacctggaataagagaagcaggtctttctcagatgttcctccctcttattggaaggaagacaaga

SEQ ID NO: 676654 - DNA, 1264 bp, Homo sapiens
agtgataaaaaggatgtacgagttaattgagagagtctagtgttgtacagagggaaaaagactggtggaaagcacatcagaagaataaggatagaacttttaaagatataaagattttttatgtataaaacccattaaaaatggtaagaaataacagccatttctaaaatgccctttaaccagttaacaatctgtttgcacagccttgtagcttatgtaaatatgcatgctcactttcctgcttggatgtgtcagaagttagggagggataggagccctgggtagaaccatatggattcaaaaacacagggaggggctccattttaatattatggctcagaaatagtcctaggaagctgggaccagctgtgcaaaactggtcatagaacagcagttgcccctaaatgatttgaattctttagtactacagttctaattactcctgaaactagtatggaatttgggagtggtgattttgtcattcttcaaattgcttttcctattctttgatagcatgcagaattgacaacagttttcttctagagaacccaatcttgcaaacattaaataaagacagtaattattctgcattcacaattagtgactttgaggccttagaaagagcacctcatgacaaagatactcggtgaatgtcgtcaactgacttcctgcgtggctgtcggactgattttttcaaattctaagaaagagaatgagagattcagatgattcacctccccaaaagatgtccccagggctttttccacctctccatcttgatttgagatcttcaaaatcacttcagcttcagattattatcccatttctctcactggcactagctccaactctctcaggcaagaaagtttgctcatgtgtcatgattatttggttgggtcacttatttagtggccattttccatttacttcaagtatcagaagcaaaaccaagtcacatggctcttcgagggagtacattttgtgtttgttccctctcttaaatccccatttcaccatcagcatagttcccacttattggtacagtgtggccacaggatttaggtgagcaccattcaacaacagttgcacaggtaccattcaggccaagaacaatggctctgagacagctctgctgattattggctgggcttccttaagcaaatgactaaatctctgtgcttttgtttcctcatttgtaaaatgagaataagaataatacctacctcacagcatttttagaaagattawatggtttaattgttat

SEQ ID NO: 676655 - DNA, 626 bp, Homo sapiens
tcatttatcaactatagatcatccttatccttctattatcaaaaccaatatcctgcaaatcagttatgcttcagcctctcttaatctccaattttgtctagtgtctatttttttatagtactccttcatactccttcattaattttttaggaactaattgacackcctataaaatgggttgaaattcatttcccccatattttaaatggaaatcttcagaatactatatgaaaaagttttcaggggcatgcttagttgaaatgtattttaaaaaattaaacaaattcttaaaattaaaacattaccactaagcaaatatctcagctatgacgaattcagaattttattttaacgggaactgagtatgtcaacttagaaacactttgcacacaaacatctgaattatttaaaagcaaactatagttctttctcaatattaatttattcagactttccattatatttagcctgttttttcctggaagaattccaaactgttaaggttttattgaattttcatttacagaacaaatatttaaatggaagattgttttgaaagaaggagacagacataccttcctgcttcctaccttgttcaagttcaagcattatcctctattttcaaa

SEQ ID NO: 676656 - DNA, 995 bp, Homo sapiens
tgctttaaatgagtaagtacaattaaaatacagattgctcccaatttaaaatgaaaaaaaaaaattcaagcaaaattagatatgttcttaatgtgcattaaaattttttgtttttttttgaaggattggaaaatttgttttgaaaaygtaatgaatgttagcatacatttcatttgctctctagcattgttataccaaaggagcatatgtgggagattctaacacaaaaaaaagtctttacaataattaatacacactttagaaatgttgttagaagtgataaatggcatcttcacacctcttattattaccctgtggtagaagatgcagttgtatagagtattataagtgttgcatgatcaagttatttgaagagtatgaaatgcccaaaaggtaatgctatttgcgttatctcttatttttcttctctaacttccttctattgagggtaaagtgaacagaaatcagggaagattggaaagagacagggaatcaataagattaatatgtgattcaattaattattttaaaagctaagattttattatatttgtcttcatccttcctatgactcttcctatagatccaaatggtttctttctaattagaagtgatttcttttttccctagggagcttaatttggcatgtcttagcaatttgaaaaaatgttggttttggcaggatatggtggttcttgcgtgttatcccagcattttgggaggctgaggcgggagggttacttgagctcaggaattcaagaccagcctgggcgacatagtgagaccccataaaaaaaaaacaaaaaaacccccaaaacacacacacaaacgcacacacacacacaaaataaattagctgggcatggtggtgcatgcctgtagtcccagctacttggaaggctgaggtggaatgattgagccctggcggtcgaggctgcagtgagccatgatcgcaccactgcactccagcttgggagagtgagaccctgtctcca

SEQ ID NO: 676657 - DNA, 995 bp, Homo sapiens
tgctttaaatgagtaagtacaattaaaatacagattgctcccaatttaaaatgaaaaaaaaaaattcaagcaaaattagatatgttcttaatgtgcattaaaattttttgtttttttttgaaggattggaaaatttgttttgaaaatgtaatgaatgttagcatacatttcatttgctctctagcattgttataccaaaggagcatatgtgggagattctaacacaaaaaaaagtctttacaataattaatacacactttagaaatgttgttagaagtgataaatggcatcttcacacctcttattattaccctgtggtagaagatgcagttgtatagagtattataagtgttgcatgatcaagttatttgaagagtatgaaatgcccaaaaggtaatgctatttgcrttatctcttatttttcttctctaacttccttctattgagggtaaagtgaacagaaatcagggaagattggaaagagacagggaatcaataagattaatatgtgattcaattaattattttaaaagctaagattttattatatttgtcttcatccttcctatgactcttcctatagatccaaatggtttctttctaattagaagtgatttcttttttccctagggagcttaatttggcatgtcttagcaatttgaaaaaatgttggttttggcaggatatggtggttcttgcgtgttatcccagcattttgggaggctgaggcgggagggttacttgagctcaggaattcaagaccagcctgggcgacatagtgagaccccataaaaaaaaaacaaaaaaacccccaaaacacacacacaaacgcacacacacacacaaaataaattagctgggcatggtggtgcatgcctgtagtcccagctacttggaaggctgaggtggaatgattgagccctggcggtcgaggctgcagtgagccatgatcgcaccactgcactccagcttgggagagtgagaccctgtctcca

SEQ ID NO: 676658 - DNA, 594 bp, Homo sapiens
agaatgcagattcactgagccagacaaaggcatgaatgactgttcttccccacccgcgtcttaggtgaaaattgtgtacttctcatatcgcaccctttcccttgtacatttggagccctatgttcagagaaaggctaagacctctctcccaggcacacatccttaactttcgcaaataaacttcccaaagggattgagacttgcctcatcacttttctcgattgacagtggagtgaagacctctgaaaagtcacctctcaataaaagcagttcttaggaactggcatgatgcgtcaaaataaactttttcaggactgtgaaaattaaccaaaggcttacaggaatccaggaagtatttattcaaaaaaatggatgagtctcagtaagaccaatgagctttatgagattttaaattgccttagtctaatgcctcatccccaggcacagctgtagttttgagagataaaattctcagtactacagggagcagataaagctggagctcttttgtacaggctcattcctaaaraattgatgttatttgagctatttagtcattccctgaaaggctgacttaaaaggcttccctttatt

SEQ ID NO: 676659 - DNA, 588 bp, Homo sapiens
accccccagggaagatagtgaaacacatgctgtggaaattcagtctgatcttcatcccatatgctggttctcaagatggagcaacagggagatttttctcttcccatgaacacatcctcaggtaggtagctctgctccacttcctccctccagcaaggctactaaatttagttgtgctggaaaatctgaactgaacatgaaatggcattgctgagaastatgttccatgagcacctgagggcgctctggaaaaaaaaaatagagccagttcaaaataacccaccagttctcaatatgcatcagacaacgccacagagattctgtcctcaaaactgaggggctaaaaatatgcagatactttactccagcctagggaggccatgaacattttaagcaaacaacttgctatttccttttcttagatcaaaggaaacaaattctaaaactactgtgatctccacacaggaaaatgctcaacaacatgaacaattaccaagtctgtgatattgcacaaataaataacacttcccattatctctagcgcgatcgtatttattaaacagtgacagagggcatcagtaaccattt

SEQ ID NO: 676660 - DNA, 968 bp, Homo sapiens
caagttgtgattccagtgttctgctatgttgggttttctattcataaaccacaatctcctagggataaaagaaggctcttcctctttaagtagcagacagaaaatatggtttttttgggggtttgaattttcatgtgtaattactgcagttgtctgtaggagaaagggctcattgtggtttttctcgactacctttcttaaagacatatgcaaatagccagacagaacacatggcactgacctatggccagggactcacagttttgtgagaatacgggagcgtatagccacttccttcactgaatgccagtcccagagcagttgcattaggctggaggactggaggtggagccttttttgctcacggcagcaagttcccttctcctttctctcccccggcggcgtgtgcattggctcttcaagctgcctgtgctgctccgtggagtgaaaaaggcagggtgtgctcgcagactgtgctataaactgcaatttctatttggggtcctcacggagaagaacaccaggaaagacagacaggaccagtgccatgggccagctttgctgctttcctttctcaagagatgaaggaaaaatcagtaagtgggatttgtactgtgcagaatcctaagtgcttgactattttgtgcggttgtcttctaggggtagttttgctctttttttaatgggaaggatagcagactaatcagctatggtttttaatgtgtgtttcttaaagggactggtaggtgtgtasttacaaattaactgtaaaagtactgcaactcagtagatgggctgtgttaaaaatacaaaatactgaaaactcatttctgattctcctctgttggtattctcccagctcatttttatcccactacattagagtcagagtttagttttgagtttctttaaatcactgcattcgatttgatatactgtacaagccagactttatttttcttatctga

SEQ ID NO: 676661 - DNA, 605 bp, Homo sapiens
tctgctggtaacattaatataatcctaaaaatattgacaatgtttcaggccttctagagctcatctttatgccagatattaatacattaaatagattgaaatgttaattatatacttgagcattctaagacacgtgtgtgtgtgcacgtgtatgtgcacgtggacaaacgtgagagatatcagtgtttaaaaagttgtgatatttactaaatttttcctttgggggcttatctcagtaaagaaagtaagaaaacgtagaaaataattttgtttaaacttttgtttaatctcatgaggcttaacctattgacttatctgtctattattgaccattttatgaaaagcaatttttctaacatggagcacacttttgaatgagaaaaaatttttttagtgctcatcgtattttttttcrtgacaaagtgttgtccactactagctgtggaattataaaacaaaatccaaataggaaaccaagtaatcctattaagaacatacttttatgataatataattaatttgtaaactaccatataataatcttgttgtggcattgaatagtatgcctgcatcatgaacacttgatctctttctaattggtacca

SEQ ID NO: 676662 - DNA, 598 bp, Homo sapiens
cgtgtattttttcactagccatatatcccccaaatactgaatacatccctcaggtattttaaaaatctattaaacgtttacccaaaagagaacatctttttctgtatatcatctaaagtgagcaattaacattctctttaatggtatatttatactattatacatatcayatatatactatcacttaaggacttaatatgagcccttaagtaactggaggaccagttacttaagaaaaacattcatgtgtttttcttttcctgataaattgaagtgatgctaaatattataaagtatcttttgcaaaatttgttttaacatctatatatgtaactatatatacatatagtgaaatttcttaaaataagatacagtacatttttcaaaaagtattgtataagaaacttagaaacacacaatataactgcttgtaagaaacttagaaacacacacaatataaccacttgaatgtcatgtatattttccttaagaaatgtaaacgctgttatccctttaaaaagatatatcataaaatatttcacagaaataaaatattactacttagattttcttcatgttcttaacatttattggacat

SEQ ID NO: 676663 - DNA, 598 bp, Homo sapiens
cgtgtattttttcactagccatatatcccccaaatactgaatacatccctcaggtattttaaaaatctattaaacgtttacccaaaagagaacatctttttctgtatatcatctaaagtgagcaattaacattctctttaatggtatatttatactattatacatatcacatatatactatcacttaaggacttaatatgagcccttaagtaactggaggaccagttacttaagaaaaacattcatgtgtttttcttttcctgataaattgaagtgatgctaaatattataaagtatcttttgcaaaatttgttttaacatctatatatgtaactatatatacatatagtgaaatttcttaaaataagatacagtacatttttcaaaaagtattgtataagaaacttagaaacacacaatataactgcttgtaagaaacttagaaacacacacaatataaccrcttgaatgtcatgtatattttccttaagaaatgtaaacgctgttatccctttaaaaagatatatcataaaatatttcacagaaataaaatattactacttagattttcttcatgttcttaacatttattggacat

SEQ ID NO: 676664 - DNA, 598 bp, Homo sapiens
cgtgtattttttcactagccatatatcccccaaatactgaatacatccctcaggtattttaaaaatctattaaacgtttacccaaaagagaacatctttttctgtatatcatctaaagtgagcaattaacattctctttaatggtatatttatactattatacatatcacatatatactatcacttaaggacttaatatgagcccttaagtaactggaggaccagttacttaagaaaaacattcatgtgtttttcttttcctgataaattgaagtgatgctaaatattataaagtatcttttgcaaaatttgttttaacatctatatatgtaactatatatacatatagtgaaatttcttaaaataagatacagtacatttttcaaaaagtattgtataagaaacttagaaacacacaatataactgcttgtaagaaacttagaaacacacacaatataaccacttgaatgtcatgtatattttccttaagaaatktaaacgctgttatccctttaaaaagatatatcataaaatatttcacagaaataaaatattactacttagattttcttcatgttcttaacatttattggacat

SEQ ID NO: 676665 - DNA, 1143 bp, Homo sapiens
ggcataagtcaccatgcccagccctctctgtgcttttttatgtgacctgtattaaatgatcactagaatttagttagtagcttgtacaatgatgctcctcacccctaatatattagggtctcttttagcaaatatttattgaatagccatcatttgccaagcagtatgccaagcaaaataagccagatattttgctcactaaatatttttctattttacttctcgtggtttttatgtatgtccacttttcctgattggaatataaatttcttaagagcagaagccttctttttaaaacaatgagcaaagtatctggtaggtcctagcctcataaattccrcagtttgatggggttaactgacattgattagcaattacacatatatatttataaaccatgataattgccatatatatatatgtatatatatatgtgtatatatatatatatatacatatatatatatacatatatatatatacatatatatatatatatatatatagagagagagagagagagagagagagagagagatggagcttcgctcttgttgcccaggctggagtgcaatttcggctcactggaacttctgcctcctgcgttcaaaccattctcttgtctcagcctcccaagtagctgggattacaggtgcccgccaccacacctggctaatttttttttgtatttttagtagagacagggtttcaccatgttggccaggctggtttcaaactcctgacctcaggtgatctgcttacctcagcctcccaaaatgctgagattacaggtgtgacccactgcgcccggccaaataaattttaaaatacacataagaggaggtattgacgtggtcttgaagaattaagaaggtttccctattgatcaaaaaacatggcaaacatgttgaacaatctaacctgaaggatggaacggagttagccaggctagggggctggggtgagagctggagttcacagcaaccggagaaggaggaacgccaggctacaaagcttttgggacagtgggttcctagacatggcccattcggtcagtgtgcctgaggagcaaaaacaaagggagggaggcgaggccagagaagaagacagaggcaggtgattgggagcctagctggccattct

SEQ ID NO: 676666 - DNA, 1143 bp, Homo sapiens
ggcataagtcaccatgcccagccctctctgtgcttttttatgtgacctgtattaaatgatcactagaatttagttagtagcttgtacaatgatgctcctcacccctaatatattagggtctcttttagcaaatatttattgaatagccatcatttgccaagcagtatgccaagcaaaataagccagatattttgctcactaaatatttttctattttacttctcgtggtttttatgtatgtccacttttcctgattggaatataaatttcttaagagcagaagccttctttttaaaacaatgagcaaagtatctggtaggtcctagcctcataaattccacagtttgatggggttaactgacattgattagcaattacacatatatatttataaaccatgataattgccatatatatatatgtatatatatatrtgtatatatatatatatatacatatatatatatacatatatatatatacatatatatatatatatatatatagagagagagagagagagagagagagagagagatggagcttcgctcttgttgcccaggctggagtgcaatttcggctcactggaacttctgcctcctgcgttcaaaccattctcttgtctcagcctcccaagtagctgggattacaggtgcccgccaccacacctggctaatttttttttgtatttttagtagagacagggtttcaccatgttggccaggctggtttcaaactcctgacctcaggtgatctgcttacctcagcctcccaaaatgctgagattacaggtgtgacccactgcgcccggccaaataaattttaaaatacacataagaggaggtattgacgtggtcttgaagaattaagaaggtttccctattgatcaaaaaacatggcaaacatgttgaacaatctaacctgaaggatggaacggagttagccaggctagggggctggggtgagagctggagttcacagcaaccggagaaggaggaacgccaggctacaaagcttttgggacagtgggttcctagacatggcccattcggtcagtgtgcctgaggagcaaaaacaaagggagggaggcgaggccagagaagaagacagaggcaggtgattgggagcctagctggccattct

SEQ ID NO: 676667 - DNA, 1577 bp, Homo sapiens
gatgaaaagacagctacaaatagacaaacaccttcctaaaacaatgcccaaggaattcagacctagagcagctgtaagccttcttccttcctttctcacctgcatccgagatgcctaattgctgttcatgaggttttaaaattcctaagtggaccgtgagttccctcataggaggaatcctgtctttcatgttataatctctaatattcagcacactgcctggtagatagtaagtgctaaataaatgatgttatatgagtggacaaattaatgtgtgtgtgtgtatgcatgcatgcacatgtgtgtgtgttcgttatatgaagcttctagacttatcaataagcaagaatctgcttaggtgagctcattttgagtgtctcaggcccatctaatgaaaaggtgctagctgagggtgactgaaaccagtgctgcctctgcctctccccacggctccctactaacctgtgtgttctctgctgaaaacagagatgagatttttggatttgttgtgttttatgagctacacttcaacattagctgcatgtaattgacctaagtcttaggaagtctcaatgagtatccgagggagtccacgttgcagatggctggcctaagtcaaggacctgctatgtggtttgccttgggtcacatgaagaaacagaagttccagacagaggtgccccagattccacaggttctatgctttcttagcatgtaaaggaatctaagctatactagttattcatgtaaaacaaacaaacaaaaaagttggagttatgtgtatagaaacctgtctcacatcttttttgtcatcttgaacatcatgcaggtcactcagttgatgaagaactaagagatcaaatactcctagacccactggaagatagagcaagctgtgagctcttcctggagcattttttcccagttgatgaatcccagagatagaaatgaattttgactactttttttcttcgtttagtgktgtgttaatgaagccactgcacaaaaatgatatacctgaagaggattcttggagtattcagtttaagattctaggtaattttaagcaatttgctttgaggaaatttatctcccctactgttcttggacgttttaagataagagtcatcacgccttttaaaacacacacacacacacacacacacacatacacacacacacacatacacataaacacatacacacatacacacacatacacacatacacacacatacacacacacatacacacacacatacacacacccctgtaatctctttattaagcatgaatggcacttagttaagaaataatagctctattatcaactaaaagatgtttctcaattctacagttttctgtcacagactacagaattagaggtgtaaataataaaggagggataaggatgtgttccagataccagcatgaacaatattcaacaggaagttaaattaatcttgagtctacaaggaagacaaagtcaagttgggctaagttaactggtggaaggggacaccgtgaccacccgacacgttgcctggctcgtggtgggtctttatcagacagtcacg

SEQ ID NO: 676668 - DNA, 631 bp, Homo sapiens
ggatggtctcgatctcctgaccttgtgatctgcctgcctcggtctcccaaagtgctgggattacaggtgtgagccaccgcgcccggccatatctgggctgttttttagagcgttcagtactggttgatcctgaatgaagaatgatatagccacagcagagttagcattaaactggaaggatatttcttctggccttcctctcccccatcttggataggttgagtgcaggcacacctttgctgtctgcatctgggattctgctagaggattataaggtaaggatgattcaccatgaccctacagttgagaaaggcagcttaattgggactatttggaattattacctactggtctatctcttgtgaacagcactgagtcaactcatctactagatttgtgtcttgcatcagcattgagggagcaggtgacaagtctcaaccagcactgtagattacaaaayacttgtgtgttgtgtgtgttttaagtttgaattttaatgtgtagcatttgaaaccccataatctgggtcatggatttgcttctcctgtatttaaagtacttcataggtgtaatgaagctgcttgtgtcagtaactgaaccttaaatgcgcttcctttcttgtagttttcat

SEQ ID NO: 676669 - DNA, 1674 bp, Homo sapiens
gaatgggtaaaattaaaaagacaaaaaaatctggtattggcaaggaggtggagtaacactgcagatgaaagcataagttggtacagccactttagagaacttcttagtggtctctacttacgctgaacagatccatatcctgtgacccagttgctgttacctacctcacagaaatttgcacagtgttcttcagaagaaatgaataagaatgttcatagcagcactatttgtaatagccccaaatcaggaattatccaaatgccaacagtaggattcgtaaattgtgaaatattcgtacaacagaatactatctagcactgagaatgaatgatttgcaacttctgatataagtgcatctcacaaacataaagttggacaaaataaaccagacactgaagagaacataccgtatgtttctatttacattaatttcaaaaacaggcaaaactatagttatctatggtgatacatatctatggtgactcatgcacttttctgattgtatgttatactttaattaaaagtttctaaaattwaaaaaaaaaacgctgtattatctggtcttaaataaggcaggtaaaactcttattccagcagtcactaagagaaactttatcccagatcatctttctctaaaaacatagcaacagcacatatcttgaggaacgttctctgaaactggcataaaagattacgctatccataagcaaagagacgtttcagcaaacattctcttttctccaaaatactgcagtgtatactgtcttctagaacatcacttccctcaaaagctaccagtccacctcattttctggcaagtaacgaaattactgaaagatgaggagaaaaaaggctgatgttaaagggcattcggctgttgccatgttgctgcattgcctcacttacccacgttgtaagaaagaggtcaaaacacggttaactggcttacccagggttatataggctctcggtagagccgcaggaggactgaaggagacactgccagcttctgactctgattctttaatcttttctatagtcaggtaacccaggattgggacagaaaaacataagccctctactatcatatttgttgaatgtaagatttcctcagaatcaagaatatgaatagattatgcacttactgttcatatttttaatttctagaatggctattatgattagtttttgctttttctttggacaaaagaattttgtggtgctaaaagtgtcttttaaaatttccttttattatggagaaaaaaaaaagctttgtccggacaccggtggctcaaacccctaatcccagcactttgggaggccaaggcgggaggatttcttgagccccggagttcaggaccagcctgggcaacatagtgagaccttgtctctacaaaaaatgagaaatgaggcaggtggatctcttgagcctgggagatcgaggctacaatgagctgtgattgtgccactgcattcccacttgggtgacagtgagatcttgccccccccaaaaaaaagaaagaaagaaaaagtttcaaccagcctgaactaagaaactttaaaaatattcaacccaaactcaaaaaccgtgattccttcagcaaggcacgtatgctaacaaagtccccttgaagcgtctcttctggagacagtacagtcccacagtagtgttta

SEQ ID NO: 676670 - DNA, 1674 bp, Homo sapiens
gaatgggtaaaattaaaaagacaaaaaaatctggtattggcaaggaggtggagtaacactgcagatgaaagcataagttggtacagccactttagagaacttcttagtggtctctacttacgctgaacagatccatatcctgtgacccagttgctgttacctacctcacagaaatttgcacagtgttcttcagaagaaatgaataagaatgttcatagcagcactatttgtaatagccccaaatcaggaattatccaaatgccaacagtaggattcgtaaattgtgaaatattcgtacaacagaatactatctagcactgagaatgaatgatttgcaacttctgatataagtgcatctcacaaacataaagttggacaaaataaaccagacactgaagagaacataccgtatgtttctatttacattaatttcaaaaacaggcaaaactatagttatctatggtgatacatatctatggtgactcatgcacttttctgattgtatgttatactttaattaaaagtttctaaaattaaaaaaaaaaacgctgtattatctggtcttaaataaggcaggtaaaactcttattccagcagtcactaagagaaactttatcccagatcatctttctctaaaaacatagcaacagcacatatcttgaggaacgttctctgaaactggcataaaagattacgctatccataagcaaagagacgtttcagcaaacattctcttttctccaaaatactgcagtgtatactgtcttctagaacatcacttccctcaaaagctaccagtccacctcattttctggcaagtaacgaaattactgaaagatgaggagaaaaaaggctgatgttaaagggcattcggctgttgccatgttgctgcattgcctcacttacccacgttgtaagaaagaggtcaaaacacggttaactggcttacccagggttatataggctctcggtagagccgcaggaggactgaaggagacactgccagcttctgactctgattctttaatcttttctatagtcaggtaacccaggattgggacagaaaaacataagccctctactatcatatttgttgaatgtaagatttcctcagaatcaagaatatgaatagattatgcacttactgttcatatttttaatttctagaatggctattatgattagtttttgctttttctttggacaaaagaattttgtggtgctaaaagtgtcttttaaaatttccttttattatggagaaaaaaaaaagctttgtccggacaccggtggctcaaacccctaatcccagcactttgggaggccaaggcgggaggatytcttgagccccggagttcaggaccagcctgggcaacatagtgagaccttgtctctacaaaaaatgagaaatgaggcaggtggatctcttgagcctgggagatcgaggctacaatgagctgtgattgtgccactgcattcccacttgggtgacagtgagatcttgccccccccaaaaaaaagaaagaaagaaaaagtttcaaccagcctgaactaagaaactttaaaaatattcaacccaaactcaaaaaccgtgattccttcagcaaggcacgtatgctaacaaagtccccttgaagcgtctcttctggagacagtacagtcccacagtagtgttta

SEQ ID NO: 676671 - DNA, 1674 bp, Homo sapiens
gaatgggtaaaattaaaaagacaaaaaaatctggtattggcaaggaggtggagtaacactgcagatgaaagcataagttggtacagccactttagagaacttcttagtggtctctacttacgctgaacagatccatatcctgtgacccagttgctgttacctacctcacagaaatttgcacagtgttcttcagaagaaatgaataagaatgttcatagcagcactatttgtaatagccccaaatcaggaattatccaaatgccaacagtaggattcgtaaattgtgaaatattcgtacaacagaatactatctagcactgagaatgaatgatttgcaacttctgatataagtgcatctcacaaacataaagttggacaaaataaaccagacactgaagagaacataccgtatgtttctatttacattaatttcaaaaacaggcaaaactatagttatctatggtgatacatatctatggtgactcatgcacttttctgattgtatgttatactttaattaaaagtttctaaaattaaaaaaaaaaacgctgtattatctggtcttaaataaggcaggtaaaactcttattccagcagtcactaagagaaactttatcccagatcatctttctctaaaaacatagcaacagcacatatcttgaggaacgttctctgaaactggcataaaagattacgctatccataagcaaagagacgtttcagcaaacattctcttttctccaaaatactgcagtgtatactgtcttctagaacatcacttccctcaaaagctaccagtccacctcattttctggcaagtaacgaaattactgaaagatgaggagaaaaaaggctgatgttaaagggcattcggctgttgccatgttgctgcattgcctcacttacccacgttgtaagaaagaggtcaaaacacggttaactggcttacccagggttatataggctctcggtagagccgcaggaggactgaaggagacactgccagcttctgactctgattctttaatcttttctatagtcaggtaacccaggattgggacagaaaaacataagccctctactatcatatttgttgaatgtaagatttcctcagaatcaagaatatgaatagattatgcacttactgttcatatttttaatttctagaatggctattatgattagtttttgctttttctttggacaaaagaattttgtggtgctaaaagtgtcttttaaaatttccttttattatggagaaaaaaaaaagctttgtccggacaccggtggctcaaacccctaatcccagcactttgggaggccaaggcgggaggatttcttgagccccggagttcaggaccagcctgggcaacatagtgagaccttgtctctacaaaaaatgagaaatgaggcaggtggatctcttgagcctgggagatcgaggctacaatgagctgtgattgtgccactgcattcccacttgggtgacagtgagatcttgccccccccaaaaaaaagaaagaaagaaaaagtttcaaccagcctgaactaagaaactttaaaaatattcaacccaaactcaaaaaccgtgattccttcagcaaggcacrtatgctaacaaagtccccttgaagcgtctcttctggagacagtacagtcccacagtagtgttta

SEQ ID NO: 676672 - DNA, 804 bp, Homo sapiens
ggccaatttgacctgcattgaatctatgattcaaaaaatcttatctgttaactcccagtggcccaggaaggtccataaggttttaaaattccaaatgctatagaagttatgtttatcataataagttgtacatattcatttgtttctggcataaaattagcatattaaaatttatcttccctataaggtttcatcaaaaattgacgcttttctcctttaattctggaaaaaggttttgtaatctcagggataaccagttggaatagttgatcaataggattgcatacttcactgacacagtccaaagctttaaaaaatgcagctcaaaagatgtattacaccaacttagattctcaatctgatatggctgtgaagccaatggactgtttcatgaaggcttaacttttcaatcagaaaagattgctctacatgttagagaacttttattttagaaacttttgtgattattcttagtgtagaaacttttatatatatatatatactttaagttctgggctacatgtgcagaacgtgcaggtttgttacatagttatacacgtgccatggtggtttgctgcacccatcaacctgtcatctacattaggtatttctcctaatrctatccctctcctagccccccagcccccaacaggccccggtgtgtgatgttcccctccctgtgtccatgtgttctcattgttcgactcccacttatgagtgagagcatgcagtgtttggttttctgttcctgtgttagtttgctgaaaatgatggtttccagcttcatccatgtccctgcaaagg

SEQ ID NO: 676673 - DNA, 2748 bp, Homo sapiens
tttatactgtaaatacttaaaatttttatttgtccagcatacctcaataaagctggggagaggagcagaaagggcaaatagaaataatttgaaataggacacaagtagccagtgaggatcccaacttgtttctttaagttgactttttgaagaatccaatcatttcacatattataaatatattcataatataaaagtatgatatcataaaattataatcataatatgatttgctctgtaagtgctgtaataagcgtgaatttaccagaataaaatggaaaagaggcaggtcaaaaggaagggtcagtatctctatcacccttcccaaactgagaacaaattgaagctgactgacacatttagggtatgtagatgttatggtgcccacatttttccatgtgctcttcactgtgctggaagtcttggaagtcatatgtaagttgcatgggaaggtatgaccacggtccttggagccctgagccagtgcccaagcaaagaaagcagtccagctggccgggtgcagtggctcacgcctataatcccagcactttgggaggccgaggcgggcagatcacgaggtcaggagattgagactaccctggcccacatggtgaaaccccgtctctactaaaatacaaaaaaaaaaaaaaattagccaggcttggtggcgcatgcctgtagtcccagctacttgggaggctgaggcaggggaatcgcttgaacccaggaggtggaggctgcagtgagccgagatcacgccactgcactccagcctgggtgacagagtaagactccatctcaaaaaaaaaaaaaaaaaaatagcagttcagtcctagggcagtggttctcaaccaggtagcattacccaataaaataaaacacaacttgcccagttaacttgaacatcagataaacaatgaataattttttagtataaaagtatgtactaaaattacatgggacatatttacactaaaaaattattcctatgcaccagtggtcatagcagcatcgttcacaatagccaaatgcgggaagcaacccaaatgtccatctatggatgaacggatgaaggagatgtggttcattcacacagtggaatgttattcagccttaagaaggaaggaagttctgacatgcgctgcaacacagacaaaccttaaggacgttacactaagtgaaataagacagacacaaaagggcaaatactgtatgattctacttacatgagatacccagaagagtcaaatgcatagagccagaaaggagaacggaggttgccaggggctgggagaggggaggatggggacttagtgtttaatggggacagagtttcagctagcaaagataagaaagttctggagatgaatggtgatgatgtttgcacaacaatgtgaatgtccttaatgacactgaccacttacaaattttagccacttaaaaatggctaaaatggtaagtcttatattctgtgcattttaccacaataaaaacaatttgtatggtttatctgaaattcaaatttaactaggcacgctgtgttttcatttgttaactctggcagccctatatccccaagggacatctggcaaggtctggagacatttttgattgtcacaactgagagtgggggaggggaggcactagcatctagtacgtagagccctgggtgctgctaaacctcttacgatgcgcgggacaccccctacagcaaagaggtgtctggtctaaaacgtcaatagtgtcaaggctgagaagctctgcccgagagaggcaacagggaaaccctcacatgattttccctaagaccaaaaaattttaatttaagccactgactgcaaatgacagatgtcaacaggaaaacacaagtatacagatctgatttgtatcaaggcacacctgaaattatttgtaatcattttgcctattattttaatacacaaaattctgtgcataaaaccatattctgtgtataaacaagtgtattgtgagaccacaatagctattacacatagctaaaaatagcagccctaacagaactcattttggctgagcctgatacagattaagagcttatcagaaaaaaggtctttctgtccagtctcagcctcagtatactcggtgaggcactatagccacaaaaataaaattaggagattaaacatgaatttaaaccaaatccccacagcaaagttccctgaccgggccagaaagacatacayttagactgctgtgacaaaaacatccacaggaaagccagcgtgcctgggagaaactcagctacgcccatttgacctgacattcacttactaaaccttttaagcattggaggaaaaagaaatccacccaaaacttgaaagcaagcatggtaaagtcttaaacctgtttttgactattacagctgataacacaaatgaatggtgtttcattaatgctgacttaagaatcaaagtcagagtagcagcttattgtcaaagctgttttaagaacaacaacaaaacaagattagtgccactgagctggtataaattatactcgtgatctgtcaagaaaaatcaatcagtgaggacaaaactggtattttctgcttcttaaaaaccatcaggtttcatccatcaacgaagactttgagtgcaaccaaacaggtaaaatatgagggaaaacaaatgatggatgagttaagcactaggactggaaaattataaattcttaaaattgaggagcttcatggaaggttatacttggaaa

SEQ ID NO: 676674 - DNA, 1562 bp, Homo sapiens
tttgggaggccaaggcaggcagatcacttgagctcaggagtttgaggctagcctgggcaacatggtgagaccccatctctaccaaaaaagcaaaaaattagctgggctttgtgacgcatgcctttcgtcccagctactcgagaggctgaggtgggaggattgcatgagcccaggaggcagatgttgtggggaaccaagattgcaccactgcactccagcctgggtgacagagtaagaccctgtctccaaaaaaaaaaaaaaaaaaaaaattcataggcaaaatgtcaaatgacatttacagaataatatactacagaatccagtttgaaacatatttatttggttaagtcaagttgaaaaggacaacagaacagtttactatctctataaatctgtaagtgtataagtaacttgagagtgagtaacctatatcaaaacaaagaacaaggccatgagaacctaaggaatgtattacagtgaattctgaatgaaagaaaatagggtgttttatctcagagagacaaataaatagaaaatccagagttcaggttataccataattccttataagaaaaagtggtaagaaggaacttgacacctaataatagggaacaagtaggttccaggtaccacctttgaaaaacaggaagatactggatactaaaataaatcaagggccaggcatggtggctcacacctataaccccagcactttgggaggccgaggtgggtggatcacttgaggtcaagagtttgagaccagcctggcccacatggcaaaaccctgtctgtactaaaaatacaaaaattagctggatgtggtggcacatgcctgtaatcccagctacttgggaggctaaggcacaagaattgcttgaagctgggaagcagaggttgcagtgagctgaggtcatgccactgcactccagcctgggcaatagattgaaactcactctctctcaaaaaaaaaagatttctaaataaattatagtatatccttttacctgttagactctgaaatccaaaagcatcaagatccacctgattgatgaaactctgtgaaaacaggcactctcatttattgctgaagaaactgacactatggagaacaatttggcaatattaatgaaataactaacccatttgccttgtgacctagcactcccacttctgggaatatgttctgcaacagtatctaacagtatctttacrtgtatgaaattgttattaatagattcataattttatagcaaagattattacaataaaattacttattaaaagatcactgtataagtttactgtatacgttctaaaagatcactgtgtaagttaactagtccattattgtggtctagcctatactacatgttatggaaaattgtccattattgcaggctaggtaattaaattgtggacttacgcaaaggattactatacagtcggagaaaggatgaggaagctccatatctgcacatccagtatggtagccactagctgcatgtggctgtttaaatctgaattaatcaaaattagataaaatgtaaaaattcagttctttg

SEQ ID NO: 676675 - DNA, 1562 bp, Homo sapiens
tttgggaggccaaggcaggcagatcacttgagctcaggagtttgaggctagcctgggcaacatggtgagaccccatctctaccaaaaaagcaaaaaattagctgggctttgtgacgcatgcctttcgtcccagctactcgagaggctgaggtgggaggattgcatgagcccaggaggcagatgttgtggggaaccaagattgcaccactgcactccagcctgggtgacagagtaagaccctgtctccaaaaaaaaaaaaaaaaaaaaaattcataggcaaaatgtcaaatgacatttacagaataatatactacagaatccagtttgaaacatatttatttggttaagtcaagttgaaaaggacaacagaacagtttactatctctataaatctgtaagtgtataagtaacttgagagtgagtaacctatatcaaaacaaagaacaaggccatgagaacctaaggaatgtattacagtgaattctgaatgaaagaaaatagggtgttttatctcagagagacaaataaatagaaaatccagagttcaggttataccataattccttataagaaaaagtggtaagaaggaacttgacacctaataatagggaacaagtaggttccaggtaccacctttgaaaaacaggaagatactggatactaaaataaatcaagggccaggcatggtggctcacacctataaccccagcactttgggaggccgaggtgggtggatcacttgaggtcaagagtttgagaccagcctggcccacatggcaaaaccctgtctgtactaaaaatacaaaaattagctggatgtggtggcacatgcctgtaatcccagctacttgggaggctaaggcacaagaattgcttgaagctgggaagcagaggttgcagtgagctgaggtcatgccactgcactccagcctgggcaatagattgaaactcactctctctcaaaaaaaaaagatttctaaataaattatagtatatccttttacctgttagactctgaaatccaaaagcatcaagatccacctgattgatgaaactctgtgaaaacaggcactctcatttattgctgaagaaactgacactatggagaacaatttggcaatattaatgaaataactaacccatttgccttgtgacctagcactcccacttctgggaatatgttctgcaacagtatctaacagtatctttacatgtatgaaattgttattaatagattcataattttatagcaaagattattacaataaaattacttattaaaagatcactgtataagtttactgtatacgttctaaaagatcactgtgtaagttaactagtccattattgtggtctagcctatactacatgttatggaaaattgtccattattgcaggctaggtaattaaattgtggacttacgcaaaggattactatacagtcggagaaaggatgaggaagctccatatctgcacatccagtatggtagccactagctgcatgtggctgtttaaatctgaattaatcaaaattrgataaaatgtaaaaattcagttctttg

SEQ ID NO: 676676 - DNA, 1627 bp, Homo sapiens
tggaaacacatcctagaactgctaaaactgagaaatgtccaccaaagttcagtaataatcccaaggagcttactgtgtaagtaacagctgaggaacccagagtaaatctaaattattatcaatcaattggttctttttcattccttcccctctttcttttctcctcatttgtatttatcattttgcttcaaagttgttaagtctaacactttgagaaatccaggacatgtaaaaatctagccaatataccatcctcagtgttccagttttggaattttaccttatatgactttagtcaggttttttatggatgtcataagttttgctgttttttaaaattttctatcattttatctgcaaagttttcataggttctcttccttttccaaatgtacttcaaaaattatttatgattatatttcctttctctagggaaaggaataaacatagatgttcttacttaggttaatttataataattaaggatatttatgtaataatggatattatctgtacttgagtaaagagaatgaagagaatttttagtgatacagaataacttttttttcctttttagggaaacgaaatatgataatatttcaagaattcaatatcattcagttattagagatcctgaatccaagacagccatttttcaacacaatgggaaaaaaatggtaaaaaatgcaaaatgtagttgggacccttcttttcttttttaaatttttttttttttttttttttttttttttttttttttgacgcagagtctcactctgtcacccaggctggagtgtggtggcacagtcacagctcactgcagccacaatctcctgggctcgagtatcctcctccctcagcctcccgaatggctgggactacaggtgcacaccaccatgcccagctcttatttagtagagatggggtctcactatattgcccaggctggtctccaactcctgagctctagcagctgttgtgcctcagcctcccaaagttctgggattataggcatgagccaccgcacccagctgctggggcccttctgagatgtaaactattgccttcctatcctttacttagctcaaaatgtttgtgttactttatagtgtgtagaatttcttttattgttttggaatggtggacggtggaaatgctaggaccatgttctgtttacttagtatcatccacggcagttgacatgtttccagcttggctgtatgaggagaatgctggtcatgatctgacagtgtgctccactgagaccgagaggtatcccattctgagagtttgtgggagaagctaaagtcttcaggagttaatagtgatatataagaaaagggacaaagtaatttaggtgaaggagaacaaggtttttgttttttgttttgttttgttttgagatggagtttcactcttgttgcccaggctggagtgcaatggcacgatctcagcttattgcaacctctgcctcctgggttcaagcgattcccctgcttcagcctcatgagtagctgggattacaggtgcctgccrccatgcccagctacttttttgtatttttagtagagacggggtttcatgatgttggccagctggtctcaaactcctgacctcaggtgatcca

SEQ ID NO: 676677 - DNA, 1264 bp, Homo sapiens
agactctgtctcgaaaaacgacaacaacaacaaaaaacttacaaacaaaacctatcaaaactcacacgaacacacagggacaagtgaacaaacattacagattaaaatgaaagaatatgccagatacactttattagttatctgttgctacataacagattatccttagacagtggcttagacagcaatcatttattatttctcatggtttccgtgggtaaataatttcagaacagcttggttggatggtcttggctcggagtctccatgaaattacagttagatatcagctggggctgcagccgtctaaagttttgactggggttggaggatctacttttcaaaatggctcactcttgaggctggcaagtcagtgctggctgttggcaggaggtctcagttcctttctatgtgggcttctccacaaggctgcttaagtgcctcatggcatggcagctggcgtcccccaaataaagtaatccaagggactaaggaggaaactgcaataccttttatgacttatccttgggagtcaaatttcattaatttattcatattctattggttacacaaagccagccctgattcactgtgcaaagtgactacacacaggcacatataccaggagtcaagttcactggaggcccttttggaggccggatcccatgtgcatagtcactgtgtatgcattagatgataagcgcgtagtctgagtgaagatgagacatggaaaactctcctcttcaaacaaggggccaggaaagttatagatttcaagagttccttgaatgagaaagaaggaatgaaagaaggaccatgagtccttcaggtttccctgtagcccgtgaaaaaatataacaagctaatgaaatgttgagctagttgttctgaaaggcataaacaggatgtattcagttgcttcttttctctttcccttttgttttagccaccattttttcattctctcttatctgcattgcyatggatgtgtctgttcctttgtttctaaccattggtaggtactccatgacatgcagccaacaattttatgcctctactcaccaggaatacacacgcatgctgcctaggaggagtttctgagggagaaaaggcattagcaagaagtagcccagagaagtgttggcattagcaacacctttatttattttaaagttagaacatgcaactacatatgtgtgaggtggtaaggactggaaatgttctttactcaataatcatctgtgccaggcacagtgccagatac

SEQ ID NO: 676678 - DNA, 622 bp, Homo sapiens
agacgggagaatcacttgaaccctggaggcagaggttgcagtgagctgaggtcatgccattgcactccagcctgaggaacacagcaatactctgtctcaaaaaaaaaaaaaaaaaaaaaaatttaaaaattgaacttgatttgaatgcagtaatttgaaatctaggagcaaatgctaaatttgaaatgtagaagtgtgattaacttccatcttaaaaataaacactttatttaaaacaaatcaacgtttttatcatgaaatatacacacggaacaatgcacaaaacaagcatgcacaattcattgacttatgacaaagggaatgcctatgtggtccccactcacactgaaacaactggaagaggcatgacaactaaatgcaacctgtattcctggataagattctagacaagaaaagacagaratgttgttggaacagccagtaaaatttcagtgaagtctgtgaattaggcattagttttgcaccaatgttgatttcctgattggggaattgtatgctgattatagaaaaaattgtccttgtttggagcaacatatactaaagtttttagagtgacaagacatcatacctgtagcttgctctcaaaaggttcggaaaaagg

SEQ ID NO: 676679 - DNA, 1141 bp, Homo sapiens
cccattgggaaaagctttcattttgacgtggtgcagtcagtggcggtctctctaggaaagccctggaaaaggcattgctgcatttttctctgttgcatgtgtcttttctccccttagtgtcatgtccaagcatgatgtcactcacatgtcatctgcacatcccaggtccctttgcaaatggaaactacagaagaaacaaaaattgattgagtgcataaaatctatttcaggaacatcctaaagggtctatctcagaagcactgagttccaaaggatttgctgacatttattgttctgcttcagattattaaatgtctttctgatcacatgatgccatgttttgcatagtgtgacatatctgtcctgttttaaattcataggaattggcaacaagctcatttcactggtgggtttgctgaagcattatcacaagacagtcagaatgactgatgagtgctcttcaggtagggaaatgctgccagcctggtttgtattttgtcttaccaagagttttgctccttaattttctatttcagttatgaataatcccttttcatgctagtagccataatcacattataaaggayttaaaatttgtcatttcctggtagtatttcttacagcgtaagcatttttggttcatgtacgattattctccttttattttattttttaacatgaggagatatcataggccaatattaagatttcctaattttaatgttaagagctaagcacatattctggtcaagtagagaagttaaagagtgaccagactttatctgaaatggtaggaataggagacatgctgttccatgatgtaccttgacacggtttttaaaaagcaacatttatgcctgagaatctaatgagtttggttaaaaggagatctagtaagccaatattcattcatttctgcctctccccctagattcctccaatcatgtttgtttctgtgtcttcttttttttttttttttgagatggagtctcgctctgttgtccaggctggagtgcagtggcgcgatctcggctcactgcaagctccacctcctgggttcacgccattctcctgcctcagcctcccgagtagctgggactacaggctcctgccaccatgtgtggctaatttttttttgtat

SEQ ID NO: 676680 - DNA, 1509 bp, Homo sapiens
gatttgtcactgaactatatgataactcagtcgtacttctgtcttttaaaattggctacagttaaacttcaatctgtcaataaagtaaaagctaccaaagtgggaattctaaaattataacatgtgataaaatctcagggagaagttttggattctgttgtttttattttctgccatttgtgccgatttgagcggtaactgacctcatgaaacatggaagtattatttatgtacaaggaactgacccctgagaaattgaaggtcagcactaaaataaaaatgtagggggaaatgcaactaataaaatgtaggaaaaaaaatgtgaacagaaaatataataaacctacatggtggtgcttacgtagataaaactgaaagaggattgtaaatagaactgtaagaatggatttgtctaccatttattatattttgttaaaaataaagaaattcaatttacaatattgaattttactagactttctggtttgaaaagctagagtttctttttcctttcagaaggcttgtattcaggtaatactgatgaagagaatcctcaagacctttacactctgggtcagttccaagatggctgagagctgtttcaaacaaccaaaaaacaacttgataggattgacaatttcatgttttttaataagtgttgaatgagactgctaactacaatcagcagatatacatatgtggtgtcatagatgttaggttttcaaaaataaagaatgtgttagaaaaatgcctgcaaatcattcgaatgttacaaccttttaaaaaaaatctggctgttgagtgcagactgtgctgtttcaccttttattacaaagactcagtgaatgaaacatatttgatagcttggtaatagaagaaaaatttgtatttaaatgaggacagaagacactgggctggaattgatatgattatgccacaattgatgagtcataactawtgacaaagtctagagctcaggaagcaaatctgacaacgggagtgagaggaatgcaatcagcacactgggaggaaggcaggtgcatgcccacaggtcgtgccacagaggggtacttagcacaacacttgctcctcattgtgtatctcttggtttctaagcaaaggtctttggggagaaaagatgttattaaatactataaaactgaaacaaaaataaaattgagcctagctaggcacttgaaaatatactagtctgtgacacagtaaaagaaaaatcatgtggataggcaacagatagttttggaaatttaaaactcaggttttgttttatgtcttcatatatgatgctgaggtaacagatataaaattaggaatttgtcagcaatagctcctcctgcctttatcatatgttttaaatgatttaacagtgacattttattgtattttcttttttattgagattcatttcctatcttgtctaatattctcctattctcctgatagtttacacacaattatcacaaaacactagcagttccattaattttgtct

SEQ ID NO: 676681 - DNA, 1728 bp, Homo sapiens
cctgttcaattcatttgatcatcaccgcctgtgatctgggttttattaacatttcagcatttgattggacccttcttacctctctgtctatccatcacttaagacatttagtgctgcctactggcagttatctgtgtaattgttttatttcactcactaagtgataagatccttgaggcaagacgctatgccatatggcctgtatcttccacaacaagtaatcacattgattcaaaagattccctcacaatacatttttattgcaaaaatgattttgtatttatccattttggaaaagaaattttatctcttgagcccctaaaaatggaattgtacacattaagacccttacacatatcacataataatcttcagggtcaaacattatagttttcacctgctgctattcctttgcagtagactagaatagagaattatataaaacttctatgactgtcaaaaaaatgatatattttttgaaatcatgtaaaatcaaccttctttattttacagatatagaaatttagatctgtaaggaccatcagtgtggtgaaggtcacatggtaagttaattacagaatcaaatttttccctttcatttcaatctgtttttaagttttacatgattccactttcaggaaaaagcaattaaaatacagactggctttggtaagagtgatatatatttttatgtttcagaccagcatgttgtttcatgctgatgttaaaagataatggttgatatcagataaatacccacacatacacacaaacacaaactaacttggggtccaataaaataagactgggtggttcacatatttttccattagtgcaaatattttacagagataattttctttgataaaatctgtgttcttaaaactgattaacacatagtccttactagaaactctttacaaaaaaaaaaaaamaacaacaacaaaaaaacaaaaatgagagtgcaaaaattgagagaataagtcaaaggagaaagagaagttctcccataactgaaattcattgtacctgtacattaatcaaagaacaaaattgactgtcatgtgatttgactcatgctaaaatgtccctcacaatgaaaataatctcttttattggcccctcacagtgtttaaaatttttcaccatttaaaaaaaaattgacttaaaatacttcatcttctgacatttttgttcacaaaaatagtaaaagtaaaggaaaaaggtagataatataccaactttgcagggtattgcaggaagttcagagagggaaagaaagaggaactataaatagttatcataaattacagctaaatattttagtttagcataaagagggtatgatgaatgtaaacaacatcacatatagttcaaagtagagttgtggaattacttttccatgacaatgtttaagaattgtacagctttgctgttatctagtgatgtgtccccacccaaatctcaccatgaattcccatgtgttgtcagagggacctggtgggaggtaattaaatcatgggagcaggtctttcccatgctgttctcatgatagtaaatttcatgtgatctgataattttataaagggaagtttccctgcacaagctctcttctcttgtctgctgccatgtgagacatgcctctcaccttctgcaatgattatgaggcctccccagccacatggaactgtaagatcattaaacctctttcttttgtaaattgcccag

SEQ ID NO: 676682 - DNA, 1728 bp, Homo sapiens
cctgttcaattcatttgatcatcaccgcctgtgatctgggttttattaacatttcagcatttgattggacccttcttacctctctgtctatccatcacttaagacatttagtgctgcctactggcagttatctgtgtaattgttttatttcactcactaagtgataagatccttgaggcaagacgctatgccatatggcctgtatcttccacaacaagtaatcacattgattcaaaagattccctcacaatacatttttattgcaaaaatgattttgtatttatccattttggaaaagaaattttatctcttgagcccctaaaaatggaattgtacacattaagacccttacacatatcacataataatcttcagggtcaaacattatagttttcacctgctgctattcctttgcagtagactagaatagagaattatataaaacttctatgactgtcaaaaaaatgatatattttttgaaatcatgtaaaatcaaccttctttattttacagatatagaaatttagatctgtaaggaccatcagtgtggtgaaggtcacatggtaagttaattacagaatcaaatttttccctttcatttcaatctgtttttaagttttacatgattccactttcaggaaaaagcaattaaaatacagactggctttggtaagagtgatatatatttttatgtttcagaccagcatgttgtttcatgctgatgttaaaagataatggttgatatcagataaatacccacacatacacacaaacacaaactaacttggggtccaataaaataagactgggtggttcacatatttttccattagtgcaaatattttacagagataattttctttgataaaatctgtgttcttaaaactgattaacacatagtccttactagaaactctttacaaaaaaaaaaaaaaaacaacaacaaaaaaacaaaaatgagagtgcaaaaattgagagaataagtcaaaggagaaagagaagttctcccataactgaaattcattgtacctgtacattaatcaaagaacaaaattgactgtcatgtgatttgactcatgctaaaatgtccctcacaatgaaaataatctcttttattggcccctcacagtgtttaaaatttttcaccatttaaaaaaaaattgacttaaaatacttcatcttctgacatttttgttcacaaaaatagtaaaagtaaaggaaaaaggtagataatataccaactttgcagggtattgcaggaagttcagagagggaaagaaagaggaactataaatagttatcataaattacagctaaatattttagtttagcataaagagggtatgatgaatgtaaacaacatcacatatagttcaaaktagagttgtggaattacttttccatgacaatgtttaagaattgtacagctttgctgttatctagtgatgtgtccccacccaaatctcaccatgaattcccatgtgttgtcagagggacctggtgggaggtaattaaatcatgggagcaggtctttcccatgctgttctcatgatagtaaatttcatgtgatctgataattttataaagggaagtttccctgcacaagctctcttctcttgtctgctgccatgtgagacatgcctctcaccttctgcaatgattatgaggcctccccagccacatggaactgtaagatcattaaacctctttcttttgtaaattgcccag

SEQ ID NO: 676683 - DNA, 1728 bp, Homo sapiens
cctgttcaattcatttgatcatcaccgcctgtgatctgggttttattaacatttcagcatttgattggacccttcttacctctctgtctatccatcacttaagacatttagtgctgcctactggcagttatctgtgtaattgttttatttcactcactaagtgataagatccttgaggcaagacgctatgccatatggcctgtatcttccacaacaagtaatcacattgattcaaaagattccctcacaatacatttttattgcaaaaatgattttgtatttatccattttggaaaagaaattttatctcttgagcccctaaaaatggaattgtacacattaagacccttacacatatcacataataatcttcagggtcaaacattatagttttcacctgctgctattcctttgcagtagactagaatagagaattatataaaacttctatgactgtcaaaaaaatgatatattttttgaaatcatgtaaaatcaaccttctttattttacagatatagaaatttagatctgtaaggaccatcagtgtggtgaaggtcacatggtaagttaattacagaatcaaatttttccctttcatttcaatctgtttttaagttttacatgattccactttcaggaaaaagcaattaaaatacagactggctttggtaagagtgatatatatttttatgtttcagaccagcatgttgtttcatgctgatgttaaaagataatggttgatatcagataaatacccacacatacacacaaacacaaactaacttggggtccaataaaataagactgggtggttcacatatttttccattagtgcaaatattttacagagataattttctttgataaaatctgtgttcttaaaactgattaacacatagtccttactagaaactctttacaaaaaaaaaaaaaaaacaacaacaaaaaaacaaaaatgagagtgcaaaaattgagagaataagtcaaaggagaaagagaagttctcccataactgaaattcattgtacctgtacattaatcaaagaacaaaattgactgtcatgtgatttgactcatgctaaaatgtccctcacaatgaaaataatctcttttattggcccctcacagtgtttaaaatttttcaccatttaaaaaaaaattgacttaaaatacttcatcttctgacatttttgttcacaaaaatagtaaaagtaaaggaaaaaggtagataatataccaactttgcagggtattgcaggaagttcagagagggaaagaaagaggaactataaatagttatcataaattacagctaaatattttagtttagcataaagagggtatgatgaatgtaaacaacatcacatatagttcaaagtagagttgtggaattacttttccatgacaatgtttaagaattgtacagctttgctgttatctagtgatgtgtccccacccaaatctcaccatgaattcccatgtgttgtcagagggacctggtgggaggtaattaaatcatgggagcaggtctttcccatgctgttctcatgatagtaaatttcatgtgatctgataattttataaagggaagtttccctgcacaagctctcttctcttgtctgctgccatgtgagacatgcctctcrccttctgcaatgattatgaggcctccccagccacatggaactgtaagatcattaaacctctttcttttgtaaattgcccag

SEQ ID NO: 676684 - DNA, 1728 bp, Homo sapiens
cctgttcaattcatttgatcatcaccgcctgtgatctgggttttattaacatttcagcatttgattggacccttcttacctctctgtctatccatcacttaagacatttagtgctgcctactggcagttatctgtgtaattgttttatttcactcactaagtgataagatccttgaggcaagacgctatgccatatggcctgtatcttccacaacaagtaatcacattgattcaaaagattccctcacaatacatttttattgcaaaaatgattttgtatttatccattttggaaaagaaattttatctcttgagcccctaaaaatggaattgtacacattaagacccttacacatatcacataataatcttcagggtcaaacattatagttttcacctgctgctattcctttgcagtagactagaatagagaattatataaaacttctatgactgtcaaaaaaatgatatattttttgaaatcatgtaaaatcaaccttctttattttacagatatagaaatttagatctgtaaggaccatcagtgtggtgaaggtcacatggtaagttaattacagaatcaaatttttccctttcatttcaatctgtttttaagttttacatgattccactttcaggaaaaagcaattaaaatacagactggctttggtaagagtgatatatatttttatgtttcagaccagcatgttgtttcatgctgatgttaaaagataatggttgatatcagataaatacccacacatacacacaaacacaaactaacttggggtccaataaaataagactgggtggttcacatatttttccattagtgcaaatattttacagagataattttctttgataaaatctgtgttcttaaaactgattaacacatagtccttactagaaactctttacaaaaaaaaaaaaaaaacaacaacaaaaaaacaaaaatgagagtgcaaaaattgagagaataagtcaaaggagaaagagaagttctcccataactgaaattcattgtacctgtacattaatcaaagaacaaaattgactgtcatgtgatttgactcatgctaaaatgtccctcacaatgaaaataatctcttttattggcccctcacagtgtttaaaatttttcaccatttaaaaaaaaattgacttaaaatacttcatcttctgacatttttgttcacaaaaatagtaaaagtaaaggaaaaaggtagataatataccaactttgcagggtattgcaggaagttcagagagggaaagaaagaggaactataaatagttatcataaattacagctaaatattttagtttagcataaagagggtatgatgaatgtaaacaacatcacatatagttcaaagtagagttgtggaattacttttccatgacaatgtttaagaattgtacagctttgctgttatctagtgatgtgtccccacccaaatctcaccatgaattcccatgtgttgtcagagggacctggtgggaggtaattaaatcatgggagcaggtctttcccatgctgttctcatgatagtaaatttcatgtgatctgataattttataaagggaagtttccctgcacaagctctcttctcttgtctgctgccatgtgagacatgcctctcaccttctgcaatgattrtgaggcctccccagccacatggaactgtaagatcattaaacctctttcttttgtaaattgcccag

SEQ ID NO: 676685 - DNA, 784 bp, Homo sapiens
tatctcatttttttaaatcattctgccctccatatgaaactattggtctattagatatatttttattttttaactgttgatttgaaattattatagatttacagaaggytgcaaatatagtacagagaggtctctcatactcttcacctagtttccccagtggttacattttttttgtagctacagtaaaacattaaaaccaagaaattgacattgaaaaaatgtgtatgcatacatctgtcattttattacatgtgtaaattcttgtgaccactaccactatcaaaatatctaacacttctagtgaagtgtaaaaatcttatctcgttggaagtctctttacccatccttgtttatataattttaaaaatttttcatttaggtattgataaccatttcgatgttacagtttttgattcaaaagtcaaacataatttagaaaactcaagaagaaaaatctgttgtacttattcatatttttgctcttctgttactcttacatttttctgatgatttcaggccccttattcattttatgtttcaagaactttttgcttttctttagggtaggtctgtttgcaaccaattcttaatttttcttcttctgagaatttatttaattctccttcatttctaaaggacatttttgcctaatacagaattctggattgacagttcttgttttgcagtacttgagaaatatatcacttccttttggccaccattatttctgacaggaaatcattgtcattcaaattgtttttcttctggagagatgaagcat

SEQ ID NO: 676686 - DNA, 784 bp, Homo sapiens
tatctcatttttttaaatcattctgccctccatatgaaactattggtctattagatatatttttattttttaactgttgatttgaaattattatagatttacagaaggctgcaaatatagtacagagaggtctctcatactcttcacctagtttccccagtggttacattttttttgtagctacagtaaaacattaaaaccaagaaattgacattgaaaaaatgtgtatgcatacatctgtcattttattacatgtgtaaattcttgtgaccactaccactatcaaaatatctaacacttctagtgaagtgtaaaaatcttatctcgttggaagtctctttacccatccttgtttatataattttaaaaatttttcatttaggtattgataaccatttcgatgttacagtttttgattcaaaagtcaaacataatttagaaaactcaagaagaaaaatctgttgtacttattcrtatttttgctcttctgttactcttacatttttctgatgatttcaggccccttattcattttatgtttcaagaactttttgcttttctttagggtaggtctgtttgcaaccaattcttaatttttcttcttctgagaatttatttaattctccttcatttctaaaggacatttttgcctaatacagaattctggattgacagttcttgttttgcagtacttgagaaatatatcacttccttttggccaccattatttctgacaggaaatcattgtcattcaaattgtttttcttctggagagatgaagcat

SEQ ID NO: 676687 - DNA, 658 bp, Homo sapiens
ttaaagttcaaaatgtattacttgaaaaaatgctcgtaatattattttaccatacccattttaccatttaaatattaccagtagtttttttcctcaatatccattgataagcttattctttaaaaacagaagtggggaaagtgctagcttttttgcttcttattcacaggaacttgtgcacctgatgtagtatagcacattctcaaacatctaataggtcacttctgaatttttctctgaaytttgaataagataaaagtaatttgaatttagctatcatttcaaagaagaaaaaagttgcatttgcaaattatttacacaagcacaaatttttagagaaagaaatactagagaaagaaaaacatagaggaaaataggtggtgaaaaaattctttggaagtgcaaaagaaagaaaacgtttattggcaatgacacatgattattaatccccatgtctaagtaaatttggggtctttacccttgctatagtttggacatgggttattctctccaaaattcatgtcgaaatttaatttcccatgtaaggtgttaggagatcgtgctttgaagaggtgattaggtcattaagacaaattaataactttctggtgaaactgggttatttttcatgataatggattagttctcataagagccg

SEQ ID NO: 676688 - DNA, 1212 bp, Homo sapiens
taaactcatccagttcttctgaaattgtgttatgagtttatgctcttttaaaaattcaggctgctctctggaagaagcgggtgaatctgaataacaaataacatataccagaatccaaatgtcaggacctgggtctgtccctaaagagcagaggctaatggcagtgaaaaagggctgcagaggtatctgggcatagctaaaggatgattctaggtgtcaacggcaacagagtggaaagagggaggttctaatgagggcggtrggaaaccagcgggaaaaactggaaaagtaaaattgctggttatttgtgagaaggagggtaagtttccccagactgattcaaaactcttaacttgaggaagatggcttgtctctcaagttagtcatttcttggcatagtggtagccaccttgactatgggcatttcagtgaattccctgtctttcttgcttaatggtaggtgtcatgggtgtgccacttcctgacagattttgtttacaggatcctctattccaaaattttaatgtacctgccaatcacccagggattttgttgtgatgtagattctgatttactgggtctggggtgaggcctgagtttttacatttctagaaatttcctcgggtgatgctaaagcagcaagtggttatctttctcccgcccttacagccttcctccacactaggccacatgtgggattgggcatgccagtactgtggtggggtggtagggaccgctcagagacatagctagggggcacctggaaggccacagtaggaaggaagcatgccctgcagggcttggcttggcccacacatttcactaagggacacttcttcctcggttttggtcacactttaccctaacatgcaggagacttaatgcaatcaaagcccagaaaggagaacattgatcttgtccacaattttccttcccaccctcaaacacacccactgacccagagggccttcatggttcccctcagcttgattaaagggaatcattaaagccctggtggtcagtgggtgtctaacaaagctttagacggtcttcttcaaggcccccgacctctttcttagagcatttactttagaaaccttgtaaattctttttccacccctttgagatgtaaatcttttaaaactcctcttgccagttttacaacccaagaatgtctttctcaaaggcccaggagccatctctttcaagtgt

SEQ ID NO: 676689 - DNA, 1212 bp, Homo sapiens
taaactcatccagttcttctgaaattgtgttatgagtttatgctcttttaaaaattcaggctgctctctggaagaagcgggtgaatctgaataacaaataacatataccagaatccaaatgtcaggacctgggtctgtccctaaagagcagaggctaatggcagtgaaaaagggctgcagaggtatctgggcatagctaaaggatgattctaggtgtcaacggcaacagagtggaaagagggaggttctaatgagggcggtaggaaaccagcgggaaaaactggaaaagtaaaattgctggttatttgtgagaaggagggtaagtttccccagactgattcaaaactcttaacttgaggaagatggcttgtctctcaagttagtcatttcttggcatagtggtagccaccttgastatgggcatttcagtgaattccctgtctttcttgcttaatggtaggtgtcatgggtgtgccacttcctgacagattttgtttacaggatcctctattccaaaattttaatgtacctgccaatcacccagggattttgttgtgatgtagattctgatttactgggtctggggtgaggcctgagtttttacatttctagaaatttcctcgggtgatgctaaagcagcaagtggttatctttctcccgcccttacagccttcctccacactaggccacatgtgggattgggcatgccagtactgtggtggggtggtagggaccgctcagagacatagctagggggcacctggaaggccacagtaggaaggaagcatgccctgcagggcttggcttggcccacacatttcactaagggacacttcttcctcggttttggtcacactttaccctaacatgcaggagacttaatgcaatcaaagcccagaaaggagaacattgatcttgtccacaattttccttcccaccctcaaacacacccactgacccagagggccttcatggttcccctcagcttgattaaagggaatcattaaagccctggtggtcagtgggtgtctaacaaagctttagacggtcttcttcaaggcccccgacctctttcttagagcatttactttagaaaccttgtaaattctttttccacccctttgagatgtaaatcttttaaaactcctcttgccagttttacaacccaagaatgtctttctcaaaggcccaggagccatctctttcaagtgt

SEQ ID NO: 676690 - DNA, 705 bp, Homo sapiens
gaattcctactggtcccaagatgatctagagtccttagcataatccttgatagttcttcaagctccaacttccctccacttccttgtcaccacagccagctccatttgcatctcttgatcatcccagctcttttggcctcgagttataaactctcccttggaggatgactgctttttgtaggtcccagaggcaactgttcatagatctttttggtagccaacaaaatgttgtctccagtatcagcaaggatatggacaagatctagatctagaaccagctcaggagctggcctgaaatatatcaaagaaactgtcctctaagttgtgctattatttctcctcaattggccctggccctaactgtgccttacaatggagtttacggccttagttctctcttttattaacttttcatccaaggttcattcttgacctttccagagaaacttctccaaagatttgagggcagcttttctctcctatcttggtgtaagacccaaayccagatcatctcatgtaattataatttctggtggcctaaggtgacatctcataattcctgggtttggtgagccagttacacattgccagagccttcagttaaaaacacaaatagtccgaacgcagtggctcacacctataatcccagcattttaggtggccgaggcaggtgggttgcttgagtttaggagttcgaggccagcc

SEQ ID NO: 676691 - DNA, 667 bp, Homo sapiens
tgggctcaagagacccacctgctcggcctcccaaaatgataggattacaggcgtgaaccactgcacccagcctataccataattttttaaactctaagctcatttgcttactgtgtaacctcaagcatattaccctctttaaactcatttcctcatctataaaattaaagtagtaatataattacctcctaggattgttacaaggtgtaaaaacaataattcatgtaaagcatttagcacagaaccttgcatatagtgtttgataaagattgcctattattattcttaggaatgcaatcataaacagacaagattcaggarttataaattgctttaggaatcataattaaggtagaagctaatatcacaaacacatgagagcctcattttaagaaaagtaaaaatatctaattctacatttgtaaatttgaggaaaagttttagattctcagcttttaaaaaatgtttcccacagaatgcacttacacaaaaaattactctaaaattttcaaatattattagatgtaacccaaaagacaggtgtccaatttacttttaagatatgtatcagataaagcaaggaacattcacatttgccacagtctctctggggcctagaccacccgatctggaaagctcacacttcagaggacacactgactctcga

SEQ ID NO: 676692 - DNA, 667 bp, Homo sapiens
tgggctcaagagacccacctgctcggcctcccaaaatgataggattacaggcgtgaaccactgcacccagcctataccataattttttaaactctaagctcatttgcttactgtgtaacctcaagcatattaccctctttaaactcatttcctcatctataaaattaaagtagtaatataattacctcctaggattgttacaaggtgtaaaaacaataattcatgtaaagcatttagcacagaaccttgcatatagtgtttgataaagattgcctattattattcttaggaatgcaatcataaacagacaagattcaggagttataaattgctttaggaatcataattaaggtagaagctaatatcacaaacacatgagagcctcattttaagaaaagtaaaaatatctaattctacatttgtaaatttgaggaaaagttttagattctcagcttttaaaaaatgtttcccacagaatgcacttacacaaaaaattactctaaaattttcaaatattattagatgtaacccaaaagacaggtgtccawtttacttttaagatatgtatcagataaagcaaggaacattcacatttgccacagtctctctggggcctagaccacccgatctggaaagctcacacttcagaggacacactgactctcga

SEQ ID NO: 676693 - DNA, 1048 bp, Homo sapiens
agccaatctggtaagcaacatcccttatgcagtcctaataaagtctccaccaagccatctaacaaagtcttagcccacagaaactccagattaaggatttccttttagagggacatttcttgtgagtggtgatctgtcttaggcagaactaaacctggtattccccttggttggagcctgccccagaagagttggcctcatttttccaagctgacgttaaccttgatggcagtaacaatggaagctgtcagctaactgcagcccctgcagctgaagggcaagttctttcttgaagggaaatccaagtgtcccatctccatgactgccacaacttaagagtaattgaaaacaaattattcacacatattatagacaaacactatcatactcaaacactaagatataagaactgaaggtttactataattaaaagttgttaattttgtcatccaataaatattataatgagtattcactctgtgccaggctctagtctagtgtcagggttatgacaaagattaagaatgataaggtccctattcttgtgaccttaacacaggtttttgtgaggaagaagcagaaaaacaaatagtgctatgtcgtaacaaaattatagtggagtgctgtgataaacagtcgcaatgtgaatactttcaattagatgattttaaatttggtgatgggggaagttcttccaaaagcggtgatatttgaataagaaaaagatgccaaccttgcaaaattcttggggaatcttactgtaagcagagttaacagctggcacaaactgctaaggtgagaataagcttagaagaatctaaagactcccagatccaagcaggcaaagggattgaaattaaaaccaaaaatagcatctagacttttgggttgagtaattgggaagatgrtggttccattattgagataagaagaaatgacaggttcaacggatgagaatcaaaaattctataaagatattaggtacgatgcctattagatactcaaaagcataaatgatacaagacataaaaagagtatggaaggaggg

SEQ ID NO: 676694 - DNA, 1788 bp, Homo sapiens
ttctgctaagagaattatggttcttaacataagatagggcaaatcccagttcaaagaaagcactgtgtgtgtatggaaagcaaacagcagactggaacagatacgcatttgataagcaaaataaagtgttttctgtataaaatgttcatacagataaatatttgtgtgtgtttgcatcatttaaactgacattagcacattataattatctttttattttgaaattttaagttgcctaatgaaggtagcccaatcacattggctgttttaaktggtcaattcaatattatatcattatctatacaagaggcccacctttcttctctttctcctttgatttgtgagtgatagataatttcgcacaggttctatgtatcatcccaacatgtaagaggcctttaaactttcctttgccctttctgccatctgctgttaaatagctgggctgcctcatgtcagttgtcctggggtgggggttctttagtgctgcttctggtcatcagattcacaatatgtcttatattcccaaagtcagacttcttctcagactacttgaaaactatgtccctttcttaagatcaatactttcatccaaacttcgagttctctagggttttcaatttccttctttgtgttatgcatattatttaggatgcccagaatcctggaaggctgccatattgtgagtgaatcatttgctttgactgcatggacgacatgagtcatggaggataacttgtggtttgctcaaggtaacaaaacaaaaggtattattttacaaatacaaaaacagtcttaaatcaatcctgtaaggtgtgtggaactgaaagctatagactagaatatttttaaatattctgaaatctcttcatactactctctagctgagtatcagttctgtctttgttctagattatttatccacaatataatcaaatcactctgtattacaacctgttttcatcataagcctcatatcatatgtgttttgtttaaaatattatttattagatggattttattatatatgatagattttatcatactcaagtaattcatactaaagcatttgagtgtgtttcaatttgtaaataatattagaaataagtggagcaaccagctagaaacttaaatatatacatacatatattcatatacatttctgataaaatgtgtaaaaatttaggaaactttatagtaaggaaacaactggatcaagaagttttgagtcattttaaaaatgcaattaaaatggcttctagaaatactgcatatttttatatatctaaatgatgtgtatattaataacaattttctactctccatactattgtaggtataagtagatgtgtaagttgcaatttaataagaaaaatagcaatataataattcattactatgtcaaactaaagctaatgtttatgtcttttggtgtgatagtgaattaagttcataaagagtttcattatagtttctcaaatattttattgacattgttttgtttgtatctgatattgtttcacaaacatatttatgtgctataatttatatctaagaatattaactatttttatatggtgcatacattttttcagtttatatttttcaggcaaaacattttttgctacatataaattttattttccactatggtttcaatattactattttaaatttattttttattttattttactttaagttttgggattcatgtgctgaacgtccaggtttgttacacagatatacatgtgcccttgtgatttgctgcacctatcaacccattat

SEQ ID NO: 676695 - DNA, 717 bp, Homo sapiens
ttctagtggtccattgtttgctctgtaggcatggttgattgcagtctgcaaatggtgtagtttatacttccatctgcamatggtgtagtttatacttccatctgcacatggtgtagtttatacttccatctttttttttttatgtaatagtcaaattcctagagagtttcctggattatttggcctaatcataactactttcagatataaacattgctttgtgagtgagtgttttgctctctgttcagcttcctattccatctgtccacaaccagccgctcctttgaattctagttcttatattggacctccagaaaaagtcattagctttcaactctgcactcatgtcccctggagatttaagtagaacagaaagctaaactcaagagacttttacagtatcatttattgctctgaacaaattactgtgagtgtgtctcaaaattttgggatgtttgggcagggcagcacaagatgccatctctatgcaaaacccttatcagagaactgaacaaaacgcttctttctctggcctcaatattattgctatgtacagatgctcctcaacttatgattgggttacatccctataaacacatcttaagttgaaaatactgtaagttgaaaatgtatttaatacactgctgaacatcatagcttagcctagcttatcttcaatgtgctcagaacacttacactaacctacagtggggaagc

SEQ ID NO: 676696 - DNA, 717 bp, Homo sapiens
ttctagtggtccattgtttgctctgtaggcatggttgattgcagtctgcaaatggtgtagtttatacttccatctgcacatggtgtagtttatacttccatctgcacatggtgtagtttatacttccatctttttttttttatgtaatagtcaaattcctagagagtttcctggattatttggcctaatcataactactttcagatataaacattgctttgtgagtgagtgttttgctctctgttcagcttcctattccatctgtccacaaccagccgctcctttgaattctagttcttatattggacctccagaaaaagtcattagctttcaactctgcactcatgtcccctggagatttaagtagaacagaaagctaaactcaagagacttttacagtatcatttattgctctgaacaaattactgtgagtgtgtctcaaaattttgggatgtttgggcagggcagcacaagatgccatctctatgcaraacccttatcagagaactgaacaaaacgcttctttctctggcctcaatattattgctatgtacagatgctcctcaacttatgattgggttacatccctataaacacatcttaagttgaaaatactgtaagttgaaaatgtatttaatacactgctgaacatcatagcttagcctagcttatcttcaatgtgctcagaacacttacactaacctacagtggggaagc

SEQ ID NO: 676697 - DNA, 1378 bp, Homo sapiens
tttccattttttggctctttaaaataaagctgctacgaacattcatgtaaaagtcctcatatgctttcaattttctttgataaatacctatgaatggaatggttggattgcatggtcgatgtgtattttactttttaagaaactgtcaaactgttttccaaaatggttgtaccattttacagtcccagcagccaccatatcttgtttttatgttattcaaattatttttttttcgttaattgaagctcatctccatccctaaataaggtaaataaatgcagtattactttttgtttgtctgtttggttttggttttggtttttggtttttgtttttgtttgtttgtttgtttggagatgaagtcttgctctgttgcccagcctggagtgcagtggcatgatctctgctcactgcaagctctgcctcctgggttcacaccattctcctgcctcagcctccccagtagctgggactacaggcgcccgccaccatgcctggctaattttttttttgtatttttagtagagacggggtttcaccatgttagccaggatggtctcaatctcctgacctcatgatctgcctgccttggcctcccaaagtgctgggattacaggcgtgagccaccgcacccagctgtattactttaatagtaatactttaaaacaacagagaaaaaattgagtatcagatggaggagacagggatagaaagaaaaaatggtagacacggagaggaaattggaggagaggagtgagacaaaggagaataagagaacaaaaaagaaagagggagaaaaagtgagagagaaacacaacaaagtactatcaattagagtccccacaagaaactgatggcttgtgcacagactagttgaggaatttttaataaagggactatgacaaatatgtaggaagaacttctgaaaccaacaacgtgtcatgtagttcmttggttaccatctctaagcatgaaggctgtcagggaagagagattttgggcaccctgagagagcagctactgaaaaggaccacccaccagaagtgggatgagctaaccctcttgaactggaagggagtgagctgcagtaataaactccccaactcactctgcacgccacctcccagtgcctgctgatgacttcctttagccaaacccagctagaagccagaaagcataagtctgttgatgatgttcatttgggccagcctctctccctggcctggagtggacaggtaaaatgtggatctagaaaggaaagagaagacacctagtacaggagccaacagaggaaagggacaaggagctgaactgctttaacatcttcctccatttgtgacaggaaaaggttgacaaaacaacatgtaagtattgagaa

SEQ ID NO: 676698 - DNA, 638 bp, Homo sapiens
tcaaacactgcttctggtggctggcttccaaactcagtctcaattttttcactgtgcttacaaccagaatgtcctgttaccattttttatcaggatgttccagtagtacagagaatttaataagtccaaaacaaagcctatcatcttgatttccagtatttccctctttctgcctctaggttaatgttgccaccattctctcaaccattcaaacccagaatcctactatcttttactagccttcattctccttcatcctattrccttcctcccattgcttacctggtttccaagtgtaattttaaaattcttactagaagcctttatttctgttgtctccctaatttttccattatcatattcttgattcatgttgtcattaactcacagtgattactgtaaagacatcttcactgagttgtctttctttgcccctgaaacccaacttataaataacttgcatttttgtagcatgttacagcttactgcatgctttcacatacatcgctttcctccacaaagcagcctccagtgacagggagattaagaattattctcctcattttatgaggaagccttagaggtgaactgacttgcccaaggtcacggagcaagtgagtggcacagctacaattcaa

SEQ ID NO: 676699 - DNA, 630 bp, Homo sapiens
ccagctacttgggaagctaaggcaggaggattgcttgaacccaggaggcggaggttgcagtgagctgacattgtgccactgcactcagcctgggtgacagagtgagactctgtcttgaaagaaaagaaaaaaagaaaaaagaactccactgaagaaacaaggacatcagaccacccaccatgggtgagtgcctacttcctcaatgtagaatgtaaaactcttctaagtcttctaaccctcagacaaccaaccacttgtaaaaaaacacttagtctcactaagagattaacccagtctttttccacctgtccacatcacccttcggtacactgggcagttaacataaccctggatgagtaccaattttggagacttctgttgaaaacagttgaatgccaacagatatcccaaagagagcacctataagtgggaaaattctcaggatcacagcagcatcaaaataagtatcactgatgggcatttctatgtrccacctgcacagcgtcacacacaggaagacttggggggactgtctccccagtgacaatgaaggcagaaaggcgaaataaagggagatgaccttctatgtctatatctacagtccaagggcacagactaaggacagaactc

SEQ ID NO: 676700 - DNA, 572 bp, Homo sapiens
tcttatttcttgttcacatcctccatgtggacatttaggaattaaacaccatacacacttgcagcattgtttcatgctgccccttctacttgtctgatagatatgactctttgagacaaagtgcactttctaattggagtcttttggtgcttgattctttcatgtaatatcttggatataaccatgagatygtacttttttgtgttaaaatgtccaggtcacattcttatgcatgccccatgcagtgggacatcaatattggacccatttttccattagtgcacttgggaattactggaccccttctcttctgggcctttgcatgaggtccctcactctgtgtgtgaagccagtgaatctcctactaaatcctctttctaggcactgggaacatatttcttctctttctaggaactcaccattctggtattatatgctgtgctccattaaatcaaaggttttgtattgacactacctttattcgccaccagacaccaagtcatttgttcccacttcaataattgagggaagtgactgatgtatttgctgggccttggaaggctggtcagtgt

SEQ ID NO: 676701 - DNA, 574 bp, Homo sapiens
cttggtcgtaaaactgtgctccaagttggagctgacttgatgggagtctgtgcttggaaggcttgatttgaatggtgccagtcagagttaaattacaggctgggaaaaaggaaacaaawtttttaaaaaggaggtgtttatggttcccggttcccctaagtacttcttgaggatcaaaatagcctctttaaaataaattgcagaccattagtacatgatggaggaaacccctttgagactagattgggggaggggaaggcaagggcacaagaaaaaagagattgatttgggccactttcagcctgtgcagtgcattgccccccagcccccgcagcatgcccctggaggggttaatgcacacagatggcctttcatgtacccacagttgccatttctgtcagtctaagtggacctcactgcagatccactccaattctgaatcttgattggaatttgggtttcttggaatgtgttcttcctccatgcccacccccccacctttctttttctttttaaacaaatagaacactattgcctgccatcttatgcccttatggatcataaagtcttactg

SEQ ID NO: 676702 - DNA, 619 bp, Homo sapiens
ttccctcagctgcctcccacccccagccttttttgagtcagtctaatttctagagatttggggtttgcaatgaaggggagtagcatggtgctaaccactctgtcccttcctgtttctgttggtctctcgtgttctctgctttcgttaacctggctgatgtatgtccctatgttcttggccatgcatagacaatgttcatgctgttgccatcgtcatgccttcaaacttgctcttgggaagtgggacatttccctctctctgtctaaggcattcagccgagccattagtctgctggggaggaggtgggagtgatggtcactgagtccccctagccaaaggttttttttttcttttttttaaaaatgatctcattatttgttctctagtctcttcctaagggagggtgcagaaaggyagcatggtgaggtcagaagaacctcatcctagatgctcccagtcccagctctcaccccagctccacccctgccacagaggaagactctcccctgcctctgttttctcatctttcaaatggtgatcatagtatctgtccagcctccttcacttatcaaatgagaatataggaatgaaattgctcatacttcatgtgatcattgca

SEQ ID NO: 676703 - DNA, 632 bp, Homo sapiens
ggaaaatatggttcggattgcccatcctagctccttcttgggctttggatgctctacaagtaggcaaatggaaacagtaaatatttgggattccagatctggtcctttcccattttataacattagtaactttgtccttaaaccttagtttccctttctgggctcctttcatcttctatggtagttacatcccgcctgctacagactcctctcgtgttctcggccactcaccttaggcaggggtccactcttaggagaagatcttatgtcagccacaaacccccagtgcaacaacactgcagaactctaagaaacctttcaagacttctggttgaacaccttcacgtcacrtaggaggaactggggctgaaaggaacaggaagccactggaagcctgtagctggttaggggcagagacacatctggaactcagttttctaggccctgccccacccatccagtgcttttcttcacctcactggaaccattttgctttggcgtgaaattgtctaaaccattttatctggggtaaaaatcctctcggcctaagggtggacaatttgccccaccttctcttgcccttaatcctagtgtggtactagttttaactgtatgaaattgccaatatctga

SEQ ID NO: 676704 - DNA, 2077 bp, Homo sapiens
caaaagttctgtctgtatttaaatgtgtttaagaaaatttatcttgctgattattaaaagtaatggtaaaaaccacagttacttttgcatcaacctaataaatatttggatagtcattctgtttgagatagagttgggatttttacctgaaaataaaacactctcatggttttcaactggcatttttattttcactttttctaaaataaaactgcattaaatgttaatttataaaatctatgccatatcatatattttatttcatatttgttgagtaatttttcactgaacatcagggatcccttagattcccattgactaggtctctgatatgttgcctttaatgatgcagttatatttaaattaactcttgataataatgatatttttattgattcctttatttttcttttcttgaactaccactctattcacatctattcactctattccattcatttgtgatcagtaattttctaggaatgattgtcttagtgcaaatataaagactaaaaatcagattgacttaaagaagcagtaatttttgctatttgctggacaaaatggcaatatccattaaaaaataactacggggactgggcgcagtggctcacacctgtaatctcagcactttgggaggccaaggcaggcagatcatgaggtcaggagttcaagaacagcctggccaatatggtgaaaccctgtctctactaaaaatacaaaaattagccaggcgtggtggcacgtgcctgtagtcccagctactcgggaggctgaggcaggagaattgcttgaaccctggaggtggaggttgcagtgagccaagatcacaccactgcattccagcctgggcaacagagggggactctgtctcaaaaacaaaacacacaaacaaacaaaaaactatgggccaaatgcaatggctcacacctgtaatctcagtactttgggaggtcgaggtaggaacatcacttgtggccaggattccaagaccagccaggacaacaaagcaagaacccttctctacaaaaaaataaaataattagatgggcgttttggtgttcacctgtagtcccagctactcgggaggctgagataggaggatcacttgagcccaggagttagaggctgcagtgggaattatcataccattgcactgtctctgtctcttaaaacagtacaataaaataaaaaataaaatagaataaaatagactaactctgtgaattcttggaattcaacaatgacaatgacacacatgcacacacatgtatgtatgtatgtatacaatctaaaaggcaaatcactaaaagagaaactattaagaaacatatgaaaagataccagcctaaatataaaaagagatacaaatgaaatcaactacagactttttcccaaaaatataagaataagctacttgtctttaaatatatagtttgaagaagttggatctacacctgtggcttagtaaagcattatggcaaaaacttccctttctttagcaatgtggagagagggaggaaaaaagaagacacagtttctgcccttgttatcctgctgctgaatttgttacaagatggttaaattttatatagtttaaaacttgtaaagaatctttcaataatgaagaagcaaagtttgtaaactaggcccctatggaaccacacwgtttgagccccgggaccttctctctgtttgtggttgggttcaggggcctgcactctgtctacaggtatcacaaataaaatgttgttagcagctgaatgatattgacagacctatcagcaatctgcagattttcattttgaactgtggcatcctgaaataagttgaagcagaaataatatctctgtgttgagagatttcaaattctttttattgataggtaaactacagctctagatataactaagtgaagcacggctggagagggaagaaataacacctggactgctgactgccgtcgtggaagggcaaaacaagaggacacaaatgcatccagctattctctgtgctgcttggtgtaatagattaaacttcaatgcaccttgggctcttttcatgggctttgcctgtc

SEQ ID NO: 676705 - DNA, 2077 bp, Homo sapiens
caaaagttctgtctgtatttaaatgtgtttaagaaaatttatcttgctgattattaaaagtaatggtaaaaaccacagttacttttgcatcaacctaataaatatttggatagtcattctgtttgagatagagttgggatttttacctgaaaataaaacactctcatggttttcaactggcatttttattttcactttttctaaaataaaactgcattaaatgttaatttataaaatctatgccatatcatatattttatttcatatttgttgagtaatttttcactgaacatcagggatcccttagattcccattgactaggtctctgatatgttgcctttaatgatgcagttatatttaaattaactcttgataataatgatatttttattgattcctttatttttcttttcttgaactaccactctattcacatctattcactctattccattcatttgtgatcagtaattttctaggaatgattgtcttagtgcaaatataaagactaaaaatcagattgacttaaagaagcagtaatttttgctatttgctggacaaaatggcaatatccattaaaaaataactacggggactgggcgcagtggctcacacctgtaatctcagcactttgggaggccaaggcaggcagatcatgaggtcaggagttcaagaacagcctggccaatatggtgaaaccctgtctctactaaaaatacaaaaattagccaggcgtggtggcacgtgcctgtagtcccagctactcgggaggctgaggcaggagaattgcttgaaccctggaggtggaggttgcagtgagccaagatcacaccactgcattccagcctgggcaacagagggggactctgtctcaaaaacaaaacacacaaacaaacaaaaaactatgggccaaatgcaatggctcacacctgtaatctcagtactttgggaggtcgaggtaggaacatcacttgtggccaggattccaagaccagccaggacaacaaagcaagaacccttctctacaaaaaaataaaataattagatgggcgttttggtgttcacctgtagtcccagctactcgggaggctgagataggaggatcacttgagcccaggagttagaggctgcagtgggaattatcataccattgcactgtctctgtctcttaaaacagtacaataaaataaaaaataaaatagaataaaatagactaactctgtgaattcttggaattcaacaatgacaatgacacacatgcacacacatgtatgtatgtatgtatacaatctaaaaggcaaatcactaaaagagaaactattaagaaacatatgaaaagataccagcctaaatataaaaagagatacaaatgaaatcaactacagactttttcccaaaaatataagaataagctacttgtctttaaatatatagtttgaagaagttggatctacacctgtggcttagtaaagcattatggcaaaaacttccctttctttagcaatgtggagagagggaggaaaaaagaagacacagtttctgcccttgttatcctgctgctgaatttgttacaagatggttaaattttatatagtttaaaacttgtaaagaatctttcaataatgaagaagcaaagtttgtaaactaggcccctatggaaccacactgtttgagccccgggaccttctctctgtttgtggttgggttcaggggcctgcrctctgtctacaggtatcacaaataaaatgttgttagcagctgaatgatattgacagacctatcagcaatctgcagattttcattttgaactgtggcatcctgaaataagttgaagcagaaataatatctctgtgttgagagatttcaaattctttttattgataggtaaactacagctctagatataactaagtgaagcacggctggagagggaagaaataacacctggactgctgactgccgtcgtggaagggcaaaacaagaggacacaaatgcatccagctattctctgtgctgcttggtgtaatagattaaacttcaatgcaccttgggctcttttcatgggctttgcctgtc

SEQ ID NO: 676706 - DNA, 2077 bp, Homo sapiens
caaaagttctgtctgtatttaaatgtgtttaagaaaatttatcttgctgattattaaaagtaatggtaaaaaccacagttacttttgcatcaacctaataaatatttggatagtcattctgtttgagatagagttgggatttttacctgaaaataaaacactctcatggttttcaactggcatttttattttcactttttctaaaataaaactgcattaaatgttaatttataaaatctatgccatatcatatattttatttcatatttgttgagtaatttttcactgaacatcagggatcccttagattcccattgactaggtctctgatatgttgcctttaatgatgcagttatatttaaattaactcttgataataatgatatttttattgattcctttatttttcttttcttgaactaccactctattcacatctattcactctattccattcatttgtgatcagtaattttctaggaatgattgtcttagtgcaaatataaagactaaaaatcagattgacttaaagaagcagtaatttttgctatttgctggacaaaatggcaatatccattaaaaaataactacggggactgggcgcagtggctcacacctgtaatctcagcactttgggaggccaaggcaggcagatcatgaggtcaggagttcaagaacagcctggccaatatggtgaaaccctgtctctactaaaaatacaaaaattagccaggcgtggtggcacgtgcctgtagtcccagctactcgggaggctgaggcaggagaattgcttgaaccctggaggtggaggttgcagtgagccaagatcacaccactgcattccagcctgggcaacagagggggactctgtctcaaaaacaaaacacacaaacaaacaaaaaactatgggccaaatgcaatggctcacacctgtaatctcagtactttgggaggtcgaggtaggaacatcacttgtggccaggattccaagaccagccaggacaacaaagcaagaacccttctctacaaaaaaataaaataattagatgggcgttttggtgttcacctgtagtcccagctactcgggaggctgagataggaggatcacttgagcccaggagttagaggctgcagtgggaattatcataccattgcactgtctctgtctcttaaaacagtacaataaaataaaaaataaaatagaataaaatagactaactctgtgaattcttggaattcaacaatgacaatgacacacatgcacacacatgtatgtatgtatgtatacaatctaaaaggcaaatcactaaaagagaaactattaagaaacatatgaaaagataccagcctaaatataaaaagagatacaaatgaaatcaactacagactttttcccaaaaatataagaataagctacttgtctttaaatatatagtttgaagaagttggatctacacctgtggcttagtaaagcattatggcaaaaacttccctttctttagcaatgtggagagagggaggaaaaaagaagacacagtttctgcccttgttatcctgctgctgaatttgttacaagatggttaaattttatatagtttaaaacttgtaaagaatctttcaataatgaagaagcaaagtttgtaaactaggcccctatggaaccacactgtttgagccccgggaccttctctctgtttgtggttgggttcaggggcctgcactctgtctacaggtatcacaaataaaatgttgttagcagctgaatgatattgacagacctatcagcaatcygcagattttcattttgaactgtggcatcctgaaataagttgaagcagaaataatatctctgtgttgagagatttcaaattctttttattgataggtaaactacagctctagatataactaagtgaagcacggctggagagggaagaaataacacctggactgctgactgccgtcgtggaagggcaaaacaagaggacacaaatgcatccagctattctctgtgctgcttggtgtaatagattaaacttcaatgcaccttgggctcttttcatgggctttgcctgtc

SEQ ID NO: 676707 - DNA, 2077 bp, Homo sapiens
caaaagttctgtctgtatttaaatgtgtttaagaaaatttatcttgctgattattaaaagtaatggtaaaaaccacagttacttttgcatcaacctaataaatatttggatagtcattctgtttgagatagagttgggatttttacctgaaaataaaacactctcatggttttcaactggcatttttattttcactttttctaaaataaaactgcattaaatgttaatttataaaatctatgccatatcatatattttatttcatatttgttgagtaatttttcactgaacatcagggatcccttagattcccattgactaggtctctgatatgttgcctttaatgatgcagttatatttaaattaactcttgataataatgatatttttattgattcctttatttttcttttcttgaactaccactctattcacatctattcactctattccattcatttgtgatcagtaattttctaggaatgattgtcttagtgcaaatataaagactaaaaatcagattgacttaaagaagcagtaatttttgctatttgctggacaaaatggcaatatccattaaaaaataactacggggactgggcgcagtggctcacacctgtaatctcagcactttgggaggccaaggcaggcagatcatgaggtcaggagttcaagaacagcctggccaatatggtgaaaccctgtctctactaaaaatacaaaaattagccaggcgtggtggcacgtgcctgtagtcccagctactcgggaggctgaggcaggagaattgcttgaaccctggaggtggaggttgcagtgagccaagatcacaccactgcattccagcctgggcaacagagggggactctgtctcaaaaacaaaacacacaaacaaacaaaaaactatgggccaaatgcaatggctcacacctgtaatctcagtactttgggaggtcgaggtaggaacatcacttgtggccaggattccaagaccagccaggacaacaaagcaagaacccttctctacaaaaaaataaaataattagatgggcgttttggtgttcacctgtagtcccagctactcgggaggctgagataggaggatcacttgagcccaggagttagaggctgcagtgggaattatcataccattgcactgtctctgtctcttaaaacagtacaataaaataaaaaataaaatagaataaaatagactaactctgtgaattcttggaattcaacaatgacaatgacacacatgcacacacatgtatgtatgtatgtatacaatctaaaaggcaaatcactaaaagagaaactattaagaaacatatgaaaagataccagcctaaatataaaaagagatacaaatgaaatcaactacagactttttcccaaaaatataagaataagctacttgtctttaaatatatagtttgaagaagttggatctacacctgtggcttagtaaagcattatggcaaaaacttccctttctttagcaatgtggagagagggaggaaaaaagaagacacagtttctgcccttgttatcctgctgctgaatttgttacaagatggttaaattttatatagtttaaaacttgtaaagaatctttcaataatgaagaagcaaagtttgtaaactaggcccctatggaaccacactgtttgagccccgggaccttctctctgtttgtggttgggttcaggggcctgcactctgtctacaggtatcacaaataaaatgttgttagcagctgaatgatattgacagacctatcagcaatctgcagattttcattttgaactgtggcatcctgaaataagttgaagcagaaataatatctctgtgttgagagatttcaaattctttttattgataggtaaactacagctctagatataactaagtgaagcacggctggagagggaagaaataacacctggactgctgactgccrtcgtggaagggcaaaacaagaggacacaaatgcatccagctattctctgtgctgcttggtgtaatagattaaacttcaatgcaccttgggctcttttcatgggctttgcctgtc

SEQ ID NO: 676708 - DNA, 1608 bp, Homo sapiens
attccacagattaattatatgtgttcagccagaagttcaaccttcagtttgaagaacctctggggaaaagatgtctttttaagcgattaactacctgtgcttttaatatatagacctgatttactgtttcactgtttttctcctactgaggttctttgcttcctttcttttcatatgtcagaaagagagagaaagaggaagggggagaaggagagagagaacatgtttttgaacaagtttcaaaacctagtcatttggagtaaagaaaattggattatttacttattatagattttatatttcttgtcttgcttggaaagcagctggctggccctaatagcttacccaggactaatgcattccaaagaatctacttataaagaccatttctgtacagatctaaaattttcatttgtgaggcaaggttaaattcattagataaatccaaaatcgattttttagaaatagtttacttactttattaagtgtttagatatatgtgggttattgagaataaaatattttcttgaaatggagcaaaaaagacccttaaaatggcatatgtaatttaattcttctgtagttttcttttttaaaaaatcacaattagaaaggactttttaaagctttttatgtgcatagaaagaaacagaaaaaatataggtatggcctgtaccttctagtgctctagttataaatataaattcatagtgastctgtagttgaatatcacatattaattaagtaaaaattccgtatctgaacattgtctcacagcatcttggttgctgggtctgcatttgcaggcgttcccagggttgtgggatgagctgagagtaaagatctgggcactcgcaggaatggaaattgggatctggctgtaggaatggctattccttaacacactgtgtgacctttcaagttcaaggattccctcaaactggcatacaatgctttctaaactgtaggtgacagaaataacataagggcttttgttatctgagctgtgtctgtatgtgtatctgtgtatgcatgttttcttatgcacaaaaaaaaatagaatggctgaattatgttaaatgtaaaaaacatcaacataatttttattcatttaaaaatactaacctaaatgcggcagagataatcgtattaataaatttttataagtatggatctcacctgctatttaatcattgcaagccaaacaatgttctaaacatttgacatctatgagcttatttaattcttgcaacgaccctgtaaagcaagtattattcttatacccattttatatatgagaaaaagcataaaacttgttcaaacacaccattaatgtttaagtatgtatgcttatttcagatcgtgtgtgtgtgtacgtgtggatagatgggtagatagctgaatggatgaatggatagatagatctagcagatgatagatagatagatagatacatagatacatagatacatagataaatagatgatagataagagagagagagagagatgtttgttttacagaagatagaatcaaagctagctgcaactgagagataaaagttcattttcccttctaataccatttggaatttgtttctattataca

SEQ ID NO: 676709 - DNA, 1608 bp, Homo sapiens
attccacagattaattatatgtgttcagccagaagttcaaccttcagtttgaagaacctctggggaaaagatgtctttttaagcgattaactacctgtgcttttaatatatagacctgatttactgtttcactgtttttctcctactgaggttctttgcttcctttcttttcatatgtcagaaagagagagaaagaggaagggggagaaggagagagagaacatgtttttgaacaagtttcaaaacctagtcatttggagtaaagaaaattggattatttacttattatagattttatatttcttgtcttgcttggaaagcagctggctggccctaatagcttacccaggactaatgcattccaaagaatctacttataaagaccatttctgtacagatctaaaattttcatttgtgaggcaaggttaaattcattagataaatccaaaatcgattttttagaaatagtttacttactttattaagtgtttagatatatgtgggttattgagaataaaatattttcttgaaatggagcaaaaaagacccttaaaatggcatatgtaatttaattcttctgtagttttcttttttaaaaaatcacaattagaaaggactttttaaagctttttatgtgcatagaaagaaacagaaaaaatataggtatggcctgtaccttctagtgctctagttataaatataaattcatagtgagtctgtagttgaatatcacatattaattaagtaaaaattccgtatctgaacattgtctcacagcatcttggttgctgggtctgcatttgcaggcgttcccagggttgtgggatgagctgagagtaaagatctgggcactcgcaggaatggaaattgggatctggctgtaggaatgrctattccttaacacactgtgtgacctttcaagttcaaggattccctcaaactggcatacaatgctttctaaactgtaggtgacagaaataacataagggcttttgttatctgagctgtgtctgtatgtgtatctgtgtatgcatgttttcttatgcacaaaaaaaaatagaatggctgaattatgttaaatgtaaaaaacatcaacataatttttattcatttaaaaatactaacctaaatgcggcagagataatcgtattaataaatttttataagtatggatctcacctgctatttaatcattgcaagccaaacaatgttctaaacatttgacatctatgagcttatttaattcttgcaacgaccctgtaaagcaagtattattcttatacccattttatatatgagaaaaagcataaaacttgttcaaacacaccattaatgtttaagtatgtatgcttatttcagatcgtgtgtgtgtgtacgtgtggatagatgggtagatagctgaatggatgaatggatagatagatctagcagatgatagatagatagatagatacatagatacatagatacatagataaatagatgatagataagagagagagagagagatgtttgttttacagaagatagaatcaaagctagctgcaactgagagataaaagttcattttcccttctaataccatttggaatttgtttctattataca

SEQ ID NO: 676710 - DNA, 1608 bp, Homo sapiens
attccacagattaattatatgtgttcagccagaagttcaaccttcagtttgaagaacctctggggaaaagatgtctttttaagcgattaactacctgtgcttttaatatatagacctgatttactgtttcactgtttttctcctactgaggttctttgcttcctttcttttcatatgtcagaaagagagagaaagaggaagggggagaaggagagagagaacatgtttttgaacaagtttcaaaacctagtcatttggagtaaagaaaattggattatttacttattatagattttatatttcttgtcttgcttggaaagcagctggctggccctaatagcttacccaggactaatgcattccaaagaatctacttataaagaccatttctgtacagatctaaaattttcatttgtgaggcaaggttaaattcattagataaatccaaaatcgattttttagaaatagtttacttactttattaagtgtttagatatatgtgggttattgagaataaaatattttcttgaaatggagcaaaaaagacccttaaaatggcatatgtaatttaattcttctgtagttttcttttttaaaaaatcacaattagaaaggactttttaaagctttttatgtgcatagaaagaaacagaaaaaatataggtatggcctgtaccttctagtgctctagttataaatataaattcatagtgagtctgtagttgaatatcacatattaattaagtaaaaattccgtatctgaacattgtctcacagcatcttggttgctgggtctgcatttgcaggcgttcccagggttgtgggatgagctgagagtaaagatctgggcactcgcaggaatggaaattgggatctggctgtaggaatggctattccttaacacactgtgtgacctttcaagttcaaggattccctcaaastggcatacaatgctttctaaactgtaggtgacagaaataacataagggcttttgttatctgagctgtgtctgtatgtgtatctgtgtatgcatgttttcttatgcacaaaaaaaaatagaatggctgaattatgttaaatgtaaaaaacatcaacataatttttattcatttaaaaatactaacctaaatgcggcagagataatcgtattaataaatttttataagtatggatctcacctgctatttaatcattgcaagccaaacaatgttctaaacatttgacatctatgagcttatttaattcttgcaacgaccctgtaaagcaagtattattcttatacccattttatatatgagaaaaagcataaaacttgttcaaacacaccattaatgtttaagtatgtatgcttatttcagatcgtgtgtgtgtgtacgtgtggatagatgggtagatagctgaatggatgaatggatagatagatctagcagatgatagatagatagatagatacatagatacatagatacatagataaatagatgatagataagagagagagagagagatgtttgttttacagaagatagaatcaaagctagctgcaactgagagataaaagttcattttcccttctaataccatttggaatttgtttctattataca

SEQ ID NO: 676711 - DNA, 1608 bp, Homo sapiens
attccacagattaattatatgtgttcagccagaagttcaaccttcagtttgaagaacctctggggaaaagatgtctttttaagcgattaactacctgtgcttttaatatatagacctgatttactgtttcactgtttttctcctactgaggttctttgcttcctttcttttcatatgtcagaaagagagagaaagaggaagggggagaaggagagagagaacatgtttttgaacaagtttcaaaacctagtcatttggagtaaagaaaattggattatttacttattatagattttatatttcttgtcttgcttggaaagcagctggctggccctaatagcttacccaggactaatgcattccaaagaatctacttataaagaccatttctgtacagatctaaaattttcatttgtgaggcaaggttaaattcattagataaatccaaaatcgattttttagaaatagtttacttactttattaagtgtttagatatatgtgggttattgagaataaaatattttcttgaaatggagcaaaaaagacccttaaaatggcatatgtaatttaattcttctgtagttttcttttttaaaaaatcacaattagaaaggactttttaaagctttttatgtgcatagaaagaaacagaaaaaatataggtatggcctgtaccttctagtgctctagttataaatataaattcatagtgagtctgtagttgaatatcacatattaattaagtaaaaattccgtatctgaacattgtctcacagcatcttggttgctgggtctgcatttgcaggcgttcccagggttgtgggatgagctgagagtaaagatctgggcactcgcaggaatggaaattgggatctggctgtaggaatggctattccttaacacactgtgtgacctttcaagttcaaggattccctcaaactggcatacaatgctttctaaactgtaggtgacagaaataacataagggcttttgttatctgagctrtgtctgtatgtgtatctgtgtatgcatgttttcttatgcacaaaaaaaaatagaatggctgaattatgttaaatgtaaaaaacatcaacataatttttattcatttaaaaatactaacctaaatgcggcagagataatcgtattaataaatttttataagtatggatctcacctgctatttaatcattgcaagccaaacaatgttctaaacatttgacatctatgagcttatttaattcttgcaacgaccctgtaaagcaagtattattcttatacccattttatatatgagaaaaagcataaaacttgttcaaacacaccattaatgtttaagtatgtatgcttatttcagatcgtgtgtgtgtgtacgtgtggatagatgggtagatagctgaatggatgaatggatagatagatctagcagatgatagatagatagatagatacatagatacatagatacatagataaatagatgatagataagagagagagagagagatgtttgttttacagaagatagaatcaaagctagctgcaactgagagataaaagttcattttcccttctaataccatttggaatttgtttctattataca

SEQ ID NO: 676712 - DNA, 1608 bp, Homo sapiens
attccacagattaattatatgtgttcagccagaagttcaaccttcagtttgaagaacctctggggaaaagatgtctttttaagcgattaactacctgtgcttttaatatatagacctgatttactgtttcactgtttttctcctactgaggttctttgcttcctttcttttcatatgtcagaaagagagagaaagaggaagggggagaaggagagagagaacatgtttttgaacaagtttcaaaacctagtcatttggagtaaagaaaattggattatttacttattatagattttatatttcttgtcttgcttggaaagcagctggctggccctaatagcttacccaggactaatgcattccaaagaatctacttataaagaccatttctgtacagatctaaaattttcatttgtgaggcaaggttaaattcattagataaatccaaaatcgattttttagaaatagtttacttactttattaagtgtttagatatatgtgggttattgagaataaaatattttcttgaaatggagcaaaaaagacccttaaaatggcatatgtaatttaattcttctgtagttttcttttttaaaaaatcacaattagaaaggactttttaaagctttttatgtgcatagaaagaaacagaaaaaatataggtatggcctgtaccttctagtgctctagttataaatataaattcatagtgagtctgtagttgaatatcacatattaattaagtaaaaattccgtatctgaacattgtctcacagcatcttggttgctgggtctgcatttgcaggcgttcccagggttgtgggatgagctgagagtaaagatctgggcactcgcaggaatggaaattgggatctggctgtaggaatggctattccttaacacactgtgtgacctttcaagttcaaggattccctcaaactggcatacaatgctttctaaactgtaggtgacagaaataacataagggcttttgttatctgagctgtgtctgtatgtgtatctgtgtatgcatgttttcttatrcacaaaaaaaaatagaatggctgaattatgttaaatgtaaaaaacatcaacataatttttattcatttaaaaatactaacctaaatgcggcagagataatcgtattaataaatttttataagtatggatctcacctgctatttaatcattgcaagccaaacaatgttctaaacatttgacatctatgagcttatttaattcttgcaacgaccctgtaaagcaagtattattcttatacccattttatatatgagaaaaagcataaaacttgttcaaacacaccattaatgtttaagtatgtatgcttatttcagatcgtgtgtgtgtgtacgtgtggatagatgggtagatagctgaatggatgaatggatagatagatctagcagatgatagatagatagatagatacatagatacatagatacatagataaatagatgatagataagagagagagagagagatgtttgttttacagaagatagaatcaaagctagctgcaactgagagataaaagttcattttcccttctaataccatttggaatttgtttctattataca

SEQ ID NO: 676713 - DNA, 1171 bp, Homo sapiens
agtgtaaacccacttaaagtgactcctttcttaagcaatgtcagaaatatttagtctctgttgctgcacagactgtgcgtgaattgcagccagaggtcagctcagatatgcgcttgcacattcaagctgccaaaaaacataagaacatatttagaacaatgaattgttaagttgaagctttcaattctcatggaacgttaactctccagcactcatcgacacctctttgagcctctgattaagaaggaaaatcaggaaaagaacatggacctgggccacctaatggaaatatttcatcaggcagtgacctttgtgtttgtcattgtttgtcctctctgtttcccggggcatactgttttaataagcgtttgtaattataatctacacaagcgtcttaatagtttccaaagatacttggaaactcattggggctgtttcacaatcggaaattgatgtttatttggagatgactatggtaggatcctgagctccagcctccctgtctgatttgagtggggttttggagggaaggataccgattttttttgttgttgtttttttgttttttgtkttttgtgttttgtttttgagacggagtctcgctctgtcacccaggctggagtgcagtggcgcgatctcgactcactgcaagctccgcctcccaggttcacaccattctcctgcctcagcctcccaagtagctggcactacaggcgcccgccaccaagcccagctaattttttgtattttttagtagagacggggtttcactgtgttagccaggctggtcttgatttcctgaccttgtgatctgtccacctcggcctcccaaagtgctgggattacaggcatgagccaccgcgcccagctggataccgatgttttaagtgtccaatggtgatagcaagattcctgtgttcccataaactttcataatggtaaagctaatatttgcacatgtgcttaaatgtgcctgtcatttttgctttgtaggggtcagtctttactggatttggtcagcagccatctaggtatccggagtgttggtggacttctctgcaaagtaatatagcagcaaagagtcctgagcctcccaggctgtgtccccacctgcctagaggactctgagtaaattcctttctctcccaaggcctcagtttccttatctgca

SEQ ID NO: 676714 - DNA, 968 bp, Homo sapiens
tttaataatcttataaatcatcatgccaatactttacttggcaattggaagccaatatttgacaactggaagtaacagagtgaagatgaagaggtctcccccactttctaggctcttgtaccccacctccactgtctgctgagtatctgcttgtacatcttctgcagcagttaaatatctccacttcacatctctgcattcttacatgaattctgccttggccaggctccccagaaagcaaagcctgagataaaagctcatgtgcagtattttattagggagcgcactcccaggaaagcgggattaagggaaaacaggaatgaaaagagagagaagctagagccaacacaagggcaggctactagtaccacctttgggggtggagggtcacccacggcttgatcttgtgggggctgatgtccaaggatccatacaaatgacggtgaacttcagacagtgtgtccagggcaggaagaccttatctgccagctcccatttcccactggtcccatttttcactttgtggaaaaattgccccacgcttctgaattgcacaagggtggccttgaaccagtcccaaggcatctcttatttcaattcttacaaaagtagaaggcgcagggcacgaggtgagagatgtttggtgtgacagcattagatgccattgagttctgtctgcgggaagctggccagaatccgagcagagcyggtcctacagcaagggccaggccagagcaaagagccttggaccaggaggtggatgaggctgagaagacctgaagacctatccgccacacttacctgtgcccttgcgttgtattgactccccgaccacaattgggctttattgctgtgagaacaagatgccgtaagaggaaatataaaaccaatcagtcacagagtgcccccttcaaagtggtggccagccttagtctctgagaaagccttaagttaaaaggttgagggaa

SEQ ID NO: 676715 - DNA, 1421 bp, Homo sapiens
ccctccagctcctctttacttctgaggacttgtggagaacgtgaatggaaactctggagtccagtctgaggccagcctttgctttgttccactccctatacaagcacagagctcaaggtggctttgcctctcctcctagcatgagcttgtcctccatggctgctgccaccaaggaggcaggagccagcagccttggtcaccttagaaggccacagaggctgtaggatccctgtagcagaagctgttgcgtcccaccgccacctcaggacttattattgcaccgagtgcagtccaacctccaactgcctctgccaactgtcaaatagctaatagacatgggcttctgccaaagccctggggagcggggggttacatcctgtatgacaagacagtaaagccagaaaattaagacccccaagagcagctctcaaccaatgactggagggggttaaggtacaaataaccccctcctccacaccccaggggttctacactgaatcccagaattacctagtaggatagagctccagacggtcacagcagttactcacttgagaatgtaccctttattcgctgcccttgattctctgtctcatgtccctaaaaccaaataagcaccttgcactcggaactcctgccctgagtctgcttctaggggtctcaacgccatgtgccttttatcttcactcttcttttccaacgcagtctgtgccagtgaccatagccagctgtctgacaatggtttttccctgcaggaccagagaaaggaagaacagctggatgcagagatcccaccttatgagtgtgcacactactatccatggccatggatagggtccgtcacagcccctagactactacaggatgaagcccaggytcctattctggtacaaagactctgcaaatgtccccttgcctacttatccagccccaaacatgtcacccactcagtgtctcaaaactaacccaggctgtcctgcttatgagcttgccaagccacaggacccatctcagatggggccagtcggagaggctatcccagactcttccagactgcgctcattgttccaacctctgtacacctttagctcacacctgaatgcagggtctaccatactggattttgcaagaaatgtggtataaaagagacagcatggccaaggcaaggcaagcctagctctgccacttatgagcagtatgatcttagaaaggtccagaacctctctgggtttccatgctctcactggtaaaaggtggttgctaacagcacctacgtcatagggccattgttaggattagggaggtagtgtggcaggtggctaacattaactgaccatgcagcacagatttgcatgattcttcctgctagaccatgagcttattacagaacctgacacagttgggctccataaacctttatt

SEQ ID NO: 676716 - DNA, 1215 bp, Homo sapiens
attcactctttagtatgttttgatgaacagaagttcttaatatactctaatttaaatttttattatttatggttaccacttttgtgaactgcttaggaaactgcctactccacggtcatgaaaatgtttttttgctgttcacatttagatctataatgtatctagaattggttttttgtgggtgcgtatggtgtgaaatagggatcaggataccttttccccccacatggaaatccaactgaatccatgagtatagcaggctgcttatattccttgctaagtagagatgacttaagtgttctcatcatttacctggattcaaaatagagtgaaattttagttcattctctgcgctctgctatcacccagctttctcttggcataaacttatcaattctgaatttagctcagtgctaatggttctaattagcccctgaaaattataaatgtaccaggtgctcatgtgattccaaacacaaatgcaagtacaagtatagaaaccttgtgatagtacctattcattttgttttttagatcttgtaatacattatctgctttggccagctgttgttaataaaaactttatagtctctcatttaattcccacaataaccacatgggatagggtttcattttggttatgttagttgcaatggacagagcaccattcaagttaaccaatgggaggttaatcataaggagacacaaaagtggatcattcttaaggagtaaggcagccaagaccagtctctctctgggcatctctgcctctcggggcagctgcttctgcaggcttgtgctttcgctccccctggggaagagggaaagtagttgtcacatgggataaaacctaactaacgttaagggctgtgagttgagtacttccccttttggaagggactgtggactggtgggtttgatgaaacatcttatacaagtcattataatgaccattttacagataagtcagacagactgtagaaaaggtcagaaacctttcgaccaaagccatagggttagtgcagggcggaacatctctgargtcaaagcccagactgctttgtttatgaaaagttgtaacttggctctataattcagtaatttaaatatatatcagaaaagagttggtgtattttcttagctctacttagtgcattttaaaaaccagtttaagagtttagtttccactttacttaaaatttaagtagttaaaac

SEQ ID NO: 676717 - DNA, 1529 bp, Homo sapiens
tttttttttgtatttttagtagagacgggatttcactgtgtttgccargatggtcttgatctcctgacctcgtgattctcccgcctcggcctcccaaagtgctgggattagaggtgtgagccactacgccagccctattctactttcttgcaaatggataggtgatgttcctagccccatatattcattctccacagaattataattccacatttatcatttattcatttctagtatatactgtgtattagtttgccaggtctgacataacaaagtgctgcagactgagtggcttaaacaatagaaattttttgtctcataaatctggaggctagcagcctgagatcaaggtgttggcaggattggtttcttctgaggcctctctctttggcttctagatgaccatcttcaccttgtatattcacatggtcttcctatctccaaataaaaaccctatctccaaataacatcacattctgaggtacagcagtttatgacctcaacacataaatttagggagggaaacaattcagtccataacaacttgaatctattttcagatgctctgcatgtctattcctgtgttatcatcacaggtacaaacttatagattacttagaagacaatctactatttagaaattaacttttcttaatagttaatatgttacatcgtttgtaaaactttccccaatctcttcaactctcctgctagaaacgaatgcctctccctgtattttatttcaacctccattataatactgttcactttataaagaggtattccaacttctgtattcaaacaagattgcaagctcccagggctcaagtaactaaattattactaaatattattaaatattcatatttgatattattaataatcatttgttgatgcttactctgtgttgaacactgtgttttgagttttgcttggatctgcatcctgtgaagtagaaataaggcttaaagaagtcaagttacttgcctgagagcacatagcaagttagtgacccacttaagattccaaccatctctattttactccaaatcctaaattcttagccattatgcatcactgccttgacagctgttttgtacctgcttccttctccctgcagagtgcctgctgcactgtaggtatttaatatatgtgcttagaacgtgaactaagctgaaaagcacaccaaccaacaagtttttttgatgtcattctttctatttaaaaactgttgtgactaatgagctattttaggtctggattactgtggctgaagtaacagatatgtgatcaggtcctcctcatccccatgacacatagagtgtatgcttcccaatactgagagtcaccatttccttcctgtatattcctggtctttaatataacctcaaaccaaattccattatattgtgtacttgatgctaccattactcagcatgttaaacgaatgccataggccaggtgtggtggctagcacctgtaatcccagcactttgggaggccaaggtgggcagatcacttgaggtcgg

SEQ ID NO: 676718 - DNA, 1332 bp, Homo sapiens
tgcaaccaaggacagaagttcaagggtagtaaaggattttatacatgttataaaattatatccaaaactggtatcagggcacatataatggtggacgtgctatttaagaaaattaagaacagaagtgttgtctataatactagcatgtgaataaatcaacagaataactgaagcttatactggctatgcaaaagtaatattaattatagtcatttatgtgaacttctgaccttttatgtttaattatcttgcagcaaaataatttttatgtatataacattacatttcaaagatgatatttgtttattatgttttycaactaatatttatttagtgactgccatttaaagatattcagctgggctctattaggggatatgaaaaagctcagaaaagaaggcccttctcttaaaaagctacactctaataggagagacgagatacttatataacatgatagcaaatgtgacagacttagatgaacaatgctacgggggtggagggccttacaaaggaggtctcagtgagatcaatcttgcaggatgtgatagaagagggtgaggagagaagacattccagagtgaacaaagttcagatgtggaacacgatagtgtgtgtccaggaagctggagaatatagtctgatagaaaactgtaacatgcaaaaaggtgaaataggaggtaagactggaaaactagattgtgatgagatcatgatagccaagtagaaaacttacatgttgttcacttccatataaaaatttccagaaaatgttcaacagactatatttgaaattctctatattgcatccaataggttttcttattcccaatcgaagctcctagtacgacgaagttctaccgtggaaggacttttctaacgtacagctcatttgtggtaaatccattgttttcactcagtaaagggccaactagccctttgttggtctcaatgtcgaattgctattaacttgtgttatatatggatggtggtacccctttaaaatggtcatatatttatttctatagctaatagtctattgatttttaatttataatcattttatcttccagcagaggttttgagacagtttatcacttattgtttggaaaatcagtcttgtttgtcaataattgattttagttcaccacttaatctgacgaagttccctgctctaaggaattaaataacattttctttctatttcaagagattccctggcactctcctgtggtgctattgtggatggcacttaaatttttaaattttctgcttattgctgatacggaattacaattacctaattgtatatttctaacacagtagccttga

SEQ ID NO: 676719 - DNA, 1247 bp, Homo sapiens
tgcattattacaacgtaccatcaattcaaaaccataaatttgcagaaacatcgttgctttaattcctaaaatattgaatatgaataataaaaataatatatgctttgtcttagaagcacctttttaatatgattgatgtgtattgatctgtttcttcattctaacrtgaacatttctgtaacagtcatttcccctgaaatatctaacctgtgggtacctgagacagcttgtcagttaggaagaacagtggtggcgatagccacgtagggctggtttggtcgtgagtgcaagtgtggttgcagcagctagagcagaggactgtgtggagaacatgggtcaggtcagaaggcagtagccaggagggatgcagagtcgagagagaatttgttgattggaatgactcaggttgactttcaggatgaagagaaggggccaatagagagggaagagaggacagttgatgaggcaggctccaagagaggagggcaaagcgagatcaggggctccagtgaaatgcctgagtgtgatgagaagagcgctgtcttgtgaggctagagagggaaccaaggatgggtgggcctgggaaggctggagaggtagcctgtcagggagctgctaacccacttagaaatactcttattgacataacaaggttttttgttttggttttttgtttgtttgttttgagagagcgttcgctcgttccccaagctgaaatgcaatggtgcagtctcagctcactgaaacctccacctcctgggttcaagcgattctcctgcctcagcctcccgagttgctgggattacaggtgcatgccacgggtgcagtggctcacgcctgtaatcccagcactttgggaggtcggggcgggcggatcatttgaggtcaggagttcaagaccagcctggctaacatggatataacaaaattttctatttcaaaagttcagtcgtgggcacaagttgattttgccttacagtcttgatagtgaaggtgcatactatttttaaagctgtattccttagatactaccatattatctaatgtttctaataatggaattagcaaaaaatgactacatcatccaaatttgactttgtactaacatacttggcgtactccatatccctgaaggttaacaagagataaatttggcctagactggtcttttcctgaattcatcacttaaaaaaggaaaaaaagaatggggaggaaaagccacgttttacttttataatttttattcc

SEQ ID NO: 676720 - DNA, 1471 bp, Homo sapiens
catcaaaataataactaaaacaaaaaacctcacacatttggaaaccaaaaaaatcctcataatggaaattagaagatagctaagaatgaataaaactattacctacctatcaaagtttatgggatgtaataaagtggttgatgtaatttttaaatattgagattaaattaaaaaaagaaaactgaaaattaaagggttaactatacccaatttaagaagttagagaaagtaacaataatctaaaaaaatgagaaagaagaaagtagaaagttgagagcaaatgtcagtaaaacggaaaacaaagaaacagaaggagtcactaaaacctactgctggctgttacaaagtcaaataaaataggcaaacctggcaagcttgatgaaaagacaaaggaaggagcacaaataaacagtattaagaataatacaagggatataatggcagattttwaaaaaatcacaagaatactttattcataccaataactttgatgaaagacaactttctagaaaagtataacttattaaaacttattctagagaaaacagacattggtaattatcttttaaaattgttcaggaccatctacttaagctgagccatatgtgagactcagcaattccactcctgaataaaagaaattcaaacacatgttcatcaaaagacatggactagaacgttctcagcagcattatttccaacagtcaaagacgggaactacccaaatgcccatcaactatagaatgggtaagttatggtgcattcacatactgtaatctaataaagcagtttgaatgaatgaaccagaatgacatgcaacaatatggctgaatctctcaaatgatgttgaacaaaataaacacaaaaagtacatttgtatgactattattatatagcatgtacttttctggatatatatcatactttaatgtaattgaaacagtacttaaaaatctacccaccaaaaacctacaggtgaagtgtatgaaatctttaatgactccttatcttatataaactgctctagagtacagaaaaggaaggagagtttcccacctaattttttgggactagcataacactgtttccaaaactagacaaggccattatgagcaagaaaaattatacaatatatagttaatttttcttgggtagatacaataatcctaaataaaatatcagcaaattcaatccaacaatgttttcaaaataattctcttatctagtatgatgtgctgtattaggatttatctcaaaaatcttagaaaaactagcaacataatccacacattaacagtttgaaggagaaaaatcaaacgctcatctcaataggtatgaaaacaatttgacaaaattcaatacccattcatgaagagacaaaaatgcctattaccaattcttgcattcagcacaagtcacagcataatgagaacaaaaaccaaacccaaacaaaaatctcacataaagatag

SEQ ID NO: 676721 - DNA, 618 bp, Homo sapiens
gctgtgtgagaaaccattcccaaatttaggagcttaaatcaataaccattcctgttgaaacaaagatcaaatccttaagaattagtttagtgagaaatatgcaaaacctgtactaggaaaaagtttaaatactccagaaacacataagtagagttgaaaaatagagacttcccctctttgtatacaaacactcaacattattaagatgttagttctccttactacattagtgtacaaacttaatgcaataccaacaaatgtcccaagaaactattttatggaattagatcctatatttgttgatcatgtatttgtattgttacaaacatgtaacaaaagtyaggaaaaggccaaaaaagagaaaactacaagtgatggctagccctatcagacattaaaacctagtaaaataggagatatcttctttttttttttttttttgagaaggagttttgcttttgttgcccaggcttttgttgcccaggctggagtgcaatggcactatctcggctcactgctacctccacctcctgggttcaagcaattctcctgcctcagcctcccaagtagctgggattacaggtatgcaccaccacgcctggctaattttgtattttt

SEQ ID NO: 676722 - DNA, 615 bp, Homo sapiens
tggagaacctttgtgtctagctcagggattgtaaaggcaccaatcagcgccctgtggaagcagaccacttggctctaccaatcagcaggatgtgggtggggccagataagagaataaaagcaggctgccggagccagcagtggcaacaggctcgggtcccctttcacatggtggaagctttgttcttttgctctttgcaataaatcttggtactgttctctctttgggtccacgctacctttatgagatgtaacactcaccacaaaggtctgcagcttcactcctgaagccagcgagaccacgmacccaccgggaggaacgaacaactccagatgcgccgccttaagagctgtaacactcgccgccaaggtctgcagcttcactcctgagccagcgagaccatgcacccaccagaaggaagaaactccgaacgcatctgaacatcagaaggaacaaactccggacacgctgcctttaagaactgtaacaccgcgagggtccgcggcttcattcttgaagtcagtgagaccaaggacccaccaattccggatacactgggatttagatgccaactttactttttttagggtctgctgggctgagcctttaaaattt

SEQ ID NO: 676723 - DNA, 642 bp, Homo sapiens
tactcagaacatccctaatgttttatattaaatgttttctatttaaccaaaattgttagggatatcaaaagttatgaccaatagaaaaaatataattggtatacacccaaagaagttgaaaatattagagctaaacaacaacacatagcttttcacataattgtgattaatatattcaaacaagacagattaaaagatgtaaaatgtaatcagagaactgcaattcttattttaaaaaagcttaagtggaaaatctagaatatcaaaataaaaaaataattttaagaacttaatgggataaaagcagatttggtgaggctgaagagaatattagtgaactagaagatagattaatagaaaaattctaataacacagagaaaactagatgaaaaatacaaaaaggtacataatagacatatgagactcaatacaaaagttaaaccagtgattcattggctggcttatgccagctaataagaactaactggtaattttcatgtattttttgagctccttgttaaatagttggtaacttgaactcagcatgaagagaakagaggtagcaaatgccagttaacagaaccattttatttccttcagaaaattagcttatcactaggtctaaaatgtgggtaagtgga

SEQ ID NO: 676724 - DNA, 388 bp, Homo sapiens
cttctggggtgctactgatgctttacttctttatattggttgttttatgggtgtgctcacattgtgaaaattcagtgagctggacacttgtgatctgtgcacttgtaaatatgatatcttaaaaaattcttttacttttaaaagkatagcaagaattagagaaaatatggagttaacagcatttcatccaaaagctgaaatctttgtgggcaaagggcaaatcaatttcacacaggcacttgcacgcagacaacatatgaatctctcaggttacagatggcaatgggtaagtgcatgtcttcgaagacaggagttgaatcttgagaatggggtcttctaagttgcagctcaaatacagatggtccccaaattataatttttttcaact

SEQ ID NO: 676725 - DNA, 598 bp, Homo sapiens
ttattccatccattatgctttgctaaatatgtggagataaggtcttgctatgttgcctgggatggtctcaaactcctaggctcaagcagtcctcccacctcagccttccaaagtgttaggaatacaggtctgagccactgcatgtggccaataggtgtttgtctctgaaacttgagtgagtcttcctgccstggaatgatttggtttaccattgccagcattttctccaagccactgtgactattcctgcaacatgcttggtgctgattgtagcaaataatgtctttagacaagagaaatgccattgtatatttggccaagctcttgtcaaaccttccttctccttggcctctttgaatgttttgtggttcagtctggactgtaccatagaagctcctaatctctgttatccaaatagaatgtaatacgtgtctgtctgttttcctttttctctatcttcacccaacaaatgattttgtttaccttgttctctctccttttgctcttcttccttctgttacatatcattatctattttatttatttgcataatgtcttttttcaggacttgttcaggtctggagaatttaatgcagtt

SEQ ID NO: 676726 - DNA, 665 bp, Homo sapiens
tgttttagacagagtcttgctctgttgcacaagctggagtgcagtggtgcaatcttggctcactgcaacctctgcctcccgggttcaagcgattctcctgcctcagcctcccaagtagctgggattataggcatatgccaccacatccggctaatttttatttttcggagagatggagtttcaccatgttggccagcctggatacgaacagaatatacagttttaattgcatgtgtgtatatgtttagatactgataagcaaacattgtgttaaaaaccaagtatcgcattattctgttttttaagacctagatttatggaagataaacattagaaaacaatattcagcagtcttgtttctagttttaacattgacctaatgtgaaacagaagaaaatttgggatcaataataacaccactttggtaccaaccacaraacaaaaaaagttgaaaaaaaaaaaacaacccacaccctcaaaagataacaatgtagtatgtacgaaaaaagtgagtagaaataaaataaaatcagatactatgtgggaaagggctttgttgtccatacattgccatagttggcccaggcaaggatagtggcaattgaaacactttctaagatgcacagccctgcaagtcagcttttggctgatttcctgggtattta

SEQ ID NO: 676727 - DNA, 1036 bp, Homo sapiens
tcttctcagacaatagctcgcattacaacacgccaattacatttttatcaggtagttaagttaattacctgtggtaaatgtgttagtgggacaagtgtagattgctgtaaacatttgctgaccactttaaaatgctgctggaccatatgggaggattcaagggtacaatagcatgcagatgtatttacacctgctaatgccatataaaatccaataaagtgttcatggtgaaacctgtgtgtctttttttccaccacaagatggctctgtggtggtttcttctcagaaaccacatgggtggcaggacaaattcatggttgtgaagtagcacacacactctgggcaatggtgttgtsgaaactggacatttggtttgaaccagtgacttcagcctcccttccttgctgagagaaacctctccttcccaccctctcccccaagcacccggtgcctttggcttccctctgtcggaggctaaaacagcatctgggctggccatggtggttcacacctgtaatctcagcactttgggaggtgggcggatcacctgaggtcaggagttcaagatcagcctggccaatgtggcgaaatcccgtctctactaaaaatacagaaattagccaggcgtggtggcacgtgtctgtaatcccagctactcaagagactgaggcaggagaatcacttgaatccaggaggcggaggttgcagtgagccgcgatcacacccctgcactccagccgggtgacagagtgagaccctgtctctcaaacaaaataaaacaaaaccaacgacaaaaaaaacccaccagcatctggatccttctgtgttggcagggactttgcctatttcgttcatcactgtcttcccagtgcttacagcagtgcctgaaactgcgcttagaaatttggggtgtgccagtggaggctgcagtacccatgggagtcagtgtcaattccaggttgtatccacctccatttcagggtgcactgcctgaaattcattccctgcatggaagggtggtcaagctttatataat

SEQ ID NO: 676728 - DNA, 651 bp, Homo sapiens
ttccccactaccacctggaggctcaactggagaggctaaaccagttaggctcaatcaaaatctctgaaatgtgatacaaatcaaagataagaagagtcttctttgcaattctattatatcagggtttcccaagctcacactattgacatttggagccaagtagtttttggagttcttttgttttttctttgtttttggttgggatctgaatcgtgcattgcaggatgtttagcagcctcctgtcctctacccactacatgccaggagacaatcaaaagcatctccagacattgccaaatgttctcctgggggccaaaattgtcctggttgagaaccactgtgttacactaagtgtgtgtgatacttggggtggatcttttyctgctgtgaatttgtggtccaggattatttgcatttatcccaggagatggtttggtttttgctcattgacttttatgtctgtgagaagttatgcagggatgaagatgtcatgacatctcctcaccctccttgcaccccacttctgatgaagttctatccatgcagccagagacttcagaacactgaaaaactcaactcttgagaggcaatactccgcaggacccattatgtccacagaaacctgaagagtgaggagggttgagtgtgaaa

SEQ ID NO: 676729 - DNA, 651 bp, Homo sapiens
ttccccactaccacctggaggctcaactggagaggctaaaccagttaggctcaatcaaaatctctgaaatgtgatacaaatcaaagataagaagagtcttctttgcaattctattatatcagggtttcccaagctcacactattgacatttggagccaagtagtttttggagttcttttgttttttctttgtttttggttgggatctgaatcgtgcattgcaggatgtttagcagcctcctgtcctctacccactacatgccaggagacaatcaaaagcatctccagacattgccaaatgttctcctgggggccaaaattgtcctggttgagaaccactgtgttacactaagtgtgtgtgatacttggggtggatcttttcctgctgtgaatttgtggtccaggattatttgcatttatcccaggagatggtttggtttttgctcattgacttttatgtctgtgagaagttatgcagggatgaagatgtcatgacatctcctcaccctccttgcaccccacttctgatgaagttctatccatgcagccagagacttcagaacactgaaaaactcaactcttgrgaggcaatactccgcaggacccattatgtccacagaaacctgaagagtgaggagggttgagtgtgaaa

SEQ ID NO: 676730 - DNA, 457 bp, Homo sapiens
ctaccattctttacagtctcagttcatatatgaccttggcctcaagaaagatctgacatcagtccccactctcctccaaatgttgaactagatgtcctccattgtgcrctcacatatctcctttatttactgaccagcaccatcaatattctggtttctttgagagaaaaaaatgactgatgcccacagtgaactccatgttcttcaacagaggatgcactgaaatgcccagacacttcttcacctaagctgcgtgtttgttgggatcccattgttagatctcaaacctatttctgccagtcgtacttgttagtttaattaagtaatttaactagatgtcacttgagtgaatagcacatgagtgaaagagttgtgttttctatgaaaacagatggatgctttggaaagataagatgctagaaatcgtacttttgaatgagccataggcaaaactaca

SEQ ID NO: 676731 - DNA, 457 bp, Homo sapiens
ctaccattctttacagtctcagttcatatatgaccttggcctcaagaaagatctgacatcagtccccactctcctccaaatgttgaactagatgtcctccattgtgcactcacatatctcctttatttactgaccagcaccatcaatattctggtttctttgagagaaaaaaatgactgatgcccacagtgaactccatgttcttcaacagaggatgcactgaaatgcccagacacttcttcacctaagctgcgtgtttgttgggatcccattgttagatctcaaacctatttctgccagtcgtacttgttagtttaattragtaatttaactagatgtcacttgagtgaatagcacatgagtgaaagagttgtgttttctatgaaaacagatggatgctttggaaagataagatgctagaaatcgtacttttgaatgagccataggcaaaactaca

SEQ ID NO: 676732 - DNA, 457 bp, Homo sapiens
ctaccattctttacagtctcagttcatatatgaccttggcctcaagaaagatctgacatcagtccccactctcctccaaatgttgaactagatgtcctccattgtgcactcacatatctcctttatttactgaccagcaccatcaatattctggtttctttgagagaaaaaaatgactgatgcccacagtgaactccatgttcttcaacagaggatgcactgaaatgcccagacacttcttcacctaagctgcgtgtttgttgggatcccattgttagatctcaaacctatttctgccagtcgtacttgttagtttaattaagtaatttaactagatgtcacttgagtgaatagcacatgagtgaaagagttgtgttttctatgaaaacagatggatgctttggaaagataagatgctagaaatcgtacttttgaatgagccataggmaaaactaca

SEQ ID NO: 676733 - DNA, 654 bp, Homo sapiens
gatagtaagtaacttgctcttatgttcacctgatttaacctcttctcaagaagactctatatcagaaactttgtttataaaaggaaatattgtaaggacaaatttgtaataataatttactgtttaaattactgtataaaagataaatttgtaagaataaattactgtttccttaggcccaagttcactatctaagccatggtatatcctagggaggcaaattcctccyggtgaataggagtacggtcattcaaaattgcccttgccctactaccaaaagacaatttagaggatttctgggacttataggatattgcaggtggtagatttccaacttttctgaattagctggcaccctcagtgacatgaattaaaatggtattcctgagcttctgccttggatggtcactacagagttagccattgaccaacccaaggcatttcattttgggtcaccccaaaattatactatctttttttttggtttatatataaaagggatgatcaagctcttggagttttatcttagaaacatgatggaaatcagagactcattgggtattacaatattgctccatccagtagctaaatatatccctctttcctgggggcagtagctgtcgccgcatttaatcttgggatcaccttttcatc

SEQ ID NO: 676734 - DNA, 2762 bp, Homo sapiens
tcacctaggggatggtggtggatgaggaacctgatcagatatcaaggatgatcagatatcaaggatgggggtttctggctacactgacttagcagggttattttgcaaaaactggattttataatgaagtgcacagatgggcctgggagaaggctcagaagcctgactaaagtttggccaagcaaagaatctttgtcactcatccctgctccaaattctcatttccaccctcctcataccgacaaacattctcgatattttcaggcttttggggagcctggccaactggtcatgccctcacccttgcctgacttacaatcagctggaggtcatccaggtgagtaagcatgcccaccaggccagtgcggatggtgtcaagyttctgcagcgcctcggcccagtgcacccgctgtgtcaggatgctctggtgggcccgctcctcttcgccatgcacctgttccagtaaccgctgctcctcgctctcgcaaagactcctcaccagactcaaccgctggataaccagttccctcgctgcactggccatgctctaatgagggataaaatgaggagttgggtggtctgtgcaaagccccggtcaggatttaagagggtttaggctcagtggaaaggagtgttgagattgattagcaatgtctgccacgggcttagtaatggaaataatagcatgtaagccttttactttgacatctctgccccaagacttcccaaatatggtttagggtaaagaaatttgagatgcagacacataggccatatctcagggagccatgatcacataatggaagacctgggcaggacttagagcccaactagaatactctgcttaatcacagttgggaatacaaggtcaaaggatcaaggtcagagaatcacagaattgcagagcagagggcctaaaaagtcatccccatcagcaggatccataccagcagtggtacagttgatatttcaccatgtttgagggaaaaaactgatgacttcctaaaactgtccatttcaactggttatgtggtagaatttttatctgccacagaagaggcctgaaatcaattctcagacaattaacaggtgtcttcttgtaattcttagcacagtgcctggcatgcagtaggtactcaaatattgactgaatgggaaatttttttttttaaattttttttaatagagatggagtttcaccatgttgcccaagctggtctcaaactcctaggctcaataaataagcccaactcagccccacaaagcgctgggattataggcatgagccactgtgcccacccaggaaattttttctgacttagtaaaagatctcttcatagtgctcacatggcaattcagtagcaaagctgagactcgaacccaattctcttgactctcagtccagtcccattcccctacaccagatgccacctggcaaccaatccttcccaaaggcacctgttgcataaggcagctgcacttgtactcttgccagacaagtgggaatagaactgcctccttcatgtcagaaagtcagggacagccagcagctttccctatgccctgtcccttaagacctgctttgtacagtgcacagggcaatcattcctattttacagaaaacactgagacccacagtttgccttacagggaggagagactagctaagtgaatggcaagtgaacccagaaggtaagactccaagtttatagtgtgctcttgaggcaacataacatagtggtcaggaaattaagctttagaggtagtgtgtagatttaaatcttaactgctccgctcattagctgtggaacttagaacatattccttatcttccctatgcctctattttctaatctgtaaaatgaggataataatagtacctacctcataaggctatagtgagggttaaatgtgttaatatatataaagtaagtagaacaaagcctgctacattatgtgttcaataacattcattcactattgctcttctttatcttttttttttcttttcttttcttttctttaagagacacagtcttgctctgatgcccaggctgaaatgcagtggcacaatcatagctcactgcagctttgaactcctgggctcaagcgatcctcctgcctcagtcttccaaagtgctgggattacagtcatgagcaactgcatccagcccacgattattctcctgtttatcccactttaatgccttacccacagggtgagcccctgaaaccatggttgtactgtgtgatcctggatcaaaacagatcctcacccaagatgaatcagattctgattcctgcctaaaagactctagtcattctcaacaagtttgttgagccattcccagaaaaggagagcaaagaaaagaaaaacttccctttccaaacacatgacagagagtagacaaaccaaaaaccctctcagaataaagtagagaaatgctggaaaaatagcccaagcatccttttaaaagtgtggttgtggctggacacggtggctcatacctgtaatcccagcactttgggaggctgaggcaggtggatcacccaaggtcaggagtttaagaccaacctggccaataaggtgaaaccccgcctctactaaaatacaaaaattagctgggcctggtggtgggagcctgtaatcccagttactcaggaggctgaggcaggagaattgcttgaagctgggaggtggaggctgcagtgagctgagatcgcaccactgcactccagctgaggtgacagggcaagatctg

SEQ ID NO: 676735 - DNA, 603 bp, Homo sapiens
ttatgttaggcagaaaaagaaaccaagttgattaaaamaaatgtgtttttaccaaatcttatataggaagattttaaacatttgcaaagtatttaatgtttgtgtttgtcagccgtaattacattatcaccagatcaatgcatttttacttcgcttgataataactatagagtgcagcaagaatttctgtgtggaggaaatcttggtaaaatcacttccttcccacttagttgggtagatagttttaatatttaaaatgatataatagtattacagattattttgaaataaaaagcatctttagttccactactttcaaatgactgtatttatttttatatagtctttctgtctttgttgacacatgtagttttacacagttgctctcacagtgcttataccattttaaatttatttttctcagccaacataatattaacattcttccgtgttgctacattgtcatctgatcatttgaaaggctacacagtattccactttgttaatgcattatcacttagcctattattatttgtcaggtcttatattattatacattgagcatttttatatagtagttctttgcttctgaattatttaccg

SEQ ID NO: 676736 - DNA, 671 bp, Homo sapiens
ttggccactaacttcgattattcttgtaccaaattcaacaccaattgtgtgaggacaatcagccataactgttaaggaggaaaaaaagtaatagcccaattttcagaaaacttcaaattaagcctagagggggaaaatccactaaataagcaaatggcttactaatacttacaggctataaatagactaaagctaccgctaaaaaaaaaattaacaaacacccagaagtaagaagtcagggaaatgtgactgtactagaatcggggtcagcaaacttctagaaaggaccaagcagaaaatattttaagttttgcaggtcaaaaggtytttgtcacaaactactcaactctgccactgaggcataaaagcagccagagacaatatgtaaaacaggcatggttgtattccaataaattttattcacaaaaacaggcagtgactggatttgccccactggccaccgtttgctgacccctcgactaaaataatctgctaagtaaaaataaggattttaattaattcttcacaatatcaacattataccatttagccttcttacaatcattatctataacagatcaatcaatggtcttggtaccctaggagttgttagtcaaacagattcttatcccagaaaatatcagtgtctcaaagaaaatcagcatgtttta

SEQ ID NO: 676737 - DNA, 3581 bp, Homo sapiens
ttaatatattaatattatttcttaaataaccatatttgttctataatttttcctttgctctagttttcttatgctgtacataactgtttctttattgaacaggatagtccacagtagctgcactgttcagatccaaagtttccaaggtaatgcagcaggaaacagaaaaaaaaacaggtagcatatcagcaattaataatacctgataagaaatgacttcattcattttggctcatcacacatcagtagtaactagtcttataacctttacctaattacaaagtattctgaaaaatgcagggaagcacattaaatatgagatgaacaacactttatcagccatagtcccttacacagaataggcaagtcagtaaaatatctttgataaaaatatcgtgtgaataagagtgtatgacattataacaaaaggcaaagatactatgttaatgaagaaatcctagagacttaaaagaaagctagttaatatgcaacagatttgaaacaaatgaaaggataaatgcaaattcaaaatagggcacgataagctaatctcaatatttagaaaaatttgacaaataattgctccacattgtgaacactatctcttattctgaagagaatacccaagattttcagagtcacttggtaaaaaatctcaaaggttttccagatattctatcaccacatatcataacttcaagtactcttctcctcaaagggaaagtaacaaagcagaattattcattggggattatggtgataaaatattcacaattcctattaaagcaataatgtgccagtttttaaattactgaactattctttttgttatttccaagggaatctgattagcaaagatagaacatactaacatggttttgctttgggattcatcgcatgtctgattaaagaatatttaaaaatacatttcagatatcttctcctcacttgctataaagaggctgaaatgacaattaggtagtctcatggttattaaattcagaggacatgaaggtaccttgtaacttgggaaattgaaccagaaatgcacataataacgtagacagtaaaaagaaataaaaggatcagacttatagttttaaaatagatccagttctgcatgcatagaattatcccccaaagcattctgtatataattttaagcatacaaatcaccttggtcaagcaacatgataatgcaagtacaagcctctacttagaaatttagttacttgccccagtaagaagtggtctgaaaatatctatgttgccatgtagaaaaagtaaattgtctatttttttcagattctttgaaccttgcttattgatccagccaatttacataaagaacctattttaatataagcaacccagttctataaacctgtagttaacaataattcaaagatgtttttatctagtttttctatgtttccatagttcaatacaattatatgaaataaatatcccatgctgctgtaacccaatgtttcactgcagttccaaattattgagcatagggtgaattttcaaatttgaaatttttaatgactgtttagtgagaggtcacaaattacatcagtactgttttcaagtagtcatatataccgccccccaccaaaattaactgattacagaagaagtatattttacttatgaattagaagaggttcatttttttctaatcaagtgggtcctttccaatcatagagaacatggagctagcaaatgtgtggaaaactgcatcacgcttcatattaccacctcccacttcttttaaaatgaagggagaggacactaaacgtaggcaggattaggttctccaattcaattccaattcatatattaatctgatgatctgtgggttcctgaggcatctgagtgtggctcctatgatcaggaaagagacagttattccgtgggcaagttctggcgggtggaaaagaacaagcacggaccagagtgcttgtctttttgcattagcctttccctgaaagagtatcaagggaagagccaactggactagttatgttgtttatcaagagcagccaaatatttatatgcacatttaacccctagataatgcactatcacttaaatcaaatacaattataattcttacattgcacctgcctgcaaattcaaacttctgtattttgacacaattgcctctacttgtttatgcattaaggcctatagcatcaactaattcaagagtcattttgatgaccagaaagggaaattttttaataactaataactatgttggtatttgcaaagaggaccctcaaaagggctttcctaaggattcctacttatacataacttatacataactactttatctatctcacagctaaagaggcatgcatagtatttgtactaaattaaggcctgaaaatgttgatataaacagatatttcgggggatgatctgaccaaacrccaaccaggtagatatgcctgtgattgatgtgaactcaacaacctaaaggaacatgatgataatgtaaataaatgaagtggatagggaataaaatatggtaaaatgaagagtgtagtttttggcttcaggagtcagcagctgctaagctccagctaattgttgacatgttgaaacatgggtttggtattgacaaatcttctgatttttacacaaactgagaaatatggcaaggcgtaaaggtggtatgtctcaagaaaggtaagaagaacagatattggaaagagaaagagtgaaaaaagagaaattgaggcaaagatcatcaaggtgcctatagctggggaaaaggctcaggttcctgcaataagagacacaattttctattttcctttgacttcacacagttattgaagggcattagcttaactaatgatccagtgtccagttctagctacttatttcaaacacttgtatgctgtttcacaaggtgatgattcaattaatgatgagtaaatatataagtgaggccaacaaagctcatatactgaaagttaagttgtattcaaatacaaaataatctgaatgttagattccaagaactgtccaagtatagagaacaaggaaagttacttgaaaacataaataggttttcagtagaggctaaattcagatcaattcatgcaatgaaattttttatttgactctataaagttgattacttttattggttttactcacagtctgaatagattaacctcacttttaacccattagatatattatgctttatgttgaatttttgtaaacttcatcaattttttttttttttttaagtataaagacaggccgggcacagtgactcaagctgtaatcctagcactttgggaggccaaggctggcggatcacttgaggtcaggagtttgagaccagtctggttggcatggtgaaaccctgtctctactaaaaatacaaaaattagctgggcatggtggtgggtgactataacccaagctactcaggaggttgaggcaggagaattgcttgaactcggaagccaagatcgcaccactgcactccaacctgggtgatagagcaagactacatctcaataataataattaataataataataataat

SEQ ID NO: 676738 - DNA, 3581 bp, Homo sapiens
ttaatatattaatattatttcttaaataaccatatttgttctataatttttcctttgctctagttttcttatgctgtacataactgtttctttattgaacaggatagtccacagtagctgcactgttcagatccaaagtttccaaggtaatgcagcaggaaacagaaaaaaaaacaggtagcatatcagcaattaataatacctgataagaaatgacttcattcattttggctcatcacacatcagtagtaactagtcttataacctttacctaattacaaagtattctgaaaaatgcagggaagcacattaaatatgagatgaacaacactttatcagccatagtcccttacacagaataggcaagtcagtaaaatatctttgataaaaatatcgtgtgaataagagtgtatgacattataacaaaaggcaaagatactatgttaatgaagaaatcctagagacttaaaagaaagctagttaatatgcaacagatttgaaacaaatgaaaggataaatgcaaattcaaaatagggcacgataagctaatctcaatatttagaaaaatttgacaaataattgctccacattgtgaacactatctcttattctgaagagaatacccaagattttcagagtcacttggtaaaaaatctcaaaggttttccagatattctatcaccacatatcataacttcaagtactcttctcctcaaagggaaagtaacaaagcagaattattcattggggattatggtgataaaatattcacaattcctattaaagcaataatgtgccagtttttaaattactgaactattctttttgttatttccaagggaatctgattagcaaagatagaacatactaacatggttttgctttgggattcatcgcatgtctgattaaagaatatttaaaaatacatttcagatatcttctcctcacttgctataaagaggctgaaatgacaattaggtagtctcatggttattaaattcagaggacatgaaggtaccttgtaacttgggaaattgaaccagaaatgcacataataacgtagacagtaaaaagaaataaaaggatcagacttatagttttaaaatagatccagttctgcatgcatagaattatcccccaaagcattctgtatataattttaagcatacaaatcaccttggtcaagcaacatgataatgcaagtacaagcctctacttagaaatttagttacttgccccagtaagaagtggtctgaaaatatctatgttgccatgtagaaaaagtaaattgtctatttttttcagattctttgaaccttgcttattgatccagccaatttacataaagaacctattttaatataagcaacccagttctataaacctgtagttaacaataattcaaagatgtttttatctagtttttctatgtttccatagttcaatacaattatatgaaataaatatcccatgctgctgtaacccaatgtttcactgcagttccaaattattgagcatagggtgaattttcaaatttgaaatttttaatgactgtttagtgagaggtcacaaattacatcagtactgttttcaagtagtcatatataccgccccccaccaaaattaactgattacagaagaagtatattttacttatgaattagaagaggttcatttttttctaatcaagtgggtcctttccaatcatagagaacatggagctagcaaatgtgtggaaaactgcatcacgcttcatattaccacctcccacttcttttaaaatgaagggagaggacactaaacgtaggcaggattaggttctccaattcaattccaattcatatattaatctgatgatctgtgggttcctgaggcatctgagtgtggctcctatgatcaggaaagagacagttattccgtgggcaagttctggcgggtggaaaagaacaagcacggaccagagtgcttgtctttttgcattagcctttccctgaaagagtatcaagggaagagccaactggactagttatgttgtttatcaagagcagccaaatatttatatgcacatttaacccctagataatgcactatcacttaaatcaaatacaattataattcttacattgcacctgcctgcaaattcaaacttctgtattttgacacaattgcctctacttgtttatgcattaaggcctatagcatcaactaattcaagagtcattttgatgaccagaaagggaaattttttaataactaataactatgttggtatttgcaaagaggaccctcaaaagggctttcctaaggattcctacttatacataacttatacataactactttatctatctcacagctaaagaggcatgcatagtatttgtactaaattaaggcctgaaaatgttgatataaacagatatttcgggggatgatctgaccaaacaccaaccaggtagatatgcctgtgattgatgtgaactcaacaacctaaaggaacatgatgataatgtaaataaatgaagtggatagggaataaaatatggtaaaatgaagagtgtagtttttggcttcaggagtcagcagctgctaagctccagctaattgttgacatgttgaaacatgggtttggtattgacaaatcttctgatttttacacaaactgagaaatatggcaaggcgtaaaggtggtatgtctcaagaaaggtaagaagaacagatattggaaagagaaagagtgaaaaaagagaaattgaggcaaagatcatcaaggtgcctatagctggggaaaaggctcaggttcctgcaataagagacacaattttctattttcctttgacttcacacagttattgaagggcattagcttaactaatgatccagtgtccagttctagctacttatttcaaacacttgtatgctgtttcacaaggtgatgattcaattaatgatgagtaaatatataagtgaggccaacaaagctcatatactgaaagttaagttgtattcaaatacaaaataatctgaatgttagattccaagaactgtccaagtatagagaacaaggaaagttacttgaaaacataaataggttttcagtagaggctaaattcagatcaattcatgcaatgaaattttttatttgactctataaagttgattacttttattggttttactcacagtctgaatagattaacctcacttttaacccattagatatattatgctttatgttgaatttttgtaaacttcatcawttttttttttttttttaagtataaagacaggccgggcacagtgactcaagctgtaatcctagcactttgggaggccaaggctggcggatcacttgaggtcaggagtttgagaccagtctggttggcatggtgaaaccctgtctctactaaaaatacaaaaattagctgggcatggtggtgggtgactataacccaagctactcaggaggttgaggcaggagaattgcttgaactcggaagccaagatcgcaccactgcactccaacctgggtgatagagcaagactacatctcaataataataattaataataataataataat

SEQ ID NO: 676739 - DNA, 3581 bp, Homo sapiens
ttaatatattaatattatttcttaaataaccatatttgttctataatttttcctttgctctagttttcttatgctgtacataactgtttctttattgaacaggatagtccacagtagctgcactgttcagatccaaagtttccaaggtaatgcagcaggaaacagaaaaaaaaacaggtagcatatcagcaattaataatacctgataagaaatgacttcattcattttggctcatcacacatcagtagtaactagtcttataacctttacctaattacaaagtattctgaaaaatgcagggaagcacattaaatatgagatgaacaacactttatcagccatagtcccttacacagaataggcaagtcagtaaaatatctttgataaaaatatcgtgtgaataagagtgtatgacattataacaaaaggcaaagatactatgttaatgaagaaatcctagagacttaaaagaaagctagttaatatgcaacagatttgaaacaaatgaaaggataaatgcaaattcaaaatagggcacgataagctaatctcaatatttagaaaaatttgacaaataattgctccacattgtgaacactatctcttattctgaagagaatacccaagattttcagagtcacttggtaaaaaatctcaaaggttttccagatattctatcaccacatatcataacttcaagtactcttctcctcaaagggaaagtaacaaagcagaattattcattggggattatggtgataaaatattcacaattcctattaaagcaataatgtgccagtttttaaattactgaactattctttttgttatttccaagggaatctgattagcaaagatagaacatactaacatggttttgctttgggattcatcgcatgtctgattaaagaatatttaaaaatacatttcagatatcttctcctcacttgctataaagaggctgaaatgacaattaggtagtctcatggttattaaattcagaggacatgaaggtaccttgtaacttgggaaattgaaccagaaatgcacataataacgtagacagtaaaaagaaataaaaggatcagacttatagttttaaaatagatccagttctgcatgcatagaattatcccccaaagcattctgtatataattttaagcatacaaatcaccttggtcaagcaacatgataatgcaagtacaagcctctacttagaaatttagttacttgccccagtaagaagtggtctgaaaatatctatgttgccatgtagaaaaagtaaattgtctatttttttcagattctttgaaccttgcttattgatccagccaatttacataaagaacctattttaatataagcaacccagttctataaacctgtagttaacaataattcaaagatgtttttatctagtttttctatgtttccatagttcaatacaattatatgaaataaatatcccatgctgctgtaacccaatgtttcactgcagttccaaattattgagcatagggtgaattttcaaatttgaaatttttaatgactgtttagtgagaggtcacaaattacatcagtactgttttcaagtagtcatatataccgccccccaccaaaattaactgattacagaagaagtatattttacttatgaattagaagaggttcatttttttctaatcaagtgggtcctttccaatcatagagaacatggagctagcaaatgtgtggaaaactgcatcacgcttcatattaccacctcccacttcttttaaaatgaagggagaggacactaaacgtaggcaggattaggttctccaattcaattccaattcatatattaatctgatgatctgtgggttcctgaggcatctgagtgtggctcctatgatcaggaaagagacagttattccgtgggcaagttctggcgggtggaaaagaacaagcacggaccagagtgcttgtctttttgcattagcctttccctgaaagagtatcaagggaagagccaactggactagttatgttgtttatcaagagcagccaaatatttatatgcacatttaacccctagataatgcactatcacttaaatcaaatacaattataattcttacattgcacctgcctgcaaattcaaacttctgtattttgacacaattgcctctacttgtttatgcattaaggcctatagcatcaactaattcaagagtcattttgatgaccagaaagggaaattttttaataactaataactatgttggtatttgcaaagaggaccctcaaaagggctttcctaaggattcctacttatacataacttatacataactactttatctatctcacagctaaagaggcatgcatagtatttgtactaaattaaggcctgaaaatgttgatataaacagatatttcgggggatgatctgaccaaacaccaaccaggtagatatgcctgtgattgatgtgaactcaacaacctaaaggaacatgatgataatgtaaataaatgaagtggatagggaataaaatatggtaaaatgaagagtgtagtttttggcttcaggagtcagcagctgctaagctccagctaattgttgacatgttgaaacatgggtttggtattgacaaatcttctgatttttacacaaactgagaaatatggcaaggcgtaaaggtggtatgtctcaagaaaggtaagaagaacagatattggaaagagaaagagtgaaaaaagagaaattgaggcaaagatcatcaaggtgcctatagctggggaaaaggctcaggttcctgcaataagagacacaattttctattttcctttgacttcacacagttattgaagggcattagcttaactaatgatccagtgtccagttctagctacttatttcaaacacttgtatgctgtttcacaaggtgatgattcaattaatgatgagtaaatatataagtgaggccaacaaagctcatatactgaaagttaagttgtattcaaatacaaaataatctgaatgttagattccaagaactgtccaagtatagagaacaaggaaagttacttgaaaacataaataggttttcagtagaggctaaattcagatcaattcatgcaatgaaattttttatttgactctataaagttgattacttttattggttttactcacagtctgaatagattaacctcacttttaacccattagatatattatgctttatgttgaatttttgtaaacttcatcaattttttttttttttttaagtataaagacaggccgggcacagtgactcaagctgtaatcctagcactttgggaggccaaggctggcggatcacttgaggtcaggagtttgagaccagtctggttgrcatggtgaaaccctgtctctactaaaaatacaaaaattagctgggcatggtggtgggtgactataacccaagctactcaggaggttgaggcaggagaattgcttgaactcggaagccaagatcgcaccactgcactccaacctgggtgatagagcaagactacatctcaataataataattaataataataataataat

SEQ ID NO: 676740 - DNA, 1470 bp, Homo sapiens
atgtttaaaaaatctacctatgcaaacatactttatattttctggaattctaatatcacttgcagtttagaataaaacataatcttatgaaactatagcacatgaatagttttttgatattaaattattaaattactgtatcatatattcttatataatttttcagtctttattttgtcctcctcatactttatgtgtcaattttcaattcctaaacattctgaacctcctagttgattgattcatttattaaggcatttaaaacatgaattgaagcctcaaaatgaaccaggtgtcatgttcattcctggacataacaaggtcaataagacatatattttgctttcaaggaacacaggttcttgttttggatgacattaagagctagggaatatgttttgcttctaattcttttcatagacttctaccaatttttacatggaaacatttacttaagcattttgagcttagaatcctattaatttcaaatactatcactgcttgtactgttttaaattgtgtttcaatataattgcttaaattccatatattttctgtgttgtcatatatgaaagaggttaaatgattgatattggttattagaggactgcaaatcaaaaccgcaatgaaataccatctcacatcagttagaatggcgatcattaaaaagtcaggaaacaacagatgctggagaggatgtggagaaataggaatgcttttacactgttggtgggagtgtaaattacttcaagcatgtggaagacatgtggcgattgttcaaggatccagaaccagaaataccatttgactcagcaatcccattactgggattatacccaaaggattacaaatcattctactataaagacatatgcacacgtatgtgttttgcaacactgttcacaatagcaaagacttggaaccaacacaaatgtccatcaatgatagactggaaaaagaaaatgtggcacatatacaccrtggaatactgtgtagccacaaaaaggatgagttcatgtcctttgcagggacatggatgaagctagaaaccatcattctcagcaaactaacataagaacagaaaaccaaacaccgcatgttctcactcataagtgggagtagaacaatgagaacaaatgggcaggtggagaggaacctcacacactggggcatgtggggggtggggggctaggggagggataggattaggagaaatatctaatgtagatgacaggttgatgggtgcagcaaaccacgatggcatgtgtatacctatgtaacaaacctgccatatatcccagaacttaaagtataataacaaaatttaaaaaaagaaaaaatgttcactataaatttatgaaaatatatttccatgtgtaaattgaggttgtctgaaatattatttaaaatttataattttgattattttgaattttgataattttgaatttgcccagtaaatattgacca

SEQ ID NO: 676741 - DNA, 614 bp, Homo sapiens
ttgccttgtctcagataaaactctggactgtgaacttttgagttaatgctgaaacgagttaacactttgggggactgtttaaaaggcgtgattggttttgaagtgtgtggacataagatgtgggaggggccagggtgaaatgataaggtttggctgtgtccccacccaaatctcatcttgaattgccatgtgttgtttgagggacccagtgggaggtaattgaatcatgggggcaggtctttcccatgctgctctggtgacagtgaataagtctcatgagacctgatggttttataaaggggactttccctgaacaagctctcttctcttatttgctgccatgtgagatttgcctttaaccttccaacacaattgtgaggcatccccagccacctggaactgtaagtccattaaacctgtttcctttgtaaattgcctagtcttgggtatatttttatcagcagcgtgaaaacagaccaatacagctagggtggttaagatagagatatgggcaagatagaaatccttaacaacaaacacatacatcaaattgtttcttccatctaggatggttcttttaacayacaggtaatcactttgtgtgtttcattaag

SEQ ID NO: 676742 - DNA, 1309 bp, Homo sapiens
ttttttttaacttgtgttcataaggtagattcattcagcaaaagagtaactggtactagaagagaagtaagaaattcatggctgagttgtagttaaactatatccgtctgaaactctttctctctgaggaagcttttaaaattattttttcatttttccagaccttttttcttgatctctgtattttcctctaaagcraagactatcaatgacattcttaaactttgaaagatttaggatgaagggaatatttacctatattttagaaatagtgcaattttggagactgagaagtctctcaggttattatcatcaatgtagaacttatcagagatgactttggctttctaaagcatctaaaataagctatagtatgcccatgttcctgcagcattggacttacataatttcaaatgttaataatacctttcatggatgcctttacaggtatgcataaacaaaatatctcattttttaaaatcattctgccctccatatgaaactattggtctattagatatatttttattttttaactgttgatttgaaattattatagatttacagaaggttgcaaatatagtacagagaggtctctcatactcttcacctagtttccccagtggttacattttttttgtagctacagtaaaacattaaaaccaagaaattgacattgaaaaaatgtgtatgcatacatctgtcattttattacgtgtaaattcttgtgaccactaccactatcaaaatatctaacacttctagtgaagtgtaaaaatattatctcattggaagtttctttacccatccttgtttatataattttttaaatttttcatttaggtattgataaccatttcgatgttacagtttttgattcaaaagtcaaacataatttagaaaactcaagaagaaaaatctgttgtacttactcatattgttgctctttctgttactcttacatttttctgatgatttcaggccccttattcatttcatgtttcaagaactttttgcttttctttagggcaggtctgtttgcaaccaattcttaatttttcttctgagaatttatttaattctccttcatttctaaaggacatttttgcctaatacagaattctggattgacagttcttgttttgcagtacttgagaaatatatcacttccttctggccaccattatttctgacaggaaatcattgtcattcaaattgtttttcttctggagagatgaagcattgttttacctcactgtttccaagattttttcttctgctgaagttttctgaaattgacctgtttctt

SEQ ID NO: 676743 - DNA, 1309 bp, Homo sapiens
ttttttttaacttgtgttcataaggtagattcattcagcaaaagagtaactggtactagaagagaagtaagaaattcatggctgagttgtagttaaactatatccgtctgaaactctttctctctgaggaagcttttaaaattattttttcatttttccagaccttttttcttgatctctgtattttcctctaaagcaaagactatcaatgacattcttaaactttgaaagatttaggatgaagggaatatttacytatattttagaaatagtgcaattttggagactgagaagtctctcaggttattatcatcaatgtagaacttatcagagatgactttggctttctaaagcatctaaaataagctatagtatgcccatgttcctgcagcattggacttacataatttcaaatgttaataatacctttcatggatgcctttacaggtatgcataaacaaaatatctcattttttaaaatcattctgccctccatatgaaactattggtctattagatatatttttattttttaactgttgatttgaaattattatagatttacagaaggttgcaaatatagtacagagaggtctctcatactcttcacctagtttccccagtggttacattttttttgtagctacagtaaaacattaaaaccaagaaattgacattgaaaaaatgtgtatgcatacatctgtcattttattacgtgtaaattcttgtgaccactaccactatcaaaatatctaacacttctagtgaagtgtaaaaatattatctcattggaagtttctttacccatccttgtttatataattttttaaatttttcatttaggtattgataaccatttcgatgttacagtttttgattcaaaagtcaaacataatttagaaaactcaagaagaaaaatctgttgtacttactcatattgttgctctttctgttactcttacatttttctgatgatttcaggccccttattcatttcatgtttcaagaactttttgcttttctttagggcaggtctgtttgcaaccaattcttaatttttcttctgagaatttatttaattctccttcatttctaaaggacatttttgcctaatacagaattctggattgacagttcttgttttgcagtacttgagaaatatatcacttccttctggccaccattatttctgacaggaaatcattgtcattcaaattgtttttcttctggagagatgaagcattgttttacctcactgtttccaagattttttcttctgctgaagttttctgaaattgacctgtttctt

SEQ ID NO: 676744 - DNA, 627 bp, Homo sapiens
ataggatatattttagctgatcaggggaattctattatctcttttctgtagcataaatattacattccattcttaaaatattgatttgattggtaatgcaaaaagctttagcactccagaaaaaaatatattttcatttataactttcaatgacagagttcttattacacttcaattctctaagtatattgaataaagagtagagaattgttcttggagttggacctatattgattctagtccctgctcatttatttattagctctgtgacatttatctctttaattctgagtttcctcatctgaaaatgagaataataatgatacctatattaccacattcctatgagaatgaaatgaactggtgcccacaaacttcttacttagctcagttcctggcaccaaaatagtgcccagtgaatattaactattataattatcatctagtccatgctctggactaaatactttggggaatacaaaggtgagcaaagttaactctgatggagtagatgagctgtatttatgctatagtttgaatatttgtcccctccaaatcycgcgttgaaatttgatccccagtggttggaagaggggcctaatgggaggtgtttgggtcatgggagca

SEQ ID NO: 676745 - DNA, 675 bp, Homo sapiens
gttaggcccagattcagcaatctgtggtgccagcagctgcacccaggctgtcaagaccagccatgctggggcctgaggggacaaggaaggagagacgcagttgggacagctggggacatctgaaggggcacgttctggtttggagaagtatgttttggtcacataggagatctgctcaattggggaaaaaccctgtgtgtgtccaggggcgaggggtaccatgtctcagcatggcgcaacacagagggaggtgacaggcggtgtgaacaggcggcagcttctcattctcctcgtatactgtttctgtaaattcaaaattacattcaaattaaactttttttttttttggcgcaatttcggctcactgcaacctctgactccctggttcaagtgattctmctgcctcaacctcccgagtagctgggattacagatgggcgccaccacgcccagctaatttttgtatttttagtagagaaggggtttcaccatgttggatagggtggtctcgatctcttgacctcgtgatccgctcgccttggcctcccaaagtgctgggattacaggcataagccaccacacccagcctcaaattaaactgtaaaaacacgactgaggctcagagagtttaaaagggatttctcaaagtcatatagccaatcaacagctaagtggg

SEQ ID NO: 676746 - DNA, 675 bp, Homo sapiens
gttaggcccagattcagcaatctgtggtgccagcagctgcacccaggctgtcaagaccagccatgctggggcctgaggggacaaggaaggagagacgcagttgggacagctggggacatctgaaggggcacgttctggtttggagaagtatgttttggtcacataggagatctgctcaattggggaaaaaccctgtgtgtgtccaggggcgaggggtaccatgtctcagcatggcgcaacacagagggaggtgacaggcggtgtgaacaggcggcagcttctcattctcctcgtatactgtttctgtaaattcaaaattacattcaaattaaactttttttttttttggcgcaatttcggctcactgcaacctctgactccctggttcaagtgattctcctgcctcaacctcccgagtagctgggattacagatgsgcgccaccacgcccagctaatttttgtatttttagtagagaaggggtttcaccatgttggatagggtggtctcgatctcttgacctcgtgatccgctcgccttggcctcccaaagtgctgggattacaggcataagccaccacacccagcctcaaattaaactgtaaaaacacgactgaggctcagagagtttaaaagggatttctcaaagtcatatagccaatcaacagctaagtggg

SEQ ID NO: 676747 - DNA, 1346 bp, Homo sapiens
attctgttagcgccaccttcaagacacatttagactctactccttccctctgtcaccaccactgcctggttccaagccacctgtgctgcagcactggcccctaactggccagtcagcagccacacttgcccaccgtccaaccactctcaccaaggacgccgtaaaacatcagaccgcaccacgcttcagcacaaaaccctctgatggcttcccgcggcacttggaacaaaagccaaagtcactgccatgccctacaaaaccctacaggaacccatcccccagactcggcctgtctggaagcacttcccgcactcatctgcgcagcctgctctgcctgtgagaactgatcatccacttcccatcgagttacagccccatcccatcgccctcactgcctggccttcacgacatgctgttctatttttcccctggcagaacatgaacctgaagaggtggcgctctccagcctgccttctgaggccccctcaacgccccgcggcatgtctggcgctcaatctgcaggacaaatgggcccaagtttccaagccaggcccacactgtagatgccacccactccctagggtgcttcgygggacttctgaccagctgttaggtgtgaaaaataaaacacaccacatggtccctggcctcaaacaatgaagtgaaggaaagccagtgtgagcacgttctagccatacctcaggctgctaagcaaggacctcaggctgccaggccagcgggaccagcaagcagagcaccgtgaggtatgctgaatgtggacacgggtctgccggggggggcggtgcagcccagcctttgtggggacagggcagcaaagccaagaggaaacaggctcgacctcagccaactcctcgggtcgggatccccaagaggcttcccacacgcaacctgctgggactccggcacccatcatgcagaaacgcaagcaggaccctagaacagctaccctgagcctcagagtccagctctgccctcaggttgagagccctcagccctgtcctttctagattggaggactgtcctcccctcattcattcagcctctcacctggtcttgagttcagaagagatgttgtcgaagaacgacttggatttgtcatagtagcagttgggccccagaaggtcttcctcagcgggcgcttcggcactctgggtcaccacagccaggtccttctcttcccccttctcagccttgtcatctacaaaaagaagcagaacacgtggagatggaggaggggcagagcgcacagccttttagcagggtggtccctccgggctcactcggaagccaccctcaagctaagacatcaactatgccttgtgcaa

SEQ ID NO: 676748 - DNA, 641 bp, Homo sapiens
ctgatgtgttcctggcgccaccaagaccgaaaggagacagggtccctgccctggggcatcccaacaaagaagggagagtttgtgaagcttaaaaatgtcccagatggtaaaacagttacacgtcatacctcaaggctgctctatacttttattatagttttattcttaaggctgtttatttattttctgatgtaaaaggtaatagaaagtttataaactattcctagaatatagacaaaaaataaaattcgacttygtccagcatttttaatgcacatgtaagaactctacttggtttatggccgggcgcggtggctcacgcctgtaatcccagcactttgggaggctgaggcggacggatcatgaggtcaggagatcgagaccatcctggctaacatggtgaaaccccatctcttgctaaaaatacaaaaaattagccgggtgtggtaagcaggcgcctgtagtcccagctactcgggaggctgaggcaggagaatggcgtgaacccgggagacggagcttgcagtgagctgagatcgcaccactgcactccagcctgggcaacagagtgagactccgtctcaaaaaaaaataaaaataaaaataaaaataaataaaataaaataaaaaactctacttgg

SEQ ID NO: 676749 - DNA, 641 bp, Homo sapiens
ctgatgtgttcctggcgccaccaagaccgaaaggagacagggtccctgccctggggcatcccaacaaagaagggagagtttgtgaagcttaaaaatgtcccagatggtaaaacagttacacgtcatacctcaaggctgctctatacttttattatagttttattcttaaggctgtttatttattttctgatgtaaaaggtaatagaaagtttataaactattcctagaatatagacaaaaaataaaattcgacttcgtccagcatttttaatgcacatgtaagaactctacttggtttatggccgggcgcggtggctcacgcctgtaatcccagcactttgggaggctgaggcggacggatcatgaggtcaggagatcgagaccatcctggctaacayggtgaaaccccatctcttgctaaaaatacaaaaaattagccgggtgtggtaagcaggcgcctgtagtcccagctactcgggaggctgaggcaggagaatggcgtgaacccgggagacggagcttgcagtgagctgagatcgcaccactgcactccagcctgggcaacagagtgagactccgtctcaaaaaaaaataaaaataaaaataaaaataaataaaataaaataaaaaactctacttgg

SEQ ID NO: 676750 - DNA, 607 bp, Homo sapiens
actaaaaatgaaatcagactacaacattcacttcttacgtggcttttcagtatacttaggagaaagcctacaattcttccccttacctgtatgtaatatttccgtctgctttgatccctacctacaatctaggttcactttcagccctactcttccccaccttgctcattaagcttcagctaaactaaactaagccttctttcaggctgyggaagagttcaagctcctcatctcaggatcttcctctgcctgaaaagactccttttcacgcttccgtctattctctgcttaaatgtctctctttcaaagaaaagatcctcctgcatcaaacactccactaatccatcgctggtctcaactaggtgtctcctgctacaatctcagatcatactcatttcctcagctgcatttatccaatttgtagttatgtttgttgatttgtaatctgtaacccccagaagactgcaaggtccatgagggaaaagacctatgctcttattgccttactataaccttgaacttaataaaagcctggccaataaatatttactgaatgaatatttttctttaacaaataacctttctgagaggatgccctttttttttt

SEQ ID NO: 676751 - DNA, 607 bp, Homo sapiens
actaaaaatgaaatcagactacaacattcacttcttacgtggcttttcagtatacttaggagaaagcctacaattcttccccttacctgtatgtaatatttccgtctgctttgatccctacctacaatctaggttcactttcagccctactcttccccaccttgctcattaagcttcagctaaactaaactaagccttctttcaggctgtggaagagttcaagctcctcatctcaggatcttcctctgcctgaaaagactccttttcacgcttccgtctattctctgcttaaatgtctctctytcaaagaaaagatcctcctgcatcaaacactccactaatccatcgctggtctcaactaggtgtctcctgctacaatctcagatcatactcatttcctcagctgcatttatccaatttgtagttatgtttgttgatttgtaatctgtaacccccagaagactgcaaggtccatgagggaaaagacctatgctcttattgccttactataaccttgaacttaataaaagcctggccaataaatatttactgaatgaatatttttctttaacaaataacctttctgagaggatgccctttttttttt

SEQ ID NO: 676752 - DNA, 1250 bp, Homo sapiens
ttgtttatttaatatgtgaactctacgtaagtggagcactgtgtttgaagttcctgggaggctggagaggggaaaggcatggataagactagtccttaactgtaggaaacttacaagggaagagaaaaaagtcaataattaactagtacagcagtgagtttggactttattccaataggcgctgaaaattattagagctttccaagggaataaaatgatctaagccatgccttaggaagacggccttatctctcgtagaaatgtgacagaaagataagagaagtgaaacactggaatcaggcagaccagtcagcaaggtgattgtaataatcccagcaacagatcatgaaactatgcaccagcgaagtggcaacggaaatggaaataggctataggaagtagaactgatagaatttggagacaatatcaatgtgggagttagggagatggaagaatgaataacaactttgttctttcgaactcaaatgcctaggaaagatgaaatactgtttgctgtaaaaggaaactgaggaaaggctcttttggaaagcactgcaatgggttttgattttaggtacactggagtgaaagtgacttaagaattgccatatgccagtatctaacaagttgttcaaagttctaactttaattttagagatatcagagttactattacggttattatcattgctattattactgagaagctagagcagagaacaatataactaagacagaaggtaggatgagaagaaagcagaggaaggaaattgagaaatgcctacaaagagggaataggtagacatgcattatgtgtgtgaacagcttctaccttctgcttcccttttctttacttcctcctttccagaatttacttttgctcaaaataaacatgaaacattacacattctgagaaaggtagcaacctaattcagtaaatgcaagctgataaaaattacatagttgaytgggtgggttatcttgtcatccttttgctgctcttcagaaataaattcattgtttatgagctgaaactaaaaatctgcattgccaaattggttcttctgcgaatgaacaaggaatcctactcagtagtaatttcccctcatctatattaagcatctagagaggactccctagggacaaaataatatggagccttaattcaggccatattattgtgattatttataatatttccaggtaactaaataattagcctcaattagtatcttactgaacagctaata

SEQ ID NO: 676753 - DNA, 626 bp, Homo sapiens
ttctttccttcccagtggctgagatgcagatttggtgatgggagctggagctctgctttggaccacaaaacagatgctgtgggttgaaggtggaagagcaatgagaaactagatactgtgaggttgtcacataaaccctaatgtgtatagggtgatacaaacctctatcctattggagccactttactttggcctttgctacaacagctgaatctgcatcgtaactaattcattatccaggtcgcaacactgataaataacagagcctgttatttgaactcaaatctgtgtaaatccaaagcccagtctcttactgactatacagtactgcctgcaaaaaccaaaaggttaaagtrtaacaaaaggaggtcaagctgacacccagagaaagtgctaaatgcaaaataattttagctctttgaggtctgaaacaagcctgtgccactcacactaaaagttcacgtgtcccaattgtgaataaaaacactaataaacattcggaagaatggaggagcatgccacaaaactgaactacccaagtacaattctgacagtggcagataagggctggactcaggtttactgtgggaagcaacaattgtaaaccacccacggtgataacacca

SEQ ID NO: 676754 - DNA, 626 bp, Homo sapiens
ttctttccttcccagtggctgagatgcagatttggtgatgggagctggagctctgctttggaccacaaaacagatgctgtgggttgaaggtggaagagcaatgagaaactagatactgtgaggttgtcacataaaccctaatgtgtatagggtgatacaaacctctatcctattggagccactttactttggcctttgctacaacagctgaatctgcatcgtaactaattcattatccaggtcgcaacactgataaataacagagcctgttatttgaactcaaatctgtgtaaatccaaagcccagtctcttactgactatacagtactgcctgcaaaaaccaaaaggttaaagtgtaacaaaaggaggtcaagctgacacccagagaaagtgctaaatgcaaaataattttagctctttgaggtctgaaacaagcctgtgccactyacactaaaagttcacgtgtcccaattgtgaataaaaacactaataaacattcggaagaatggaggagcatgccacaaaactgaactacccaagtacaattctgacagtggcagataagggctggactcaggtttactgtgggaagcaacaattgtaaaccacccacggtgataacacca

SEQ ID NO: 676755 - DNA, 626 bp, Homo sapiens
ttctttccttcccagtggctgagatgcagatttggtgatgggagctggagctctgctttggaccacaaaacagatgctgtgggttgaaggtggaagagcaatgagaaactagatactgtgaggttgtcacataaaccctaatgtgtatagggtgatacaaacctctatcctattggagccactttactttggcctttgctacaacagctgaatctgcatcgtaactaattcattatccaggtcgcaacactgataaataacagagcctgttatttgaactcaaatctgtgtaaatccaaagcccagtctcttactgactatacagtactgcctgcaaaaaccaaaaggttaaagtgtaacaaaaggaggtcaagctgacacccagagaaagtgctaaatgcaaaataattttagctctttgaggtctgaaacaagcctgtgccactcacactaaaagttcacgtgtcccaattgtgaataaaaacactaataaacattcggaagaatggaggagcatgccrcaaaactgaactacccaagtacaattctgacagtggcagataagggctggactcaggtttactgtgggaagcaacaattgtaaaccacccacggtgataacacca

SEQ ID NO: 676756 - DNA, 626 bp, Homo sapiens
ttctttccttcccagtggctgagatgcagatttggtgatgggagctggagctctgctttggaccacaaaacagatgctgtgggttgaaggtggaagagcaatgagaaactagatactgtgaggttgtcacataaaccctaatgtgtatagggtgatacaaacctctatcctattggagccactttactttggcctttgctacaacagctgaatctgcatcgtaactaattcattatccaggtcgcaacactgataaataacagagcctgttatttgaactcaaatctgtgtaaatccaaagcccagtctcttactgactatacagtactgcctgcaaaaaccaaaaggttaaagtgtaacaaaaggaggtcaagctgacacccagagaaagtgctaaatgcaaaataattttagctctttgaggtctgaaacaagcctgtgccactcacactaaaagttcacgtgtcccaattgtgaataaaaacactaataaacattcggaagaatggaggagcatgccacaaaactgaactacccaagtacaattctgacagtggcagataagggctggaytcaggtttactgtgggaagcaacaattgtaaaccacccacggtgataacacca

SEQ ID NO: 676757 - DNA, 1269 bp, Homo sapiens
aaaatctgtgctgtccacactgcaggactgttgtgagggcaaatgagatcacaggcatgaaagccctttgaaaagttagaagaggactgtgtatatattgacatcatcgttatcaggtgattttgaacgttggaacacatgtattttgtccccaagcccctggtgttggcacaccattgggacaccattggtcctctctgttagctgcctgcacatcactcagtgttaagatccccctggcagtggtctggataaaaaggccggtgattctggcagtcgtgtttgctaagcttgtcctcaaatcatcttcggtgtcctcttgtgacttcagtcactctccctgtggggtgacctgtgtctcagcttcgggcctgcccttctcttgaggcacactaatcttgccatcttcgaaaacaggctgttctcatctcgggtctacactgtggcagccacaaagctcggctttttccctgaaagtcttccccatagcctgagagctgacacctagcgcgtgggcattcaaagtcactgtcaaccagggcttcatgcatggttcaagccattgactaggtatcaaagaccggattcaatgaggttttaaatttccgtacaattccattttttccatcctctttttatgttttttaaaaatccttcattgcctacctaccatcagaggaaaacagcgttgtgatatgatgggggattttaaccaggtactaatattgtgaargagaacgttagtggtcctgaaactaggcatatgttgtaaggtggggtgattttcccacttcctgtatgtccagaggcccttcctggcagaacttccagcccaggagactttcatcttcatctcgcatgaaggatacaatttcgttttgacgcacggtttagagaagccgttgaacgtccacacaatctgttatgctaaatcacacctggtgtctgcacagagaaggctctggcaagagtttttgccactgggaccaaggcctctgactcagaagccaaaacatggcagtgttgcagggcgcctggctcaacggcacgggaaattaacctgcttgttctcacgttaaatgctttatgaaaattcaccgggcgcaaaaagagggaagaaaacccaagtggttgtgcagtgcgcctgcctggcaccagtgaaggaatgaagctgcggaaaaagtcaatgtgaagagctggcaggaggagaaggtggaaagcgcgatggaaatcaaatgcggtgccagccacggcattgttttattagca

SEQ ID NO: 676758 - DNA, 605 bp, Homo sapiens
aacacatttagtaaacattatttagctaactggtttccaaattcctgacaatgctaaaaaaaaatttattagatgtacttttaacagtatatatgacatacttctgctgccttctagaaaaattgaaagaagatgtttccatcaattatttcatcagttgttattcatcaattgtgctttgaaaaaatgtaccagtattttagtaaatctttcagtctcttctagttaatgttaactcattaaatctgttttccaaagaaagaataagcctgcattattggtcttagctacaaactgctataaatggcattcattgtttgcttttctcataggcaataggagcttaaatttgatgtcaaacatttttaaataaagacatttaaacatttggcatgttacacatttgtcttggttttaaaaataatttttaaaaatctttaaagaagatttctggtttcaaaaagaaatctgagatggaggtgatagtagcggaactctacataattactaaaaaatcaatgamttatgcacgtacaatgggtggattttatggtatgcaaatcgtacctcaataaagccactttaaaaattgagaaaattaagca

SEQ ID NO: 676759 - DNA, 595 bp, Homo sapiens
agtcttgctcggtcacccagtggcgcgatctcggctcaataccacctccgcctcccgggttcaagcaattctcctgtctcagcctcctgagtagctgggattacaggtgcctgccaccacacccagctaatttttgtatttttagtagaaatggggtttctccatgttggccaggctggtctcgagctcctgacctcaggtgatccaccctcctcagcctcccaaagtgctgggcttacaggcgtgagccaccgtgcccggccttgagttcttattattacaagatgactcagatttgggctggagagcattttaaaacattaaaacatcttctgcctaacaaatgcattaatcctttcttgaggattaagaaagaattaatccctccaaggatgggcagccccacagmgggtggcttggaaaatacttggcttcgtgcatctgcagacttactgttttctttgaccctttgcgtctacatctgggaatttatcctaaagaaattctgtaatccagaatatcaaaaaagcctcattggcaaatactactttattcacagttgcatcatgtaaattacagaggtatggctaagtca

SEQ ID NO: 676760 - DNA, 2990 bp, Homo sapiens
ttaaggttaatatgtaattataacagagctgtcaaacctacagaattaatatttgtaccatactatgaactaaactacagattcatgtctcactggtttttacattggtgacttttttctgcttcagaatccaatccaggatatcatatctacatatccatcatgtctctttggtctcctagggtctgtgatagtctggaagtctttgtttttcatgggatagtgatagattttacaacaaaaaatgtatcttcattgacaataagttgtaagactaattttttgttatttagaaccataggaatagagttggagagacaacactttggcaaccaacaaaacagcccatagtgccttttaaaatgctactgggccccctatccagatattctaatttaactggtttggggtacagcttggtcactaggaacctttaaagctctccagtgagctccttatacagtcaaggtagagaatcactgccttagaggttgggaagtccaacctcttactcaaaagagcattgattctcaaagtatagtccctagaatagcaggtgattctgatgtacccaaaagtttgggaaacagcgcaacagaagaacctctgccaaattattcctctcaaatgccttgaataatccttgtaaaggagaactcatgactcatagcatatgtcacttgatggcttaattgttaggaagttatcctccattgaaacaaattgctgaattgtaatttccaatcaatggtcacagttttgtttcttaattaagcaatgactctacaaatacaaacccaaacattgtattgaatcttatagaattccaaatggatttacacttgagaaaatgttccctacagtgtaaattcaccttgaaaatttacctaaaaccctcatacactgcgtgtgagaatataaaatgatatggctgctttgaaaacagtctagcagttcctcaaatggttaaacatagaattactctacaatccagcaatttcactcctggtatacacctaagagaaataaaaacacattttcacacaaaaactcatatatgaatgttcatagcaacattaatcaaaatagtgaattaaaacccaatagtgaaacaatccaaatgtcatcaggtgatgaatagataaacaaaattgtctggccaccttataattatatgatttgaaaagtatkacagttcttaaaatctgtgaaatggccctatgaaattaatttcactcatagtcacaaaccatttagtttagggaaagactctatcatttagaattgaaataaaaatatttaaacttattcctgttgagtctcagaaaaagtaccccaaaatgaaagcctcagaagcagcctcagaagcaaaagtttttctctgaccttctcctgccctcctgtctcagtctcattctcccccaaggatagccaaagaaactagaatccctcttccccaaggcaagaatccttccttccccaaggaaaccaaaacctgttttccccaaagccagccataaaacctaaaattattactctacctatcccttcacctttctttctatgtaaaaactggccataaagaaattctctgacatcccttgcttgactgtaggtcataagacccccaatccagaagaattctgccccatgcccagaaggaaggaatgcatgctcaagaggttaagaataatctagggacacaggccttgctggctttccccactcagtctcttgccattaggtcatattatttttgtccaatcatatttctacatggctctctgtactttattgaacctaagtattaaatggacaatttcccctgtatctttgggtcttcattctgaagtctccgatcacaggttaaataaatttgtatgccttttctctaattactctgccttttgggagttgatttttcagcaaagcttcagagggcaaagtggaactttccccttggctcctaccttcttaatgaaacgaattagaaaacatgtatttgcttgggcatccaattacgatgtaaagtgaatacattcataaaatgaatcacctttcagtttagcagattttcccgggactcttatttagatttttaatttgattcattaaagtacctgaagaggtagagtaagctgaagttacaaagaagccaaaactgagaggcaaaaaaaaatttggttatcaaacagaagagcagagaataaggaagccaacaggtacagggaagggcaggaaaaagatggacaaaagccaatactcagtgactagctgagttccactagtaacaaagaactctagttaatgtccaagggttccaaacttcttcaggtcaagaatggacaatctcccaagtgaaatctctctgaggcccggcaatgccaccattcctgctcttgaacttccatgaaattccatttcctcattaatcccatttcatgaacaagtccaatggaactggaatgcttctcaaatcaaatgggaaattccttaattttacgtaataatttacttgtaattttttttaccccaatcacttccaaataatacttgaatgagattagttaaatgtaagcccagtcctattcccaaaatagtacatgtgtttccaggataagcagattctactgaaaatttatcctccctcattctctcaaagactttctcaaggtcacaaacagaaggaagaagatgttttggggaactaaaggaatggaaagaaactatctacctgtcggattcaggaaccttttagagacagtatgaaaaagaaaaatgagccagctcttttcctagcttttccattctctgcagatgaaatcacaatatcatttcttttcatagaaaaaataatagaaaaggtaactgcacctatgaaggtgaaaatggtaacctattgtgtttagtattccctcatatgtaggggtaagaattgctaaacatggaaaagttatttttcctgaagtatacagtctgtgacaaaaatg

SEQ ID NO: 676761 - DNA, 603 bp, Homo sapiens
tgtgttaggaccaggggattgaaagttccagtgctggagatggagtgtggaggatattggaggtagaattattggaggaaatattggaggtagaatgttcgaaatggagattctggaggggttcccgttacactattggcaaaaactacaagtgtgaccatggcagtgagtggctgcagttgggtgggagacaagaccattgggagatataaagtgaaagacatgagaaaccggtaaactggaaggattatctacaatggcttttaaaatcaccaagaattatgaacagagtagtgttgaggagaagaatggtgtgcaaggagctaaattctctgttgaaaatctrtaaaaatgtgagatacagagaaaaaaatttggtcctaacaggtcttttcgatagcttgtcagagagcctcaaatctttgcttcttgaagaacacgtatttgtttgtttgtttttgtaacctactcaactgtccagaccttcttagctaataatttctatatcctacgtggactgaactggtctttgctgggaaaaaggttgtcaaatctttgcagatgaatatggcttcatgatgaaacttcttggcctcagggaac

SEQ ID NO: 676762 - DNA, 642 bp, Homo sapiens
ccctatgtctaaaagaattgttttaaattgaagaaggacttgaacaatagatagtaaaccatgctgttaagttacagtcaataaaagcagtgaaatactggggcaaagaagagacaagcaggtcagtgacacacctgtttacattgaaaaaaatatttgacaaaactgacatttcaaattagggaggaaacagtctaacaaataactgttggttatttatttagggaacagttaagtccctataccatagtatgtatcaaaataaattccagctagaataaagatctcaatattttataactatatagaaggagaaaatacaggagaatatcttcataacaacatgagtgatgaaagtcctttgcaaaagcagaactctaaagccagaagtcagggcagatttgactacaacaaaacttgaggaatatttctgtacagcaaatgattaaagtgtcagaacttccaggacaggtaaaatgtatttatttatgttgttgcttattaataacaacactgtctaaaaaaggattttggaatacttccagcagtttatatagaataaaataaaagattacatgtacacacacatttatgaatggaggtgaagcctatatatatatatatatatatatatwtatataa

SEQ ID NO: 676763 - DNA, 1446 bp, Homo sapiens
tccttcagagtcacattttctactactgtacggttaaacatcgtctgtgggaggraaggtgatgtatgggtttttctgctccactgttgtcgggcttagaccaccatcttctaaaaggcagaaacctggggtctgtaccagacagctccatgaacagatggtcattttgaagtctttgaaggtgaaatctgtgatgctcagtgaggtatacacttctttttaaagtggtagttccaaatgaagtgatgctgtaacatatccttaattccttagaccactgtccttaatctcagttgtaataacctggcgtgtgactattgtttattcctggtttacaagaattgtctagttatatagtttctattgcttttcctctaagctgaacaaagcactttgatactacttcattaatttcacagtagacagcttgatcgtttttatattgatttatcgctttctaatccccaattattttttggtcctatgtcagcttctcctgccagtagacagtgtgtgttttcatggatactcttgacatgagctttattagaacataaccaagaaggtgaatctgttgccaaaaaattaaataatgtttgccaaagagttacacagaataatttattacccagtgttctgcttttcctatgcaatggttcctcccagtggtatagaaaaccaaagattggcttgccctaagagatgaggcagtttggggatgggaaatagtgttcttcttttagtagataaataacatgtccaaggttataggatcgggatcaaaataaaaagcagaatcatgagtttcctgattcccagcccttcaacctttgctaataggtaactataaacatggtcatacctagaaagaaaaaattttagcacctagaaggaaaaaaacgtaaaatttaagtagcatgcgctaaaaaactatccaaaatttctagttttcctcaatttcattgatttgaaaattataggttttaataattatgtacattaaatggtatcttaaggaaaagttgatctttcccttattacttaaaccctactatttatttttgtgtatcagattggtaacattggtgggaatattcactctagccataaaaggtatttaatttttatcaccaaataataggagtatcacccaataactttaatacaactatgagaatgctctatttttttgttttgctagattatcattcatacagggaagaaccagcattttcttagttctcctgtagatggcgaatctaaagggtgatgacgactgatataaatataattgttttttatactgttaagcattatgtatctgcatttttggtaaataataatatgcaaagttaatgcctttttttttttttttggagatggagtctcgctgtgtcacccaggctggagtgcagtggcaggatctcggcctaccacaacctccac

SEQ ID NO: 676764 - DNA, 1811 bp, Homo sapiens
ctttattgttttgatgcttttccattttaatagtaataattacataataataatattgtagctaacacttactgtttactgtgtgccaaacaccattctaacctcattacaagatgttaaatttgaaatatgttgacatagactgtctcatttaattcttgtaacaaagatgtgagttaggtaaggaaggaattattcccattttgcagatgagaaagttgagacttagcaaagttcacttttttaaatcaaggttacccttctagtaaatggcagagtttgaagcataatttaagtcttcagattcctaagttactgatttttgcaaacaattctcttataaatgacatcaaatatataggtaattaagagtaagagagcgtgcttttttttttttttttttttttttgcctgtttgcgttctgaacaaagaaatgtgggactcagtaaggtgagaaaaatgacatttgcctccctaaaggatcactaacatttagcccttgcaggaagaactgaggttgaagaatggagtccaagaagcacaatgtttctaacaccaggagctgtatggattggggatcagaaggaagctgagctggaacttaagatgcctaaagagcaagaagggattattaagccagtacaagaataataaagtataaagttacatctgaacaaatcaaaaagcctatacagggaaccaagatataatgtgaaacaaaacactaagaaaaccttttctttcatttttttatttgtaagatgaattcaatttatagaaggcaaaatatgttcaaaaagaaaagttgtgcctttgagagacagaagaaagcagataacatatgtctgtggaaaatccgaggcttcaacatacatcagcatgtcctttaaggtataaattgtgttggtttctatacttagatttcattcctagcgatagcaaaagccaagtgtgagggaagagtttagagataaacatgatagagaaggaaataaagggcattttttacatccagcgatttcagccatccttccctccctcaaaacaaaaattctgacaaatttaagaaatttatgattgctattgcagccaaagggcagttgagtaaacggaaatatatcttacagtttgtttccaaaagttaaaaaatattatcataattccttttggtgatttcagtatctcaggtaggatagaatcaaccctatctataaagatatttaggaagcaaagtagcattattgcttaacaaataccttgactaactaattaaggcttcagaaaaagaagacagagagcgagatttttctgattatcatcactccrtaattactagtattttccataacctaggtaactcagctgtctaagaaacaaaatccagctgaaactgaaccgtctaaagttttccttctacaattttttaaggcccagcgcaggatccctgtcatgctaaagtctctcctggatgtctggaaaaagtcttatagtctgggagacattccaaaatatgtgcagtgaccattgccacaggcgtgaacttcttaatgcattttgcagaaatctcctccacaatgaaattgattactgtctgaaaggatttttttccccttttcaaaatagcaagcagctagaatatgcttttcttatgttttattacatccttaagtatctcatgtggactgaatgtgactggagaaagttaccggtctgaatctgatacataatgtctagtttaaaacaatttttttacattgatgggttagatgaacagcgaaaggaaaaactctggatgtttgaagactacaca

SEQ ID NO: 676765 - DNA, 1803 bp, Homo sapiens
gctgaaaaaattaatacttataaatcagccattttttttcaatagtaacactgagagaatgagaaaatacctgcaattagtgtattttaaattagtccttctttccttttacagctgccagtggagggcatattgatcagagaaaggaccaaatagacaaaaatgcagaaaacagatctatggtgtaaagtgccgaagtaattgatccttacctagtaaatattcacatatgttaacgtaagttaatactgttaggaaactgagaccaatttcataaacaatatgcaactatttggaaatttcaattatagatgctcaacaaatatcaagtaagcacatttaaacctaaagacgagtgttcggatatttcagtggaacattttagtattggttctgactgtaataatcctggccaatatgtgtagactcttttagtagtcattgtttccaagctgattgggcagagaccatgtctattgcacttttgaatagcaacttgaatcctcttggcttctggaacatataaaataacaatgttctccagaaatgctgccatttggtaacttctctttggagtgcaaacttaaattcttggttataagtagtatgtgcatatgccccggtgtccacatgcacagatctctatgggcatcaaataaggtatgcttgctgggaaatagaatgatttttgaatgcataagaacccaaagaggatgacataaacttagcgaagttttcaagctccagtctttattatgtatgtatgttttaaattaaggagcaatccaaaggttgaaaatcagggaaatcagaggcagttaattttatcagagaaaaaaattggaagataaaagctttggaagatatcagagcaaaaattggaagataaaaaaatgagaggaatagcaaaaacaaatttttaaggtaaaactataaattttcttttgaaattgtacatattcgttggactcaatagtcatcttctcttactggaactaactaagagttagtccctgtgactgcttacaaggcagagccaggtaattgatgcgtcagaaacctagctgttgaaccactgtgtgaatctttaggccatgaggcttaattctaattttaagcagatttggctcttataaatcctaaagagttataaagccttgagttattttcttgaaaatatctgataattcaatttataatttattcttaacactctctttaaaaaaaaaagaaagaaaacttaaagtataataataataaaattwaaaaaaaaaaaaagaaaagtaagggaccagatcaggggtagaacaaagctgcagacatatatttttcaaacctgctgtcaaggaaatcagaggcataagaaaacttgaacagaatcaagaaatttaccatttagttataaaattagatgcagcattccatatctcatccaaatataataatctattgggaaatcatattcaggagtggcttctccatcgaaggtataattcccttggaagattcacatgtattttatacagtttatccctaaaaatgtttaaagacaagtctgtgtaaaatgtgaagtacttgacttccttattagtgactttatctgaggcatggtctaccatagtagtgattacactgcccattaaccagtgagtattgatctatttattcctgaaaattttccctccccatttaaaaataagcagaaataaaaacctggcttcgtcatttgtgatggatgctaaagtcatgactagataaaagacttcaatttatcagtttatgtctgaagccgaaaactacttg

SEQ ID NO: 676766 - DNA, 3303 bp, Homo sapiens
tttacatattaaaaaatagactcagaggcggaaaaacttccttgaaattgtttgtcatttgttctacagttacttactgaagtcattactatttaccaagcatcatgctaggtgctaggcttacaagagtgaacaaggagacagggttcctgtcattatagagcttaatctactggggaagattgagtgggaaagattgacttaaataaaacagtaagttcagaaagttaggaagtgttggagtctatatttaaacttaggtattttgacccaaaagcctgtactgtttctaacataccatgctgatgctctagcctccattttatatgcttaaacttattatggggcttttaaatagaatatgtattatccttgccagggcaaaatataaagaaataattgactgcctgctatatctgtcttcacctttctatccctattatctgtttttttattcctcttttttgtctcccttgtttcttaccctgacttatgtatgaagatctctagtatttctttactattgtgaggatgaccagcggagaggtaatattatagcagttgcctagtacttcttccctagagcactgaagttctaaatatgaaagagtggataagtaaatatatcttttttatcactttcattttgtttcattttttagactttaaatattaacacaatgacagcctcatttgaagctagcagcaaatatttggaaggagggaacctttaatacatcaagattaaagttaactttaaattataaatgagtcattttaatatgtgggagtgagaatcttaaaacataatgaaaacctccaaaagaaaagtgaattaggaaatacatgcctgcttacctgtctttcacaccccaattttagaagaaaaatacttgggatggattgagtagggggcaagagagaaaaaaatatattacagtaaatatcactgaaaaatgttcaatttgtggaaatgaatacaaataaaattttatcaatcaacttttttttttttttaaagagacaggatctcaccatgttgcccaggctggagcacagtggctattgacaggctcgatcaggcacacttcagcctagaactcctgggctcaagggatcctcctgcttcagcctcatgagtagctgggactatagatgtgcactagtgagcccagctcaacagttagttttaaaggcatagaaatgtttttatgttcagagaaaagtatcagcgctgatacagggccgtggtagctaaaagtcaattaaatttgaaatgtaactagtacacagctttgcagaccattgaatagactaccaaatcaagcacctttgcagtaaaacctttgtagagacttgaaattatttgaattttttccatgtcacaaaattataccaacttgtagttgattagaccacaaaatataggtatgcttatgttggttgaatttatgtatttgatttgccctgcaattttcttatgaactcttacaattttttttttttttttgagatggagtcttgctctgttgcccaggctggagtgcagtggtgctatctcggctcattgcaacctccgcctcccgggttcaagcgattctcctgcctcagcttcccaagtagctgggattacaggcatgcaccaccatgcctggctaatttttgtatttttagtagaaacagggttgcatcctgctggccaggctagtctcaaactcccaacctcaggcgatccgcccaccttggcctcccacagtgctgggattacaggcatgagccaccgcgcccggccttaaaatgtttttagcgaagctctgttagttggttttgaactctggatattcctgccgtaaaagtaaatatgctattgtgttagaatcaactatttttcctatttctttacaaaaatggatgacagtcattattagggagaatggatggtttctaatttcctaagcaaaatgaagtttttgtttactgtaaaagttgtcttatccttgttttttctaatatctatagtcttttccttacttatttcttcctstttgcctttaaccatatacgggtcttctgcatttccttgtatcccccaaaccctttcatcttttgctataatgatctgtgttacccaccaagcaaggtggcaccttcctgtagtcccagttactcgggagatggaggcaggacaatcccttgaggctaggagttcaaggttgcagtgcataacaactatgcctgtaaatagccactgcactttagtctggacaacatagcaagaccccatctctaaaataaataaataaataaataaataatgatcagtgctaccattttttgaaaatgtacaatcacttattcctcaaatttaacttctgtcctaccacagaggcatttaatcaccaaattcagtaattttttttcctttcaattcttactcatctgtttttttaaaaataacatttaatgtagacctcttcctttattagtctctgatactatggttacttggatagctttcccccaaggtaatagcttttcttcttccacttcactactgccacctacaccagcaccaccctactcctgcccttcagtcaacaaatttcaagtcagaattcaattaacatgtccctactgtatgtaagacatatgtggtactatagatataaaaaaaaatgaagaatatatcattatgagactgactacttggatgaggaagataactataatatgaggctgaccacttatgagaaagagattctggctgggcatagtggctcacacctgtaatcatagcactttaggaggcccaggtgggagaatcacttgagcccaggagtttgagaccaacctgggcaatatagtgagaccctctctctacaaaaatagaaagaaagagggaagaaggaaagagaaagaaatcccaagtatggaaacattacatcaaattttaggggtacaggagtatgccaactagtaagcaattatcttagctccagacccacctttctatgctctgctttgtgactggacctagtactctgcaagccacatgtttctttgctagctgactctccattagactctgttgccatatggggctatcgtgggagattgcatggatggaggaagagaaagggttttctcttactttctcttgtctttcagttcctttgaacaacccagcaacacttcttcaccctggttgcatcagttttcctgtagcagagactgaacgcggtttgcattttctctaatacaccaccagcctgaacccgcaccccatccccccactctggcagt

SEQ ID NO: 676767 - DNA, 1266 bp, Homo sapiens
aaaacttaacaaggtgatgtctttatattaacctgtatactctataaaatctacaagttcaatttgtttttatttcaggaagttttcttctatcatgtgtcttaatattttatgctccactcattggattcttttctttaggtaacagttatcttttgtgggatcatctttgaattccattgctatcttcttctctttcattgcttcaattttggtattttctgcccctacattcactattatttttgtctttttctcattgctttgtctaggaattggatagttactaattctcgggtccctaaattgctctgtaaccttggaaaatcacttgatctccccaagaatacaagagtttttacatagaagtaagttttcttttaactggactttgtatattttaggtttcttttttaataattacgttaaaaaagcatgcccaattttgataaaatgtaggatacaattgaaaactgctaaatctataaagcatttttataggagcgtgtgttctataatattcaacaaaatttggtattcaagtagagacaacacaatgtgatgaagcttgatgatctttgttcttaaattcacaagataatctcagttcccaagggtgaaagtgtgtcgactgcaaaaaaaaagttaaataaaaatacatttttaaaaattacaataacaacaataatagtaataaaaaatactaaagctttttggtggattagcccctcagtacatgcagaaattgtgtctgtactgaccatttcttctgtctccttgctgtctcctacccctttcgacctctggatactgtttcagttcctaaatcttctactcctttctatgtatatgtgctctttaggaagtttccagctatgtgactttattttattttacttttttgagacagaatctcactctgtcactcaggctggagtgcagtggcatgatcttggctcactgcawtgtccacctcccttgctcaggggatcctcccacctcagcctcccaagtagttgggactataggcagtcaccactgcacccagctaattttttgtattttttatagggacagggtgtcaccatattggctaggctggtctcaaactcctgagatcaagcaatccatccgccttggcctccacagtgctgggattacaggcttgagcctccatgcccagcccagtgatgtgacttcaaatattatctgtatgcccaagatttccaaattgagatcttatatttagcctggacccctttctac

SEQ ID NO: 676768 - DNA, 1266 bp, Homo sapiens
aaaacttaacaaggtgatgtctttatattaacctgtatactctataaaatctacaagttcaatttgtttttatttcaggaagttttcttctatcatgtgtcttaatattttatgctccactcattggattcttttctttaggtaacagttatcttttgtgggatcatctttgaattccattgctatcttcttctctttcattgcttcaattttggtattttctgcccctacattcactattatttttgtctttttctcattgctttgtctaggaattggatagttactaattctcgggtccctaaattgctctgtaaccttggaaaatcacttgatctccccaagaatacaagagtttttacatagaagtaagttttcttttaactggactttgtatattttaggtttcttttttaataattacgttaaaaaagcatgcccaattttgataaaatgtaggatacaattgaaaactgctaaatctataaagcatttttataggagcgtgtgttctataatattcaacaaaatttggtattcaagtagagacaacacaatgtgatgaagcttgatgatctttgttcttaaattcacaagataatctcagttcccaagggtgaaagtgtgtcgactgcaaaaaaaaagttaaataaaaatacatttttaaaaattacaataacaacaataatagtaataaaaaatactaaagctttttggtggattagcccctcagtacatgcagaaattgtgtctgtactgaccatttcttctgtctccttgctgtctcctacccctttcgacctctggatactgtttcagttcctaaatcttctactcctttctatgtatatgtgctctttaggaagtttccagctatgtgactttattttattttacttttttgagacagaatctcactctgtcactcaggctggagtgcagtggcatgatcttggctcactgcattgtccacctcccttgctcaggggatcctcccacctcagcctcccaagtagytgggactataggcagtcaccactgcacccagctaattttttgtattttttatagggacagggtgtcaccatattggctaggctggtctcaaactcctgagatcaagcaatccatccgccttggcctccacagtgctgggattacaggcttgagcctccatgcccagcccagtgatgtgacttcaaatattatctgtatgcccaagatttccaaattgagatcttatatttagcctggacccctttctac

SEQ ID NO: 676769 - DNA, 679 bp, Homo sapiens
tctgcctgtttttcagagttacttatggttgattctcctctagtatcatrtagggctgggatgctgtgctgtatatgcctcagcagctagcattgatgtttcgcacatacatatgttcttgattggtgcttattgcattacattaatccaggggtcagcaaactccagcttgtgggtcggccacttgtttttataaacaaaattttactagaacgcagtgacgtccattcatttatgtcttgtctatgacagctttcacactgtcacagcagagttgagtagctataccaactctggtctgcaaagcttaaaatgtttactaagtggtcctttatatttgctgacccctggattatggtcctgcattaggtgttttatgtcggctggtaagtttgtgtctttgacctttttttttcctacttattttttcttcaaatttgtttgagatatttagagaccatgtggagtgtagactgtgcctttgcagcattggtcatggtcttgtttgtggtaaggaggcagcagagccaagggaaagcaaagctcatgggtagttagagcagtctctttcagtgtgactatgggactaagtagtacctttaaaaggaaaggctagggccaggaaagtggaacaagatggggaagatggatctatgcattgaagacatgctttttcagc

SEQ ID NO: 676770 - DNA, 1613 bp, Homo sapiens
ataaatgcagaatatagtcagtcaatcatggtattctctataaagcacacttaggaaagggaaaattcatagcaggaatagtgatgtgtttaacaaacaggcatcagtgtattgaatgctgccaaacccaatccattgctcaacagaatgactataaataagacagcacagaggaggagagttagagatgaaatgggcaatgaggtggaaggagtcgcagctgtttcttttcattcattcattgaattctctgtaaatattggtatggcttgcaaagtggtaaacagcatttctgtaaattagaatgactgctcatatcctggcaagaatatcaggggtctgagtatcaggcaaagcagacgatgacatcatacacggcatgagcttcccctcggcttctccaaatgctcctaattcatttgctccgtaacatttgaatatatattttagctgagccaacttttttaccaggaaagtattcagtgcttgttttagattcattttcctgcagcttgcattttgccatatgcattgggacttgtttacacttttattttaaggtttgttctgtttctgattttgtttcgcactgaagttccgaatagacagatgtctattagaagaattgaaatgacatatcagagttttaatgccgtcgttcttgtatttgcatatttaattacttgcatcgcattttattagtatattttctgatgaggaattctcagtaattaatttcacctggaatggtatgcgggtgtatgaaaaattacacttggccacttgcagagaccagctgtgtattagaaatatctggtccccatctgcaggattaaaaaaagtgagagaaaacagctgattgtaaaaaacagtcactttaccttgtgccctgaaggtattattattattggcagatatcctttattactcagcctatattctggacattaactcagaagtttactctgagcatcattcagtgggatgacttgactttgcatcattttggttttaatttgtagtcctgctaatgtgattgggttccacccgtatgcgtgcactcgctgccttcaattccagcctgactcacacacagccaacttcatttggaccacaaattgttttggcctagctggcagcggaaacccaaaacaaaaatctgggagagtagggatatcatgttaaaagataaccctcagggtcaaacgtggcctcttagaaatgcaaccaaatcctgtagcagcgctccagtacacacgtgcatgtttttattttctctttttctctctgtcttgctatgtatttctatgtggattctttgtctgccctgacaacagatggtgttttaataaagtccggtaggaatattactgtgagtaaacaatgcagcgcatgccaattccataattgctgggtactgattcagcctcttacctgctgcatccaaattgggagggaaccaactgtgcttgcacctaccrgcagcagcccgctcgcctgcagctgtggtgtgcttcagcagctagcctcaccacggaaggtaaattgcggctcctgtcatgtgtcttggcaccgggtctagggaatgctgccatctggcttgtcatcaaaca

SEQ ID NO: 676771 - DNA, 1613 bp, Homo sapiens
ataaatgcagaatatagtcagtcaatcatggtattctctataaagcacacttaggaaagggaaaattcatagcaggaatagtgatgtgtttaacaaacaggcatcagtgtattgaatgctgccaaacccaatccattgctcaacagaatgactataaataagacagcacagaggaggagagttagagatgaaatgggcaatgaggtggaaggagtcgcagctgtttcttttcattcattcattgaattctctgtaaatattggtatggcttgcaaagtggtaaacagcatttctgtaaattagaatgactgctcatatcctggcaagaatatcaggggtctgagtatcaggcaaagcagacgatgacatcatacacggcatgagcttcccctcggcttctccaaatgctcctaattcatttgctccgtaacatttgaatatatattttagctgagccaacttttttaccaggaaagtattcagtgcttgttttagattcattttcctgcagcttgcattttgccatatgcattgggacttgtttacacttttattttaaggtttgttctgtttctgattttgtttcgcactgaagttccgaatagacagatgtctattagaagaattgaaatgacatatcagagttttaatgccgtcgttcttgtatttgcatatttaattacttgcatcgcattttattagtatattttctgatgaggaattctcagtaattaatttcacctggaatggtatgcgggtgtatgaaaaattacacttggccacttgcagagaccagctgtgtattagaaatatctggtccccatctgcaggattaaaaaaagtgagagaaaacagctgattgtaaaaaacagtcactttaccttgtgccctgaaggtattattattattggcagatatcctttattactcagcctatattctggacattaactcagaagtttactctgagcatcattcagtgggatgacttgactttgcatcattttggttttaatttgtagtcctgctaatgtgattgggttccacccgtatgcgtgcactcgctgccttcaattccagcctgactcacacacagccaacttcatttggaccacaaattgttttggcctagctggcagcggaaacccaaaacaaaaatctgggagagtagggatatcatgttaaaagataaccctcagggtcaaacgtggcctcttagaaatgcaaccaaatcctgtagcagcgctccagtacacacgtgcatgtttttattttctctttttctctctgtcttgctatgtatttctatgtggattctttgtctgccctgacaacagatggtgttttaataaagtccggtaggaatattactgtgagtaaacaatgcagcgcatgccaattccataattgctgggtactgattcagcctcttacctgctgcatccaaattgggagggaaccaactgtgcttgcacctaccggcagcagcccgctcgcctgcagctgtggtgtgcttcagcagctagcctcaccacgraaggtaaattgcggctcctgtcatgtgtcttggcaccgggtctagggaatgctgccatctggcttgtcatcaaaca

SEQ ID NO: 676772 - DNA, 656 bp, Homo sapiens
aaccctacctgagtttccagcctgccagcgtgccctacagatttggattttccagccccacaaccacataagccagttccttagaatacatctctttgtataaatataccctgttggtcctgtttctctggagaaccctgaatgatgcagtaggtgtggcagagaagtgacactggccctaatcagtgcattctaataggaggtacataatgtcagtttgtctcggtactgaagatactgaccttgattacttggttatatagtctaagccgtacgtgttggaaattgaaactaataaagcaaatggcatctttactgtgaagttacacaaatgttctttttggtaaatactaagtaattttagagtggttttttttttttcagattgtgtacatctagagctctttgttaaaactttccttgctagttttggcatccattgattattttcaactccatcatttcttccacgttagttgaaatttcaccataagcaagagctttcccttctcctccattaagtaatttaatcatttattgataatatgtataaatttmtgtatccttatttttttctatagttataattgatatcttatggcaagctcacttactcatgagaaccacgtttaggcaactcttcttaaatctgtgtg

SEQ ID NO: 676773 - DNA, 730 bp, Homo sapiens
caggctagagtgcaatggcatgatctcggctccctgcaacctccgcctcccaggttcaagcgattctcctgcctcagcctcccgagtagctgggattacaggcgcctgccaccacacctagctaattttttgtatttttagtagagacggggtttcaccatgttggccaggctggtcgcaaactcctgacctcaggtgatccacctgcctcagcctcccaaagtgctgggattacaggcgtaagccactgtgcctggcctaaaaggcattatttaagacaagttgctgattttaaactttagaattagtatgggagaatttattcatgcctacatgatcattagttcatgtggaaaggttayggaagcaactgatgtgacttgctttattatatctaataataaacttgcaatgggaatcaaatcattaaatggcacagaagattcttcttttaggcttaaaacaatcacgtttgtttaaagatcacttttcactccaaaatctactaatggaaagagttgtaagaataattcaagtctttaggccaaggtcccacagtcccaggcagcctcatgcatttgcttatcatacatacatgcactgtcgctggagaagccattttgctgagtgctgttgacatactgcttaagcactggaattggaaggtaattgttgagatggccatgtacacatgtccatgttatctggctagcacttgaccaattttccc

SEQ ID NO: 676774 - DNA, 1726 bp, Homo sapiens
ccatggccagtcccagagcgagaaccacctagctgaactcagtcaacttctagaactgtgtgacacgagaagaaatgattgtagttgttgtaagccactattctgagataacgtcttaggtaatcatagagaacatgaaaatatatatatctccaaactcacrtgtgtatgcatatgtattcatgcagacatgtttcaggcttggtaatgagatggggtcaatgctattgtcacatttacctgttatatcataaacgcttaccttccgcatggtcagcatgtatggtgttgattgtttataaataccagatccatgatatacagtcatttgtaattttgctgagccatgaatttgagtcacaggcttgtgggcgggagtgaatttcttagctagtgagtgatcctagctgactgtcaaataaacagagttttgttctcgatgtgtagttctttatgcagtacattttatgatgtgattttttttaaaagagatgtggtcttgctatgtcatccaggctgtatttgaactcctggctcaagtgatcctcccacctcagcctcccaagtagctgggactacaggtgcatgccattgcacctggcttaatgtgatttttttttcttgaggctgtgttcctttgtcaaaaaatcagttctgctagtcctagtgttcgaaataaagagaaaataaagaggcctgagaaagacattcctagcccaataatgaaatttcaaggaacagaatgtcaaatgtgatgatgacttggctttatgatatgaaaacagttggaggatgtgatctcaaaacaaggaagcataattcattaagccattttgccaagaactctgatcagaatgtggtagcttataaaggcattagaagcttcaagatattattcacatttttcagtcaaaatataccagatttggggaggaaatgatatgctattgttatattcaacaatttgtagggcgtttgaaggtgtagggacatatacctcttgcatgtcaacagaatgtagtcgttaaacattacatatgagaccctctcctaggcttgtgcagcattgagaaaaatataagtcattgttcttgctgttgagatgcatacagtttatccaggtgatgggtgtggggtaagaaaggaaataaacaaaggacaagttaaatattaccacgtcacgtggtggtgaatgtaggctgtgattcgctggtgtagagaataagggcagttagttgaggagagagagagaacctgagatctctcagaggataaggtccaagccctttggccaagcatttcaaggccttccacaatctggcttcgactttatctccaatcttctctctcaatatcctctatgtaaaacagctcttccagtcaatttggttgattcctgaagaaatacacctgcctctctgtttataccctgttaatttaaggagtttgaaataaaatgaaggagagattggaaactttacatgcatacctacatatacacacaaaataatttcagaataaaacaatttaaactgctttccttttaaatcaaacaaacaaattccttagcagtagtaagtataaaaactttccatgcctaatctaccattctcctttccccttctgtctggctagagtggaatcaaagcccagggtgatcttagaagctacatgttgagggaggcggagcctatagcagcctgagtccctgaatgactgtgtggag

SEQ ID NO: 676775 - DNA, 1726 bp, Homo sapiens
ccatggccagtcccagagcgagaaccacctagctgaactcagtcaacttctagaactgtgtgacacgagaagaaatgattgtagttgttgtaagccactattctgagataacgtcttaggtaatcatagagaacatgaaaatatatatatctccaaactcacgtgtgtatgcatatgtattcatgcagacatgtttcaggcttggtaatgagatggggtcaatgctattgtcacatttacctgttatatcataaacgcttaccttccgcatggtcagcatgtatggtgttgattgtttataaataccagatccatgatatacagtcatttgtaattttgctgagccatgaatttgagtcacaggcttgtgggcgggagtgaatttcttagctagtgagtgatcctagctgactgtcaaataaacagagttttgttctcgatgtgtagttctttatgcagtacattttatgatgtgattttttttaaaagagatgtggtcttgctatgtcatccaggctgtatttgaactcctggctcaagtgatcctcccacctcagcctcccaagtagctgggactacaggtgcatgccattgcacctggcttaatgtgatttttttttcttgaggctgtgttcctttgtcaaaaaatcagttctgctagtcctagtgttcgaaataaagagaaaataaagaggcctgagaaagacattcctagcccaataatgaaatttcaaggaacagaatgtcaaatgtgatgatgacttggctttatgatatgaaaacagttggaggatgtgatctcaaaacaaggaagcataattcattaagccattttgccaagaactctgatcagaatgtggtagcttataaaggcattagaagcttcaagatattattcacatttttcagtcaaaatataccagatttggggaggaaatgatatgctattgttatattcaacaatttgtagggcgtttgaaggtgtagggacatatacctcttgcatgtcaacagaatgtagtcgttaaacattacatatgagaccctctcctaggcttgtgcagcattgagaaaaatataagtcattgttcttgctgttgagatgcatacagtttatccaggtgatgggtgtggggtaagaaaggaaataaacaaaggacaagttaaatattaccacgtcacgtggtggtgaatgtaggctgtgattcgctggtgtagagaataagggcagttagttgaggagagagagagaacctgagatctctcagaggataaggtccaagccctttggccaagcatttcaaggccttccacaatctggcttcgactttatctccaatcttctctctcaatatcytctatgtaaaacagctcttccagtcaatttggttgattcctgaagaaatacacctgcctctctgtttataccctgttaatttaaggagtttgaaataaaatgaaggagagattggaaactttacatgcatacctacatatacacacaaaataatttcagaataaaacaatttaaactgctttccttttaaatcaaacaaacaaattccttagcagtagtaagtataaaaactttccatgcctaatctaccattctcctttccccttctgtctggctagagtggaatcaaagcccagggtgatcttagaagctacatgttgagggaggcggagcctatagcagcctgagtccctgaatgactgtgtggag

SEQ ID NO: 676776 - DNA, 666 bp, Homo sapiens
cacatggaactatgagtccattaaacctctttcttttgtaaattgcccagtgtcgagtatgtctgtaacagcagtgtgaaaacagactaatgcagcacccaacctcagctgagggagtgcttcaatggtgctgacatcttagcaggaagcccaagagtcagtcaagacccagggagtggggaagaaaggtgaacaagacagagggaatcatgtgtgcaaatgcctaaaggctttggaaatcatagaaaatttgagaaactgaaaatggaggagaagagaagaaagatggaggctggagagtgggagaaacctttgacagatgaagtcagtgataggagtagaggctggatgacaaaggccagaaaggtcaggccaaggactgtaccytttattttgaggagaccaggagagtcagccaaagctgtgaaccagggctcggtgtgaccagctttgtgtgccaccgtcaggatggcaatcaaagaaaagagaaaggcaaaagaaagctcaagaaaatgtagctcaattagctgcacctagttttcttagagagcagaatgcaccacctaaaatagcagagtctgggaagccgaggcgggcagatcacctaaggtcaggagttcaacaccagcctggccaacatgatgaaaccccatctctactaaaaat

SEQ ID NO: 676777 - DNA, 1137 bp, Homo sapiens
tgcctctgtatctagtgaagtaaggggttgtgtagttcagtggcatcctgtggttgggtccatggaaacacgggttggtttggacacctgcagtgttttcttttggcctattaacaagatttctctgtgacctcgggctcggtgctatttttacaggtacgagagaattgaatcacatcaggatctgactcaaaaataaagtcttggcctttgcattaagatatgattattaattacaagtttgcagtgtaggtacatttaaggtgaattttaatctagcgagagcaaatctctaaatgttgatacaaaaaattcrgttgtcttgtgctagtttttatataactgaaatatcactcccagtcaatgtgattctgttttaaatcatggctcttgataggaggtgctttctgacccccaggggacattcagcaatgtctggagacatttttagttgtcacaaccgggcgatggggtgtgctactgacgtctggtgagcagaggccagaaatgctgcaaaacatcctataacacacaggacggtcccccaacctagaattatagtatccagctcagaatgtccattgtactgaggccgagaaacctcgctttaaaacataagtcggatcatgtcattcccgactccagcctctctgctgctttctgagttgattcacattaagatccaaaggcttcctgaggctgagaggaccttgcatgccctgactcctgctggccttgggccccagccccccttacacgccttaggccttggcctcggtcttgccttcccggccctgtcagcctcccagcctctctctccttctccagcgtccagcagggcatggcagctgcactgtgttcaggccttctggatgaccttctgaaaaacagcacctgtcttcctcgccaggtcagttcctgtccccactccttgctttagttttctacacagtccttctcactgcatggcacagaacagcccaattgtttgttttgtgtctccttcctctggaatgtgggcaaatacaatgtgcgttgtattttcagtgcctagaatagagcccggctcacagatggcactcaattaatatttgttgaaaaagaaaaaagatgaatgaacaataaattagttttaat

SEQ ID NO: 676778 - DNA, 2258 bp, Homo sapiens
tgaagtgataatcttgtttattttggtgaaattgttaggaagagacacataaaacatttacatgcaatcagtaatgcacctccaaacagttttgtggactgcaatctcattttgattttaccatgttctcatcatatgtcatattttaaatgaatgtgaattacatggaaatgaatgtcataactgagataagatgcatgccatgaaaccacaggtggttcaagcattttattcccaggtgtggtcactaagagtcatcctattttagccaaggtcaaatgcatagcaacttcattcagcagattyaatatcatcttcacccgagaataattttaaagtaccacaatataaattaaatctacaatatttcatttaaaactattatgttttagttgttttggacattattctttattttggaaacaagcagaaaattgcagtcagctgaggtggagagagaagaccattcagctgaaggagtgcagggcagaggtgagaacagctgagccctccagtccacacagagcatctattggtaacaagttaatgaatgccttgtcataacttaattccatttgtcactgcacatgtgaacagacagacatcattacctgagtggtgtgactgtccctgtgtctttgaaatgtcgaagtccctgtgccacttatagacaaccgtgagtatccatcttcttcaggtaaacctattgaggtcaacacaaatcgggagttaagcagtgtctccttgttccaaataaagtaagtcatgcactcattacaataaactagaattgttatcttttatgaattgaaatgatgatccttaaacacaaactaaatactaaattttgcaatgaaacatgggcatgcacagtattgtggcagcttcatttaggaaaagagggcatatcctgccaaaggagatacaatgataataaggagatatgtgataatagcacaaaagtgagcagataagtattggaggggagaagggaaacttctagagactgaaaaggtttgaagaagcatacggggtcagtgacgggcccactgagtcgctagggtgactgcagacagcagaatgtggctgccattcataggattgcagggagacgaggaagggattgaaaatcagagcataactaagcctgtgtgtctgatgaattccactggctgtagttcattttgtgcacaaggaagcaaagagattggctgaatttccatgaggaaaaggtggggagagctgccgattcacaacacaccaattcatgagcaaccatgcagagtaacttgtaggtttatgaaactttacatgtccctcaacaacgcgaagttactatgaggcaccaaatgatttgattaattatcctttatgatcaaagcagtttcccagcctctgcactattggaattttggcctgtataattctttgcagtggggtctgccccatgcatccctgacctccacccactagatgccagcagcacccccatttgtggcacccagaaatgttcccagacattgccaaaagttccttggagggcaaagtcatcccctcctacacgggctgagaatcactgtgatacaggcgcaatgcatcaccgcaagtgacttcgattaataaacatgaatagacaaaaagagaaataagaacccaacaaaatgaattcaactcagagaactttaaatactgaagtgattactactctcctctgaaagcataattaactagcacaggtaattgattaaacatatacataattcctaaattaaaaatcattagacaatcagtgcacgcttttccaattataggagagagttcctcagggaagtcgacacaatcctgtcaacacacaacaaggccttccaggtgatcttgttacatgtccagataccttggtatggaaaagctaacttcatgaagactgggcggacaatggctagtgggtggggggggtctcttgctggagaacagatctcggccacaggcagcagcagtagcctcaggtgctacgtggcaatagtgtccttagacactgtggcggcaggacacaggaaaggctccaatcacagtgagtgtcagagcagcctgaaattcacacaggcggaagggagtgtgtcaatccaagatcaggcacaatatgaaatttcaggaaactagataaagcagatagttggaaaaaaaatgtgtttccgggtagtagggcacaacaaagggcttgggattcatgtgaaggaccacctcttagaggggaataa

SEQ ID NO: 676779 - DNA, 2258 bp, Homo sapiens
tgaagtgataatcttgtttattttggtgaaattgttaggaagagacacataaaacatttacatgcaatcagtaatgcacctccaaacagttttgtggactgcaatctcattttgattttaccatgttctcatcatatgtcatattttaaatgaatgtgaattacatggaaatgaatgtcataactgagataagatgcatgccatgaaaccacaggtggttcaagcattttattcccaggtgtggtcactaagagtcatcctattttagccaaggtcaaatgcatagcaacttcattcagcagatttaatatcatcttcacccgagaataattttaaagtaccacaatataaattaaatctacaatatttcatttaaaactattatgttttagttgttttggacattattctttattttggaaacaagcagaaaattgcagtcagctgaggtggagagagaagaccattcagctgaaggagtgcagggcagaggtgagaacagctgagccctccagtccacacagagcatctattggtaacaagttaatgaatgccttgtcataacttaattccatttgtcactgcacatgtgaacagacagacatcattacctgagtggtgtgactgtccctgtgtctttgaaatgtcgaagtccctgtgccacttatagacaaccgtgagtatccatcttcttcaggtaaacctattgaggtcaacacaaatcgggagttaagcagtgtctcsttgttccaaataaagtaagtcatgcactcattacaataaactagaattgttatcttttatgaattgaaatgatgatccttaaacacaaactaaatactaaattttgcaatgaaacatgggcatgcacagtattgtggcagcttcatttaggaaaagagggcatatcctgccaaaggagatacaatgataataaggagatatgtgataatagcacaaaagtgagcagataagtattggaggggagaagggaaacttctagagactgaaaaggtttgaagaagcatacggggtcagtgacgggcccactgagtcgctagggtgactgcagacagcagaatgtggctgccattcataggattgcagggagacgaggaagggattgaaaatcagagcataactaagcctgtgtgtctgatgaattccactggctgtagttcattttgtgcacaaggaagcaaagagattggctgaatttccatgaggaaaaggtggggagagctgccgattcacaacacaccaattcatgagcaaccatgcagagtaacttgtaggtttatgaaactttacatgtccctcaacaacgcgaagttactatgaggcaccaaatgatttgattaattatcctttatgatcaaagcagtttcccagcctctgcactattggaattttggcctgtataattctttgcagtggggtctgccccatgcatccctgacctccacccactagatgccagcagcacccccatttgtggcacccagaaatgttcccagacattgccaaaagttccttggagggcaaagtcatcccctcctacacgggctgagaatcactgtgatacaggcgcaatgcatcaccgcaagtgacttcgattaataaacatgaatagacaaaaagagaaataagaacccaacaaaatgaattcaactcagagaactttaaatactgaagtgattactactctcctctgaaagcataattaactagcacaggtaattgattaaacatatacataattcctaaattaaaaatcattagacaatcagtgcacgcttttccaattataggagagagttcctcagggaagtcgacacaatcctgtcaacacacaacaaggccttccaggtgatcttgttacatgtccagataccttggtatggaaaagctaacttcatgaagactgggcggacaatggctagtgggtggggggggtctcttgctggagaacagatctcggccacaggcagcagcagtagcctcaggtgctacgtggcaatagtgtccttagacactgtggcggcaggacacaggaaaggctccaatcacagtgagtgtcagagcagcctgaaattcacacaggcggaagggagtgtgtcaatccaagatcaggcacaatatgaaatttcaggaaactagataaagcagatagttggaaaaaaaatgtgtttccgggtagtagggcacaacaaagggcttgggattcatgtgaaggaccacctcttagaggggaataa

SEQ ID NO: 676780 - DNA, 595 bp, Homo sapiens
tatgttgtgcagcgatcgagttccatcttgactttgccacccttcacagtcacsgcctccgtggttttaagtggatgatgcttatatacatggagccgcacattcaccttcattctcacagctcaccccttccttctgagttcagtttccttcttcctgaagcacctcttacacaggacgttttgaatcaagaactttgttggtggcacactaactcagtcttctttaagtgtctttttttattttgcctcttgaaatacagtttaagtatagaatatttattaaccatgattttccctcagcactttgaaaatattattctattatattctaacatctattttggctgatgaggcttcttttggtttaatggttatccttttgtaggagagctatgtctttttctctggttgcttataagatctgtttgcctgtggtgttctgaagttccatcaagatgtgtttaggtgtggatttatttattcagctcaggacacgttgcattttttaatctgatttatgaaatttagtcaatttatgcaatatgattctacacctagaaaaccctatagtctctatccaaaagctccttgac

SEQ ID NO: 676781 - DNA, 595 bp, Homo sapiens
tatgttgtgcagcgatcgagttccatcttgactttgccacccttcacagtcaccgcctccgtggttttaagtggatgatgcttatatacatggagccgcacattcaccttcattctcacagctcaccccttccttctgagttcagtttccttcttcctgaagcacctcttacacaggacgttttgaatcaagaactttgttggtggcacactaactcagtcttctttaagtgtctttttttattttgcctcttgaaatayagtttaagtatagaatatttattaaccatgattttccctcagcactttgaaaatattattctattatattctaacatctattttggctgatgaggcttcttttggtttaatggttatccttttgtaggagagctatgtctttttctctggttgcttataagatctgtttgcctgtggtgttctgaagttccatcaagatgtgtttaggtgtggatttatttattcagctcaggacacgttgcattttttaatctgatttatgaaatttagtcaatttatgcaatatgattctacacctagaaaaccctatagtctctatccaaaagctccttgac

SEQ ID NO: 676782 - DNA, 937 bp, Homo sapiens
ggcaaaattcctctttctggaaaaattaactgtggttttcagtagctgttagtggactgtagcaagacaggcctgtgctcttgccaaggatctttctttcccgcccatccacactgttgtactatcccaaagtacctggtctcatgggcatgctctacatgaaatgagttaggggtcagccctgttctcagcagagacttgtcacagaatctttcaccaccatcggcagcaattagcactaattggtaccctgtgcacccgcagaacagcaagggcagtgatggagtgaacaggcaggacaaattaccctttcgcctctgggaagtgaacttattggttctgtgcgaagctgctctgttcccactacctcagctgggcctaggaggtggattaaggaggaatttattccctgaggctgtcaaacaaaaggattgaagaaggtcagttcactgagtgggcaaaacaaagcagctgagttatgaccacgaaacagccataaataggtctccacgtcctcactccgtattgcctcacccttcctatctctccctctcgctttccatttctccctataatattataaatccaatcaaagcaagtgctctgtcagcatttttctctccttagcctcagagtgcctgctgtttatactcattactgtgcaagccgggtcaccccgtggctgggaagagatgtggtcatttgtctttgctttgctactctatcaattcatcctatccacttcaccagagatacgggagtgacgtgaaaacaagtaaaatgggacctgtgcaaaactttggtctttgcagaatattaawtctactacgtgcccttgggtttgtcattctaatatctctgccatagctactttaagtcaagaggttaaagaatccttgagcgaattatcagagaacaattaataatcctttcctct

SEQ ID NO: 676783 - DNA, 1343 bp, Homo sapiens
aagttttttatgcatagtccataagcaaatacataaatacatctgaacacacaactctttttttaaatgttttgttttgagatagtagtaaattcacgtgctgttataagaaataatacagagagacacatgtactctttacacatacctatgtaatccagctatttttatgtaatctatctattttcttatgttgtgaggctttattgttagttttctgtcctccatccaatttaccgatgcggactaagagtggaaataataaatgtggctgagtggacccggtcatgacagcactgagaacctgggagtattctccctggagatctatgcagtcactctcagcttttcactttagcttgagacactgtcactccctgctaagacttcctttctagagaacccctgaacactgcttggtgaaaagcagagcccttttctgtgaggctgaactattcggattcttggaaaatggcggtgttgtggttcattgggcaaaggatgtagtttgtgtttaacattggaatattccaatttctattgattagatcaattaatattctagtgctgaggtgaggtagtatgttttctttcctccaaaagcaattactctgtattgactgagctctaggggaaatgtttcctaggacatagctgaggttggtttcaatacagttggagtctttcatgtggaaaattctctacttagcaattatgtgcaatgagaaaacttgaattcataagtggttcagtaaatcacaagccatgaagagtacaggaagagccaaagagagaaagtcttggcatttagccaaattcacctcaccaatatttcccaaaaaaatggccaacaaaatcctgtggagagcattttaaaaacacagatttctgcaccaaaatacacccatccccactcctgatggttctaaattcaacggattaaggcagaaccagagaaacagaatttccataaagcttcccacragggtccactcgggagccaaggttgggaaccactgcttcaggctggtatatttcactgtgatgaccatcccttcatagtaggaaagagtgaatgaacacctcccttcactttcactgtcaaaattcttaatttattttaaaattttttttacaatgataataatgaatttcagttttttaaattacttaatggagattatctagttggaggtattatgatgccagtttcatggaagaatatgccctgaattcatcccaaatttgaagagaaaaaatactataccccactgctgccagaatatttcacttgtgaccaaaaaaaaaaaaaaaaaggaaaagaaaaactcaccgagcaaggc

SEQ ID NO: 676784 - DNA, 1343 bp, Homo sapiens
aagttttttatgcatagtccataagcaaatacataaatacatctgaacacacaactctttttttaaatgttttgttttgagatagtagtaaattcacgtgctgttataagaaataatacagagagacacatgtactctttacacatacctatgtaatccagctatttttatgtaatctatctattttcttatgttgtgaggctttattgttagttttctgtcctccatccaatttaccgatgcggactaagagtggaaataataaatgtggctgagtggacccggtcatgacagcactgagaacctgggagtattctccctggagatctatgcagtcactctcagcttttcactttagcttgagacactgtcactccctgctaagacttcctttctagagaacccctgaacactgcttggtgaaaagcagagcccttttctgtgaggctgaactattcggattcttggaaaatggcggtgttgtggttcattgggcaaaggatgtagtttgtgtttaacattggaatattccaatttctattgattagatcaattaatattctagtgctgaggtgaggtagtatgttttctttcctccaaaagcaattactctgtattgactgagctctaggggaaatgtttcctaggacatagctgaggttggtttcaatacagttggagtctttcatgtggaaaattctctacttagcaattatgtgcaatgagaaaacttgaattcataagtggttcagtaaatcacaagccatgaagagtacaggaagagccaaagagagaaagtcttggcatttagccaaattcacctcaccaatatttcccaaaaaaatggccaacaaaatcctgtggagagcattttaaaaacacagatttctgcaccaaaatacacccatccccactcctgatggttctaaattcaacggattaaggcagaaccagagaaacagaatttccataaagcttcccacaagggtccactcgggagccaaggttgggaaccactgcttcaggctggtatatttcactgtgatgaccatcccttcatagtaggaaagagtraatgaacacctcccttcactttcactgtcaaaattcttaatttattttaaaattttttttacaatgataataatgaatttcagttttttaaattacttaatggagattatctagttggaggtattatgatgccagtttcatggaagaatatgccctgaattcatcccaaatttgaagagaaaaaatactataccccactgctgccagaatatttcacttgtgaccaaaaaaaaaaaaaaaaaggaaaagaaaaactcaccgagcaaggc

SEQ ID NO: 676785 - DNA, 610 bp, Homo sapiens
cagggccatgagcagtgcccagggcaggacatgcagcccgtgagaagtgttggcacggtgtgtatgttatgaaagggttctttggcccaagaaagcttaggcaatgcttcacacagcccccttttgtagacttacatttcatctgagtattttgaagcttctgagacttttctgcgataaatctatttcattttgtttaygccagagtttgacaaatgtatttaaccacagaagcttcttgttttattaccctattaccaactaccattttggaaatagtcacacaaagccttaaaataatttctaacaccagaggaactctacacaattccataaaactacttaggtaaggatttagggtaaacagacattgaaaaataatgccttcatagctctagtctggtcatccattcattcactcattgaataagcatgtcttggacatctgccctgtaccagacatgacatcatgtctcagagatatagtgattggtacaatccctgtatctctgagcctcagcatctatgatatggtgtgagaaacaccacactctatgggagagcatgttggagcagcactgagcccagtctcgggctctgggaaggcttc

SEQ ID NO: 676786 - DNA, 610 bp, Homo sapiens
cagggccatgagcagtgcccagggcaggacatgcagcccgtgagaagtgttggcacggtgtgtatgttatgaaagggttctttggcccaagaaagcttaggcaatgcttcacacagcccccttttgtagacttacatttcatctgagtattttgaagcttctgagacttttctgcgataaatctatttcattttgtttacgccagagtttgacaaatgtatttaaccacagaagcttcttgttttattaccctattaccaactaccattttggaaatagtcacacaaagccttaaaataatttctaacaccagaggaactctacacaattccataaaactacttaggtaaggatttagggtaaacagacattgaaaaataatgccttcatagctctagtctggtcatycattcattcactcattgaataagcatgtcttggacatctgccctgtaccagacatgacatcatgtctcagagatatagtgattggtacaatccctgtatctctgagcctcagcatctatgatatggtgtgagaaacaccacactctatgggagagcatgttggagcagcactgagcccagtctcgggctctgggaaggcttc

SEQ ID NO: 676787 - DNA, 692 bp, Homo sapiens
tctctctctttctctttctctgccagcctctctctctcttctctctttctctgcctctctctctctctctctgtgtgttgaacgaggaggatagcaaatcattggcttctatttttagttacccatgaacttaaaaacaatgaaaacagtgacatttctttcaactgtagtaacagtctctaactgtgctaataggctstgaatgctgcatcaaggaagatgtcacggcactgttttcagccctggtcagatctgggacacagtgttcaatctggccagcaccatttcaaagagctgtttacaaaatgagtgtgagggatctgaaaattacaaacaccacataggggaaacatcatagagctggggatatttagacaggataggagaaggcccttggggaacaagctcactgccttttacgtagctgaagtcccgtcatgctgaagatgtcatagacttgttttgcactcctcttggaaggtagaactatgaacaattgtcaaaaggcacaaaagagcaaactggcttaacacaaaatggacatttccaagttttagtgcttctccatcaaatagacctgagtggctatttctctagaataaaatagaatgttttcctgtccaggtaggaggttggagctatggagttttcttcttacccagagtcagtggtttgaaggcatctcttcttac

SEQ ID NO: 676788 - DNA, 1533 bp, Homo sapiens
gtgcctctttagacccatgtagtgtatttttagactcactcatgcagtcattcttgtagtacctataaggacaatgtcagaaatatatatatttctgtcagtgtgtgtgtgtgtatatatacacatatatgtgtgtgtatatatacacatrtatacatatgtatacatatacatatacatatatacacacacacatatatgaaggcaaggagagaactttctagggtgatggaaatgttctgtatcttgactgaggtcaagatatatatatatacacacacacacacatacacatatataagagccataatctcagggagaaggaaagttgtagacaatgaaccaacattgaagtactgggcccatcaaggaacaggattgtgggtaaatacatcaggcttttagtcggaatcctgaaaaggctatgccctagaagtagagttgaaccagaaattcacaacccccacaagaactcaaaacaagctttgaatcaattaaatccctgaatgaattaaggtgatcttcctaatatcttaagggcctaccagaagtaaatcctctctagagaaagataccattatctagctagaacagaggttggcaataatcaatcttttagtcttgtggccaattaggtttctgttgcaactgctcaactctgctgttgcagcacaaaagcagccacagacaatatataatgtgactattccagtaactctacttatggccacttaggtttgaattttatgtttcatgtgttgccaaatattattcttcatttgattatttttcaatcatttaaacatacagcaaacattcttaaagccagacaaaaacaggtagcaggtcagatttggtccatggggcataatttgtagatccctgagctacagccacaaattttccttacaatttttcacatacaatttcaccttacaattttcacatacaatttcaggtattctatcaaaaattaataggcacggcagtcaataggaccttatgattgagaaataatggaaaaacaagacaagagaaacaaatccacagaagatctacagattggagttttcagacacagactttaaaataactgtgattaatatattcagtaacttagataacaaaattacagtaactgaaattaaacacccaatagaaggtagataggtttaatggccaattagacacacctgatgacaggattagtgaaaatggaaaaatcagaggtacatgtattaacatggatgactcttacaatgttgagggaaaaaagcaaattacagaaacatatactgtatagtttttgtttgtttgtttgttttttaagacaagctttttcactgttacccaggctgaaatgcagtggcaagatcacagctcattgcaacctatacctcctgggctgaagcaatcctcccacctcagcctccagaatagctgggactacaggcacgcaccaccacacctggatagttttttcactttctgtagagacagggtctcgctatgttgcccaggttagtctcgaac

SEQ ID NO: 676789 - DNA, 1533 bp, Homo sapiens
gtgcctctttagacccatgtagtgtatttttagactcactcatgcagtcattcttgtagtacctataaggacaatgtcagaaatatatatatttctgtcagtgtgtgtgtgtgtatatatacacatatatgtgtgtgtatatatacacatatatacatatgtatacatatacatatacatatatacacacacacatatatgaaggcaaggagagaactttctagggtgatggaaatgttctgtatcttgactgaggtcaagatatatatatatacacacacacacacatacacatatataagagccataatctcagggagaaggaaagttgtagacaatgaaccaacattgaagtactgggcccatcaaggaacaggattgtgggtaaatacatcaggcttttagtcggaatcctgaaaaggctatgccctagaagtagagttgaaccagaaattcacaacccccacaagaactcaaaacaagctttgaatcaattaaatccctgaatgaattaaggtgatcttcctaatatcttaagggcctaccagaagtaaatcctctctagagaaagataccattatctagctagaacagaggttggcaataatcartcttttagtcttgtggccaattaggtttctgttgcaactgctcaactctgctgttgcagcacaaaagcagccacagacaatatataatgtgactattccagtaactctacttatggccacttaggtttgaattttatgtttcatgtgttgccaaatattattcttcatttgattatttttcaatcatttaaacatacagcaaacattcttaaagccagacaaaaacaggtagcaggtcagatttggtccatggggcataatttgtagatccctgagctacagccacaaattttccttacaatttttcacatacaatttcaccttacaattttcacatacaatttcaggtattctatcaaaaattaataggcacggcagtcaataggaccttatgattgagaaataatggaaaaacaagacaagagaaacaaatccacagaagatctacagattggagttttcagacacagactttaaaataactgtgattaatatattcagtaacttagataacaaaattacagtaactgaaattaaacacccaatagaaggtagataggtttaatggccaattagacacacctgatgacaggattagtgaaaatggaaaaatcagaggtacatgtattaacatggatgactcttacaatgttgagggaaaaaagcaaattacagaaacatatactgtatagtttttgtttgtttgtttgttttttaagacaagctttttcactgttacccaggctgaaatgcagtggcaagatcacagctcattgcaacctatacctcctgggctgaagcaatcctcccacctcagcctccagaatagctgggactacaggcacgcaccaccacacctggatagttttttcactttctgtagagacagggtctcgctatgttgcccaggttagtctcgaac

SEQ ID NO: 676790 - DNA, 620 bp, Homo sapiens
ctgtgaattcatgtgttaatgtttactacagttaccaattttgatgctcaggttgtcctaaatttgtctagtggaagttccttcaagctgaatcctatgcctttgaattgtttccgtcattgtctaagcacttccttacttcctggcaccacaagatgttccaagctcatctcgtaccttccttgtccactctggaatctgctgcttctctaaggagctgtcattcattttaatgaagaattgtattcacagacacagacacacacaaatccatgtttctgcctgtctgtctgtttatctatctatcttaatgttaattcatacccattttccagattttagtctagtaccacagggttcattctggtttcttcctttccatatttrtaactcttacctgtcaatgagaaatgtggctcatattattcttagtatatatacttatttaatcagtcccccttgtgtataatcaatctcccgttgccaccattgccctcctctgcagacattctccttaacttgattgggttccagtaccccactctgggcctttgccaaccacctgcttggatgtcttcgtcaccttcttagagttctcataccctatattatactgctgt

SEQ ID NO: 676791 - DNA, 987 bp, Homo sapiens
tactagaatcttggcataatacaaacctatgttgatctcaatttagtataaagtaggtccatttggacctcatacaaatagggtgatatgaatgaaattgcagagggactagccttttttcagccatagtagcatggatcccaaaaatactttgaatgactatctccattttataaatgaggaaactagtctcaaaatctagagtaagaatcaacaaattattttgtaatcttggacaagtcactgctttgcttctggatctaaattttctcattttgattgttcagttatagttctgttgcatttaacttttgtgcaagaagcctaataagtagcaacagctgactttttgactctgtcctttcttcattatattttgctgacttctgaaaacaatttttttttgttatttctaggtaacttacagaccatgatggattcatagacattgtattttgcttccacaattcctgttgagaatttgtatatatctgaacagttaaatggttatttcatcctgacactgaaggcagtgaaaataatgcagtgatatgcaacactaagcctgtttctcaaacttttttattgtaaatttgataaagtaacttaacctctctgggcttcaattttctcatctgtgagatagttaaattagataatctctgaatgtccatctataataataataatrattattattattattattatttgagacggagttttgctcttgttgcccaggctggagtgcagtggcattatttcggctcaccgcagcctctgcctcatgggttcaagcagttctcctgcctcagcctcccaagtagctggaattacaggcatgcaccaccacgcccggctagttttgtgtttttaatagagatggggtttctccatgttggtcaggctggtcttgaactcccgacctcaggtgatctgcccacctcagcctcccagagtgctgggattataggtgtgagccaccgc

SEQ ID NO: 676792 - DNA, 610 bp, Homo sapiens
gaataatcagtctcctaatgtgcaaagtagtggaaagatttagagtgccatgtttcatttttyatttgtgatatagtagtagtagtattccatgtaggcgaagaatgagaataaatgcggagcagaatccttgatgtttacttttgctcttagccaaggaaaatgacatgaatagcgaagaggagtttatacttactgattatatttcctaggaagtgggaaatttatattattctatttaggaagttattacatataaattttgtgccaggttctattgtaagggctttatttacatatattacctcatttaattttcacagtagtcttatgaggtgaatgctatttttttcccccatttcacagatagagccacagaaaggttaagtaactagccgtggttacagagccaagcccagcagcctgactccagagtcagctctcagttatcacaatatgttgccttctcatattgtgtaggccatggaagtccatgtattgagatcatccagatattgctgccactcagcctttcttcaaatgggcaaccatttctcatcttctggtgtctggtgaagatacttctaggttctcaaatacttctttgcag

SEQ ID NO: 676793 - DNA, 668 bp, Homo sapiens
tatcccagcagcaaacctggggtctgcttttggtgctttatatccccacgtggttatcccatcttatgattaagtttgattatctgcttgtattctacataaaatactgaattcaggaacagagttttgaaacattttattgtcttcttatgtaactgtatttctaattgctgccagagctgcattttagtactgagaatccaaatgctttagaattaatgatgataaattctgctgagttagttgtttaagtttaagtattttattagtttgggagtgtgtgtgtgtgtgtgtgtgtgtgtgtgtgtgtgtgtatgtagaactatgtatatagaacaatatgtatgtatagaactatatatatatatttcagggttcttataaagcaaatacctagtagtagagacatggtattttatttctcttaaatgagtacactcattactgttgaataattagatttattctttattgaagcaggcttagaaaagattacccttttaaaaaagacatgactatttcatattgttgtagatgatttttaaactttatttgtattcagtggtttcaaataagaaagcaaccctgagtttttgtttttaatgtcatttagggagcatctactgtattatacttrttttatcttatatctttggtatcatcacatg

SEQ ID NO: 676794 - DNA, 672 bp, Homo sapiens
tgcaaaaccctggtttataaagaaaattcctactaggctgggatgaggccctgtaaatatttggcccaaggaaaactcttgtgcctcaaagatgagaaaccaaaaagaacaaacccaagttatttcaaagatatgaaacataaaacaagaaaaaaaaagaccagaaaaagtaaatggcagataaagtgttgccaaagagcagataaaaatagtaaaaagcattttactacaaacataaaatacttaaacaattacctctatgaagtttgggcacaaagtagagagggaagaatcatggaagtsacagaaagacaagtgatgttgtttgagctggcgcactacagggtaggcatgggggaaaatgtaaaccatcaaagaaacaaagatgtgtttgaaggaagatagacaataataatagcacaagagctcagaggttaaaaataagaaaaccaagcaaaatgaaattgatttgggtacaggaaagatttattaaacaggacaaaaaggtgagcaaaatactgattttttaaaacctggtgattgtagagttcaaaaaaacaagcttacttgtaaatattaatgcaaaaatattaaataaaatattaccaaatagactcaaacaattcattaaaagaataatacaatgtgacaaattggggtttattcataata

SEQ ID NO: 676795 - DNA, 671 bp, Homo sapiens
tttaccaggaagactttcatctcagcttcagctctaaatcactttattcatgaataatgaactaacgatcctgtgtacttgtgaattattttagatatctaaattattgttaaaatttacattctcactttatgtgacagaatgtctaattgaatatgcacttggtatagcagccacttcctcagactctcagagaatattaaagaacagggtgaggtattagcaaaacgggaacataaaaaattgaacaaaaaggtatatttcctcacactaacagcatttttacctgcactgtagaacaattaagaattactattctgctaagtgcctaggccattttcttagaagaaacaaataagcactctgtaacagcacatttcaaagactgataayaaaattttcagtgcatagcagtataataaatgtatcattaactctttgtaactaacaaagatatttaagatggaagaaaaaatgttttgggtttcttcgttttgtttttctgtaattatctgcaaaatttttaaagccttagcaaattttaataatagtccagtgaatgaccccattaatctaaaggctaaactggatgaagcctaaataatcatcttgtatgtctttatatcttgagtgctaaacagaataaagttctacaacttggaatattttaa

SEQ ID NO: 676796 - DNA, 1680 bp, Homo sapiens
ttcctttttgagacagagtcttgctgtgttgcccaggctgcagtgcagtggtgcgatcttggctcactgcaagctccgcctcccaggttgatgccattctcccgcctcagcctcctgagtagctgggactacaggcgcccgccaccacacctggctgatttaaaaatatagtagagacggggtttcactgtgttagccaggatggtctcgatctcctgacctcgtgatccacccgcctcagcctcccaaagtgctgggattacaggtgtgagccaccgtgcctcgcccatttttttttttttctttttctgagaccgagtctcaccctgtcacccaggctggagtgcggtggcatgatctctgctcactgtaacctctgccgcctcctaggctcamgtgattctcctgtctcagcctcctaagtagttgggactacagccacccaccaccatagccggctaatttttatatttttagtagcaatgaggtttcaccatgttggccagcctggtctcaaactcctgacctcagttgatctacctgcctcagcctcccaaagtgctgagattacaggcgtgagccaccgtgcccagccttgctggtattattttattagttcttaaaaacacaatttatctgaggccaactgtcctgcctgaatcctatgccaccacctcctaatttatgacagttgttaaatctgttaaaacattaatgtttttcttttaaaatttttatttatttagagacagggtctcgctttgttgcccaggctggagtgcagtggtgcaagcttgcctcactacagcctcaaagtcctgggctcaagcagtcctcctgcctcagcctcccaattaactgggactacagccatgcaccattgcgcctggctaattttcttattttttgtggagacagggtctcaccatgttgccaggctggcctcactcctgggtcaagggatcgtcccacctcagcctcctgagtagctgggactgcaggcacatgccaccatgctcagctattttttttttttttttctgtagagacagggtcctaccatattgcccaggctagtctcgaactcctgactcaagcagtcctcccacctcagcctcccaaactcctccctcactgcattacagcagtgagcctctgcatctggcctactttaatgttgttttccaataaatactttaaataaataagcaaatacatatacgtgattggagaattttgttattgaaatagaaatgctagtagcctcaacatggtatcctactcttaaggttcttgtggcaggcacgctaagttctagaattcccctcccttgagtgtgttttctttgctgcacagttttacctgcttcatattccctgaatgtgctgtgtaccctcaagcccctgcaacttagctgatgctttttttcacccaaggtgcccttgtccattttttctctctggctgatacttcctgtcacaactcagcagtcccatgtttttttttcccttttgaaagtatttccggccacaaagccagagttagatgccagttcttttcatgtctctccatagtcacgtaacaccctgtgcataacttttcttagagtacttactaaattgaattttaataatgggctttaactgtcctctccctacctcttctgtctcgatgttcaac

SEQ ID NO: 676797 - DNA, 582 bp, Homo sapiens
gacacttaggttgcttccaaatcttggctattgtgaacagggctgtaacaaacatggttgtgcagatatctccttcaatataatggtttcctttcctctgggtatatacccagcagtgggactgctggagcatatggttgctctatttttagttttttgcggaatcacccaactgttctccttagtggttgtactaactggcataatttaataaagcttttctygacctattcccaaaggaaactacctgctccctcttttatgtcctcatcatactttataaagactattatcacagctactattaacaatttactaactgtctcctaccaaactctaagtccttgggtgcagggtccatgctctcctctttttatcccaaatatttatcatggtacttcatactgaattaacaattatataatgtaagtaaaacagcatgaagaagagccacacaggcatagtcctgttgaggaggcggaacttgctaaccccacacaaaatgggatctgggcttggaagacaggtgaaaactggcaactgaggcataacctaataaaacagtgaaacgctcatgaagaa

SEQ ID NO: 676798 - DNA, 582 bp, Homo sapiens
gacacttaggttgcttccaaatcttggctattgtgaacagggctgtaacaaacatggttgtgcagatatctccttcaatataatggtttcctttcctctgggtatatacccagcagtgggactgctggagcatatggttgctctatttttagttttttgcggaatcacccaactgttctccttagtggttgtactaactggcataatttaataaagcttttcttgacctattcccaaaggaaactacctgctccctcttttatgtcctcatcatactttataaagactattatcacagctactattaacaatttactaactgtctcctaccaaactctaagtccttgggtgcagggtccatgctctcctctttttatcccaaatatttatcatggtactycatactgaattaacaattatataatgtaagtaaaacagcatgaagaagagccacacaggcatagtcctgttgaggaggcggaacttgctaaccccacacaaaatgggatctgggcttggaagacaggtgaaaactggcaactgaggcataacctaataaaacagtgaaacgctcatgaagaa

SEQ ID NO: 676799 - DNA, 599 bp, Homo sapiens
tatccatgagattacaagctttgagtgacaaaagttatctacttagaaaaataaaattatatatgtatatgtgtttataataaatatacatatttgatatgtgcaatagttgaatgtgcaaactgcaatggggaaaatattaaaactgtgatttttctggaccttaaatatagttaagtatattttaaaatgcttttgaaacatggaaaagttttctgaggctttggaagtatgaattcaaaatggtactgctaatgagagtaaatatttcaaggtaatgtgaaaagtctgagacagaggttattggccagtaatttaccyggaggaaggcaaggtaagtctgcaaacatagagcatgtggatctttctgtactatgtcattctgttcatataatctgaacattttttttaatctccatgcattactatcttgaataaacaaaataattaggcaaagaaaacatattttaaaaagttaaaacgtgttggaagagaaaccatcagaatataagctgttatgccttcccagcctctgtattaaacatggaatttttactctttaccctaagtcattgggagaagatgaaagttttttcaaa

SEQ ID NO: 676800 - DNA, 599 bp, Homo sapiens
tatccatgagattacaagctttgagtgacaaaagttatctacttagaaaaataaaattatatatgtatatgtgtttataataaatatacatatttgatatgtgcaatagttgaatgtgcaaactgcaatggggaaaatattaaaactgtgatttttctggaccttaaatatagttaagtatattttaaaatgcttttgaaacatggaaaagttttctgaggctttggaagtatgaattcaaaatggtactgctaatgagagtaaatatttcaaggtaatgtgaaaagtctgagacagaggttattggccagtaatttacctggaggaaggcaaggtaagtctgcaaacatagagcatgtggatctttctgtactatgtcattctgttcatataatctgaacatttttttwaatctccatgcattactatcttgaataaacaaaataattaggcaaagaaaacatattttaaaaagttaaaacgtgttggaagagaaaccatcagaatataagctgttatgccttcccagcctctgtattaaacatggaatttttactctttaccctaagtcattgggagaagatgaaagttttttcaaa

SEQ ID NO: 676801 - DNA, 654 bp, Homo sapiens
tgctaagtggagtatgtgacatttgcttcatatgcacagtggatgattgattccctcagcctaactgatagagtattttttctcctgaccttggtgcaattacattatagttgcaattttcaacattatattttaatagaatttttgaatctctttgttattaataaagttaaatataatcagaaatgaaaatctctgctgaaatattcaccttgatacacttccactttgggctgcttccagttcccgtcattgctttgcccagagtaagcaataaatgcacatttgttggattggatgggcactcttcccccacgrttattccatctcaaaaagaccaaggtgtttttcttcaaatggaaaagtcttctaagcaacaccctcgaaatatgaaatcagcaacaaaattcattacttgagatttttcatttagagaaatgatcataatgacatgctgtgttcacaagtgagattttctgtctttaagctcttaaagtatagtttgcctttaaattgcctccttttctaaatcaaacacagattaaacacccacataattacttttcggatagtttctttgccactgcatggatgtggaatgtgttgaaaatttgtagttattattgtttgaattttaagagctaaaataataaa

SEQ ID NO: 676802 - DNA, 654 bp, Homo sapiens
tgaagaccaaagcagagagcttcaggagcactaactcaatcttttgtcctccttttggcacttagctaatgtttcttgggcatgaaaagggaagtcattgggcttattgaaaacttactgcacattctgatgtaacaaaagcatctgggtaaaaatgttccaaagaaaacccatttatgaatcaataaatgaaagataaagaaaatatgaaactgtatctaatcacttgcttacttttttgtcctttcctttttcttggaatatccatgtcactgatgtgtcatacttcttggcagtatgtcaattaacaataatcacaccttggataaacctcattgctcacattactgccaccatgcaaagcttagctctattttaaatcaaaggaatttgactcagagcaaagaaactatttgcccaaactttgtagatcttttgactcttcagagtttgcatcatgtagtacaaaaaccactgccagaagatagaaagacctggtttctagtcttggctccgaaagtgattccccaggtgggtcgtaaggaatggtrtgatacttgcaaggctctctcctttgcaccacattcagagcaatctaaatcttctccctatctccacagccatgactttgtctaagtcacgttgctctcttat

SEQ ID NO: 676803 - DNA, 581 bp, Homo sapiens
aaaagagggtgctattattcattaggccaggatgagttataaacccagactgtccccggtaaacctggatttaggatggtgccacttataagcaccctctgagagcacctcttatgatgttcccagtgatctattgtgttctctaaagaaaagartgttgcatggacttgtgtccaaaagccttttcttatccaaaggtgatggggctcatccaatccaatctaccatgcagtattaaaagattacagacagactgcccaaggagagaagaggtctgagacacagaaacacaagaaagcacacacacagaaactatggaaccacttgagaaagaccaaggctgcctgattatgaaaggacttagctgagttatactgtctttgtcactcgccctcctaagaggcaggcattaggggctctatcaggacgcattatctcagaactcccatggtgcaaatttcatattgagataccaagtcttcattaacatactgattccaaggacttagcctgtgcaggggaggaagagacaaaagcaagccttcacagctgccaactgaattttataaaatatatcagat

SEQ ID NO: 676804 - DNA, 596 bp, Homo sapiens
gccagctcttcttcacttttctcacttcctatataccattaaagcttgaatgggtgcctttccttccaggacagtattctcatccgtttgctattcttttttaattccattcttgcctttctgccttagccatatgttagtctcatacttctctattgaataactctttttggctcaatggatatgagaaaccaagcaaaacttcacatttkaagtaaattattggcctagtttatacactaagtctctcttaaaattccataactgtttcttattcaggcacattaatgaaattctaaatgtcagcgagcagtaccaaaggcctgtagttacatgcttttcaaaataaagtattgccattgcctgcagttttgcacattctggtaaaaggcattaacagtttctttgtttctgcctcaattatcaattggtatcatgctcaaaaattgctgaaagattactaggttttggttagtagttaaagaaggtgagtctgctcagaatcacaagaacatagtatagactgtctgagttgtgcatgttacatgcaaggattaactcatgtgccagtctctggtgactggagcactgtgctg

SEQ ID NO: 676805 - DNA, 669 bp, Homo sapiens
tccgctctgctgtgtcctcacatggcagcagaactcatcatcctcagcgagtctacgacacctcagatcatgataagcttagtaaatacccccatgaagggaactagaagagtagaacattgtcttgtggaaacattattgagccacacaccagtctttctttacatgtatagttcaatagtctgaggtttgtcttgaacacctcagtggaaccaggaaaaatgtcatgatcacagttgacaaagcttcttctcgcttgcccagcttcccatggcrttgtaagaaatgctgccttcactgacctaaaccaaccctgtccccaccctccaagaagtctggcatttactggttatggcatgccactgacagtacctggggtcacccaaaagataggccagagttagcctatctcagaactcagctgctgctaatcttataagaagtctcatcccagcactttgggaggccgaggtgggcagatcacgagatcaggagatcaagaccatcctggctaacacggtgaaaccccgtctctactgaaaatatataaaaaattagccgggcatggtggcaggtgcctgtagtcccagctactcaggaggctgaggcaggagaatggcatgaacataagaggtagagcttgcagtgagccgagatcgtgccactgca

SEQ ID NO: 676806 - DNA, 674 bp, Homo sapiens
ctttggagcttttttcctaatgaaattgcaaatattttgttatgtttaatcttgaatgaagaggcagactgttatattaagaggcaaccaatgtcattccatcttttcttactactgaaaacattacaaaaaagaaacctgaaaattggcaggtaggcggcctccgcaataaccctgactgggtaaattctttctctctccaggccaactggggmatgcctttcttgagggtgctgcagactgtggtcaacagtgggatattcaactcatcatttttcctccaaagtcaatggaatataacaaccaatttactatcaaaatggagtgattgaaattaaagtataagttttataaaatagctctgtacttctagatttcagtccatgttttatttgaactaccttggttttcttatttctgggccctgactccatccagccacatcagaaaaacaaatcactactttatctgtgtgcctgtaattatttgcaaggatttaatccagttactgcatcaagttatttcagttaacacagcatagcgcttagcacaaagtaactattcaataaatagttgtcaagacaaactggaataggttttcttggaaacaacatagaatgtagaaataaaaattttatcctatttcttattgggcagaaaatggagaacaagaa

SEQ ID NO: 676807 - DNA, 1681 bp, Homo sapiens
tgatccccttcgccttcagagcgaggtcataacctggagtgtgtggatcccataggccagccacttcctctgaaccagcttcattaacattgtgtacacacaaactaactctctgtgtgccctgatataaaaagggtggggtgcactggtccatactagtcatttgatgcttagaaattatcttgaatatattttcttttacactaggtaggcattcttctaggttaaattataaaccctcctaagagtgataaatattatcacttatatcttcatcgagcagcaatatggtatctgcttggtgaaatgtgtttcttaaagcaagtctccatggcatgagtgtaagtcttaactttgctagttaaaagccttatggtaagttagacatccataatgcccaatctgtaaagtcctaatctgctaagagtataaactgatgtcctccacacaggactggtttgagaattaaatgagcaagtgtatctgaaggtcctgtcgcacaaaaatttgcaataaatgacaccacctctcttaagtaacttcaaaactattgctgaagataaagaagatgtgaaattaatacctgcataaacaagatggaaacttcctggaaaagaaacatctatttaaaagttaaaaataaaagtttatcatcatagaaaatgaaaatgtaaatgttaagattaaaattccaacacactcacacagcgtttacgtttaaagtgggcatcattctctagctgatttctgtcaacacgctttcctaatgattagcctattctttgtgagaactttcccctcacacagagatcccatcacattgcataataatccaaggacatttgccacttttaacaaagtctaagtgtttggggttttcttttgccatacaggttgtaagcagaacttatttttaatgtctatttcaaaaccatttatgtgttatttttgatggaaatgtgttaaaattgaaaacaaaatacagatttggttttgaaacagaaaccaggaaagcctcctgcaaacacacaggctacaagattgaattcagataacaagatccttactcttccttcttttagtccaaagcaaatgtcagtagctgctatttcatccctcctttgtagaacaaatgccagacaagctgacatatggaagacacacagtgctttgaggtcatccgaatattgatagaagtaaaaggacaagtcagtccccatgcagcccagtactccccaccccacagtgcattgagcatggccagcaacaaccaactccaaaacgccttgctgcatccacctgctcctggatgacactaaaactaaaaacactcaggtgctgtctgtggattgaaatgcagaaataaccgctaggtaaggaaaaaaaaaatctctatagagcaaatttttccatatataatatgaaacataatgtctacaaagaattattttcaatacaaaaatgccatggtttatataaaatrgtgtttttccagtactataaatagatgcacatttaagctaacttcataacagatatcttcagtttgtctggaatttaatcatccaaataaaagaaataaggtattttacatcttaaatcttgcatctttaaattggaacatattcatatccttcagaactgaagcataaagatgttttaaaatacaaacctggtatcc

SEQ ID NO: 676808 - DNA, 1572 bp, Homo sapiens
tttyccacaaagtacagaggaaataaactaaaattatttactgataagatttctgtgacactgatcatactttatatttcacattatctcgagaagatctaaggactttagaatgaaagatggtttttaatctttttggattaatttaagatgtgagatgttgtattgtcttattacatgaggcccaataaatatacatgaaatttccaaagtttgttgcagaaagattttattttgctggactttaaattcctattgtttaatgctcaaataagtactatcttcttccttctgcattattttcatcatagcatttactaccatctaatatgtattttgcttatttattttgcttattgttgcttttcccttcctccactagaatgtaatctctaagatgaaagtaacttaaaatttttttaaattgatgtataatagatgcacataactttgggatacatataatagtttaatgcattcatgtgatttgtaaagatcaaatccatttaattgagatatctatcaccttaaatatttgtttttatgctagcaacatttaaattattcttttctagctattttgaatataaagagtagatcatattttaatataaaatagaagtataaccaattattataaactatagtcaccttacagatctatcaaacactagatcttatttcttccatcaaactgtacatttgtacttgttaatgaaccacaaatgaattccccccttttactttattgttgtacctccagactctagaatagtgctcagcacatgaaaaggattcaaaatgctgtattttttaaataaatgaagtaggccctgaagtgaatatatattaatatttagcagtttcatcagcatataggtaatagatatatcgacaaaaatagatgaactcatcaaaagaggatatgtaaaatgagattctaaaaattcttgagttgaaacaatgagcctcaccaacatgtacagggaggcaggggaagacaaaccccggtgggcactgagaaggagaaagggggagtcaatgggagaaccaagagagaatagtgtcttagagataattggagaagaaaccgcagagagggaaaatttgctaagacttcagaaagattggatatgataaacatctctcctctgtaaaggcccacttttaattatcatgctatcttttgtaggaggtattatatacctgattttatataatttgtaccagggaaattttttagtagcttttacaccatggtagttatagagaacttttaatgctcatcttatgctgtatttatttatttatttaatgtgcctttgatttggaaaaaaacaacatgtaatcagattaacctttggaagtgactctggaagtgaaagagttaattttttagcatcctgtgtagctctaggggaagcgtgcagagtaaatgaaaaatggagccgtagtcccaactctgtataatctcgaatcatgtgatattctcctggggctgattctaatcaagtttgctgtacaaaaggtcatttccattaccctgtgaggcagatcctaaatagaattatg

SEQ ID NO: 676809 - DNA, 1572 bp, Homo sapiens
ttttccacaaagtacagaggaaataaactaaaattatttactgataagatttctgtgacactsatcatactttatatttcacattatctcgagaagatctaaggactttagaatgaaagatggtttttaatctttttggattaatttaagatgtgagatgttgtattgtcttattacatgaggcccaataaatatacatgaaatttccaaagtttgttgcagaaagattttattttgctggactttaaattcctattgtttaatgctcaaataagtactatcttcttccttctgcattattttcatcatagcatttactaccatctaatatgtattttgcttatttattttgcttattgttgcttttcccttcctccactagaatgtaatctctaagatgaaagtaacttaaaatttttttaaattgatgtataatagatgcacataactttgggatacatataatagtttaatgcattcatgtgatttgtaaagatcaaatccatttaattgagatatctatcaccttaaatatttgtttttatgctagcaacatttaaattattcttttctagctattttgaatataaagagtagatcatattttaatataaaatagaagtataaccaattattataaactatagtcaccttacagatctatcaaacactagatcttatttcttccatcaaactgtacatttgtacttgttaatgaaccacaaatgaattccccccttttactttattgttgtacctccagactctagaatagtgctcagcacatgaaaaggattcaaaatgctgtattttttaaataaatgaagtaggccctgaagtgaatatatattaatatttagcagtttcatcagcatataggtaatagatatatcgacaaaaatagatgaactcatcaaaagaggatatgtaaaatgagattctaaaaattcttgagttgaaacaatgagcctcaccaacatgtacagggaggcaggggaagacaaaccccggtgggcactgagaaggagaaagggggagtcaatgggagaaccaagagagaatagtgtcttagagataattggagaagaaaccgcagagagggaaaatttgctaagacttcagaaagattggatatgataaacatctctcctctgtaaaggcccacttttaattatcatgctatcttttgtaggaggtattatatacctgattttatataatttgtaccagggaaattttttagtagcttttacaccatggtagttatagagaacttttaatgctcatcttatgctgtatttatttatttatttaatgtgcctttgatttggaaaaaaacaacatgtaatcagattaacctttggaagtgactctggaagtgaaagagttaattttttagcatcctgtgtagctctaggggaagcgtgcagagtaaatgaaaaatggagccgtagtcccaactctgtataatctcgaatcatgtgatattctcctggggctgattctaatcaagtttgctgtacaaaaggtcatttccattaccctgtgaggcagatcctaaatagaattatg

SEQ ID NO: 676810 - DNA, 1572 bp, Homo sapiens
ttttccacaaagtacagaggaaataaactaaaattatttactgataagatttctgtgacactgatcatactttatayttcacattatctcgagaagatctaaggactttagaatgaaagatggtttttaatctttttggattaatttaagatgtgagatgttgtattgtcttattacatgaggcccaataaatatacatgaaatttccaaagtttgttgcagaaagattttattttgctggactttaaattcctattgtttaatgctcaaataagtactatcttcttccttctgcattattttcatcatagcatttactaccatctaatatgtattttgcttatttattttgcttattgttgcttttcccttcctccactagaatgtaatctctaagatgaaagtaacttaaaatttttttaaattgatgtataatagatgcacataactttgggatacatataatagtttaatgcattcatgtgatttgtaaagatcaaatccatttaattgagatatctatcaccttaaatatttgtttttatgctagcaacatttaaattattcttttctagctattttgaatataaagagtagatcatattttaatataaaatagaagtataaccaattattataaactatagtcaccttacagatctatcaaacactagatcttatttcttccatcaaactgtacatttgtacttgttaatgaaccacaaatgaattccccccttttactttattgttgtacctccagactctagaatagtgctcagcacatgaaaaggattcaaaatgctgtattttttaaataaatgaagtaggccctgaagtgaatatatattaatatttagcagtttcatcagcatataggtaatagatatatcgacaaaaatagatgaactcatcaaaagaggatatgtaaaatgagattctaaaaattcttgagttgaaacaatgagcctcaccaacatgtacagggaggcaggggaagacaaaccccggtgggcactgagaaggagaaagggggagtcaatgggagaaccaagagagaatagtgtcttagagataattggagaagaaaccgcagagagggaaaatttgctaagacttcagaaagattggatatgataaacatctctcctctgtaaaggcccacttttaattatcatgctatcttttgtaggaggtattatatacctgattttatataatttgtaccagggaaattttttagtagcttttacaccatggtagttatagagaacttttaatgctcatcttatgctgtatttatttatttatttaatgtgcctttgatttggaaaaaaacaacatgtaatcagattaacctttggaagtgactctggaagtgaaagagttaattttttagcatcctgtgtagctctaggggaagcgtgcagagtaaatgaaaaatggagccgtagtcccaactctgtataatctcgaatcatgtgatattctcctggggctgattctaatcaagtttgctgtacaaaaggtcatttccattaccctgtgaggcagatcctaaatagaattatg

SEQ ID NO: 676811 - DNA, 1572 bp, Homo sapiens
ttttccacaaagtacagaggaaataaactaaaattatttactgataagatttctgtgacactgatcatactttatatttcacattatctcgagaagatctaaggactttagaatgaaagatgktttttaatctttttggattaatttaagatgtgagatgttgtattgtcttattacatgaggcccaataaatatacatgaaatttccaaagtttgttgcagaaagattttattttgctggactttaaattcctattgtttaatgctcaaataagtactatcttcttccttctgcattattttcatcatagcatttactaccatctaatatgtattttgcttatttattttgcttattgttgcttttcccttcctccactagaatgtaatctctaagatgaaagtaacttaaaatttttttaaattgatgtataatagatgcacataactttgggatacatataatagtttaatgcattcatgtgatttgtaaagatcaaatccatttaattgagatatctatcaccttaaatatttgtttttatgctagcaacatttaaattattcttttctagctattttgaatataaagagtagatcatattttaatataaaatagaagtataaccaattattataaactatagtcaccttacagatctatcaaacactagatcttatttcttccatcaaactgtacatttgtacttgttaatgaaccacaaatgaattccccccttttactttattgttgtacctccagactctagaatagtgctcagcacatgaaaaggattcaaaatgctgtattttttaaataaatgaagtaggccctgaagtgaatatatattaatatttagcagtttcatcagcatataggtaatagatatatcgacaaaaatagatgaactcatcaaaagaggatatgtaaaatgagattctaaaaattcttgagttgaaacaatgagcctcaccaacatgtacagggaggcaggggaagacaaaccccggtgggcactgagaaggagaaagggggagtcaatgggagaaccaagagagaatagtgtcttagagataattggagaagaaaccgcagagagggaaaatttgctaagacttcagaaagattggatatgataaacatctctcctctgtaaaggcccacttttaattatcatgctatcttttgtaggaggtattatatacctgattttatataatttgtaccagggaaattttttagtagcttttacaccatggtagttatagagaacttttaatgctcatcttatgctgtatttatttatttatttaatgtgcctttgatttggaaaaaaacaacatgtaatcagattaacctttggaagtgactctggaagtgaaagagttaattttttagcatcctgtgtagctctaggggaagcgtgcagagtaaatgaaaaatggagccgtagtcccaactctgtataatctcgaatcatgtgatattctcctggggctgattctaatcaagtttgctgtacaaaaggtcatttccattaccctgtgaggcagatcctaaatagaattatg

SEQ ID NO: 676812 - DNA, 1572 bp, Homo sapiens
ttttccacaaagtacagaggaaataaactaaaattatttactgataagatttctgtgacactgatcatactttatatttcacattatctcgagaagatctaaggactttagaatgaaagatggtttttaatctttttggattaatttaagatgtgagatgttgtattgtcttattacatgaggcccaataaatatacatgaaatttccaaagtttgttgcagaaagattttattttgctggactttaaattcctattgtttaatgctcaaataagtactatcttcttccttctgcattattttcatcatagcatttactaccatctaatatgtattttgcttatttattttgcttattgttgcttttcccttcctccactagaatgtaatctctaagatgaaagtaacttaaaatttttttaaattgatgtataatagatgcacatawctttgggatacatataatagtttaatgcattcatgtgatttgtaaagatcaaatccatttaattgagatatctatcaccttaaatatttgtttttatgctagcaacatttaaattattcttttctagctattttgaatataaagagtagatcatattttaatataaaatagaagtataaccaattattataaactatagtcaccttacagatctatcaaacactagatcttatttcttccatcaaactgtacatttgtacttgttaatgaaccacaaatgaattccccccttttactttattgttgtacctccagactctagaatagtgctcagcacatgaaaaggattcaaaatgctgtattttttaaataaatgaagtaggccctgaagtgaatatatattaatatttagcagtttcatcagcatataggtaatagatatatcgacaaaaatagatgaactcatcaaaagaggatatgtaaaatgagattctaaaaattcttgagttgaaacaatgagcctcaccaacatgtacagggaggcaggggaagacaaaccccggtgggcactgagaaggagaaagggggagtcaatgggagaaccaagagagaatagtgtcttagagataattggagaagaaaccgcagagagggaaaatttgctaagacttcagaaagattggatatgataaacatctctcctctgtaaaggcccacttttaattatcatgctatcttttgtaggaggtattatatacctgattttatataatttgtaccagggaaattttttagtagcttttacaccatggtagttatagagaacttttaatgctcatcttatgctgtatttatttatttatttaatgtgcctttgatttggaaaaaaacaacatgtaatcagattaacctttggaagtgactctggaagtgaaagagttaattttttagcatcctgtgtagctctaggggaagcgtgcagagtaaatgaaaaatggagccgtagtcccaactctgtataatctcgaatcatgtgatattctcctggggctgattctaatcaagtttgctgtacaaaaggtcatttccattaccctgtgaggcagatcctaaatagaattatg

SEQ ID NO: 676813 - DNA, 622 bp, Homo sapiens
catgaagagtgaggcatctggcttcagaatgggtctttttaaccaccgtgctgtgctaccttagagttgaggtatagagcataaaacctatagagcaacagagcaggatggttgaacatggctacaattctcagctctgccatttccaagctgtgtaaccctggacaagtcacttaacctttttgagcctagattctcccttttaactaactgtacttccttgtacctgtaggattattgcaaaacttgagtaggattacggatgttatgtgcttaaaatagtgcactgcatgttctataagcgcaagatattaattacatggtcccaggccctcgcagagcccagcaccaagttccctaggcctaacacccacttctatgatacccratgcagttttatgccagcctagtttctacggaaggaattaagatgaatatcttttgagtttgaattattttgcctcaagaactctctacaaacacctcaaatcagcctaactgaattccatcaccattttttaaaattcttcttgatcaaggccagctttatgtcactggttagatttgaagtataggcatgtgtatccctgtccctcagccctcctattgacattagtgcaca

SEQ ID NO: 676814 - DNA, 2047 bp, Homo sapiens
gtatgagcgagcagaaaagtgaacataatattttagaacaaggattatttgggagacaaaaccattactaaaggtatttggggaatgctaccctctcactttttctgaaagtataaatttgtggtagagtagtttcagactttcagggggctctttaaaatcatctccttgtgaaagaataaagatgatgttctgttttaaaggggtttgaattctcagagttaaaatatttaagcaatgtaagtttcagggggaaaaaaactgaagtacgttgccttcttcctagttcctccccgcaaaatacttgcatattctgaagtcgactggttagcatttggaaataggctactgaacaaataccatcttttcacgtaaaacctcaatatgccatagatatttacatctaagaggtgccaatctgatattttatgatgttgtaaattttatgttttggatgattcttagcattagagaattgaaactgaggtcgaaactgttttccaaatgtaagccacatggccatagccagggtaggattaggcctctttgtattttgctgctgagcaaactgtctgagacctataaagaggaagcacttggaatatttttcttaaatgtcatctgttgattacatgttgcttctttctgataatatattacagcccacttcattttaaaagccagcttataaaagcatttggaatagcagcatatgtctaactcctgggaattagaaaaggaaaacaaatgaacaattttaagtgtgcgagttccccctcctcacctacccccctcccttttcttccattttggacatctctctcacaggtgtggactactctggccactctctgtggcagggcgtaataacacagtcagaactgggtttcctttcttctgggaacgacttctcccgcagacactgtgttcggattttgggctctcgaggatggccagccagtgtcttcaccttctgctttgccagacagaaccagacagtcccttcccggagtggcagggagaggggagaaggaggtcagggaaaggaacagactggagcaggcagcaggagactgggaggtggaaagttaaacaaacagggaaatagatgtctgaccaatttcttgttgctttcttaagcagctgtttaccttgaacagtgaggtatgctgaactttccacagagcccttctggttggtggctttgcagtgatagacaccttcatcctcttctgtgactctttcaataaacagcgtgctgcttcctggtcctaaaataattcctgaggggtgagagatgtttagattagtgggcctggatgacaaacaaaaaacagctacttctgtaacacagccttcttcctatcattatgcattcagacaaggaaatccgagctctagtgaacctggggcagggttgcttatttgttttctctgggtccaggctttctttttcttttctttcctttttttttttttttttttttctgcaggctttytaatagcaccttcaccacccagcagagctgtgatccccagcttcggagatgcaaatccacccaccctgtagaaagaaatgtgaggcagctgccatgcccaacttgaaagttgaagatatcaagaaggcagcatatctaataataacaactatcattgactcaacgccctctgtgtgctcggcactatgtgacacactttcataccttgacatttacaaccagcctgtcagctaatattgtcttccttttacaaatgaggaaactgagattctgtgagattaagtaacttcaccaagagcatgcagtttgactgaaagcacatttgtgacatatgggtcaaaggaactaatatttcatttgtcataaggcctggtgagtcaatatagcctagtgatgaagagtttgcctgggctgtgttttaatccatgccttagcgcttcaagctttgtcacttaggcaagttacttgatctttctaagtttcagtttccttaatcttaagataaaaatgaaagtaattcttactctatagtaaatggcaagcccatg

SEQ ID NO: 676815 - DNA, 2047 bp, Homo sapiens
gtatgagcgagcagaaaagtgaacataatattttagaacaaggattatttgggagacaaaaccattactaaaggtatttggggaatgctaccctctcactttttctgaaagtataaatttgtggtagagtagtttcagactttcagggggctctttaaaatcatctccttgtgaaagaataaagatgatgttctgttttaaaggggtttgaattctcagagttaaaatatttaagcaatgtaagtttcagggggaaaaaaactgaagtacgttgccttcttcctagttcctccccgcaaaatacttgcatattctgaagtcgactggttagcatttggaaataggctactgaacaaataccatcttttcacgtaaaacctcaatatgccatagatatttacatctaagaggtgccaatctgatattttatgatgttgtaaattttatgttttggatgattcttagcattagagaattgaaactgaggtcgaaactgttttccaaatgtaagccacatggccatagccagggtaggattaggcctctttgtattttgctgctgagcaaactgtctgagacctataaagaggaagcacttggaatatttttcttaaatgtcatctgttgattacatgttgcttctttctgataatatattacagcccacttcattttaaaagccagcttataaaagcatttggaatagcagcatatgtctaactcctgggaattagaaaaggaaaacaaatgaacaattttaagtgtgcgagttccccctcctcacctacccccctcccttttcttccattttggacatctctctcacaggtgtggactactctggccactctctgtggcagggcgtaataacacagtcagaactgggtttcctttcttctgggaacgacttctcccgcagacactgtgttcggattttgggctctcgaggatggccagccagtgtcttcaccttctgctttgccagacagaaccagacagtcccttcccggagtggcagggagaggggagaaggaggtcagggaaaggaacagactggagcaggcagcaggagactgggaggtggaaagttaaacaaacagggaaatagatgtctgaccaatttcttgttgctttcttaagcagctgtttaccttgaacagtgaggtatgctgaactttccacagagcccttctggttggtggctttgcagtgatagacaccttcatcctcttctgtgactctttcaataaacagcgtgctgcttcctggtcctaaaataattcctgaggggtgagagatgtttagattagtgggcctggatgacaaacaaaaaacagctacttctgtaacacagccttcttcctatcattatgcattcagacaaggaaatccgagctctagtgaacctggggcagggttgcttatttgttttctctgggtccaggctttctttttcttttctttcctttttttttttttttttttttctgcaggctttctaatagcaccttcaccacccagcagagctgtgatccccagcttcggagatgcaaatccacccaccctgtaraaagaaatgtgaggcagctgccatgcccaacttgaaagttgaagatatcaagaaggcagcatatctaataataacaactatcattgactcaacgccctctgtgtgctcggcactatgtgacacactttcataccttgacatttacaaccagcctgtcagctaatattgtcttccttttacaaatgaggaaactgagattctgtgagattaagtaacttcaccaagagcatgcagtttgactgaaagcacatttgtgacatatgggtcaaaggaactaatatttcatttgtcataaggcctggtgagtcaatatagcctagtgatgaagagtttgcctgggctgtgttttaatccatgccttagcgcttcaagctttgtcacttaggcaagttacttgatctttctaagtttcagtttccttaatcttaagataaaaatgaaagtaattcttactctatagtaaatggcaagcccatg

SEQ ID NO: 676816 - DNA, 626 bp, Homo sapiens
tttccctttcatatttttggaccacagttgatcatgggtaactgaaacctcagaaagtaaaaccacacataagatgtgtgaaaagtatcagaataaaaatgaagtcagttgcrtcacaccctaagaaaataaataaagccaggagtttctaaggagggcctttgtgtacacatgcctatgataagaactactacaaagactacctgaagggcttgtgggcatatatgcttataacaagaactttcgttatggactcctaactgctgcttgctacatcagtcccaaggacagctaactggatgcacaggaatatttacctgacacattgtctccagtagtaaactggtcaactcctgccagaagtccctgtatccagtgttctctttgtttcaaaacaacttagtgtactcctccttttgctgttaaaatctttcccttacctcgaccttctcaaatgcacccatggttgcagcacacatattctgcctgcaaagcttctgcagagttcagaataaactccttgtctttagagaatctacgttttgtgggctgacagcaggggctactgtatttgtgttatctcgagttccatctctcagttctgtccctgaattattttctacttc

SEQ ID NO: 676817 - DNA, 992 bp, Homo sapiens
gtatgattaaatggagcactcaaaaatgtacatgtctatgttcctgttgttaattttgtactttatcattcaaaaaatatcatcaatacactacactggtattgtgaatcttatgctctcttttctcagagatagagaatgcaacagagaatatttctttgttgggaattattttataggacaattttggtcgtatcagtcagaatcagttctcttcactcattttatcttgagtcaatttaagaattctgcccatggccacttgaagtgggtgtgtgtgtgttttcagggactgttgacattcagggatgtagccatagaattctgtctggaggagtgtcaatacctggatgctgctcagcagaatttgtgtatggatrtgatgttacagaactacagaaaccctgtcttcttggttgaggataacttcaatatagaattcctaatttaccctaaaggtttcattttcttcctttgtaggatgtgttttggtaatttctgctttgcatgagtaaatttcagatccctgttttcaagacaatcttgcggattttttggtgtggaaaatgaattcttcaggttgtttcattttgacctgaattttcccctttcctgagtttatctatgttattcactctagataagtggtaatttcagaaacttagtgacataaaataatgttgtccacaccttaaaattcaattgccaccaccaatttttgattcagtaatactggggagtgaaacagaggaccctcatatttaatgtactttctgaatacgctaaaggttctgtcagtaaaaagtattttgggattaattttctagaatcttctattatgtcctcttttctctacttagcacagtattaggttggtaaacggagaatcccaggaaaagtcatgctcatgatgctttttaaaataaaacaggtattgtcttctctaagccagacctggtcacctgtctggagcaaaggaaaaagccatggag

SEQ ID NO: 676818 - DNA, 1528 bp, Homo sapiens
tcagcctcctgtttactgggaccacaggtgtgtgccaatacacctgactaattttaatttttatagaggagaagtattgccatgtttcccagtttaaacctgaactccctaggttcaagtgatgtgcctgcctcaaactccaaagtgctgggactacagacatgagccactacacctggcctcagttattatttctatttctattttctacttccataatttctattatatttttcatcttttccttgatattctatttttttctgattttatttagttacctgtgttcccatttaggttaaatttttaaaattaatgtgtacatctttattttcatggttgttttctgacagttttaagttttgttttttacttaggccatgtcactgtaatattttgtatgtattgtactctttggttgagatttggagattaacaaacagctacctctcacaatctttataatgtggtgttgtcctaacataatctgaaaccagttgtctcaactagagattctgggagcctatcaaatatgttatgatgtgtcttgtgtggaattttgtgttgattattcagttaaagaggtttgtctgtgtttcttaacagtctgtaattacttcctatacatattgcatgcctgtggtactgtagtttgttgctgtaacatttacctttgatctcagcagactcaagctgttatttcaaagtataccatcatttctttcagcacattttgtcactggagacagaaacaagtctctgtaaaagtgcccagaagccagaagtaaaaatacaygagccagttttttctttttctatattgaggaagatgccaggcattgcagtttacttctaaaagtgccatgctgcattatggaggagtaaaggtgttgggcaaatgtaaaaaacttttctatccattcagtatggcttgtggcattttgctcacctggtacactgaacacacttaactcatttctagattttccataaagacattttggtcagtacagttttgttataaatctataaaagaattaagacctgtggtatttttgttatgccatgttgctaatgtactttgtataattttatgtattagatttgtaaacaatagatttgtatatttacatgggcctagtgagataatttgttatttttatttctttcagctgtgttctcatttcaccgaagacctttggctagatcagaacacaaaaaattcatttcaaaaagtgatgctgagaagatatgggaaatgcagacatgagaatttacaaataagaaaaggctgtaaaagtttgaatgcatctaaggtgcaggaaggaggttacaatggacttaaccaatgtttgtcaattactcagagcaaaatacttcaatgtaatacatgtgtgaaagtcttaaggaaattttcaaattcaaatagacttaggagaagacattctggagagaaacctttcaaatgtaaagaatgtggccaattctttcacaggttctcacacctaagacaacatcagataattca

SEQ ID NO: 676819 - DNA, 1528 bp, Homo sapiens
tcagcctcctgtttactgggaccacaggtgtgtgccaatacacctgactaattttaatttttatagaggagaagtattgccatgtttcccagtttaaacctgaactccctaggttcaagtgatgtgcctgcctcaaactccaaagtgctgggactacagacatgagccactacacctggcctcagttattatttctatttctattttctacttccataatttctattatatttttcatcttttccttgatattctatttttttctgattttatttagttacctgtgttcccatttaggttaaatttttaaaattaatgtgtacatctttattttcatggttgttttctgacagttttaagttttgttttttacttaggccatgtcactgtaatattttgtatgtattgtactctttggttgagatttggagattaacaaacagctacctctcacaatctttataatgtggtgttgtcctaacataatctgaaaccagttgtctcaactagagattctgggagcctatcaaatatgttatgatgtgtcttgtgtggaattttgtgttgattattcagttaaagaggtttgtctgtgtttcttaacagtctgtaattacttcctatacatattgcatgcctgtggtactgtagtttgttgctgtaacatttacctttgatctcagcagactcaagctgttatttcaaagtataccatcatttctttcagcacattttgtcactggagacagaaacaagtctctgtaaaagtgcccagaagccagaagtaaaaatacacgagccagttttttctttttctatattgaggaagatgccaggcattgcagtttacttctaaaagtgccatgctgcattatggaggagtaaaggtgttgggcaaatgtaamaaacttttctatccattcagtatggcttgtggcattttgctcacctggtacactgaacacacttaactcatttctagattttccataaagacattttggtcagtacagttttgttataaatctataaaagaattaagacctgtggtatttttgttatgccatgttgctaatgtactttgtataattttatgtattagatttgtaaacaatagatttgtatatttacatgggcctagtgagataatttgttatttttatttctttcagctgtgttctcatttcaccgaagacctttggctagatcagaacacaaaaaattcatttcaaaaagtgatgctgagaagatatgggaaatgcagacatgagaatttacaaataagaaaaggctgtaaaagtttgaatgcatctaaggtgcaggaaggaggttacaatggacttaaccaatgtttgtcaattactcagagcaaaatacttcaatgtaatacatgtgtgaaagtcttaaggaaattttcaaattcaaatagacttaggagaagacattctggagagaaacctttcaaatgtaaagaatgtggccaattctttcacaggttctcacacctaagacaacatcagataattca

SEQ ID NO: 676820 - DNA, 1528 bp, Homo sapiens
tcagcctcctgtttactgggaccacaggtgtgtgccaatacacctgactaattttaatttttatagaggagaagtattgccatgtttcccagtttaaacctgaactccctaggttcaagtgatgtgcctgcctcaaactccaaagtgctgggactacagacatgagccactacacctggcctcagttattatttctatttctattttctacttccataatttctattatatttttcatcttttccttgatattctatttttttctgattttatttagttacctgtgttcccatttaggttaaatttttaaaattaatgtgtacatctttattttcatggttgttttctgacagttttaagttttgttttttacttaggccatgtcactgtaatattttgtatgtattgtactctttggttgagatttggagattaacaaacagctacctctcacaatctttataatgtggtgttgtcctaacataatctgaaaccagttgtctcaactagagattctgggagcctatcaaatatgttatgatgtgtcttgtgtggaattttgtgttgattattcagttaaagaggtttgtctgtgtttcttaacagtctgtaattacttcctatacatattgcatgcctgtggtactgtagtttgttgctgtaacatttacctttgatctcagcagactcaagctgttatttcaaagtataccatcatttctttcagcacattttgtcactggagacagaaacaagtctctgtaaaagtgcccagaagccagaagtaaaaatacacgagccagttttttctttttctatattgaggaagatgccaggcattgcagtttacttctaaaagtgccatgctgcattatggaggagtaaaggtgttgggcaaatgtaaaaarcttttctatccattcagtatggcttgtggcattttgctcacctggtacactgaacacacttaactcatttctagattttccataaagacattttggtcagtacagttttgttataaatctataaaagaattaagacctgtggtatttttgttatgccatgttgctaatgtactttgtataattttatgtattagatttgtaaacaatagatttgtatatttacatgggcctagtgagataatttgttatttttatttctttcagctgtgttctcatttcaccgaagacctttggctagatcagaacacaaaaaattcatttcaaaaagtgatgctgagaagatatgggaaatgcagacatgagaatttacaaataagaaaaggctgtaaaagtttgaatgcatctaaggtgcaggaaggaggttacaatggacttaaccaatgtttgtcaattactcagagcaaaatacttcaatgtaatacatgtgtgaaagtcttaaggaaattttcaaattcaaatagacttaggagaagacattctggagagaaacctttcaaatgtaaagaatgtggccaattctttcacaggttctcacacctaagacaacatcagataattca

SEQ ID NO: 676821 - DNA, 608 bp, Homo sapiens
tgctgaggtgacctctgagcgttcgcatctcctaccactgaagacttccagttccctccctgaaacaacatctcctgtcatcagtgttttctttgaaacaaaaaaccaaaacaccagtgttactctcaaagacagaagaactgtttctagaaaggatcttagtccatagtctccttgacgctatcccaatataaatgcagaacagacacctacttggagaagaaagaaaaatatgcttgttatgtgtttaaacacagatgcacttcagatgttgttgttgttgttattattgtacattgatggtcttgccagccattatggtcggaagttaaaacacctggtttacattattatgacttgtatttcagactacttcgcaggcatttgggcagaggatgtgtgtatgctcaggaaagtggtatctgatccttactggggatttttttgrcttttgtttcccttctctctctcctgttgcatttccttgaaggcggcttctcttcacagctgctgttgctgctggctggcattggtgtggtcttccctcaccaaggagacacagaaagccagatgcctcgtcttctcttagcctttcctccctcctatgt

SEQ ID NO: 676822 - DNA, 608 bp, Homo sapiens
tgctgaggtgacctctgagcgttcgcatctcctaccactgaagacttccagttccctccctgaaacaacatctcctgtcatcagtgttttctttgaaacaaaaaaccaaaacaccagtgttactctcaaagacagaagaactgtttctagaaaggatcttagtccatagtctccttgacgctatcccaatataaatgcagaacagacacctacttggagaagaaagaaaaatatgcttgttatgtgtttaaacacagatgcacttcagatgttgttgttgttgttattattgtacattgatggtcttgccagccattatggtcggaagttaaaacacctggtttacattattatgacttgtatttcagactacttcgcaggcatttgggcagaggatgtgtgtatgctcaggaaagtggtatctgatccttactggggatttttttgayttttgtttcccttctctctctcctgttgcatttccttgaaggcggcttctcttcacagctgctgttgctgctggctggcattggtgtggtcttccctcaccaaggagacacagaaagccagatgcctcgtcttctcttagcctttcctccctcctatgt

SEQ ID NO: 676823 - DNA, 615 bp, Homo sapiens
agtcaggggacttatctcctgacaaggctaggtgatgacttaggagaaggaggatcatgggtctctggcctgaagtaagagcttccctctgggataaggcaggagttggaggctgcaggtgcgaggaaggaagccaaggtcaatgtcacatctcactattcagagtgtggtctggggccagcagcatcggcatcatctgggggtttgttaaagatgcagcatctcaggcccagctctagagcaaccgaatcagaatatgcatttgaagaacatcctagcaaacagatctccagtcgcatttgaagaacatcctagcaaacagatctcattggtattagctaatatctacgatactatctgtattatctaacagataaccgacaagcactgcacattgaggtgtctctcyacctatgtcatctcttttaatcctcagaacaacctgacacagacagtctgaccctcctttttacagaaaagcaaccgtggctcagagaggttaacttatttgcccaagaccacacagctacctttcagcaaaacatagagtttagctgaatctggctgattccaaagtcactgtcttttccaccacatatctgaagtccagtgctg

SEQ ID NO: 676824 - DNA, 603 bp, Homo sapiens
ttttttttttttttgagacggagtctcactctgtcacccaggctggagagcaatgacgtaatcttggctcaytgtaacctccgcctcctgggttcaagcgtttctcctgcctcagcctcctgagtagctgggattacaggcatgtaacaccacgcctggctgatttttgtatttttagtagagatggggtttcaccatgttggtcaggctggtcttgaactcctgacctcgtgatccgcctgcgttggccttccaaagtgttgggattacaggtgtcagccaccacacccggccctgtgttccttttgtccatgaaatcattacttactcatatcgagaaacctagagaacagaggcttctgctcactggccgtggctccctccacagttttcagtcctggttcccagagccaccatcgctccagcagcaatgtttccctgggtgctagcagagagggctgagctgagcttggtccgttttcgtcagtcttggattatgctggagtctgcagaggtggctttcctggctaaatttgtggatctgttttcaggatctgttgcttacactcagtcaagccatctcacactctgttgtagcttgca

SEQ ID NO: 676825 - DNA, 831 bp, Homo sapiens
ttccatggccctccattagcttctctcaacaccctgcatgttttctccatagcactcatcacattttgtaatcatatgtttgttggcatacttaacctttattgaaatgtgactctcccatgagactaagctttctgggagcagggactgtgtgcattttattcactgttgtgcctgggacataataggtgtccaatcaataattatggaatgaatgaacaggggagactgcattgtaaggggagtgacagagaatgggccactgctcccctcacacacccaagatgtcaagcaaagtatctctctctggatccagtctcggttaccagggtctgtctttctctttttgtctcataagcatatagccatgttttttctctttctgtgtctcctctgtccttagcttcctgagagagccttttaaaccagcaaagacaatgtctgagagaaaaggacttttgaggccctgtgacactggagtgcctcccacccccaatcagaaggtggcagcagggggcagtggcaccatgggagtaacttagaacctggctcctagatgaaggagtttctctctctctctctgcagagcaacccagggtcagcagcagccgaaagccacaaaaactgactttaaaagtcctcctaagagctgcatcttttgagtccccaaaacaatcacgccttgtgccccaggacayggcgcgagttgcacacttaaagcagtttccacagaaccgcattcagttggttttaaactctggggaaagctggcagcctctttgtgggttttttaaaaaactagttagagggacaattaaacctttatgggcc

SEQ ID NO: 676826 - DNA, 687 bp, Homo sapiens
attattttcaggcactttaacaagtaagtccatatagtccctagtaccatccataacagagtatttcttcaacaacaaaggactattaaatttgtctacrgcgtactacttggaacactgaccccaaaatcacttgctgggactgtagttaatgtggtaatcatggctagaatatgactagtggatttagcagatggaaaatgacctaatttgcttcaattgcaaaaccactactcagtgaatttacaggtaactatggacagaggaaccctgagctgacggcctacatgctaagcatctgagttttctctggaggctaggcagaaactgcaaagtggtggtatctgaacttgctttgcacttgtaccaacaccacacaatgagagcatcctggctggggggccaatagggaggtcactgagggttgaaggattttgcaataagaaggtagctataaagcctctgggccttcttctcaaattcctattgtattttaacaaactttacctgtttttcctgaatatactcacttcccctgcctggaataaagaccttccctaaatatcagtccatatgtacggtatccttgcaccttgcttctcatacttcaagctactgcttgggtgggtcccgttgtaaactagatgaacactcatctgactatggatatcatcactcctagatact

SEQ ID NO: 676827 - DNA, 1477 bp, Homo sapiens
gatcttggaggctaagcagggctgggcctggtaagtgcttggatgggagatctcctgggaataccgggtgctgtagacttaaaaaaaaaaaatccggagagagttggctacactgtgcaagaagggtttgaaggcttagcatggaacagaaacaataggatgatgcttgcgcctgagtagaatagggaagaatagaaagcacctggattgaaggggccacatggacaggaatgagaggggctcggtartaattttcacagaggacagcaaagaacggaagctccccccgccccccagcccccgccccacccaccacacacatacatagcactatgtgagctctgggaacaattctaggaaaagggacagggacagtgaaccctgacttgactgaggttatattctgccacctcttaaaaacaatggggggttgtaggccaggtgccgtggctcatgcctgtaatcccaacactttgggaggctggggcaggtggatcacgaggtcaggagaccgagaccatcctggctaacatggtgaagccccgtctctataaaaatacaaaaaattagccaggcatggtgatgggtgcctgtaatcccagctactggggaggctgaggcaggagaatcgtttgaacctggcaggtggagatcacgccactgcactctagcctgggcgacagagtgagactctgtctcaaaaataataataataataataatggggttttgaaacagaaattttgttgagttaaagaatatcaattccagcctaggcaacatggcaaaaccccgtctctacaaaaatgcaaaattagctgggtgtggtggtgtctgtagtcccagctacttgggaggctgaggtgggaggactgactgagcctggaaggtggggttccagtgagctgagattgcaccattgtgctccagcctgggagaccctgtctccagggaaaaaaaaaaaaagaatatcaatttacatttacagcataccacataagttgtggacataagatttatgtttgctgcactggaaactaatacaatgaataagagtgacatcccttgacaaaccatttaacagcttggtggggtcagggtggaagaagagacgtgcttgtggttcagagtttcttacaattccagtaactccaagctaaagagcatgtgtagactgcaagtcactccagtgcacacaactacttgctaattctaatttaaggccaggcacggtggctcacgcctataatcccagcactttgggaggccgagacgggcggatcacgaggtcatgagatcgagaccgccctggctaacatggtgaaaccgtgtctctactaaaaatacaaaaaattagccgggtgtggtgacaggcgcctgtagtcccagctactcgggaggctgaggcaggagaatggtgtgaacccgggagacagagcttgcagtgagccagtattgtgccactgcactccagcct

SEQ ID NO: 676828 - DNA, 1477 bp, Homo sapiens
gatcttggaggctaagcagggctgggcctggtaagtgcttggatgggagatctcctgggaataccgggtgctgtagacttaaaaaaaaaaaatccggagagagttggctacactgtgcaagaagggtttgaaggcttagcatggaacagaaacaataggatgatgcttgcgcctgagtagaatagggaagaatagaaagcacctggattgaaggggccacatggacaggaatgagaggggctcggtagtaattttcacagaggacagcaaagaacggaagctccccccgccccccagcccccgccccacccaccacacacatacatagcactatgtgagctctgggaacaattcyaggaaaagggacagggacagtgaaccctgacttgactgaggttatattctgccacctcttaaaaacaatggggggttgtaggccaggtgccgtggctcatgcctgtaatcccaacactttgggaggctggggcaggtggatcacgaggtcaggagaccgagaccatcctggctaacatggtgaagccccgtctctataaaaatacaaaaaattagccaggcatggtgatgggtgcctgtaatcccagctactggggaggctgaggcaggagaatcgtttgaacctggcaggtggagatcacgccactgcactctagcctgggcgacagagtgagactctgtctcaaaaataataataataataataatggggttttgaaacagaaattttgttgagttaaagaatatcaattccagcctaggcaacatggcaaaaccccgtctctacaaaaatgcaaaattagctgggtgtggtggtgtctgtagtcccagctacttgggaggctgaggtgggaggactgactgagcctggaaggtggggttccagtgagctgagattgcaccattgtgctccagcctgggagaccctgtctccagggaaaaaaaaaaaaagaatatcaatttacatttacagcataccacataagttgtggacataagatttatgtttgctgcactggaaactaatacaatgaataagagtgacatcccttgacaaaccatttaacagcttggtggggtcagggtggaagaagagacgtgcttgtggttcagagtttcttacaattccagtaactccaagctaaagagcatgtgtagactgcaagtcactccagtgcacacaactacttgctaattctaatttaaggccaggcacggtggctcacgcctataatcccagcactttgggaggccgagacgggcggatcacgaggtcatgagatcgagaccgccctggctaacatggtgaaaccgtgtctctactaaaaatacaaaaaattagccgggtgtggtgacaggcgcctgtagtcccagctactcgggaggctgaggcaggagaatggtgtgaacccgggagacagagcttgcagtgagccagtattgtgccactgcactccagcct

SEQ ID NO: 676829 - DNA, 657 bp, Homo sapiens
attggtacacatttctgtgtgtgtgtgtgtgtatgtgttttagaatacaaactgtgtaattcagattttaaaacactaatcrtttgtctttaataaccctgcctttagtttcaaatctaacttaccatatttctatgtgtgcatgtctctgcagtgttaaaaataataatatcagcatttattaggggtcaactgtgtattaggcactgttctaaacatttgatattcattatctcatttaatcctcacagcaacagacccataggtactgtggtcattaagtgtttgacaagtagaaaactgaggcagagaagttactgatggagctgtagcaaagccaggatgcaggccacacttcgcttgtcagtctctgtgttcagcctggtgacatgtcatggacagacaggccttttgaaaactaggcaccttcagaggacagaagggtgtggtgagtgtcacaagttccagacagaccaatcccatcgtggtggaggggggctatctggagcaggtaggacatggtgtgttatacctgttcacgatgcttaaatctttacagcaagcagcagtaccctgccacctgtgaaatagtggctaaaagtagcttattataaaaatcttatttaaaaacaattattacagcatcttttcagaaaa

SEQ ID NO: 676830 - DNA, 876 bp, Homo sapiens
tgggtggggtctgaggttttgccctccttgtaagttcccaggtctcgttggtgccactggcacacaaaccacacttgtaagtaccaagacccatgtcaaagattctccacatcagctttttaatagaattatctgggaaggtttccagaagtccaatgcccaggccataccacagaccaattaattcagactctctaagagaaggatccaggtgtcagtgtatattatatatatagcattattatatatgatatgtaaatattatatattttatattatgtcatgttttattgagatataattcagatatctataactgagatataattcacgtacccatacaatgcacccatctaaagtgtacaattcagtatttttagtatattcacagtgtataactatcaccaaatttgattttagaacatttcataatcccaaaagaaactctgtgcccattagtacatgctccccatttctcccccagatcctccatgcacagccctagggaaccaccatttgactttctgtatgtatagatcttcctactctctacatttcatataaatggaatgatacaatrtatggtcctttgtcaatggcttcacttagcataatgttttcaagattcatacatgttgtagcatgtattggtacttcatttattttattgctgaatagtatgccattgtgtgaatataccacattttgtttatactttcatcagttgatggacatttgggttgtttccagttgagtggtattatgaattatgctgctatgagcaagttttcatgtggacatacattttcgtttctcttggatatttacctaggagtaggtatggtatatggtaactctatctttgccttttgagga

SEQ ID NO: 676831 - DNA, 731 bp, Homo sapiens
cctaatttccccactgtgatagcattagcaattaggtgcctttgggaactgactaggtcatgatggtggggccctcatgaaggaattagtgctttcgtaaaagaggccccagagagctatcttgccccttccacttagtaaagacacagctaaaaggcaccacctgtgaacaagaaactgtgccctcaccagacaccaagtctgctggagccttgatcttggacttctctgcctcaagaactggaaaataaacctgttatttataagctacccaatctatggcactttgttatagcagcctgaatgaaatgataaaaatatacaattatgataaaataataaaaagaccattttggtagtgctatgcatacatataggtgcacctaatccaggctcatgaaacttagaggacttcccaaagaaagtgacattcaaaatggagagctgaagactaagtgttagtgattatgataatgatgttgaaaatatctttgcagagttctcaccatgtgccaggcactgagttaagccctctatgtgtatttyattataaaaccattaaagattatctattccattttcatagataagaaaattaaggtttaaagatgtcataaacttaataggaaggctaaataagtacttgatgaacactaactggtattaggatgttcctactggagcataaataggataaagtgggaaacaacctaataataggaaaaagctta

SEQ ID NO: 676832 - DNA, 1772 bp, Homo sapiens
taaagtaattttttaattaatttcagttaagttctagtaaggggtctctgggaccattacttcctccggaacttaggaccttccaggcaaatgacattttctaatgaaatttttatatgtggttttcaagtcattcccctaataattaaaacctgtgtgcctcagatataaagttgattagtgaaaactccttatactactattgcttgtatttagacatgaataatatatttgtaataatagtgtagggtaaatatttggctagatttctttttgtttaagaatagtgggytatatttgcttgaaattaggcaaaataactggtctccctatttccgcttaggcagcctgaatactaaatacttggtaattatagtctaccccctctttgtatggaccctgattaagagtcagattcaacccactggccctataaaagatttgggccatgacaggcagggacatgttggtgaattctctctgagttagagaggaacaaccagacaaatactcacttgtgctatttctgcatattaaggaccactgatagaattttttccttggtctgataagaaaagattccactttctgaggacaatacacaccaccccttcccagcagtctgtgtaaatcctaatcttcttggagtgagaaaaatcattaaattctaccatctctctttgtccaggaacctccacttttcctctctactgatcttgggaggaacaggagatgacaagaaagttagcttttgtttttattcatatactgggtccatgaaactgtatgaatagttgcttcatataaaggggagaaaacctatttggttttatatctgaatctgcaaaattagtttcacttgaaacttaaatatacttgcatcattcttttcctttagccaaaaactgaggtacctcaatgagatcatgttcagaataggagttcaatttttgttgaattgaacagtgtacttgagaccaggcagatgatgcttatgtcattataatttctacccaaacagaagactggcagtataaaacataaaacctcctctctaggatttcaatcattctctttcataaagacaaaataatctctcattaaagtgaagctcatttatattcatgtagagataatatgcaaccctcccctccccctcaaaaaagactagctctgtatgattgcagtaacatctaatcagttacaatttgtgtggtttctttttttcccttttttccagaaagctaactacatttacatgatcagcatgatacatatcaaaatacttgttaatgtgaactcaatttgaatgataccaggggttttacgtttactggagctgatttaccaggtagaagtgcttgattattttcccccttgccaagattaaaaaaaaattggaatttaggagatagtgataagtttaattaaagtggaactttaaaaaagtattttaaaagggttattttaagatgcctaaatttcagtaagtcatacaaaataattatggaagctaaaggaattttcaaactttacaaatgttcacttggtgtcttcattcttcttttttatgtccttaagtctgattccagaatttaagttctttttgaaatttgaaagtaaatatttgaatttacttgttctcccactttaagttttttgaactaacactgagagaaataaacttaaagcatattgaagacactgcatttttaaggtctctttataacagcagcttagcctctgacctacatgatcccagtgtagattca

SEQ ID NO: 676833 - DNA, 1772 bp, Homo sapiens
taaagtaattttttaattaatttcagttaagttctagtaaggggtctctgggaccattacttcctccggaacttaggaccttccaggcaaatgacattttctaatgaaatttttatatgtggttttcaagtcattcccctaataattaaaacctgtgtgcctcagatataaagttgattagtgaaaactccttatactactattgcttgtatttagacatgaataatatatttgtaataatagtgtagggtaaatatttggctagatttctttttgtttaagaatagtgggttatatttgcttgaaattaggcaaaataactggtctccctatttccgcttaggcagcctgaatactaaatacttggtaattatagtctaccccctctttgtatggaccctgattaagagtcagattcaacccactggccctataaragatttgggccatgacaggcagggacatgttggtgaattctctctgagttagagaggaacaaccagacaaatactcacttgtgctatttctgcatattaaggaccactgatagaattttttccttggtctgataagaaaagattccactttctgaggacaatacacaccaccccttcccagcagtctgtgtaaatcctaatcttcttggagtgagaaaaatcattaaattctaccatctctctttgtccaggaacctccacttttcctctctactgatcttgggaggaacaggagatgacaagaaagttagcttttgtttttattcatatactgggtccatgaaactgtatgaatagttgcttcatataaaggggagaaaacctatttggttttatatctgaatctgcaaaattagtttcacttgaaacttaaatatacttgcatcattcttttcctttagccaaaaactgaggtacctcaatgagatcatgttcagaataggagttcaatttttgttgaattgaacagtgtacttgagaccaggcagatgatgcttatgtcattataatttctacccaaacagaagactggcagtataaaacataaaacctcctctctaggatttcaatcattctctttcataaagacaaaataatctctcattaaagtgaagctcatttatattcatgtagagataatatgcaaccctcccctccccctcaaaaaagactagctctgtatgattgcagtaacatctaatcagttacaatttgtgtggtttctttttttcccttttttccagaaagctaactacatttacatgatcagcatgatacatatcaaaatacttgttaatgtgaactcaatttgaatgataccaggggttttacgtttactggagctgatttaccaggtagaagtgcttgattattttcccccttgccaagattaaaaaaaaattggaatttaggagatagtgataagtttaattaaagtggaactttaaaaaagtattttaaaagggttattttaagatgcctaaatttcagtaagtcatacaaaataattatggaagctaaaggaattttcaaactttacaaatgttcacttggtgtcttcattcttcttttttatgtccttaagtctgattccagaatttaagttctttttgaaatttgaaagtaaatatttgaatttacttgttctcccactttaagttttttgaactaacactgagagaaataaacttaaagcatattgaagacactgcatttttaaggtctctttataacagcagcttagcctctgacctacatgatcccagtgtagattca

SEQ ID NO: 676834 - DNA, 751 bp, Homo sapiens
ggccgtttctaaatcaaaggacatggctcctctcaaagtgaccctacgggaacctctctttttgagtcccagtaaatactctcccctcttgccttccagcacgcgagtagtaatgtctccactgtggctgaccctatgttactgcatcagcccttgaggttctcctgcctgcattccccctcctgtgaaagtttccctttatacgtatatccctttggacaacattttgggtgtgctacaatttcccagttggtactctggctgatacagcatttgagaatgcgtggacagacagatcagagacaaagagtggaaaaacgtacagtgtgtttgggagccattgtagagttcagagatgctgcggtataaggcgctctctggtggggcagaagtgtcagatgtttgtacactatggcgtcaggacacgacaggattagatctgagattagaagggccaacctggcagcaatgtggagaacgaactggaaagaaggagttgagagactcccctgtggctccgtctgcctccagaagatattgctgtggttccaggtttagctaggtgacatcagcggctgggctyctgaaacacaacccctttcctctggctctgccgcctgctgtcactagttttaggtgattttgccatcccatatttggctctcaactcctccatcacctgggtaaccaatggctttgtagtaaatttcttcttttataaatacttgaagtgttttttgcttttctattt

SEQ ID NO: 676835 - DNA, 751 bp, Homo sapiens
ggccgtttctaaatcaaaggacatggctcctctcaaagtgaccctacgggaacctctctttttgagtcccagtaaatactctcccctcttgccttccagcacgcgagtagtaatgtctccactgtggctgaccctatgttactgcatcagcccttgaggttctcctgcctgcattccccctcctgtgaaagtttccctttatacgtatatccctttggacaacattttgggtgtgctacaatttcccagttggtactctggctgatacagcatttgagaatgcgtggacagacagatcagagacaaagagtggaaaaacgtacagtgtgtttgggagccattgtagagttcagagatgctgcggtataaggcgctctctggtggggcagaagtgtcagatgtttgtacactatggcgtcaggacacgacaggattagatctgagattagaagggccaacctggcagcaatgtggagaacgaactggaaagaaggagttgagagactcccctgtggctccgtctgcctccagaagatattgctgtggttccaggtttagctaggtgacatcagcggctgggcttctgaaacacracccctttcctctggctctgccgcctgctgtcactagttttaggtgattttgccatcccatatttggctctcaactcctccatcacctgggtaaccaatggctttgtagtaaatttcttcttttataaatacttgaagtgttttttgcttttctattt

SEQ ID NO: 676836 - DNA, 630 bp, Homo sapiens
gcccatactaccaacttcagtaataatctttgatttttgcagtcactttagaactacatttccagttattgtatataataagtaagtgagtttcagtgctgccatgatattcccattcctgagttctttctctagctcacctaggctattatacgtctttcagggagctgggtaaaggcattcttcaatgggcctttcaagagccagatagcaaggcagaacacctcagtactatgcaaaactgacacgttgatgattcaccaccaacaggagaacatgacacatggaacaaggctgtggtttaaaaatatgaaacttttgccaggttagagagagcactgctaggttttaaaagagacatgtttctaagactgattagaggtgttttttaatatagctctgcagaaaactctagggaaaattatagagtggctgaataaggatgatttctgcattcccatattcctggatataaatattactattactgagaggtgttacaaaaattccatcttgatttctaatatcaaccaactggaaacyagaaaagacttcacacctccccccaccaaattaaaatactattgcaaattatttataaaatacaacttataaatattaatggaatac

SEQ ID NO: 676837 - DNA, 1373 bp, Homo sapiens
cagtccactgaattattcaagccaaaatcaatgactctttctttccccattctttccaagccrtcaacaagtcctacagatccaaaacgcatctcaagtcacttcactgctctccatctgtacagccaccatattccaggcactgtttctttccaggactccttccacagtctctgaattggttttctgtttcgtatcactcccacaacaccaattactcattccccataaaatagtaagatatttaaaaagataagttagattgcattatcccttgcttaaaatccttcaatgttatcctatttctctcagaataaaaccaagtttctaaccataggtttgtgccctattcaacctcactctgcacaacactcccctcattcacaatagtgcaagaacatcgtcttccttcctgtatattgtttgaacacaccaactctttttcttcctctaggactttgcatgtgctgatctttctatctgaaatgcttcctctccctcctctcctcttacccccatttcacttgactgacattctcattctcaacatttggcaaagatgtcacctcctcagagaagtcttcactagccttcctctagagtagcctcccacagatattgtctatctcattatgtttatttttcctaaactctaattacaatccatagttaccttatttatatatttgcttactttttcattgtcttgtctttctcattatagttgaagcccactgatgacagggactctgactgtcctcatcactgatgaatcttctgcacctaatgcattagcacattgtagaaattcactaaagatctgctgaataaatgaagaaatttgtttctggtacattttacctataatatatacattgaggatatttgagaaataattgaagatatggcttaaattttccacatacttcattttcaaaattatgcattgcctttggtgttaaagttttaggtttaaaaatagttgtgttcttgtttattattatttgtttttttaaatttatctttaatagacaaaaattatatacatttatggtgtacaacatgttttgaaatatgaatacaatgtggaatgactaaatctagctaattaacatatgcattagctcatatacttatcatttttttgtggtgagaacacttcaattctactcttttagtgattttcaagcatgcagtatgttattaactatagttgtagtactgttaatagcatctttatttagcctgttatttgcttggaatgtttggatgtttttactgcctagatttagacaagcatatggtaaccaaagcgggttacaacatataaacataataatattaacaactaccatttctgagagcttactata

SEQ ID NO: 676838 - DNA, 2304 bp, Homo sapiens
gagtaagatagggaaacaaccagagattaactccagaaataacaatctggtagatacaagtccaatttcattcaagtctatgttctgaatagattgtttgcaaaaaaacaggtacaaaatatggaggaatgaataggagacagggagaaacaatatatagtctacaacctccgatggcactgtcataaccagaaggcattctgaaactctcagaacataatttctcacaaattataatgtttccctccactgcagaatgcaaaaactgtgtatgacaaaaaagtgtgtgtgtatatatatgtgaaacacagatacacacacatatatagatatacaacacacatatggttattaaatacctgtagtttagattttaaaattcacaggaagttataaaaaagttcattcaatagctcctaaggcttttctgtgatttagggcagaataaccctaagctagtaatacagtattcaaggtttcacactcaggagaaatttaagatacaatttgtcaatttcactcaatgtgctacacagaagagaaaaataataaattgcgatacgtttttttttttttttgagacagagtctcattcttgttgcccaagctggagtgcaatggcacgatcttggctcactgcaacctctgcctccagggttcaagcaattctcctgcctcagcctcccaagtagctgggatgacaggcgcccaccatcacacccggctaattttttgtatttttagtagagatggggtttcaccatgttggccaggatggtcttgaactcctgagctaaggtgatccacccggcttggcctgccaaagtgctgggattacaggcatgagccaccgtgcccagcctgctatcattttagaacagtagcctccaacctttttggcaccagggatgggttttgtggaagacaatttttccacggactgtggggaaggggagacggtttcaggatgattcaagcgcattaaatttattgtgcaccttatttctattattacattgtaatatgtcatgaaataattatacaactcaccataatgtagaatcagtgggatccctgagcttgttttcctgcaactagactgtcccatctgggggtgatgggagacagtgacagattatcaggcattagattctcataaggagcacacaacctagatccctcacacgcgcagttcacaacagggttcgcacttctatgagaatctaataccgctgctgatctgagaggaggcagagctcaggcgctaacgtgagcaatggggagcagctgtaaatacagatgaagctttacttgcttgcctgcccctcacctctgctgtgtggcctggttcctaacaggccacggaccaataccagtccatggcctgtgggttggggaccccgttttagaacacccaaaatatgcttttacttattaaaaaatttatagtgaaatatatcaagctattaccctgattatctaaaaataaggttcttaataaatatgtatagtatatagataatatatctgtgtttttaagaactgatatattattaatggtacacagaggcaactgacataatgtaaacaatactgatctgggagctacagtcccaattctgccaccaacttggtctgtgatttaggtacgccattaacacttctaggtctgattttccttatctaaaaaatgaagagtttgtattaaattatctaaaatgccttctagtcccaatatttgatgagttgtgaaatgattcctattcaaggaaaaactctttcgtctcacttatgcttttgaaatgttatttccttagatatacatatatatgttcgtgtccctatcctacattatagaaaatatttttagttggcttagatgtattatagtctgaccttagactatcattagtatcttgtaatcagttccaagtatttttgttgtttcaaaatttttgcaatagttcaaaatggactgaactgacatataagtatcctttttaaaaaaataaccattgctgggcgcggtggctcacgcctgtaatcccagcactttcggaggccgaggcgggcggatcacgaagtcaggaaatcaagatcagcctggctaacacggtgaaaccccgtctctactaaaaatacaaaaaattagccaggcgtggtggcgggcgcctgtagtcccagctacttgggaggctggggcaggagaatggcgtgaacctgggaggyggagcttgcagtgagctgagatagcgccactgcactccaggctgggtgacagagcgagactccatctcaaaaaaa

SEQ ID NO: 676839 - DNA, 590 bp, Homo sapiens
gcagaagaaagatgaggatgggaattagatggcttgcgttttaatctcagctgtgatacttaccagctgcctgtcctcagggttcaatgttcaaytgacctgaatgcaaaacccagctctatacctgataggctgtgtgaccttagaaaagttacttgctgcctcttaccttcagattcctcatcatcaaatggagaaggaagtacttgcctctagtggtcttccttcccactttacaatacacttatgcacataaaatctagttaaaacagacaatatgaataaaagaataatttgattttagaataggcataggagaaaagtgagctgccttcattgctttgaatattagaaggatttatccactgattctaactgcacttgttcatcaactccacgaatatttgattaagagttatgttcctattgtacatatggacaatacctggcctcatggaacagatagtgctatgtgatatggacaaagacagggagactgagtgtgcagaggaggtcatgtgacctttactggagggatatagcaaaggcttcctagaggaagtgatgtctaaattgacagggttagctct

SEQ ID NO: 676840 - DNA, 650 bp, Homo sapiens
agttgtatatttttgatcaatatatttggaaattaaagtttctgactttaattctggcctatcctttgaggctcttgagggtgggcaagttcctgaatccctcaggtggtaaagatgggcaaaggatggggaaaagaagcatgggtgattaactccttttatcccacccctggaaggaaagataagcttctgggaaracacttaacccaaagtttcagacatgttaaaccactagcccagatttctgcccttgcaccaaggctatgcttggaaatcagtggttgccaggttaggaaagtggctggatgagagatctgaggacagaaatctcaattaacatgctatcccctcccttaaaagccaagttcccccacaattacaaattcttttttattagtcaaaatcacaatcaccttgattaaaaggatgggacactccaccctcagcagaaaatgatacagtttatagaaaacctccccgcccctcccacaccccaattaaaaactacaaaaaaatctcccctccttccctacgatgtcatggtagtctgactcctccagtggcactgcagctctggagtggccagctcaccacagcaccctccacttcaccttggggagaggagggatgctggtggttaaggaggttaa

SEQ ID NO: 676841 - DNA, 1102 bp, Homo sapiens
cacccagaacaatacattcttaacaaaatgttacttctccctaccactctggtataatagcatttctgtgcacttttccccattcctcaaggagtggggctgaattccctattaggtaagagttgtagtaacaaacttcctggtgtgggcctgaatggacttaatctttaagggaaaggttgaagatcctggttctctatacccaatgtgaaaacctgtttgaggtatccgagggctaaaatttggcaacaaggaatgccaccttctctatttgaatatgattttgacataattatttctgtggccagaaagagcatcttgagctccgttttggagaagaggaaactatggcccagagatgaagaatggcttgcctagagtcacagttggtttgccgaaggactgtgaattggttctgtcttcagactccccgtttagctgaggagtgggggctactagatttggtgtcagaaaaccagttcctccacttctgtaaatcatttcactgccctgagactgtctgctaatttggattctagaacaacacaatccaccttacaagtaygtaaggaggaaagtaaataacaaacgggtaaagtgctttgtaaactgtctatacaaatataagagaccgttattacaacacagcggaagaagttgaaaaaaggcaacgtcttgcacaccccaaaactggcaaagaaattactacaatcactaagtgaaagaatcctggcgggggaggcgggggcgggattcaattttccaacccaagccaccaaaaagtattctaaacgtgtgcttgtgagagacagcttttaaagtttgattttggttttttttatttttttcctgaagcctctaagaataagctctagaaacttcaagttatctccgggatgaccctgatagcaagcaactgtttcctctccctggcccctgccaatttcagaaaacaggcacttaaaaaaaaaaaaaaaaaatcttagttgccactccacacgccggacgcgaaagcccagacagaccctgctcatcctctatgccgatctgcacagacaccaccccagttatatccttctatcgatcggtcgattcagctaca

SEQ ID NO: 676842 - DNA, 1102 bp, Homo sapiens
cacccagaacaatacattcttaacaaaatgttacttctccctaccactctggtataatagcatttctgtgcacttttccccattcctcaaggagtggggctgaattccctattaggtaagagttgtagtaacaaacttcctggtgtgggcctgaatggacttaatctttaagggaaaggttgaagatcctggttctctatacccaatgtgaaaacctgtttgaggtatccgagggctaaaatttggcaacaaggaatgccaccttctctatttgaatatgattttgacataattatttctgtggccagaaagagcatcttgagctccgttttggagaagaggaaactatggcccagagatgaagaatggcttgcctagagtcacagttggtttgccgaaggactgtgaattggttctgtcttcagactccccgtttagctgaggagtgggggctactagatttggtgtcagaaaaccagttcctccacttctgtaaatcatttcactgccctgagactgtctgctaatttggattctagaacaacacaatccaccttacaagtacgtaaggaggaaagtaaataacaaacgggtaaagtgctttgtaaactgtctatacaaatataagagaccgttattacaacacagcggaagaagttgaaaaaaggcaacgtcttgcacaccccaaaactggcaaagaaattactacaatcactaagtgaaagaatcctggcgggggaggcgggggcgggattcaattttccaacccaagccaccaaaaagtattctaaacgtgtgcttgtgagagacagcttttaaagtttgattttggttttttttatttttttcctgaagcctctaagaataagctctagaaacttcaagttmtctccgggatgaccctgatagcaagcaactgtttcctctccctggcccctgccaatttcagaaaacaggcacttaaaaaaaaaaaaaaaaaatcttagttgccactccacacgccggacgcgaaagcccagacagaccctgctcatcctctatgccgatctgcacagacaccaccccagttatatccttctatcgatcggtcgattcagctaca

SEQ ID NO: 676843 - DNA, 593 bp, Homo sapiens
cttctgaaagcttacratcccatcccttatttaaactatgtgatgttgtcattctatataaactctttccgagtaacttaactaaaacacactttgccattagtcttgagtgtgggcacagcattattcttttctaggccttaagggttccttctgcttaaaaataatgtctaactttaatgaagtttacccattattaaagtgccttctggatatatgttatcttgttctattggtttcaatacacctattttctttaaaaagaaaaaattatggaccatgaatgttaacaccagaaaaaccttaaggtacatctgatctaatttcccactttaaagtgagaaaatcaaacattgcctagggatctcatttttccccaggctaatttgggttttcatatttccatctcaaagtggactttctttggctaactttaaggtttttttttttttacatatatacaacttttattttttatttctttttttattttttatttttttattttattattattatactttaagttttagggtacatgtgcataatgtgcagcacagcatggcacatgtatacatatgtaactttaagtt

SEQ ID NO: 676844 - DNA, 593 bp, Homo sapiens
cttctgaaagcttacaatcccatcccttatttaaactatgtgatgttgtcattctatataaactctttccgagtaacttaactaaaacacactttgccattagtcttgagtgtgggcacagcattattcttttctaggccttaagggttccttctgcttaaaaataatgtctaactttaatgaagtttacccattattaaagtgccttctggatatatgttatcttgttctattggtttcaatacacctattttctttaaaaagaaaaaattatgraccatgaatgttaacaccagaaaaaccttaaggtacatctgatctaatttcccactttaaagtgagaaaatcaaacattgcctagggatctcatttttccccaggctaatttgggttttcatatttccatctcaaagtggactttctttggctaactttaaggtttttttttttttacatatatacaacttttattttttatttctttttttattttttatttttttattttattattattatactttaagttttagggtacatgtgcataatgtgcagcacagcatggcacatgtatacatatgtaactttaagtt

SEQ ID NO: 676845 - DNA, 605 bp, Homo sapiens
cactgttgcttcattcattttaaccatctctaacaccctatgatgatgaccrggagaaataaagcagccagtttgcaatccagcttacttgtggatagatgttgtcattgcttgaagaaagtatgattactactacctttttgcgtggtcaaattgagacaaagaaaagttaagtgtcttccccagcactaagtccaagagagatgacatatgttttatgtctgtccagcatgcctttggtcaacctcatttacttcattcttgcctggaaatgaatggggctggctcaacagtggacataaaacggatgcctagacaaagagaaagctctatctccttgccaaatgttacattgaggaatgggcatgggtcatagctttgccaaagaaaattgtttcctcccagagaactctgaagctattgagaaagacataatttctttttttctttttcttttcttttctttctttctttcttttttttttttttttttttttttttttactgaatcttgctctattgcctggcctggagtgcaatggtgcaatctcggctcactgcaacctctgcctcccgggttcaagtgattctcctgcctcagccca

SEQ ID NO: 676846 - DNA, 662 bp, Homo sapiens
acactcctgtgcactctggaacattcagagacaccctcacagacacacagaggctagcacagtcaggtgttctcaacactcaggtgccttcacccagcccagggctgtccccttctctccagccaagcaggctccgccttttctccccgcccacttcccaccgtcctctggggcctctagggcctccctccagagctgggggaggggacagggcagggcttacccggctgatgtggcaacagcgctcacctgcagccagggccacgccctccactgggaaaggcttaaaggagcaggaatcccaggtgttgacctcacagggtctgtgcccatgtttttcagatgkggtcaaatggagaatgggacttgaacccaggactccagtgccaagagctgggtggggagtaggcaggggatgctcctgctgggaatggggaagcctgggttccagacccacctcttgcctgccctggttagctgcttggcaacctacgcctccccactgctcctcagctccctgacaggcactcccaccttcttgcagtccctgtctcaggagccagcactctcctgaaagccacccaagccagaaacctgggcatcccgccacacacctctctctacctgtggaatctatccctaaacatttcctgaacctgggt

SEQ ID NO: 676847 - DNA, 618 bp, Homo sapiens
ttgctacttttgttacactgaatgacttttgtttggaaatgtctaaaatctgtgaagtcagagattagtcagttttgtccatcctgtaagccctagcacctatgagtgcctggaacattcattattaaatgaataaagtaatgagtaaaaagtttcagtctattcttgtttttatcttgtcaaaaataactcttcttcctcagtccatgtaagccatctaaaacttttctactcattccacagttgcctgaaaatgtgaagatcagaaatggactgaggcaaaagtgataatgaagacattctcataggcgttgggttccgagatcaattccttaaattttaaaagattcttgctatgatctcatctttaatccataatgtgytattcatttctctatttttccttgatgctccagaagtatattctttaacgtggctttacacaccaaagtagactagattttctgcctgttaatgatgatgggcttcttacttacagtatagtactgagttgtgtttcttattcccatcccgcaatgtgtgtatgtgtgtgtttcctgataatacaggtaaagcactgataaatgaagataaattgttggctttgttccaaaacaa

SEQ ID NO: 676848 - DNA, 1034 bp, Homo sapiens
gtcatttcctgagctccacacagcaaggagaatcagatcccctcttatctcgtagtctcaagcctttctggggattctatgtcccaccccactgcatcagaagaaggagaccagagacgccttcttttcctccagtggctctcctccttccacatcagagtgaatcaaattgctggggactgagggggtaggagggactgtgtctgactaatcatagtattcttccatgtctgttcttcatacaaatattttatgctctcagctataaaatagaccacgttctgatatttcaaaggctttttctctttaaagccattgtctctgcctgaaattttaagtgtatgttttttaaaaccaaaagctaggagttgtcctctttgactatttttctactctaatgatcatctctgaagatgtgaatgccttgccctcatgttttagttctaatgaaggaattactgggaacagaaaatacattaatatttcacaaaattgtcctactgtacacatatgaaatcagatgccataaagtcttagttaactaactcaaaatggacctcttccttattaagctaggtcaattaatcatgatcaaatatgttcaggctaaacaaagtcagaaaaagtatttccattaaagattggctttagaaatttactatgcaaaagttctaaaaaacaatactcctatttaattaaaactacttaaacatctgccatattcttaattttaaaagtttctctttctgaaacagattcaggctctgctgcaggaagcaattaagaaatgaggatatttggccaggaatggtggctcacagctacaatcccagcactttggaaggccgagacagaaagatcacttgagcccaggagttcgagaccagcctgggcaacatagtgagacctcgtctctacaaaaaatcaaaaaaattagctgggcatggtggcacayacctgttgtcccagctactcaagaggctgaggcgagaggatcacttaaacctgggaggttgaggcttcagtgaactgtg

SEQ ID NO: 676849 - DNA, 1034 bp, Homo sapiens
gtcatttcctgagctccacacagcaaggagaatcagatcccctcttatctcgtagtctcaagcctttctggggattctatgtcccaccccactgcatcagaagaaggagaccagagacgccttcttttcctccagtggctctcctccttccacatcagagtgaatcaaattgctggggactgagggggtaggagggactgtgtctgactaatcatagtattcttccatgtctgttcttcatacaaatattttatgctctcagctataaaatagaccacgttctgatatttcaaaggctttttctctttaaagccattgtctctgcctgaaattttaagtgtatgttttttaaaaccaaaagctaggagttgtcctctttgactatttttctactctaatgatcatctctgaagatgtgaatgccttgccctcatgttttagttctaatgaaggaattactgggaacagaaaatacattaatatttcacaaaattgtcctactgtacacatatgaaatcagatgccataaagtcttagttaactaactcaaaatggacctcttccttattaagctaggtcaattaatcatgatcaaatatgttcaggctaaacaaagtcagaaaaagtatttccattaaagattggctttagaaatttactatgcaaaagttctaaaaaacaatactcctatttaattaaaactacttaaacatctgccatattcttaattttaaaagtttctctttctgaaacagattcaggctctgctgcaggaagcaattaagaaatgaggatatttggccaggaatggtggctcacagctacaatcccagcactttggaaggccgagacagaaagatcacttgagcccaggagttcgagaccagcctgggcaacatagtgagacctcgtctctacaaaaaatcaaaaaaattagctgggcatggtggcacacrcctgttgtcccagctactcaagaggctgaggcgagaggatcacttaaacctgggaggttgaggcttcagtgaactgtg

SEQ ID NO: 676850 - DNA, 1034 bp, Homo sapiens
gtcatttcctgagctccacacagcaaggagaatcagatcccctcttatctcgtagtctcaagcctttctggggattctatgtcccaccccactgcatcagaagaaggagaccagagacgccttcttttcctccagtggctctcctccttccacatcagagtgaatcaaattgctggggactgagggggtaggagggactgtgtctgactaatcatagtattcttccatgtctgttcttcatacaaatattttatgctctcagctataaaatagaccacgttctgatatttcaaaggctttttctctttaaagccattgtctctgcctgaaattttaagtgtatgttttttaaaaccaaaagctaggagttgtcctctttgactatttttctactctaatgatcatctctgaagatgtgaatgccttgccctcatgttttagttctaatgaaggaattactgggaacagaaaatacattaatatttcacaaaattgtcctactgtacacatatgaaatcagatgccataaagtcttagttaactaactcaaaatggacctcttccttattaagctaggtcaattaatcatgatcaaatatgttcaggctaaacaaagtcagaaaaagtatttccattaaagattggctttagaaatttactatgcaaaagttctaaaaaacaatactcctatttaattaaaactacttaaacatctgccatattcttaattttaaaagtttctctttctgaaacagattcaggctctgctgcaggaagcaattaagaaatgaggatatttggccaggaatggtggctcacagctacaatcccagcactttggaaggccgagacagaaagatcacttgagcccaggagttcgagaccagcctgggcaacatagtgagacctcgtctctacaaaaaatcaaaaaaattagctgggcatggtggcacacacctgttgtcccagctacwcaagaggctgaggcgagaggatcacttaaacctgggaggttgaggcttcagtgaactgtg

SEQ ID NO: 676851 - DNA, 2211 bp, Homo sapiens
taaaagagtataattggattgtttgtaacacaaaggataaatgcttgaggtgatggataccccatttaccctgatgtgattattacacgttgcatgcctgtatttaaatatcccatatactccataaatatatatagctactatgtacccaggaaaatttaaaaaattaaaaattacacacacacacacacacacacacacacacacacacacaccagccatgagcagatcatctttggatctggaagatgaatacctattattctttctacaagattaaattttcccataaaataaaagaaaaaaccttctccaatacctagcctaaatattgcaggctttatttctgtttcatgtaggtctggtcttctttctgcatttgctttatcctttctctctgcagaccagctttctcttccttgctagacacagggccacatttgtgccccctttacgtggtctatgagttcaagagctttgtgccaactatgaggtgtctctacgtccaaattccaaattccttggacagaaaatatggtttgcccagtttgggtcaactcgccaattatctatagccaaaggagagagcatgactgtcctttcagcaggggctaagggaagacacattctgcttcaggcagaacatttcagctaatgtgccacagggtacagatgtaccaagctcagagtcctcctgggattactaagcagaacctgtagtgacctaagcccccaggtgaattgccttcagccatgaaaagactcatccactcaccccagggtgcctacacatcccatkgttttctacgtgctccatggcaagacacaggttgggaagcactgtgctagggaggtgggcagggtcatgaagttctgtcccatggtgtcttcagtgcctcctttcaagagtagaatcttggctttacatttttgtaacagaaaggtacccgagggtgtttttcccgaaacagaggaaccatctgctcacaaaggtgaattcagacttgaacagtggagaaacagaaaagtcattccttgtgtatccagcagcattctgcttccatcccctcaagacacactccccctgggttctaggtttcaacattttaattgggtccaatcacagctaaagtgctctattacatgagtatttcaattttctggtagtcattcttcacatgtatcttctttagggagcatgctcttctgagatttgtgggtgaaagcaaccaagaggcaaagagctatgaggacatctgttcccccaaacatcactaggcaaagcatttctgaaatatcaagtccctcacagcagcctttacatccttgttcctcaggctgtagatgatggggttgagcatgggggtcaccaccccatagaaaagggaaatgagtttgtctgcaaggtcttgcttgtctgcccccagcgggtccttagacttgggcttcccatacatgaagaggatggtcccatagaagatgaccacgactgtgaggtgggcagagcaggtggagaaggcctttttcctcccctcagctgaggggatcctcaggatggtggcaatgatgaagacataggagaaagagatgaacagaaccgggacccccaggaagatcacattggtcactcccatactgatcacattgacagagatatcagcacaggccaacttcaggacagccagaatctcacaggtgaagtggttgatgatgttgtctccacagaagggcagcctcattgcaagggatgtctgcaccatggaagcagtgcttccagctacccaggagccggcagccttatgggcatgtaggcagccttgctcatgaccacagggtacctaagggggttgcagatggccacgtagcgatcaaacgccatcatgctcaggagaacacactctgtggctcccatggcaaaggagaggaacatctgcactgcacaggctgagaaggagatggttttcctgggggtcaagaagctgtcaaggatgagggggactgaggatgttgtatagcagatgtccaggaaggagaggttccccaggaagaagtacatgggcatgtgcaggtgggagttggacacagtcatcaggatgaggaccccattgcccagtaggatcaccaggtacatcagcaggatgagcacaaagaacgttttctccagctttgggtgggcagagaggcccaggagaataaactcggtcacagagg

SEQ ID NO: 676852 - DNA, 2211 bp, Homo sapiens
taaaagagtataattggattgtttgtaacacaaaggataaatgcttgaggtgatggataccccatttaccctgatgtgattattacacgttgcatgcctgtatttaaatatcccatatactccataaatatatatagctactatgtacccaggaaaatttaaaaaattaaaaattacacacacacacacacacacacacacacacacacacacaccagccatgagcagatcatctttggatctggaagatgaatacctattattctttctacaagattaaattttcccataaaataaaagaaaaaaccttctccaatacctagcctaaatattgcaggctttatttctgtttcatgtaggtctggtcttctttctgcatttgctttatcctttctctctgcagaccagctttctcttccttgctagacacagggccacatttgtgccccctttacgtggtctatgagttcaagagctttgtgccaactatgaggtgtctctacgtccaaattccaaattccttggacagaaaatatggtttgcccagtttgggtcaactcgccaattatctatagccaaaggagagagcatgactgtcctttcagcaggggctaagggaagacacattctgcttcaggcagaacatttcagctaatgtgccacagggtacagatgtaccaagctcagagtcctcctgggattactaagcagaacctgtagtgacctaagcccccaggtgaattgccttcagccatgaaaagactcatccactcaccccagggtgcctacacatcccatggttttctrcgtgctccatggcaagacacaggttgggaagcactgtgctagggaggtgggcagggtcatgaagttctgtcccatggtgtcttcagtgcctcctttcaagagtagaatcttggctttacatttttgtaacagaaaggtacccgagggtgtttttcccgaaacagaggaaccatctgctcacaaaggtgaattcagacttgaacagtggagaaacagaaaagtcattccttgtgtatccagcagcattctgcttccatcccctcaagacacactccccctgggttctaggtttcaacattttaattgggtccaatcacagctaaagtgctctattacatgagtatttcaattttctggtagtcattcttcacatgtatcttctttagggagcatgctcttctgagatttgtgggtgaaagcaaccaagaggcaaagagctatgaggacatctgttcccccaaacatcactaggcaaagcatttctgaaatatcaagtccctcacagcagcctttacatccttgttcctcaggctgtagatgatggggttgagcatgggggtcaccaccccatagaaaagggaaatgagtttgtctgcaaggtcttgcttgtctgcccccagcgggtccttagacttgggcttcccatacatgaagaggatggtcccatagaagatgaccacgactgtgaggtgggcagagcaggtggagaaggcctttttcctcccctcagctgaggggatcctcaggatggtggcaatgatgaagacataggagaaagagatgaacagaaccgggacccccaggaagatcacattggtcactcccatactgatcacattgacagagatatcagcacaggccaacttcaggacagccagaatctcacaggtgaagtggttgatgatgttgtctccacagaagggcagcctcattgcaagggatgtctgcaccatggaagcagtgcttccagctacccaggagccggcagccttatgggcatgtaggcagccttgctcatgaccacagggtacctaagggggttgcagatggccacgtagcgatcaaacgccatcatgctcaggagaacacactctgtggctcccatggcaaaggagaggaacatctgcactgcacaggctgagaaggagatggttttcctgggggtcaagaagctgtcaaggatgagggggactgaggatgttgtatagcagatgtccaggaaggagaggttccccaggaagaagtacatgggcatgtgcaggtgggagttggacacagtcatcaggatgaggaccccattgcccagtaggatcaccaggtacatcagcaggatgagcacaaagaacgttttctccagctttgggtgggcagagaggcccaggagaataaactcggtcacagagg

SEQ ID NO: 676853 - DNA, 601 bp, Homo sapiens
gaacactcatgaacttactgccccaaaagagttacagtttgtttaaaactgaataaaactacattatgtgtgttggggggagatggaaaaaaaacaaaacatactgcygaatccaacaactagaacattatcaattcccgtgcgctccctctctcgtcccatcccctttcaccccactcagaggcaactcctatcttgatttttgtgtttatcaatcgattgcttcttaacaataactttactgtatatactatatattaaagtatattttatttatttatttatatattttttgagacagggtctgtctcagtctgttacccaggctggagtgcagtggtgtgatctcagctcactgcatcctcaacctcctgggctcaggtgatcctcctatgtcagcctctgcggtagctgggactacaggcacaggccaccatgccaaactaattttttgtatcttttgtagagatggagttttgctgtgatgcccaggctggtcttgaactcctgggctcaagcaattggcccgcttcagtctcccaatatgctgggattataggtgtgagcaccatgcctggcctaccacatttaaccaatatat

SEQ ID NO: 676854 - DNA, 953 bp, Homo sapiens
atactttttactgcatgcattatagaaacttctaaacactcaagtctcaaatttagcaagttaaggccaaacataatttttgttaaattaattataaatgagatcatgaaaccaaagagcagatcagatatatgtttgcaaaggaagggcaaccatcatgtcccccagctccattcgtacacctatgtccaaatagacataccttctggccaatccaaaatcaataatttttatttgcttagcatcccgattcacacacaggatattctcaggctgccaggagaaagagacacattagcaatgaaaacaaccatcattcactcaaattgtccttgaaccacaactaaaaatacaacgatgctcagaaaaaacatatcaggcctttcacttcggggcgggcttgtccgtgtgggtactttctcctttaattatgtggtggatgaggttgcgggtatcctgccaaccctgcattatccagcytgtcctctgcacggcttcacagttcaccataatgcctgagttcaggcagaggccttgaggggagcaagaaaaggaggttgcttcagtccttcccaaatgtgctgtggaggcccgctcaggcctgacatctgcccctctaaattattcagtatgaatttccccttcttggagaaatatttttcccaagattgatgagttccaagggaattgacctgctccattcaaacagccacactgaacatgcactgtcacgtgaacgttccggcctccagagcttccctttgctcaacgcctatgggaaagtcgcacggcagaggagggcttttctctccagtcgttcttcagtctcagcagttccaaggttttgctgagtttggtctcaatgcctaaaacccctgactaagtgttcccttggagctaggccctggtaagaccttagcctgctgacctgacagtcttggggtgcaggggga

SEQ ID NO: 676855 - DNA, 953 bp, Homo sapiens
atactttttactgcatgcattatagaaacttctaaacactcaagtctcaaatttagcaagttaaggccaaacataatttttgttaaattaattataaatgagatcatgaaaccaaagagcagatcagatatatgtttgcaaaggaagggcaaccatcatgtcccccagctccattcgtacacctatgtccaaatagacataccttctggccaatccaaaatcaataatttttatttgcttagcatcccgattcacacacaggatattctcaggctgccaggagaaagagacacattagcaatgaaaacaaccatcattcactcaaattgtccttgaaccacaactaaaaatacaacgatgctcagaaaaaacatatcaggcctttcacttcggggcgggcttgtccgtgtgggtactttctcctttaattatgtggtggatgaggttgcgggtatcctgccaaccctgcattatccagcctgtcctctgcacggcttcacagttcaccataatgyctgagttcaggcagaggccttgaggggagcaagaaaaggaggttgcttcagtccttcccaaatgtgctgtggaggcccgctcaggcctgacatctgcccctctaaattattcagtatgaatttccccttcttggagaaatatttttcccaagattgatgagttccaagggaattgacctgctccattcaaacagccacactgaacatgcactgtcacgtgaacgttccggcctccagagcttccctttgctcaacgcctatgggaaagtcgcacggcagaggagggcttttctctccagtcgttcttcagtctcagcagttccaaggttttgctgagtttggtctcaatgcctaaaacccctgactaagtgttcccttggagctaggccctggtaagaccttagcctgctgacctgacagtcttggggtgcaggggga

SEQ ID NO: 676856 - DNA, 1405 bp, Homo sapiens
tgtagaagctttcccatacagaaagactgatgctataacagtaaataaaaggtcattagaaaatatgttgatagttaacatttcttgctgtagttggataatatgtttgatgtgatcgaaactcaattgtaagaaaggaacaaacaagatacttgcttaaaacaaatagactcctcttctsactcatttttttgacatattttaattgatttggttcatgagagctcctatgaagaagtacactttaacctcttggtattatcttcctgatagccatcacaatagtctccctgacaggccatattctctcacaagtcataagtgctaatatgcagccatctgttgtgtgtcaaatggtctcactgcatttaaaataagaaaaacataaggagaacataaagaatcattcaactaccccaatgtcattaattgtgaatttcatactgagaacaaacaagtccattctgatggtgacagagagtgatgccaatgcccaaatttttggttattctcctaaaattgagaggctgatcaaaagggaagaattgtcatttaaacttacctggagcctgcctctgtaccttaagtccctacatagtgaactgaaacctaccttagtatataaacaaatcaaaagtaacattaggattataaaaaacagtcaagttatagccaatcacaatcagccaggctgcagtcaatcacaggcatctaactcatcacaccatgcccaaataaggcagatgccttatttgttgtagccaatcaggtgatttctctactttgctttggtttcaatctatgcaaacttgctgctcacactgctgcgtagagctttctgcacctctacgtgttcagggtgctacctgattcatgaattcttttgtgctcaaatgaactctgctaaatttaatttctctattattcttcttttaacagtttcaaatccctaagctagataacatagaagtaagtttgtagagtttttccttagaagggattttaaaaatggaattgcaattctggaaaggtgaaactagagatacagtgaaatgatcagtgattgctaacggtttaggggagacagggataaaggctaagcacaagagactttagggctgtgaaagcattctgtgtgatactttaatggtggatacgtgtcattatacatttgtccaaatccaaagaatgcacaacaccaaaactgcactctaatataaactataaactttggttgagaatgatgtgccagtataggttcatcaattgcaacaaatatacctctctgtcaggagattgtgatagtagggagcgtatgcctacatgggggaaaggtgtatatgggaacactgtattttccaatcaagtttgctgtgaacataaaactgctctgaaaataacatat

SEQ ID NO: 676857 - DNA, 833 bp, Homo sapiens
tgtttgatctgttcagccattttacactttaactctacaaacaacaacaaaaaatacaccaactatatgtagacatatgaaaattttkggggaaaataacaattaaccaaatcactaagttggtggagatgatcagtttttattagttacacattaagttcctgtgagagtgaaaaaaccaattgtttagaagtaggtttggcagtgcacgtgaaagtctcaccaatgttaatagcaaaccaatgactgaggcaagtccttaaatttcaagtctcaagtttctcatctctgaggtagagataattacacattctcatataaagttataagaatcctgtaagcagcaataacgagtttgaaaattttaaagtgctctgtaatcatgcaatattactttttaatttataaggttttcttccaaatgtataaatcgtattgtccacactgcttatttagatttgttacacattcatagctcttcccaaatataaactcctgaagtagagtgtctctatctttgttctcattgtggtacacaaatatatgttgaatccataactaatttatattttctttcaaaattaaaagtgtttgcctgactttattttgctatcagcatgtctagttggaattagtctaccctaaaaacatgacagtcgccctcttatggtcgacagagagtgtgcacattgagtgccaaggaagggccagaatcctgcctttatgaaccagatccataagaatttatctaatttatagagtatagaaaaaaaatcataggtcatgaaaaatataaattattcaatgtaagagatggagggcatttctaagca

SEQ ID NO: 676858 - DNA, 605 bp, Homo sapiens
taggagtttgagattttttaaaaaaagttttatctttcttcttacaatgttagrtaatcacaggtggtaattgtatagtttagagctacagggaaggatttctggagaggtaagttctttgtaaaagagggtggttaggctttatgatgttcagctgagaaatgcctatgagggagacttttctaggccaagaggtggatgttgggaatacaagtaaagggtatgatgctgagaagagagatgatcagaagaatataccaaatgcaatgctattctcttacaagagttgctaatcaaaattttgatactttctttaagtcaataccaataaagtattggtttgtcagtcagtcactgggtctcagcttccacattttaggaataacagcctaaaacaacatatggtttctttgcagagaaaaaccataacgtcgttcccattctttgctcttcactaccagtcactggattattgcaactcctccccactcccaaacacaaaacacagtatgtttcaatgaacggatggccacaaaactttaaagtaaaaaaatccgttacgtgactaattctatataacagtgacattgattggcaatttgaga

SEQ ID NO: 676859 - DNA, 583 bp, Homo sapiens
aactgaaaaaagatggatacacatttaaaaaatgaaatgttacaaccacacatctgtaatgagaaccagtgccagtggatatttttaaaacaaattaaaacggtcaatttttttttaacttaggcaaacagctgctatacacacagtgcacagtaactacttttcagcaaaagttcagaaggaatttcctaatgaagatttacagaatgtcctgggattgataattaagggttcccccaaaagatatgaagaacagtgttagcgatgtaaggattaaggacactgactatgcctatcctctaagggagaagcmtggaatttagaataaaagatccacactaaaaaccactgagggaaatcaggataaaataggtactgtatatcttttctgtactgacttcaaagtgttttgaaggattccataataatttctaaagtttaaatatctctgcaatttagttcattttttaaaaagggggaagagacgatgcgaggagaaaaaatggaaaaagcttgcctaaaaaaaattatattgatacaagagatcatgagttctgaaaattctgacttccactgtgtacct

SEQ ID NO: 676860 - DNA, 365 bp, Homo sapiens
ggcccaaagaaatcaggggtttcaatgcaaagcttcccaaagcaacacacaccaagaataagataaaccaaaaacctaacatttaatttttacaaatgtttttccatatgtaaactctgtatacrggccaattctttgtgctgaaacttatgtgaaaaaaaaatgatggaagactttgttgggttattctcatttaaactattaaattgagttgtgaggagacccatcaggtagaatgaaaatagattttgaaaacgtagatagtttataagggaagattttaaaaataaatgttttaaaagaataaaaagacaagccatagaccatctttgtaaaacacttatttgatcaaggactggtaacca

SEQ ID NO: 676861 - DNA, 2138 bp, Homo sapiens
atggattaaaaaggctggccttagaattcctcttcttaaaacttaaaagtagactggatgtgcaaagaataccttcttggtaaagaacacttgaaaatgcacaataatatatttaaagtatgctttaaccagcagtagggaagacaaaaccaaagtcagacaagatgaaaaaaagagttctataatagagtactgaaccttcaaaatttattctgaaggcatctacctaatcacagtaacctacagtctataccgaactagtagagaattcaaggtatagaaaagaatgtggggacaagaaaggtaggaaatcagtttgagaatccaatataacattgagaaacctaacataaaatgatggtgacaccctcaatgtgtgaactaggaaaatacccattccagagaatgcactttgcctacctcacccgaagctttgagtaggagaggaaaaaaatcttccctaagaattgttaactataaattcacttccatggtgctagagtatctgctacccatatagccttaaaaaaaggccaagcattaatttaaagtgatttatattgatagtgcccacaggtaccttgtagaaacaaatgcaattcatttgttgaagaacatatttcgaacaaataactgaaagaattcccatggatgacatatcaaggaccataaattcaaaatcaaaattcactacatgtaccaggaatcaagtcatcaagaatgagagtgagcaggaccaacaaactgcagaatcagacctacagcctatacatacctgaataaataagtatctattaactatagtaatttatgtttttttaaaagagaaatgagaagtatatgtaggacaacaaaaatcttaccaaatgcttagtcatttttgaaaaagtactaaacagaaatagaaatgaaaaatataatagcatttaaaaagttaatggagaaaagttatcaatctgataaagaccatatatgaaaaactcacagctactatccaacttaatggtgaaacactaaaaacttttcccctaagataagcattaacacaatgtccaattttgtcacttctattcaacacaatactgtaaattccaggcaaagcaattaggtaagaaaaagaaataggccaggcacagtggctcatacccgtaatcctagcactactttgggaggccaaggctggcggattgcatgagctcaggagtttgagaccagcctgggcaacacagtgaaaccctgtttctactaaaatacaaaagaaattagccaggcatggcggcatgcacctgtagtcaaggactataattgtcatgattagttcctccttgttttgatatgtgtgtgtatgtgtgcatgcatgtgcatgtatcttatatgtatgtgtgtatctcctttataaaatcctattgcttgtattttttctagagaactttgactaacatagccaggaaaggaatagctcaatattgaataaatatattaatataactacattaatttagaaaatgaaaaaagaaaacctacataatcatttcaacagatgtaagaaaaccactcatcaaaatccagcaaccactcatgacataaacctttagtaagctagcaccacaaggaactttctctaatttgataaagtgaatctgctaagaccctacaggaaaccacatacacagaagcatttaaaccctttragaaccagatcaatataaggataactattatcaccactttcagtcaatataatatttaagattaaagtcagaacaatgaaacaagaaaaaactaaaactataaaagtattggaaaagagaaaactacacggtccttatatgcagataatatgagtatctacatagaaaaccaaaaatcaagaaacaaattatttgaattaataagttagcaagtttctggctataagatcaatctacaaaaaatcatcattaacataaaggtaaaagatgcaattaaaagtaaatataaattggttctaaacattatatgagatggtaaagagacaggaatagtcaaaacacttttgaagtataagatgggagagtattttctacaggacttaatataaagctacaatcattaagatagtatgttatttggtgcaaacaaccaatagaccaaaaaga

SEQ ID NO: 676862 - DNA, 637 bp, Homo sapiens
actgttccactgttaaaaaaaaacactaatttgtcaaaatatatggaaaacaagcaatcaacttcatgttcttatttaaattgtaaaagtacagttgaaaaattgtactggctgagcacagtgggctcaggcctgtaatcccagcactttgggaggccgaggcaggtgaattacttgaggtcaggcgttcaagaccagcctggccaatatggtgaaaccccccsctctactaaaaatacaaaaattagctgggcatggtggtgcatgcctgtaatcccagctgcttggaaggctgaggcaggagaatcccttgaacccgggacgcggaggttgcagcaagctgagattgcagcactgcactccaggctaacagagactccatctcaaaaaaaaaaaaagaaagaaaaattatactatttttaaactgtacagcttaccaatttttaaaatattgaatattcatgtttaaaataataataaaaaaactgttataggttgaattgtgtccttccaaaaacaatgtataaaaatcctaacccctagtacctcagaatatgaccttatttagaaatagggtctttacagagataatgaagttaaaacaaggtcattagggtaggctctagacgaataggac

SEQ ID NO: 676863 - DNA, 662 bp, Homo sapiens
attttgtaatggaagtgttcttgtttttaggctttgtttgctgaagttctcagtaatgaagtgtgatgttaaaactgtctttcaactggcttcacaataaataaataaataattaagtgggtaaatctaggaagcatatatagcaaaacgtgaataattgtatctaagagaaaggatttaggcctttattatactattctgtcaacttttctgaatatttgaaaattttcccaagtaaaagttggagagggataatatttatatttctactccttttaataaagataatctaaacatggttttaagaacctgttgtctgccttgagaaaccatttatttctgctgacattctcacagtgatattaaggytcagatactatttaaacatttgtggctatgatttttttatcaagcacattaaaattagtcccaaactagttattattcactgagtcgaaggtcaaggaaaagaaccaaaattaatcaacactgtgtcttgtatgtaatacaagttcatagagccatgaacttgtaatatagcttcatggaagtatccacagggtgttgacgagtgtggcagcagctgtttctaaagcctccttattcctgagacgccctggcttgttgcatgcccctcaccaaaacacacaacagcccctcag

SEQ ID NO: 676864 - DNA, 2266 bp, Homo sapiens
tttttctttgtttgtttcaccatgggttttgccatgttgcccaggctggtctcaagctactaggctcaagcgatccacccacctcagcctcccaaaatgttgggattataagtgcccagactcccatcactctatttttttttttttwaaaaaggttctaagctaaggcatacagcagtactcatggtttttatttaccccttagcattatacatttattttaaatggataactaatttctttcaaacccagttttcatatcttttggagtagcagtttcataacaaaagcatttatcagtttggaggccaaggcaagaggattgcttgagtccaggagttctagaccagcctgcaccatacagtgagaccttgtctctaccaaaaaatcaaaaaactagccaggtgtggtggcgtgcgcctgtagtcctaggtactcaggaggccaaggcaggaggattgcttgagctagggaggtcgaggctgaagtgagctgtgttcacaccactgcactgcaacctcggcaagagggtgagactttgtgtcacacacgcacacaaaaaaccctaaaagcatttatttatctgatgaatattccagtcattagtaaatgattgcctctacttggtactctgaaggaattggtaaatctttaagtacttgaaactttaacaatctaaataaaaatcagaaatatttcagacttcttttcaaatgcaaatcttacctaccacccactccacaaacttcctcagtacagctcttgacgttttaatatagagaacatatgttgttttcaaccttagatttctccaactattttctacaagagaaatattatgacgattaacattataaaatgtttttcttctatacaggtaagagagttttctagtattaatgtcccatggagttccccctaaatgtcacaaatcatttgggaaatacttaagaagtagatttgtatatgtagctctcacatacacacctcgttacatagaaacctgatacatgaaattcactattacagaatttagaaactagcaaactaactcaattacactttatcccaaagcttcttttatataattttcaagttacattcagtcctatattccagtaacatgccccaccctcttgcttcatttactgaaataattaggctcaacctctttggtatttctgcattttctctggtttagaggggcctggtgattctaacacagtgccttcttattgttctgtataacaagctctgagtgatcaaaaggaggtgcacatttgctcccaatggaaaataatgaagtgtcaatttgttagaaacagatgcctcttcaatccaatgtgactgctcagttaagaaacttttttgcttgctgagaaagggaggaaagcaaagcaaaagagtcattaggtcatttaatgagttgaattatcaaatgtgattttaatacacatacatccagttgtataatgaaatgatataggctttaatacatacaaatccatgttagagaaaagttcaggagtgcagctgttctaaaggggccttgcacctgcaatccatcagatgctgcagactttgaagttttcttctggtataactttcaagttaatcactcctccctctctgctacgttggtctttgtataaatttctatttatgactttactgttgtgtttgttttcttgtctatctcctctgctggactgtaaggtacttgagggaaggacctgtgacttattgatctttgcacctcctggcacaaactggcattcagcaagcacatatcaaacaccatgtaccagtgacctatctgctgtgcaataaaaattggcgagtgtttattgctgcccttgatgctactgtgtcatcatccttttcaacttaatttttaccagcccatgtctgagtttgtcagtacatgtatcagaccttatccttttgcagagatgccttgatggcctgaatgcccattgccagagatatgaaaaaaaaggcagagcagacacatatgatccaggaaagagtgtgtggctgcaggtgaccccagagccttgttggaggacagcaatttgaaagccttgaatctaccagtcctcataacatctctggattgataatgtcctgaggcagagcaagaggattctagagctttggggactagcctttgtgtccgcagccccacatgcacgtttcttcctgacctctgactcacgctctacagttgagcatattgacaccttccatgtcccccatttcttca

SEQ ID NO: 676865 - DNA, 626 bp, Homo sapiens
gatgtcttccgcatcttttttctttgaaagctagttcttaatcattttggcttccaggagttggctactgtttttctattttacaaagttaaaatgtactggcagaatattttctttgaggattaaaaactctggtctattctaaatgtcgtctcttagcttacaaaatatttttgcaaatcagattacattttttcaggtatcttattcaactgtcagtttccatgtggtttgtctattttctctgccatatttatattcaccatagtgggcgaaatcttattgttggctcctacacgtcctatctccctactcttctcacagggcctcgatttcctgttcaggaaytatctatacttccttatactactcagtcttcacgggatatgaatccaaactttgaggaagacttctagcatatcctttttcattctccaagatccccaaagaggctgcatgtaactgaaactctgacaattagcctctttcttcagggactttgtgtcttgagtagagtaacagaagggtggaagaaatagtccatgttactaattgcagggtgtcccaaggtgatagtacagctatagagatcccctatgccaacttgacactttttgttccaagtt

SEQ ID NO: 676866 - DNA, 585 bp, Homo sapiens
tcttgtggttgagcttcttatatagcatttgaaaatactgatgcttgacttttttatggtgctacaaaatattttaactgagctacgaggtttcaaatttttgaatatgtgcctgtaatcaaagtttactacaggtacttcatgtttctattatttttttggtagcttagacttctgctgggattcttaactattgtccagtgtttctaactgtaactttcctgaaacacatatcacaaatcagyagtacttcttctcctgcttttgcatacaaatttaacaatcttgagctgatatcaatgtggggtctatctacttctgatggtgatttgttcttaaaatactcctgagcctcagtgatgaaatcagaatgttaaattatggtggtttaaaagtccctctatgagatacatagaaagacaaattgtcctagacaccttagtaaattgtctgatctatgtaaaaagtgtgtggtataaaactttatcaactatttaaaaccaacttattcataatttgctatgttggtgttctattaaatgaatgctcatttaaaaaaattttgatatgaatacaaatagctca

SEQ ID NO: 676867 - DNA, 1342 bp, Homo sapiens
ttgaggtctatcactctgaatgaattttacataaatattggcaaaggctttaatattctacaaaattactgataaggaaaagcgaagctaacccatgtatttagtttggttcacgtgactacgtttcctatgtttaagagtaataatatctaataataaaatctaataaacttaaaccctcaaatcatattcctctcaattagtacttgtgtttttcagtttttaaacctggtaacagtttcccacatttctgcctattgaagactgttaagatgatcttatattcttattctggctataggttcttgacataatgcattttctcttcctgccgtgaaaattttggataatcaagacctttatgtagacatccgataaaaattattccaaggtgaaggtctgagtcatgtcaaacactgccagaaatatatcttcagctagacatcaatcaactgttggaygcagttattcaaccagttattgatccaattacatattctaaaacctaaattctatttatcttgtactgtacgatattgagaaatgaccctgcaaggtgccatactcaaggtcacttgctatggctttggatttcatggatctaatagtctgtccagtgagcctgtttaagaagcaaatctggtttgttagttaatccatgaaggataccagtgactgctatgtccttgtctttaataaatcttgctctggaacatcacaccaccaccatcactagttctcaagtcaccatcttctctgtttgaaaaccagaaccacattcgaatttccaacatataattctttctctctccttttcaaagttaagtttaaataatttagaaaccttaatttgaggtctctttcagtattctaggttgtattatgtttttaggccaaaagattgaaatttagaccctttagttaactctttatagattcgtagatgaaaaggactaagaagataaaaattctcccaccacaccaaattggttggctatcctgcagaaatcagaaagacctgggattgaaggctgatttggaagccatctgagtttgaggtcccagataactaatttattctgagtcttggttttgtcatacgtagaaagggacaatgaattcctccatgatgtaaagcaatgtacacaatagctggtaacgcactcatcagacactcaatagacagctgttgccactaccactgtgcagctcagcctaaacgaactaaaacctaccttcccagggtcactggaaaatcagaaactttagaatcataaatactcatcttctttggcccatatgaggtcttatttctcaagggcttaaaaatcctcttttgaaa

SEQ ID NO: 676868 - DNA, 628 bp, Homo sapiens
cccagggcctgtctctgcttccggacaggggcataggatggcagctacctctgtgactgtgcagggacrtaggagcctagaaggttctcgcctgatgcactagagcctctgtccaggagaggccacatgaagggtggtctggagaacaacagacacacgggggtgggcagttctcagacttgggaggggcagagcttggtgggtcccgggatctgtgtgtgagaagagcctcccatgcatagggctgaggacaggagcccgggttagtcctgggaggaggccagtgggaaaggccctggcagcccccaccccgaggctgggtgacctgggccagtgactgggggaacaggaagaagacaaaaagctggcaggagagtcctgggcagcacagccaggtgacaggaggaggggcatctctgcacacctgggccctcctgcctcacccctgctgcaggctcctggccaccagactcaggcccacggaagctgggaatggaagcagccaggtgactgtaatggctatgatctagcaattatgcacctcctccagcaaccacggggacccaggacacagttatcaggaatccagagtccttttcaaactcacagaggttggtttttctctcct

SEQ ID NO: 676869 - DNA, 628 bp, Homo sapiens
cccagggcctgtctctgcttccggacaggggcataggatggcagctacctctgtgactgtgcagggacataggagcctagaaggttctcgcctgatgcactagagcctctgtccaggagaggccacatgaagggtggtctggagaacaacagacacacgggggtgggcagttctcagacttgggaggggcagagcttggtgggtcccgggatctgtgtgtgagaagagcctcccatgcatagggctgaggacaggagcccgggttagtcctgggaggaggccagtgggaaaggccctggcagcccccaccccgaggctgggtgacctgggccagtgactgggggaacaggaagaagacaaaaagctggcaggagagtcctgggcagcacagccaggtgacaggaggaggggcatctctgcacacctgggcyctcctgcctcacccctgctgcaggctcctggccaccagactcaggcccacggaagctgggaatggaagcagccaggtgactgtaatggctatgatctagcaattatgcacctcctccagcaaccacggggacccaggacacagttatcaggaatccagagtccttttcaaactcacagaggttggtttttctctcct

SEQ ID NO: 676870 - DNA, 730 bp, Homo sapiens
ttgggcccatctgggaacagtggtagtaggtctggacctaggggtccagtgggtctttcccacaacctagcctgtgtaagaggctggaggaaaccctgaatgcaggcagagaagtctgtcacagaggcccctggggacagtggacgctggctctgtgggccgaccaaggagcgagaccagctggagcatgtcaggggatggtgggtgtgattggagaggagggcrgtcacagcaggtgaggttgtgtccctctcctaatatgcagggccagcctttgaagttcatttcttcagttcaggtaaagtcaatacgattgatttctagacctatagacctatgtgaagtatctcaaccaaagagatgtttatctccaacctaagcatagctctattttatttctccttttgttttttggaatcattaaagataaaactactcccagccattacaactgtcatgatgacataaaatactgcatcagaaatagtaaccagggtctttatactgttgtttatttcattacttggaatgaaaatgacaatctaaggtgaagagatggacttggtttgtctgaaatagggaaacatctaggtgtagattttcagatctcacaggggacaaatttcttcatctgcagaggaggaaataaacaggatctgtgtagctcttggatgaccagctcaatacatggatgctggaggtgaagggagctctctagggaaagtttgat

SEQ ID NO: 676871 - DNA, 730 bp, Homo sapiens
ttgggcccatctgggaacagtggtagtaggtctggacctaggggtccagtgggtctttcccacaacctagcctgtgtaagaggctggaggaaaccctgaatgcaggcagagaagtctgtcacagaggcccctggggacagtggacgctggctctgtgggccgaccaaggagcgagaccagctggagcatgtcaggggatggtgggtgtgattggagaggagggcggtcacagcaggtgaggttgtgtccctctcctaatatgcagggccagcctttgaagttcatttcttcagttcaggtaaagtcaatacgattgatttctagacctatagacctatgtgaagtatctcaaccaaagagatgtttatctccaacctaagcatagctctattttatttctccttttgttttttggaatcattaaagataaaactactcccagccattacaactgtcatgatgacataaaatactgcatcagaaatagtaaccagggtctttatactgttgtttatttcattacttggaatgaaartgacaatctaaggtgaagagatggacttggtttgtctgaaatagggaaacatctaggtgtagattttcagatctcacaggggacaaatttcttcatctgcagaggaggaaataaacaggatctgtgtagctcttggatgaccagctcaatacatggatgctggaggtgaagggagctctctagggaaagtttgat

SEQ ID NO: 676872 - DNA, 591 bp, Homo sapiens
ttgttatggtagagttgatagaacagatttgtgtaatgagagaaagggaagaaactgacatttcttgcttgagtaaaggaaaggatggtatagtgttaatggagattgggaattaggagctgaatcaggtttgaagtgcctgtggcttcctgtctcttttcccctggcccccaaacaatcctgtcaattatagctctaaagtacgattttattcatgacactcctctactttacaaatcttcaatgattgtccatttgactttcaagtttaaattcctcagccaggcatgaaaggtcctctgtggtttgggaccagcctcatttgttcattcattcattcattcatcatttactgagaacctctatgtgtcaggctctgtactgtataccaaacgcaaacataaaagacctggtgcctgtttctgaggggctcatattcaaccactctagcattactccctgtcattttcttcccacccttttctccctttcataccmtgctgcaaacacactggttagccaccattccatgacttatgagcgtctgctggtctctcggccttcaccaaccattctcttaactatcttcca

SEQ ID NO: 676873 - DNA, 661 bp, Homo sapiens
cctgctggcggccgccgagcgcgggtggtttcctggagttgagcggcaaacaaaggcctccaatccgggcgcggggcggggcggtggctcctttgcataatccctgaggcccgcccgcgacagcagggggcggcccggggggggcggggcctctgggagcgcccaatcaccgaaggccgccgccacggcccgcccccagsaactcggacatagggagcgcaaaccctgctgcaggatgaaaatctcagacctgggaggctgtgtgtgcctactgcaatcagccccaccgcagacccggagatcgaggcccggtctgcggagggtaaggcatttacgcaagatcgcacagagtggctcacgcctgtaatcccagcactttgggaggccgggcagatcacctgaggtcaggagttcgagactagcctggccaacatggtgaccgtccccccacccccaccagtctctactaaaactacaaaaattagctgggcgtggtggcgcatatctgtaatcccagctacttgggaggctgaggcacgagaatcgcttgaacttgggaggcggaggttgcggtgagccaagattgcgtcactgcactccagcctgggcgacagagcaaggctccatcaaaaaaaaaaaaagaaagaaaaaagaaaaaaga

SEQ ID NO: 676874 - DNA, 663 bp, Homo sapiens
cccatggccgggtcagctgcccctgtttactcatggttggaaaatgtcacagctcctaaaacagctgtttaagggacacatcatctgaagcgacttttcctgttctggaagtgcccattttaaragcttaatttggtttttgtcctgagcccactctgctgttctatttgtgtggggtttctgccctcaggtggtgagagaggtgagctacaggtgcgctaacaggttctgggaactcagctgttgccgatgggcaccttactgtgatgtgtctagttggacttgtcactcactgtgtggtgctcttgacacaggggtcttccccaggtacagatgggaccttgtgtacccagatcttggcttccggcaggaaagcatctttgtactccacaaagttttgtttcccagacactagatcttgactgaatgccagagaaagccaagaactgctctgagctgatgttggagaaagcagtgtttcaaaaaccttgcctaggcattttatatgaggtgtctttttaaagcctcaactatcctgtgaagtaagtgttgtgtccattttacagatagagatggataagataaggaaatttaaactaaagagtttaaatcagtggttctcaaactttttaagtctgcctttacaatcttaaaaattatgga

SEQ ID NO: 676875 - DNA, 814 bp, Homo sapiens
ttttatgtaaaaataactatgataaacttattatatattaacagaaataacatatttggaaagaagaataacagtgttttacatgtttgcaaatctctttaaaatgcaacatgtagtctttcaaaagctcttctgtacactcatgaaagagagtgaaaaacatattaatatttttattaaaatagtttccatttcatggatcccttgaaagggtcttggggtatccttagggatcccagaaccatacattgagaaccactggcttaggtaatttgctgtggatgcacagctggtatgaatgaagggtggagccagcattccactcccagtttctctgaaacacacctccacactcaggcctcccccacttacccctgggcaccagaggcctgtgtaaagtgagagtgaagttccgggtgggccaaggagcttctggctctggcactccatgagtctgtctggatgatggcagctctgggcagtgctgattctatggctgctgcccctgcccacttagggaatccacagtttttgagcttcagtgggctggaacagttagagagcatctckcaatcgcttgagaagacagctctgtgactcccaaacttttctaggtttctcaccccacccccaatttgtggcatcacctgtttcagctactgacccagccagctgatgctccaagttaggaagatgggagtcagcaaaggtccttattggtatcgcctgctttttgacaaagttctgaagatggacccctttgaattcaacttctacctctccacacacactcttaaaaaactgttgaacaggc

SEQ ID NO: 676876 - DNA, 814 bp, Homo sapiens
ttttatgtaaaaataactatgataaacttattatatattaacagaaataacatatttggaaagaagaataacagtgttttacatgtttgcaaatctctttaaaatgcaacatgtagtctttcaaaagctcttctgtacactcatgaaagagagtgaaaaacatattaatatttttattaaaatagtttccatttcatggatcccttgaaagggtcttggggtatccttagggatcccagaaccatacattgagaaccactggcttaggtaatttgctgtggatgcacagctggtatgaatgaagggtggagccagcattccactcccagtttctctgaaacacacctccacactcaggcctcccccacttacccctgggcaccagaggcctgtgtaaagtgagagtgaagttccgggtgggccaaggagcttctggctctggcactccatgagtctgtctggatgatggcagctctgggcagtgctgattctatggctgctgcccctgcccacttagggaatccacagtttttgagcttcagtgggctggaacagttagagagcatctctcaatcgcttgagaagacagctctgtgactcccaaacttttctaggtttctcaccccacccccaatttgtggcatcacctgtttcagctactgacccagccagctgatgctccaagttaggaagatgggagtcagcaaaggtccttattggtatcgcctgctttttgacaaagttctgaagatggacccctttgarttcaacttctacctctccacacacactcttaaaaaactgttgaacaggc

SEQ ID NO: 676877 - DNA, 607 bp, Homo sapiens
aattgagaattacatgttaagaattcagttagctttctaaatttaagcatatgcatatcaacaaatgttaaaaactcaaaacacaatgtatacgttgaaggaatagataaaaatgggaagatagaccagtgaaaagtttttatggtcatggtctttgtttatttcttcttgagttataccatcagctgaaaaatgtacatacctcccaacattttatttgcagtctaagtctcttcagtgttaacttgcatctagttagtcggtttcctttctctgtggctggtttggtggcttagatggaccaaaacagttttggctgttgaccttgcaatatatccccatgaagatttactgaatgggacagggtgtaragttcaatccagtttgcagtttgagcataagaaagattctggaaaagacctgcttattgtatgtagtttgtacaaaccaaagatggtgtcctgggaaagaaatctgctgataacataattctagtggtgttcttagaaggtcaaattgtttcctgctgagtttccttgccaaaataattgacttgcaacctggaaacagcagcaagaagggtgaagggagaatgaaggcattattg

SEQ ID NO: 676878 - DNA, 608 bp, Homo sapiens
ttgccacagcatttaaaacatgggaaaaggaacagatagtgtggcaactaaaacatatataacttcggccgggcacagtggctcatgcctgtaatcccagtactttgggaggccgaagtgggtgggtggatcacttgaggtcaggagtttragaccagcctggccaacatggcgaaaccccatctctactaaaaatacaaaaattagccaagtgtgatggtgcacacctgtaatgctagctactcagaaggctgaggcaggagaattgcttgaacctgggaggcggaggctgcagtgagctgagattgtgccacagcactccagcctgggtgacatagtgagactctgacacacacacacacacaccccaaaacttcaactccagcgaggacaggaagacaaactatgatactggactgaaaaaaacctggattctaatctgggttccaactagtaatggtgtagtcttaagtaacttgcttattttctctgcgccttcaatgaggttttctacctctattcatctcatactgtggggacagacgaaagaaggaagaaaggatagaaggagggagggagggaaaagaaacctatttaaagcccccttt

SEQ ID NO: 676879 - DNA, 608 bp, Homo sapiens
ttgccacagcatttaaaacatgggaaaaggaacagatagtgtggcaactaaaacatatataacttcggccgggcacagtggctcatgcctgtaatcccagtactttgggaggccgaagtgggtgggtggatcacttgaggtcaggagtttgagaccagcctggccaacatggcgaaaccccatctctactaaaaatacaaaaattagccaagtgtgatggtgcacacctgtaatgctagctactcagaaggctgaggcaggagaattgcttgaacctgggaggcggaggctgcagtgagctgagattgtgccacagcactccagcctgggtgacatagtgagactctgacacacacacacacacaccccaaaacttcaactccagsgaggacaggaagacaaactatgatactggactgaaaaaaacctggattctaatctgggttccaactagtaatggtgtagtcttaagtaacttgcttattttctctgcgccttcaatgaggttttctacctctattcatctcatactgtggggacagacgaaagaaggaagaaaggatagaaggagggagggagggaaaagaaacctatttaaagcccccttt

SEQ ID NO: 676880 - DNA, 618 bp, Homo sapiens
ggggttataccatgttggccaggcttctcttgaactcctgatctcagatgatctgcctgccttggcctcccaaagtgctgggattacaggtgtgagccactgcgcccagcctaacctgagttaaatctaagaggtgggtatatggtatgtcttacattagtctatgcacttttttgtatgtttataatatttcagtactaatttttatttgaaaatcgatgagatttttcttttaaaatcccccatatatgggtattcactatattgttgttttaatttttctgcattttaaattttttaaataaaatattgaggaaaaagaccttacacattgccatcactaccccccttatacacaacacacacacacacacacacacacacacgcacaccccatgggggaaaaaacccattaggatgcgtgcgtgtgtgtgtctgtctgtctgtgtsttcaagccttcaagaacaggcatctttaatttttttttgtctcagctactcagttcttatgatttcttaaagcaaagggagtagagacaaagagaagtggtatgagaatgagaatgagaccacaatttctcaaaggtaaaactgataatgcggtggacccaatcattg

SEQ ID NO: 676881 - DNA, 1622 bp, Homo sapiens
gcttgcctgtgtttaagtctactacattggtagtggtagccaacagttactgaccacttcctgtgtctgaggcaaacccttgatcagcattatttcattgagtcttcaatgacaactgtagttattattttctctccattatgtagatgacaaaaccaaggcttgaatagacttgttaagcaaattagccaatattacccagttatggaatggcaggccaacattagcctccaggactcttggtctccagaactcctgctctttcctggtctgcttagttcacatgggaaacctaagattttatcagattcgggcaaaagaaaggagtcagcttcctggagccctcccattggatgctttccaggcatttctgaatcagcaactgaaggtgaacccaccactgtccatccttagcccaccctccaccttggcagtgagcagcaggcaatgcctcctattcccctctgaaagcttttatcctggggcaagagcccagagaacttctagaagcaaattattgccttatgctttgttatagatgaggactttgacttcctaggactgatactcaataggagtcatctttttgagagccatttctttatagtttctacagcataacaacaayagagtaagccagtggatacgccaggccagggcccatcattcctcatcatggattttcattgctgtgcttgacagctttttctggcttgatttacttcagctaaaggaggtattttggggagaagggggagggctgaagtagttctgagtgttgagcagaaagagctgatgactgaggatatgagggcagggccatttctgtttgactcctgagaaacaggaactgtttgacaagagatcttggtgactcatggcgcccacaatactgcattaagacccaggtgacaacattgcacagagtttgggagaagggcattctttctgtttctgtgcagaatgcaatgcagtgattgcaaccacagggccctggaaaatttcagaggtggaggtgctggctgtgcctgctggagtgatggggaagcagatttcatttttatagaatagcagcagtggcagaggcgaggtgactacctcacaaaacctgtgggcagaaacttaaatgatgagtccagaaagtaagaacattaatgtgctttggaattcctaaaagcagttgaggacatgataagggacagaggttgacatagtaattatgctggtgaggactttcagctggctaaagtttagtaaaatttttgctgggactaattttgccagcaaactggagtggcatgcaattataagtatcacgcagacaaaactgcaatgttagtagccttttctcaattgggtattgataaatcctgcattcctaatggattgattagcatctctccccagatccctctgttccttggtagccccatgttctgtttcagctttttctgctaatccacacactgtgttgaccaacttcaaggcttggagctcatacactagaggattctcatgtctctttctgttgttgtttaaactgaattcctccataaaggaactttccagcttgcaatgtatcacacaaatcttatcatctgcatttttgcttgcattgctca

SEQ ID NO: 676882 - DNA, 1622 bp, Homo sapiens
gcttgcctgtgtttaagtctactacattggtagtggtagccaacagttactgaccacttcctgtgtctgaggcaaacccttgatcagcattatttcattgagtcttcaatgacaactgtagttattattttctctccattatgtagatgacaaaaccaaggcttgaatagacttgttaagcaaattagccaatattacccagttatggaatggcaggccaacattagcctccaggactcttggtctccagaactcctgctctttcctggtctgcttagttcacatgggaaacctaagattttatcagattcgggcaaaagaaaggagtcagcttcctggagccctcccattggatgctttccaggcatttctgaatcagcaactgaaggtgaacccaccactgtccatccttagcccaccctccaccttggcagtgagcagcaggcaatgcctcctattcccctctgaaagcttttatcctggggcaagagcccagagaacttctagaagcaaattattgccttatgctttgttatagatgaggactttgacttcctaggactgatactcaataggagtcatctttttgagagccatttctttatagtttctacagcataacaacaacagagtaagccagtggatacgccaggccagggcccatcattcctcatcatggattttcattgctgtgcttgacagctttttctggcttgatttacttcagctaaaggaggtattttggggagaagggggagggctgaagtagttctgagtgttgagcagaaagagctgatgactgaggatatgagggcagggccatttctgtttgactcctgagaaacaggaactgtttgacaagagatcttggtgactcatggcgcccacaatactgcattaagacccaggtgacaacattgcacagagtttgggagaagggcattctttctgtttctgtgcagaatgcaatgcagtgattgcaaccacagggccctggaaaatttcagaggtggaggtgctggctgtgcctgctggagtgatggggaagcagatttcatttttatagaatagcagcagtggcagaggcgaggtgactacctcacaaaacctgtgggcagaaacttaaatgatgagtccagaaagtaagaacattaatgtgctttggaattcctaaaascagttgaggacatgataagggacagaggttgacatagtaattatgctggtgaggactttcagctggctaaagtttagtaaaatttttgctgggactaattttgccagcaaactggagtggcatgcaattataagtatcacgcagacaaaactgcaatgttagtagccttttctcaattgggtattgataaatcctgcattcctaatggattgattagcatctctccccagatccctctgttccttggtagccccatgttctgtttcagctttttctgctaatccacacactgtgttgaccaacttcaaggcttggagctcatacactagaggattctcatgtctctttctgttgttgtttaaactgaattcctccataaaggaactttccagcttgcaatgtatcacacaaatcttatcatctgcatttttgcttgcattgctca

SEQ ID NO: 676883 - DNA, 766 bp, Homo sapiens
tttttatttttaccatatatttcttaagtgtaaggtgcatcttatggattatcttataacccggatctcaaatatgattctggtgatttacaaaagcaggtccaggaagcctgcatcccacttctacttttcagtgccacacctgaggtctcactctggccccaaggtttctcaggtgccactgcctggattgtctgaaagaacccagtgcacagatatctcagaagtggaaagaagataacctcctttgggccaagctaaacactgtgggcactggaaatcaatgtctaaaaccttctccctttcattccttaggtgtttgtttattatataacaaaactgttgcctgcagaagaggtctatttaatgatactccttgtaatatacatgaacttttccaaattacctttaacatacattaactttttactcttctgttattcagctctgttttccagaaacatgttatcacataaggtatcttataaactcttctgacgggttctgcttagtgggggttagacacacaggaaaagatcagtatattcacattcacatattcttcagatgcctatgttacaatatccattatgagtaacacataaatgaatggcaagttttaatgcaaargggtaaatgtgcaacataggtgtctgtaagacctaatataatgatattcagcagttgaatattatgacagaaaaaacagttttgtagagagaaagtaatgctctatctcaaggaattttaacttcctggaatttca

SEQ ID NO: 676884 - DNA, 2114 bp, Homo sapiens
tagcccacagcccaccagcttaaaatgtctagatacagttttatctacctttttatcatcacatgaattctcttttcctttaaaagacttttatcactactactccctaaataataaaaaagtgctatttcctttctcactacaaaaatattttttaagccaaaaatgtgtgtgctcttaaggttaatttgggagaactacagaaatctctttattaaggaacatggctttcggaattttcccaagatatcagttttaattctattctcttatttttcccatattttagtgtacttcttttaattggcaaataaaattgtatacatttatcatgtttagttttttgaatatataagtttcccaaattctgtcactttaccttcaaatatagctcttgaaactcctctccctcattacctctcaaaattgtctctttgtattaacagcctcagctctggttccttaatttctcactcaaacattaattttctgactggttctctaggaagttagaaacttattctcttttaaattaccaatatctagcacagcctggctcatagtaagcattcaacaaatgttggttaactaaaatttgggactagccagaagccaaactggatcagaaaatatctatttctatatatagatctcaggatccaaaagcctaattctcacaaaaaaaggccaactcattgttcaaatgaagcaacaaagaagatgcccataccattattagttctgactgcaactgacacctggggaccttgtttcaagagatttgaaaatgtacatttatctatgaaaaaaatcattaaagtcattgggggaaaaacttgataattacaatgaaaactgaaatttaaagttgattttatagagatgtgtgctgttttagcatggatataaatgtaaaggctgtgcgactttgttgtttgagcccagctgttcatttggggtcaaatgtctctagggtcataaggaaggattatctcttagtaccctttctgttttcagattcgtaatcttagggtttaagtgctgctttcttcatgcatataattaagctcacttactagacttcaaattaattgagatggaaagagtaactctaagagatttttcatgtgttaggtccttcagggattaaaagggtaactatctcaaattcggatgctgttaaagttactgggacattggtctttgaatcaaaggaggaagttagaacattacttatttaatggaaattatgtcatttccaaaaattcctcagatctttgctgagagcagtttaaaatgtttataagatctacatttttcaaggttactttgcctrtaactttacaatgtgaaattagctaaaagatgaatactcactctaagttcaggaaccttttggtaaatattttgaaataccaccatatgttttaagaatttttggagagtagggattaagaattactcaacttcaaattgctggggttactgtagtacttgatatatacctgggatttacaaatatatttcaagaataaaggaacaagtgaatgaagaaatgaaatcaaaccattttggtaggtgatatccagggctactgcactgaattttgagcaggcttaatggcatagtaaggcataaatccccagggaactacattttataaccattgttgtagcaagatattttgtttatggcaacggagtagacccctgagtgctgacatttccttctcctttccgttcccagattgagatgatatagaaacacagtgaacccatacctaatcctgggcttctctgacctggtgatttctgctgtgtggctgctgtgaccactaacttccaaccatatccacaaggaacaaaggagaccctgaatagctgagccctctcatgccgacatggattcttgatcacaaatatgcctttcgcactgcttgctgctgatttgataataaataataagaaatattaccttaaccccatctaaattgttattcttatctgttctcaaactttgtaaggtggctgaacttgcccatcaagacatcaggcagaacaaagttaaatgtatgtaaaatacgacttgaatctaaccaacttgaaagttttgtc

SEQ ID NO: 676885 - DNA, 576 bp, Homo sapiens
agcagttttcttctaaagactgtaactggtagggaaaattacctctcatccttggtcagtctgttgtaaacatctgggttactatatcagagaagattttgaggtcacatgtgggctccatgcaagagtaccatgattgataagcagtaccttccattgtctcattagaaaatgaagaaggaagcagcaactattttatatctttggactaaacaataacaagaagaagaaataaaatagcatgaagaaagagagataaattacattttggaagccatcatatcctaaattttattcttttctaattcccaacttcctgactgttctgtagttcatatttgaacataaggaagaattctcaatgacctmgagatggtctgacttttagccccaatggaatgaggcccagagaaagagagatttctttttctttcctccacccaatatccatcttgtcttctgaggtaggcagcctctgagatggtcttcactggtccctgccttctgcattttgtataatcccttttccttgggtgtggtatagacttaatgactcagttccaagatcagatgtgg

SEQ ID NO: 676886 - DNA, 3616 bp, Homo sapiens
  misc_feature 1259, 1260, 1261, 1262, 1263, 1264, 1265, 1266, 1267, 1268,1269, 1270, 1271, 1272, 1273, 1274, 1275, 1276, 1277, 1278,1279, 1280, 1281, 1282, 1283, 1284, 1285, 1286, 1287, 1288,1289, 1290, 1291, 1292, 1293, 1294, 1295, 1296, 1297: n = A,T,C or G
  misc_feature 1298, 1299, 1300, 1301, 1302, 1303, 1304, 1305, 1306, 1307,1308, 1309, 1310, 1311, 1312, 1313, 1314, 1315, 1316, 1317,1318, 1319, 1320, 1321, 1322, 1323, 1324, 1325, 1326, 1327,1328, 1329, 1330, 1331, 1332, 1333, 1334, 1335, 1336: n = A,T,C or G
  misc_feature 1337, 1338, 1339, 1340, 1341, 1342, 1343, 1344, 1345, 1346,1347, 1348, 1349, 1350, 1351, 1352, 1353, 1354, 1355, 1356,1357, 1358: n = A,T,C or G
tgcataagtagaccttccttcctctatgctagtcaggtggaggtttggacttctagaacacactatggcaattccactcctaatgagacagacctcaagcaagcctcagatatttcctatgctgtcatcaccagagcaatgcctaggttgtcctaagataatatatgcctcttttgttttttaacattgcttatgaattttaagtaatttctgattgtccgtatttttcttcatgattcacagtacagaacttaacttacagtaatcatcatagtgtttaatgattaaattacaatatactaaagttaaatattaagctcccgtctttcaatgcaatagcataggaaataatttggtatcttgtaaaaatgtaaatgactcataaattttcctttgttagatcaaatctaagaagtcgggctaaaattacattcgtaaaagagcgtgttattttaactataaatcaaataactgggtgagtttcacctctcacctgctatttggttattaaagggttcagatatactggctcgctcatgaagtggccagttccataaagtcataggatgacaacttaggatttcatggagaaactagggaatttaggtttgggttctataacccccacttatttcgctctctgccctttttaatataaactgctcatattgaattttgtcactatctgtgagtttcttaattcttccattcacatgactatatattagtcatatagtacatatactgtcattagtactaattttataatcttcagtacttaatataatgatcacattttaaaaaattagaacaaaattgagacttaaataatcgatagctttataagagtggttcatttaattagttaattggttcattaaaatacttatcaaaattactttttttccaaaaattttatgctttgaaggttattatttgaaccattcacacaaatctgagcaaatactgcttaaatgcatgtacatcatggtgtggtgttttctgaagaggtgtggaatctttcgtgagatagcatgtacagatcaaaagatattgttccataaattttcatttgcaattaaaaagaaaaatttgttagattgatttatttttttccatatctatgctcagttccaagtgtttctgtattatggaatgatacttgatgactttggcagtccctcaaaatccagtttactgcaaaagaggcatcttttactaaaagattggtaataaaatattaaatttcctattaaaannnnnnnnnnnnnnnnnnnnnnnnnnnnnnnnnnnnnnnnnnnnnnnnnnnnnnnnnnnnnnnnnnnnnnnnnnnnnnnnnnnnnnnnnnnnnnnnnnnncttgattaagggcgccatttttcctctttttttctgaatccttttcttaaattaaggaattaaagattgtgggttcttaacttcttcattctttatcacactaatttaacttactgtttatgaactatagcctaatatttcagttctttagtaaataagcatgaaatactaattttcaaccagtgaagcttctaaactgtattatactcaattataaaatagcaatacagaaaaactttgtttcactgtaacgttccatggttgatacaaaagtactcactaacatataattctctggcaagatgagtgtatggaattaaaaagacaatcacataattaatattttaggaatcaatacacaggtaaaatacatttattaaatagtttactaattccttgctagtctggattctatctttattgttactccttattacttgctctttcatattttttttttttgtctatttgtgtaccctgtattgcacaatggtttaaacattataaacaagcaaggtttggcttatttctccacttttgctagcttatatttacaaatccattttggggtttcccctaattttgtgttggcttatgttttgatatcaccaactgtgtttttctctttttatttcttaagtaggaaagaatatgttatattcctcgtggttgctttttccttacagaattcccctgactcggccctgacagatcttgatatccaagagggagtctgctcgcaggattaaaggcaagaacctcaattagacactctctgatttcttcagatgttttttctaatcttttaatatgggattataggcagctagaacctatgttgctgttataaaaatagtgaagactctttgttctaaatcataagcacttggcgttttaaaaagtctatttttcttaatttgaattaattctgatttagatgaggataatgaactttggtcagctctttgccattctgagtacaaaatagcttgatgagcactgtgaagctcacacactctcctcagtatctgctggaaaactccctcagagactgattagctcacgcttgtcacaaataggggagataattatggggcttaacagtctatgtggtggatcttttgagaggcaatgggtagatctaagactgtctttggatcaaccctaattcttattattgcaaatatcttgtgagggtttttttttttttttttcacatccccagagactaaacattgtttcttcccggaggatgacatcacatttcttttccagaagataaaattgtccaaattagattatctttaattagtctaattttatgagccattccataaagtttattgcacccgtgctggcaccatgttacaagattcttattgaatgaactaatcttttgccatggaaatgatgcttataaacaatgttgctgatttctttattgcaataaagatttccttctctgaagcttcaggtttcaatagctgttttatggttctcagtaatatcagatgactttgttttaatgagaatgttgacttattccaaatttcactcattactaagttattatactgcaaaatgatttcatagcgacaaaaagcaaataattgaagtttcagaaaatttcattactataaaaacttattcaggataatgttttctcctgttttaacataatgaccatctctttcaaaacagcttcagttttagccttgcttttttggtaatagaacatgttgtgggctcctatttacacaccacatgacaaggtcccatacattaaagggtaggttctagagagatagataaaacaaactactatcactagaaataatgtactatttattaaatccatttttctgccttggttgccatttgctttcaactttatctggggtgtttcgttcctccccaaaaatatgcttagattttaaatagaattgttttaaattgaattttaagttgtttaaaatgaattacagcctctaaattagaattgttgacaagatgatcctaataaaatttcaaatcacatgaaaatgtcttgtgatttaaatttcctacccctttaaatcctgttaaaatccttcatatcaagtctctcactctttattttaaaaatttcarttgtttatgacctgagtcaaatcccttaattttgggggtttttgtgttctgatcttcgtaattagacaattgcaaaacatagtttgaaaactcacagctctagaacactgtgattctgtgatataaaa

SEQ ID NO: 676887 - DNA, 720 bp, Homo sapiens
tcatacataggtatatgcatgtgctgaaacgcatcagattgtgtaccttaaacatgtggcagttttttgttatagcaattatamctcaataaaattgtttgagagagaaagagagagaataccaatcttaaatttataaagggtttaaaaatggcctcccacaataattaatattaacattgggatccataagtaaccaaatgaagaaataatgttcctaactgaagaatattcttattgcagatcacacaattgagaaggagcatagcatatataaggatttaagtttgatgtgcctggaatgcaaagtggagaaggtcagaagtcatgaaggagatgtatgatgtgttttggattttggattttattcttcttgggaagtcactgaagaattttgatggaaacatagttaacatggcccagttttcattttaggggtatcaatgtgaagaatagattagaattggcaaggccaggctgttaaggagaaaacttaggaagtgattactgtaatttaacagagaagagtcctggcctgagtgtgtatgctaatattaaaaaatgaaagtaaaaaaattaatggtttctttagaagatagaactgttagactgggcgatgattagatatgtgttagggtagggaggcaagtatgaagatggagaagctgtctagaatgatatcaagagtaagttagtgtctgttggtgtgggtcattgaaa

SEQ ID NO: 676888 - DNA, 612 bp, Homo sapiens
taattaccaatgaggaaacgtccaaaacccttatcccctgccaaaagaagactgtctgttcgtggcaccttcccatgaagtggttgggtgttccatgacatgaagaggctgtgtgttcaatgaacatggtggaacttgcaaaaaccgagttcctgagtgactacttgaagcagacccttgattaacatgcagtaggattaagaaataaactttacttttaatgagctattgagattgctgggttattttgttactgcagcattaccttgtttattctgactaatactcaaacaaaaccaaatttaaaaataagcacatgtcattttacagatacaatacgtctataatgctgccacaggtagagacaatgctcacaagactactatctaaggtgctgtaaagttaggaggctttaaccatgccatgaactcttggagcacaacttttaatgttacctattcatataattgaggaagctataacaaggacaatgtgatatcccatgtatttttaatgagagaacatgagtaacccagaaagattgtattcaaaagttcagacttttytaaatgtcgcctatagttatttatttctatttaattcttttgtttg

SEQ ID NO: 676889 - DNA, 1243 bp, Homo sapiens
  misc_feature 576, 621, 622, 623, 624, 625, 626, 627, 628, 629, 630, 631,632, 633, 634, 635, 636, 637, 638, 639, 640, 641, 642, 643,644, 645, 646, 647, 648, 649, 650, 651, 652, 653, 654, 655,656, 657, 658, 659, 660, 661, 662, 663, 664, 665, 666: n = A,T,C or G
  misc_feature 667, 668, 669, 670, 671, 672, 673, 674, 675, 676, 677, 678,679, 680, 681, 682, 683, 684, 685, 686, 687, 688, 689, 690,691, 692, 693, 694, 695, 696, 697, 698, 699, 700, 701, 702,703, 704, 705, 706, 707, 708, 709, 710, 711, 712, 713: n = A,T,C or G
  misc_feature 714, 715, 716, 717, 718, 719, 720: n = A,T,C or G
caaaaaacaaaaacatgagatgagagttagaagttcaaacttagaatgatcacaaaataccagctactgttagatatttgattgataatagtaataatagctagcactacttgagctactacaccctgccagacaccgtgccctatctcctttaatccctataacactattaggtcaattctattaccttccccccttacagatggggaaactgaggctcagtgaagtaacttgttcaagttcacacagtaagtggaggaagtggctttaaacccagatattatactgacctttctacaggtggtttactttcagagggggttaaattttaatgtactacattcctgaagtttcttgacaaagatactatgttcagtgtgagagagacaaccttcaaaccaagaaaggtaagaacttcagcatctgttcagaatatcctggagggctccaggcctctgccaaagcaactctccaactttcactcttcaaagaagcttagtcattggcaccaaatttgcatcacaaaactacttctcaattggtatgttttctaaaagctaaaagcaactgtctttncgtctgcataagtgtaccgagctcgaattcgtatacagtagtatnnnnnnnnnnnnnnnnnnnnnnnnnnnnnnnnnnnnnnnnnnnnnnnnnnnnnnnnnnnnnnnnnnnnnnnnnnnnnnnnnnnnnnnnnnnnnnnnnnnnaatcactgtttacgaattcgagctcggtacccctattcttcctcctcctttagcctattaacctattaatattgccttcctcgtctatactgatttagcatgtcaattccatgtctagtctcattctgccacccaggcatgatctcagctcactgcaacctccgcctcccaggttcaaatgattctcatgcctcagcctcccgagtagctgggactacaggtgtgcaccaccacacctggtaatttttgtacttttagtaaagacatggtttcaccatattgcccargctggtctcgaactcccagcctcaagtgatccacccacctcagcctcccaaagtgctgggattacaggtatgaaccaccgcacccagcctcaattccatttcttaacatgttttatcaccagtgcacaggtctatctctcccaggagtttagggttctattaaggtcagacccctgtcttctaaatctttggctctccgtggtacgttacagtgttattatatgtagttggagccc

SEQ ID NO: 676890 - DNA, 646 bp, Homo sapiens
acattcgaagctgtcttagttatttccacattggtctgtttcctctccagactacaagtgctttgaaagcagggagagggttttttaacttctgcgttatgcacacagaatgcccagaatttatggtgacggaatgacttcctgtctgcttgagcctttttgcctgcctccttgacttactgaattcttatacatgttcctatcttaaacaggggtgtccaatcttttggcttccctgggccacattggaaggagaaggactgtcttgggctacccataaaatacactaacactaacggcagctgatgagctaaaaaaagaaaacaatcccccaaaaactcatcatgttttaagaaagtttacaaatttgtgtagggccacgttcaaagccgttctgggctrcatgtggcttgtgggccacgagttggacaagcttgctctagaatacgttaatctttagtatttgggacttggcctttcctggcttaagcacccagtaccatcactgctaccaccgctaaagcctgtgagtctggaatggctactgggatttctttttaatgcatagactctaggagtatacttttatttttaacaaccccacaaaacctaataaagataaaagattcagttagtcaacagatat

SEQ ID NO: 676891 - DNA, 646 bp, Homo sapiens
acattcgaagctgtcttagttatttccacattggtctgtttcctctccagactacaagtgctttgaaagcagggagagggttttttaacttctgcgttatgcacacagaatgcccagaatttatggtgacggaatgacttcctgtctgcttgagcctttttgcctgcctccttgacttactgaattcttatacatgttcctatcttaaacaggggtgtccaatcttttggcttccctgggccacattggaaggagaaggactgtcttgggctacccataaaatacactaacactaacggcagctgatgagctaaaaaaagaaaacaatcccccaaaaactcatcatgttttaagaaagtttacaaatttgtgtagggccacgttcaaagccgttctgggctacatgtggcttgtgggccacgagttggacaagcttgctctagaatacrttaatctttagtatttgggacttggcctttcctggcttaagcacccagtaccatcactgctaccaccgctaaagcctgtgagtctggaatggctactgggatttctttttaatgcatagactctaggagtatacttttatttttaacaaccccacaaaacctaataaagataaaagattcagttagtcaacagatat

SEQ ID NO: 676892 - DNA, 604 bp, Homo sapiens
ccacctccccaagaaagattagaaggaatgtcaagagaaacatcaagacgtgttcatcgtatgtctttcaaaaatagcaggattaggcaagccagccttttgtttacgaggagactttgtagactaattcttctttgtaatacatacaatacttaattgtatatattaatctgccttatatagttatattataaatatctcacacttacaagagttggatggcttgactctcaacattttccacattaaagaagagatacctaagcaggttttttgtttttgagatgagggtctttctgtgttgcccatgctggccttaaactcttgggctcaagcaatcctcccgcctcagcgtcctgagtagccggaatttacaggtgcactcgccatgccctgcagaagcckcatgtgttagggcgcacctgcaattccagccactataattttaaggagtgtttggaatccagaagaatggcatgagggaagtgcattaaaacacttgcctgtttttgatttccagaaggtggagtggaaggcaggaggaggaaagaaagcaatgtaatgagatacaccttgatgtttctctccgtggggaaagttttcc

SEQ ID NO: 676893 - DNA, 665 bp, Homo sapiens
tatcygacagacactggggtcctgaacacctggtctaaagcacagacctctgttgtaatactgcacatttttaaatggctactgaaccttccaagtagctgttgccagaacctgatctccaagcctagcgacttcaggcctgcctggcattccatagcactggtttacatagaacctttttctgtaatgaaattaataatttaagatatatatatactccacctgtaatcatttccttccaccaatattatttctgtagtaccgaaaatattggacactgaaacatggacaattcccaacgaatcccttctctaattcacagaaatgaaatgcagccttttgctattatttctttgatacagaaaaaaacggtgtgtttctatctgtattctaaaggacattattcccatgtgtgttttcacagtaaagtttaaacagtcactactattaccaaatactaaatcaaaagctattagaaaataaagctgccacacctttatccctatgaaaaatacaaaattaaatatataaacaaacataaacaagcagatgaatgactcagaaataatagtaatggttaacactccttgaacccacctcactctgaactgtctctgtgctgacagcttcccagcatcagcctcccaaaacccctatggagatag

SEQ ID NO: 676894 - DNA, 1862 bp, Homo sapiens
tgcaaataaagtagtggcccgcaaggctgaagtgaagttacaaagttacactcctatgcagatatctgattggttcttttcgcaaccaatcagaggtacttactttcaattttccatcttccaggcagaaagggggttgggggtttgcaaagggagtagcctccagtccttctgttacttaggtgtggaaagttggggttttccttttgatttagttctacgaagtcagagtgaatcagccttaggttccctgcctccagaccctattctcctgcctcacaagagttgaagaaagaccaccagtaagtagaacagccagtgtttattgagtacttacggtgtgtcagctctttgctaatcactttatataggaggggactgggacagggaggtaagtacactgcctgagtcacccagctgcgactgtaacccagggttctttgtttctaagtccacgcttttaagagctaagcaggaagtcttggagggaacagaaaggaggcagcctgaggatgtgtgaggagcaagctttacctccactaatgcttatgtttggaaggagaccagaatggaaccagaagtgttgggtttcaactgctcagagaagtgtgaatggttttcttactttttttggctctttaatttcccatcttttctattgaataatcatttctctttgggctctgcagtggttctcaaacttggctgcacattacagtcacctggggagctttgtataggctcatcccagaccaattacatggaaatctcgtgggtgggggtggtccaggcaccagtacttaaaaaatatccccaggtgatgcaaattaccctaaagtgtctcagttatagaagcttttttrtatcatccaggaatttttaaacaacatccaggccttgccctgcctgattcacttggtctgggctggggcttaggtaccatggtgtgtaaaagatccacaggtgatttgaatgtgcagtcagatttgagaatcgttgtcatcagtgagactttgggtagcaacccaggagaaaatacgttatttatttatttagagacagagtctcgctctgtcgcccaggctggggtgccatggcgtgatcttggctcactgcaacctccgcctcgcaggttaaaatgattctcctgcctcagcctccctggtagctgggattacaggtgcccgccacaatgcctggctaatttttgtattttcagtagagacagggttttgccatgttggccaggctggtctcaaactcctgacctcaggtgatccacctgccttggcctcccaaagtgctgggattacaggcctgagccactgcacccagcccataagttatttgttaataaaggagttagaaaggtaaaattgagaacatttatatatgtcaatgatttccatgcttatgactttacgttaatttcacattctatgtcattcttgtggcaaagcttagttaataaaaatgctggccaggtatgatggcacacacctgtaatctcagcacttcgggaggttgaggcgggtggatcacttgaggctaggagttcaagaccagcctggccaaacatggtgaaactgcatctctactaaaaatacaaaaattagctgggcatcgtggtgcacgcctgtaatcccagctacttgggagtctgaggcaggagaatctcttgaacccaggaggtggaggttgcagtgagctgaaattgtgccactgcactccagcttgggcgacagagcaaaactctgcctcaaaaaaaaaaaaaaaaaaaaaaaaagctatacattgagatttgttggaatgcctagggcgataaaatagataatatttaaatgttcataatatatgatcca

SEQ ID NO: 676895 - DNA, 1862 bp, Homo sapiens
tgcaaataaagtagtggcccgcaaggctgaagtgaagttacaaagttacactcctatgcagatatctgattggttcttttcgcaaccaatcagaggtacttactttcaattttccatcttccaggcagaaagggggttgggggtttgcaaagggagtagcctccagtccttctgttacttaggtgtggaaagttggggttttccttttgatttagttctacgaagtcagagtgaatcagccttaggttccctgcctccagaccctattctcctgcctcacaagagttgaagaaagaccaccagtaagtagaacagccagtgtttattgagtacttacggtgtgtcagctctttgctaatcactttatataggaggggactgggacagggaggtaagtacactgcctgagtcacccagctgcgactgtaacccagggttctttgtttctaagtccacgcttttaagagctaagcaggaagtcttggagggaacagaaaggaggcagcctgaggatgtgtgaggagcaagctttacctccactaatgcttatgtttggaaggagaccagaatggaaccagaagtgttgggtttcaactgctcagagaagtgtgaatggttttcttactttttttggctctttaatttcccatcttttctattgaataatcatttctctttgggctctgcagtggttctcaaacttggctgcacattacagtcacctggggagctttgtataggctcatcccagaccaattacatggaaatctcgtgggtgggggtggtccaggcaccagtacttaaaaaatatccccaggtgatgcaaattaccctaaagtgtctcagttatagaagcttttttgtatcatccaggaatttttaaacaacatccaggccttgccctgcctgattcacttggtctgggctggggcttaggtaccatggtgtgtaaaagatccacaggtgatttgaatgtgcagtcagatttgagaatcgttgtcatcagtgagactttgggtagcaacccaggagaaaatacgttatttatttatttagagacagagtctcgctctgtcgcccaggctggggtgccatggcgtgatcttggctcactgcaacctccgcctcgcaggttaaaatgattctcctgcctcagcctccctggtagctgggattacaggtgcccgccacaatgcctggctaatttttgtattttcagtagagacagggttttgccatgttggccaggctggtctcaaactcctgacctcaggtgatccacctgccttggcctcccaaagtgctgggattacaggcctgagccactgcacccagcccataagttatttgttaataaaggagttagaaaggtaaaattgagaacatttatatatgtcaatgatttccatgcttatgactttacgttaatttcacattctatgtcattcttgtggcaaagcttagttaataaaaatgctggccaggtatgatggcacacacctgtaatctcagcacttcgggaggttgaggcgggtggatcacttgaggctaggagttcaagaccagcctggccaaacatggtgaaactgcatctctactaaaaatacaaaaattagctgggcatcgtggtgcacgcctgtaatcccagctacttgggagtctgaggcaggagaatctcttgaacccaggaggtggaggttgcagtgagctgaaattgygccactgcactccagcttgggcgacagagcaaaactctgcctcaaaaaaaaaaaaaaaaaaaaaaaaagctatacattgagatttgttggaatgcctagggcgataaaatagataatatttaaatgttcataatatatgatcca

SEQ ID NO: 676896 - DNA, 1773 bp, Homo sapiens
  misc_feature 1358, 1359, 1360, 1361, 1362, 1363, 1364, 1365, 1366, 1367,1368, 1369, 1370, 1371, 1372, 1373, 1374, 1375, 1376, 1377,1378, 1379, 1380, 1381, 1382, 1383, 1384, 1385, 1386, 1387,1388, 1389, 1390, 1391, 1392, 1393, 1394, 1395, 1396: n = A,T,C or G
  misc_feature 1397, 1398, 1399, 1400, 1401, 1402, 1403, 1404, 1405, 1406,1407, 1408, 1409, 1410, 1411, 1412, 1413, 1414, 1415, 1416,1417, 1418, 1419, 1420, 1421, 1422, 1423, 1424, 1425, 1426,1427, 1428, 1429, 1430, 1431, 1432, 1433, 1434, 1435: n = A,T,C or G
  misc_feature 1436, 1437, 1438, 1439, 1440, 1441, 1442, 1443, 1444, 1445,1446, 1447, 1448, 1449, 1450, 1451, 1452, 1453, 1454, 1455,1456, 1457: n = A,T,C or G
tttgtattcttaatagagacagggtttcaccatgttggccaggctggtctcgaactcctgacctcaagtaatcctctcaccttggcctcccaaagtgttgggattataggtgtgagccactgcgcatagccatccacttcattttgttactcattcattacttcaaacatctttttttcttttatttgtaaaattgacayatagtaattgtatatatttatgggatacagagtgatgtttcaatatataatgtatagtgatcaggtcagggtaattagcttatccatcaaattgaacatttattatttctttttgttgggaacattcattatcctccttctaggtatttgaatctatatattgttttctgtagtcatcctgcagtgctatggaacattagaacttcatgcatcttgtaagcacctactctgtgttgcgcagtagacagaagcaaagcatattccctcctctcaaagagttctacatggtacactgcagaactggaaaatttgtcttttccacttgacatcatagatttggtagaatagagacttgaagttacagtgctgggcacacagtagcctctgaaaagttcttaaatagcttaacttggcttgtatacttctgataccttttatgaacactgtggtatcacagtgcaaggtgtcacctgagaaataaaggctgacttacctgttttgttgtggtttgccttgatattactggaaactcattttggttgtctgcactcttcaggctagtcacagcttccatatctaccactgttctcaattctagaaagaaaaataaaagactgaaaatcttttcatgacagtcctgcaattattgcttacattcttgcattaatatgccaggtattaaaatataattttcatgataattttggggagtgataaatcttttgccagggacctttttttggatatgaggttgctagaatgatgaaattctcagtgtgcatgacaggaagctggggtggggctatgaggagaggaagaaaggaggaggctgtacattctttctgtggaggaacagcagcaattgatgaatttacttacctcagatgcagttttaaccctttgcagtttttttcaataatttttcatttctaagatacagtagagccacttttatgcagttgaaagaacatcctataaatgtataaagttaaatcttttggttaaaaacatctgctttaaataggtaatacaagcccgtgatataaatatacaaagagtatacagtggaaaatgagtggaggggggcattagttattcttcttagtattgtggtaaaatatacataggtaccgagctcgaattcgtaaaaatggatannnnnnnnnnnnnnnnnnnnnnnnnnnnnnnnnnnnnnnnnnnnnnnnnnnnnnnnnnnnnnnnnnnnnnnnnnnnnnnnnnnnnnnnnnnnnnnnnnnntatcacatttttacgaattcgagctcggtaccttttttttttgagatggagtctcactgtcacctatgctggagtgcagtggtgcaatctccacttactgcaacctctgcctcctgggttcaagcaattctcatgcttcagcctctcgagtagctgggattacaggcgtgcgtcaccgtttccagctaacttttgtatttttagtaggaacggggtttcaccatgttggccaggctgtcttgaactcctaacctcaagtgatcagcccacattggcttcccaaagtgctgggattataggcttgagccaatgcacc

SEQ ID NO: 676897 - DNA, 497 bp, Homo sapiens
atgggtgtgtctttaaattcttaataaaacatttccacgaattataattaaagtataataatttatttctaaacccatttattttaaataatgcaatctctcaatttatttctcttttgtttctgagtcgggggtaaaggcttatcaatgatagaattttctggatgggtacatggtttgaaacattgagcctatctattagtactttttttttttttttttttttttctgagccagagtctcactctgttacccaggttggagtgtggtggcacaatcatggctcactatagcctcgacttctccaggctcaggttatccttccacctcagcctcccgagtatctgggacaacaggyggaccccaccatgcccagcgattttttgtatttttttttttgtagagatggggtttcactatgttgtccagtctggtctggaactcctgagatcaagcgatctgccagccttggcctcccaaagtgcttggcttacagg

SEQ ID NO: 676898 - DNA, 651 bp, Homo sapiens
  misc_feature 108: n = A,T,C or G
gtgcctacctttagaaaaaatatttgtgaaggtaggtttcatgatttcctttactagctcatttttkgggggtgtccagattcctgcagggatgaaattttgatgaantattgtattcctgtgtccccaggataaaaaggaaaaactcttcagagcaagaaggaaaagaacattcactgggaagaaggctcaggttgcaaacttctcttgcttattatgagggttaaaagttaaactggattaggacaatcatatttttctgacacatgaattttttcttaagaaaacatattttagctttttttttttcatgaatcatttcagtcgaagagccaggagttatgttcttatgctgggtagaaacactgaaggcccctttgtgaaggacttagctagctacatgtatttatttggctcattttgtttttctccctgggttaaattttgacttaaatatttgtatgtggagcaggaggtaaggcagtcaggctcatttttgtgattttccacagataaaattagcactaaatttatgggcatagtggcattgttctgcaagctgtggcctggaaggttttcttgtggttgtcaccatttcctcctctcccagtttcctccaactatgctttctctgggttcccaagaactggc

SEQ ID NO: 676899 - DNA, 651 bp, Homo sapiens
  misc_feature 108: n = A,T,C or G
gtgcctacctttagaaaaaatatttgtgaaggtaggtttcatgatttcctttactagctcatttttggggggtgtccagattcctgcagggatgaaattttgatgaantattgtattcctgtgtccccaggataaaaaggaaaaactcttcagagcaagaaggaaaagaacattcactgggaagaaggctcaggttgcaaacttctcttgcttattatkagggttaaaagttaaactggattaggacaatcatatttttctgacacatgaattttttcttaagaaaacatattttagctttttttttttcatgaatcatttcagtcgaagagccaggagttatgttcttatgctgggtagaaacactgaaggcccctttgtgaaggacttagctagctacatgtatttatttggctcattttgtttttctccctgggttaaattttgacttaaatatttgtatgtggagcaggaggtaaggcagtcaggctcatttttgtgattttccacagataaaattagcactaaatttatgggcatagtggcattgttctgcaagctgtggcctggaaggttttcttgtggttgtcaccatttcctcctctcccagtttcctccaactatgctttctctgggttcccaagaactggc

SEQ ID NO: 676900 - DNA, 651 bp, Homo sapiens
  misc_feature 108: n = A,T,C or G
gtgcctacctttagaaaaaatatttgtgaaggtaggtttcatgatttcctttactagctcatttttggggggtgtccagattcctgcagggatgaaattttgatgaantattgtattcctgtgtccccaggataaaaaggaaaaactcttcagagcaagaaggaaaagaacattcactgggaagaaggctcaggttgcaaacttctcttgcttattatgrgggttaaaagttaaactggattaggacaatcatatttttctgacacatgaattttttcttaagaaaacatattttagctttttttttttcatgaatcatttcagtcgaagagccaggagttatgttcttatgctgggtagaaacactgaaggcccctttgtgaaggacttagctagctacatgtatttatttggctcattttgtttttctccctgggttaaattttgacttaaatatttgtatgtggagcaggaggtaaggcagtcaggctcatttttgtgattttccacagataaaattagcactaaatttatgggcatagtggcattgttctgcaagctgtggcctggaaggttttcttgtggttgtcaccatttcctcctctcccagtttcctccaactatgctttctctgggttcccaagaactggc

SEQ ID NO: 676901 - DNA, 651 bp, Homo sapiens
  misc_feature 108: n = A,T,C or G
gtgcctacctttagaaaaaatatttgtgaaggtaggtttcatgatttcctttactagctcatttttggggggtgtccagattcctgcagggatgaaattttgatgaantattgtattcctgtgtccccaggataaaaaggaaaaactcttcagagcaagaaggaaaagaacattcactgggaagaaggctcaggttgcaaacttctcttgcttattatgarggttaaaagttaaactggattaggacaatcatatttttctgacacatgaattttttcttaagaaaacatattttagctttttttttttcatgaatcatttcagtcgaagagccaggagttatgttcttatgctgggtagaaacactgaaggcccctttgtgaaggacttagctagctacatgtatttatttggctcattttgtttttctccctgggttaaattttgacttaaatatttgtatgtggagcaggaggtaaggcagtcaggctcatttttgtgattttccacagataaaattagcactaaatttatgggcatagtggcattgttctgcaagctgtggcctggaaggttttcttgtggttgtcaccatttcctcctctcccagtttcctccaactatgctttctctgggttcccaagaactggc

SEQ ID NO: 676902 - DNA, 3433 bp, Homo sapiens
acctgagggatggattacctgggctcctggctcctcctcctccctgcagcagcctgcgcgtggccaccccactagcgcctccagcaaagcagatggaagaagccagccagtcaaggttgctgcatgtctgcctctctaataaaatccaggaagatttagtaggagaaaacctccaaaagttaggtttccaaaaaaaagaaaaaaaaattttttttttctttgagacagaatcttgctctgtcaccaggctggagggcagtggcgcgatctcagttcactgcaacctctgtctcctgggttcaagtgattctcctgcctcagtctcctgagcagctgggactacaggcgcacaccaccacgcccagctaatttttatatttttagtagagacagggtttcaccatattggccaggatggtctcgatctctcaacctcatgatccacccacctcggcctcccaaagtgctgggattataggcgtgagccactgcacccagccaaaaaagaaaaatttttaacttatcaagctgctcctatctctgactactgaaaaacaatctatagcatgtgttactttcctctcccttgagaaagtacgatgtttcaagcagagcaacccagagaacctggccttgcagggacgcaagacagtttgatacagtttatatataaagcatttaaatattaagmacaataaaccttattcccagcagttccttgccttgaatactgttaaggctgtttatgtttccactgacatttctgaccctttattttccaatacccatgaagagaaagaaaacaatctgtcacgcacatatgtctcttgtcaaagagttctttcctgggagaacaaagggatagcatttatctacaggcaagcacttcggtcttgaaggacatcacaacatggtgcagaggtcttgatggacttacttagctaaagaaggaaagcacctatagggcagcacaaggtagatcctccctcactccaaacctccagtattattcagagcagctttatattctgttcatgcctattttaaatgttattaaaatgtacctatatgcgtagatttttctctccataatccttctggaatattacattataaatcaactcaaaagttaaattaatgacatccaattaaaaaagtagattaagagactcatagaggaagcactgcgctaagattaatgaaaatgttattccaacatgaaaattgccttagaacttgttaccaaaattttgaacattaattatctctattttaagccttgcctttagaaagttatttcttctacttgcttttatcatacttcgtgacaaatctacagttgccccacacaattatatagttctcttaaatttatatatatttttatatatatatatacacacacacaaaaaaaaattcagaatatgataatttgtgcattaggaattaaccaaaacgtttttttccttttttttttttgagacagaggagtcccactctgtcacccaggctggagtgcagtagtgtgatcttggctcactgcaacctctgcctcctgggttcaagcgattcttctgcctcagcctcctgagtagctgggattacgggcatgcatcaccaggccctgctaattttcgtatttttagtagagatggggttttgccatgttggccaggctggtctccaatgcctgacgtcaagggatccgcccaccttggcctcccacagtgctgggattacaggcgtgagccaccacgcccagctgaccgaaacattttcaacaacaaatactcaatattaaataagcaaaatgagtcagaggagttattctcgtctaaataaaaactgattctccacggatccagtgttttggaaaacatcaaggtaatcaagaaatacataactggcagaccccccagccatcgctacgtacctgtgtaagatctgcagcctgctttaagatgcttttttttaactgctctgctctctttgcatgaaaagaattactttgactctggatgacgaatacaattccttttaagtctagaacaaaaaaaaatagttttcaggttttctttttacaaaattattaaaataaacttgaaaacaagtgaaaaaatagctacaaagcaaaccttcaggcagtaaactcttaatgggaaaaaatcaattcgtatgtaattctagagacaaaattttctctctttttaaactgtttcccaagcttccttcctagaagttagcaagtaaataagctgactgtaccagacccagtctatggcaccaaactgagaatgtgctcccgcatatgtcagaaagaatggctgaaaatgtgtgaaaatatctagaacactaatcttcccagtagctgaaaatctaactttcacaagtagctttttaacaattcccacataatcctacactgtgctgctacctgttatgagttgaaacatgtcctctaaaattcatattttttaagtcctaacccccaatacctcagaatgtgacttcatttagaattgggtcttcacagaggtaatcaagttaaagcgaggtcatcagggtgaaccttaatccaatataaccagtctccttagaaatttggacacataaatgacacacagagaaggaagatgatatgaggagacacacagagaagatagccatctacaagccaaagacagaggcctggaacagatccttccttcccagctctcagaaggaaccaaccctgcccacaccttgatgtcagacttctaacctccagaactgtgagacaatacatttctgttgcttgtactaagccacgttttgtggtactttgttatgtagtcctagctcactactacactacttcaagaatgttctgaatggtcctttaaggtgacactcaacagtaactgcccatctccccatgagttcagaagggtttgcaaataagtaactcaataatccctaccctacctcataaggcacctagccaggattaggtgttatctccaggaaacggccacagcaattcctcagcaacagggctttagcgtgaagtcctgcataaagcccatctataacaccccatgctggcagtattcaccagcctgctagagatgcacctgaaggcagccagctttttacaacggcgaacaggaaggaaacccgagtatgtcctgcccacaaagaccatcagagggcttgccaatggcagtagcaaggctgcctcccagagaaacacgttaggcctccccaggttctgggcctataacaaagaaatggataaaacagtgattgtgtcagcaccctgccaccagacaggaatgtcggcagaggaaggtgccacgtaaattctagccttcagccagattgtcagcaaagccatgtggggacctttcccccaccatgaatctttctctttaacacctcagctcagagaacc

SEQ ID NO: 676903 - DNA, 640 bp, Homo sapiens
gcctaaaggaaatcaagaggctggaagtggaaaaaattagaaaagaacgcatctttgctgtaaaattttatatatagtatgccacatctttccatagttacctcttcaaactaagcagtaaggatttcatttgatctgtgcaatgtaacacaaagatgggtttgttctcccattgctgtctgctgattgtctcacttactgcatgtacccctgacacctgagaatatctttgaaatgtttcttatagtgctgattttaggttggaaagggaggtacttctgtcctaaatcaatgctctccaaattagcgctgttagaattatttgtgctctcaatattgcccaggttgcaaacactgctcttaccaggggagggagacatcatcccatcagacttgcaagaaaatttatattttgaaaacatgtgtatttggaggaccatgttgcaagatgaatrcttttttcctaaggtgagaatatgttgtcttatcttcctatagatgggagaaaaatacactttcgaaaatctttttttttcttttgagacggagtctcactctgtcgcccatgttggagtgtagtggtgtggttttggctcactgcaacctccgcctcctaggatcaagcgattttcctgcctca

SEQ ID NO: 676904 - DNA, 599 bp, Homo sapiens
agcccaggagttctagaccagcctgggaaacatagcactctacaaaaaaattaaacattagccaggcacagtgatgcatgcttgtagtcacagctactcgggaggctgaggcaggatgatcacttgagcccaggaggtcggggccgcagtgagctatgattgcatcactacactccagcctgagcaacagagtgagaccctatctctaaaaaaaggaaaagaaaaaagtaatacgagaataacagtggtattgacctcaaggattattgtggagataaacaacaatacctggcacattgtaaacacgtatgtaacactcactgtatttatttattattaccattattttaattggagcactgttttctgatgcttgtgtttgaattttcctcttcctactaatgaaaggacctgttttttctcttcttcaggaattatttctgtgaatttcttacttcttgaaygttaagtttgaacgttctttttttttaatatactttaagttctagggtacatgtgcacaaggtgcaggttagttacatatgtatacatgtgccatgttggtgtgctgcacccattaactcatcatttacattagg

SEQ ID NO: 676905 - DNA, 608 bp, Homo sapiens
gtgttttttctcctcacattcttcctcatttctggagagaaagaccctcagccagtttgtagctttttagatcctgtatgtgtttctgttgtataccacgatattgactttaatttgtaaagcactctaagcaattcagatargaaacaaaaggggaaaattctctgttaatttcaagatgccggttctttctcatattcttggctgtggctgagtattgaggaagcagattcgttaggaagccagccagggaaaagttcacagttgttgggtccatggagggctccctccaggcccccatcaagactctgtgtctgttaggacttcctgaaagatgaatgaaagtggggaatgcaaagagctggaggcttcctctgagctccctgtttggatgcaaacggcagttaaatgttcagtaggcagagctgagagcaggtctgcatcctcatcaggtgccatggaggctggtggcctggatttctgttctcccacttaacttcagctctcactcttcttccctgggagactgtgaaaaggaaaaacagctcagttttccaaatgatgtatattgcctctgaataaacgtcagaaccaggttttgtgaggcc

SEQ ID NO: 676906 - DNA, 608 bp, Homo sapiens
gtgttttttctcctcacattcttcctcatttctggagagaaagaccctcagccagtttgtagctttttagatcctgtatgtgtttctgttgtataccacgatattgactttaatttgtaaagcactctaagcaattcagataggaaacaaaaggggaaaattctctgttaatttcaagatgccggttctttctcatattcttggctgtggctgagtattgaggaagcagattcgttaggaagccagccagggaaaagttcacagttgttgggtccatggagggctccctccaggcccccatcaagactctgtgtctgttaggacttcctgaaagatgaatgaaagtggggaatgcaaagagctggaggcttcctctgagctccctgtttggatgcaaacggcagttaaakgttcagtaggcagagctgagagcaggtctgcatcctcatcaggtgccatggaggctggtggcctggatttctgttctcccacttaacttcagctctcactcttcttccctgggagactgtgaaaaggaaaaacagctcagttttccaaatgatgtatattgcctctgaataaacgtcagaaccaggttttgtgaggcc

SEQ ID NO: 676907 - DNA, 608 bp, Homo sapiens
gtgttttttctcctcacattcttcctcatttctggagagaaagaccctcagccagtttgtagctttttagatcctgtatgtgtttctgttgtataccacgatattgactttaatttgtaaagcactctaagcaattcagataggaaacaaaaggggaaaattctctgttaatttcaagatgccggttctttctcatattcttggctgtggctgagtattgaggaagcagattcgttaggaagccagccagggaaaagttcacagttgttgggtccatggagggctccctccaggcccccatcaagactctgtgtctgttaggacttcctgaaagatgaatgaaagtggggaatgcaaagagctggaggcttcctctgagctccctgtttggatgcaaacggcagttaaatgttcagtaggcagagctgagagcaggtctgcatcytcatcaggtgccatggaggctggtggcctggatttctgttctcccacttaacttcagctctcactcttcttccctgggagactgtgaaaaggaaaaacagctcagttttccaaatgatgtatattgcctctgaataaacgtcagaaccaggttttgtgaggcc

SEQ ID NO: 676908 - DNA, 600 bp, Homo sapiens
ggctcaggcagaagaatttcttgaacccgggaggcggaggttgcagtgagcccagattgcaccactgcactccagcctgggcaacagagcaagactctatcttaaaaaaaaagtaattaattaattagctaaattaaattaaatatagggagaggccttttcccactgtgattgtttgcrtagctgacttagcgtgggcccctccttacacagggagctcagggcaccttcctcatgggtttcccgccacacccaggaagtgtgccatcctctctcccccaggaaatcccctctccccaagggcattccctcctcctccttcgtgctgcctccgaaccattggtcattcatacatggctattccaagaaacacctgagtgcttttataaaactctaaatttccaccttgagattctaagtgaaatgttcctgaagtgggaaggaaggagaaagagaaggaagagggaagggaggaaatcccaaagggttgggaaatactcataccagcgtccatccagagactgtgatgaccgtgacctaaaacagtggctctccatgcacagtcctaggcagcagcaaatgtgttacctgaaaggggtc

SEQ ID NO: 676909 - DNA, 600 bp, Homo sapiens
ggctcaggcagaagaatttcttgaacccgggaggcggaggttgcagtgagcccagattgcaccactgcactccagcctgggcaacagagcaagactctatcttaaaaaaaaagtaattaattaattagctaaattaaattaaatatagggagaggccttttcccactgtgattgtttgcgtagctgacttagcgtgggcccctccttacacagggagctcagggcaccttcctcatgggtttcccgccacacccaggaagtgtgccatcctctctcccccaggaaatcccctctccccaagggcattccctcctcctccttcgtgctgcctccgaaccattggtcattcatmcatggctattccaagaaacacctgagtgcttttataaaactctaaatttccaccttgagattctaagtgaaatgttcctgaagtgggaaggaaggagaaagagaaggaagagggaagggaggaaatcccaaagggttgggaaatactcataccagcgtccatccagagactgtgatgaccgtgacctaaaacagtggctctccatgcacagtcctaggcagcagcaaatgtgttacctgaaaggggtc

SEQ ID NO: 676910 - DNA, 635 bp, Homo sapiens
gaattaaccatttgtttcccacttcagtgagtccgtacccagtggggtgatgtcactgtcatatttaggagaggccagatgatataattgcctttataactttctgttacaatttaaaagagcacagtgacttactaccagaaaagctttgtaccatcatattcttgtttatatgtagggaccacttaaccaagtggatacttttgtttagatttttaaaagttttagtttcatgtcttctaaactttaaaaatatcatcttattatatgatttattgttttgatctctctmtatatatatatataattttatttttttgagatgcagtcggagtgcagtggcatgatctcagctcactgcaacctctgcctcctgggttcaagcgatcctcctgcctcagcctcccaagtatctgggattacaggtgtacacaaccatgcctggctaatttttgtatttttttgtagagacagggtttcgccttcttgaccaggctggtctcaaactcctgacctcaggcgatcctcccacctcagcctcccaaaatgctgggattacaagcatgagccactgtgcctggcctgttttatgattttaaattacagaaaatttgtttaagatagttcagaggtcc

SEQ ID NO: 676911 - DNA, 624 bp, Homo sapiens
ctaatattttacaatatctttaattgttacatcctgttggatttattttatctgaaatagtcagtctgacatagtttctcaatagcttgagagtatttaaggtttcaagtrttaaatcttaaacattgcaagatgtcttttgatctaagtaagtaagtaagtttatccaatgcttaatcatgacaagactcaggttacttattcttggcagacatgataatgcagggacttcaaaatggctgactggaagcattgtgtgcctgcttcctccacttagaagaaccaagatagactatagacaagcactcttggaatacattctccaagagagaacatgttaattcaacataaaagtggcaggaaacaccaaaagcaaggaagaagatggaagagaggcaggcagcttggccaggatcagctggaaggtgggagtgacttcccagtgtgaggaaagggtgagagaggttcagcagcccacatgtccagcatggacccatgcaaacctggccaccagagaaaccatcaacactcttatgggacagaactgctttacaggctatgggagcactaagctccacaccctttttgagaattaagtggtgacagcaaggtgctttttttttt

SEQ ID NO: 676912 - DNA, 636 bp, Homo sapiens
aaaaattagctgggcgtggtggcgtgtgcctgtaatcccagctacctgggaggctgaggcaggagaattgctggaacccaggaggtggaggctgcagtgagctgagattgggccactgcactscagcctgggtgacagagtgagactacatctcaaaaaaaaacaaaacaataacaacaacaacagcaacaaaaaaccatagatgtggctataggggaaaaatcaatgaatatgaggatacaatgaactcatatgggattaattgatgttatttctcttttctttattcactttactaaattcatgtttttgtctaatcttctaagaatcatgagaattgatctaagagtttactgattagaaaattttcccaaagggaaaaaagatacttatgtctttgttttaggagcagcttctgcttagaaaataaatgtgaatttattacttaggtgtcagagtgtttattttaattaggaaagaaactgtctgtctctgaacactgtacagcttctttttaaaaagccaaaattaattacatatgccactgtcataatacgtaatataacctattgactctagaatttgagttgttagctctgtcttataaataaatataattttattgctcaatgcttt

SEQ ID NO: 676913 - DNA, 3426 bp, Homo sapiens
  misc_feature 2539, 2540, 2541, 2542, 2543, 2544, 2545, 2546, 2547, 2548,2549, 2550, 2551, 2552, 2553, 2554, 2555, 2556, 2557, 2558,2559, 2560, 2561, 2562, 2563, 2564, 2565, 2566, 2567, 2568,2569, 2570, 2571, 2572, 2573, 2574, 2575, 2576, 2577: n = A,T,C or G
  misc_feature 2578, 2579, 2580, 2581, 2582, 2583, 2584, 2585, 2586, 2587,2588, 2589, 2590, 2591, 2592, 2593, 2594, 2595, 2596, 2597,2598, 2599, 2600, 2601, 2602, 2603, 2604, 2605, 2606, 2607,2608, 2609, 2610, 2611, 2612, 2613, 2614, 2615, 2616: n = A,T,C or G
  misc_feature 2617, 2618, 2619, 2620, 2621, 2622, 2623, 2624, 2625, 2626,2627, 2628, 2629, 2630, 2631, 2632, 2633, 2634, 2635, 2636,2637, 2638: n = A,T,C or G
tggcgtgatctcagctcactgcaacctctgcctcccgggttcaagcgattctcctgcctcagcctcctgagaagctgggactacaggtgcgtgccaccacacccagctaatttttgtatttttagtagagacatagtttcactatgttagccaggctggccttgaactcctgacctcgtgattcgcccgcctcagcctcccaaactgctgggattacaggtgtgagccactgggcccggtcatgaacacattatttctttagagaacagtcttttggtagtaagcactgggatgcttctgtataaaccggaatggcaagtggccagtgtggtcagatgcagccattccttttatgttcctttaaatattcaccttctgtgttggtacttccacctgcacatcttccagttctgactgtctggtattccagagctgtgttaggaggattggcttccacctcaactgtcagtagcactttcagactggcttctttcacttaacaatatgcatttaagattgttccatattttttcatggcttgatagcacatccctttttatcactaaagtattctaccgtatgaatgcaccacagtttgtttattcacctattgaaggacatgtttgttgtttccaagttttacaaatataaataaagctgttgtaaaaattcctgtgcagttatttcccagctttattgagatattaattgacaaataaaaattgtacgtattcaagttgtatgtgatgatttgatatacatatgcattgtgtcatgatcactacaatcaaattaatcaacacttccataaccacacataggtatgctgtccgtgtgtgtgtgtgtgtgcgtgtgtgtgtgtataaggaggtgaggaaacctaagatctactctctcttagcaaatttcaagtatacgatatgatattatcaactctagtcaccatgctataaattacatcctcagaacttcttcatcttatacctgaaattgtgtacccttttaccattatctccacatttcccttaggctttcaggtttttgtgtggacaaacgttttccactcatttgtgtaaatatcaagaagtgtgaattattgaattgtatggtagcgctatgtttagttttgtaagtaactgacaaaatgtcttccaaagtggctatgccatcttggattcccaccaacgatgattgagagctcctgttgctctaaatccttgtgttttaatacaattttgtaaaagtattatagtccaagaatacgaaatgtgcccaatatagaaaattcaaatttatccctaatcctattaaaaaaactattttctgctactatgtgtgtatttatatatacacagtcatacagtgtatatatgtttgctttctgcctttttcatttaaagacacatcatcaaagaataccatgtttttgcacactcttcagaagagcacttttttttgggggggtgggcrggcagggagatggagcctggctctgttccccgggctggagtgcagtggcgtgatatcgactcactgaaacctctgcctttcaggttcaagcaattctcctgcttcagcctcctgagtagctgggactacaggcacacgcttccatgcccagctaactttttgtattttagtatagacagggtttcgcggtgttgtccggctggtctcaaacccctgagctcaggcaacccgcccaccttggcctcccaaagtgctaggattacaggtgtgagccaccacgcctggctggggtagaagagcacttataatggtagattaattctgcattatttggatttgctacaattgaatagctatttctccattgtttggaattaatgtggtttttaattacctcatcataaataacaatgagatcaatgtacttgggcctgttagagtcctccatctaaaaattggttggatttcagaatatgctcaagtgcttagcacttttaagttttgaaagcaggaaataaatgttaaattaacatttaggaagttagaaaaggcccaaaatgaggatcacggaaaacccatatatgatacctactttgacccggtattctaagcacgtaattggtattaactcaagtaatgctcacaagaatctgaggagactttgaagcattattagcccaattttacagctaatgaagttgagtttaagtaatttgcttaaggcattgtacctagcaagcatgggattgatgattcaaatctatacagcctggctctaagcaatggtcttcacagtttcactccattgttgagagaatatttgacttgcatgatttaaggtagaataaaaatcttgatagggccatatagatctcattatgtcctctagtcttacatatggtctattgtctctttagattacctgtcctacatgtagaggcatttgagtttgcagccccatggcaaagtaatgaaaaacctattggttatgaggtcactagtgcagcctaacaaagacatggcccagctgcttatgttgcaagtgttggaaaactgatcaattttctannnnnnnnnnnnnnnnnnnnnnnnnnnnnnnnnnnnnnnnnnnnnnnnnnnnnnnnnnnnnnnnnnnnnnnnnnnnnnnnnnnnnnnnnnnnnnnnnnnnaaagccattgaattgtactccttaaataagtgaattgtatggtatgtgaattatataccaatgaggctattaccccaaaaaaacaccacatataggaaaattatgatatacaagtaaaattaatggtgtttaaagaacttaattgatcaaaagcagtatacaaaacactatgcacaatataatgtactgtttataaaatgtataagaaaaaatgaatgataagaaaagtattttgaaattgtaatcaagaagagaactcgaacataaatcaaattttaatcattaagaaaataaaatcacaataaagatattttaaaattataagataatactgtcaataaaatatgctaataagtataatttctaatttaaagtaaagtttctatgcaaaataaaattatcttaaagcaaaagtcttgaaagaaacaatgacaatggaaaatattgaaaaaggtaataaagcattactaaaaatatagcactagtttcatttggttttacagagaatttatttaaaatttcaagatcggataattaatatgctgtataaactcttctgtcacttataaaaataactaagatttatattttgctaagctagtttaaaactaataccatgaccttatagataataacacaaagttgtacagcctgatcatgcacatgctaatttaaaatatattttcaacaaaccccccctagcaaatcaaactcatttgtgtataaaatgatgctattctgtggtgaggaaattattgtttcatcaatgaaaaaatagctttatattt

SEQ ID NO: 676914 - DNA, 3426 bp, Homo sapiens
  misc_feature 2539, 2540, 2541, 2542, 2543, 2544, 2545, 2546, 2547, 2548,2549, 2550, 2551, 2552, 2553, 2554, 2555, 2556, 2557, 2558,2559, 2560, 2561, 2562, 2563, 2564, 2565, 2566, 2567, 2568,2569, 2570, 2571, 2572, 2573, 2574, 2575, 2576, 2577: n = A,T,C or G
  misc_feature 2578, 2579, 2580, 2581, 2582, 2583, 2584, 2585, 2586, 2587,2588, 2589, 2590, 2591, 2592, 2593, 2594, 2595, 2596, 2597,2598, 2599, 2600, 2601, 2602, 2603, 2604, 2605, 2606, 2607,2608, 2609, 2610, 2611, 2612, 2613, 2614, 2615, 2616: n = A,T,C or G
  misc_feature 2617, 2618, 2619, 2620, 2621, 2622, 2623, 2624, 2625, 2626,2627, 2628, 2629, 2630, 2631, 2632, 2633, 2634, 2635, 2636,2637, 2638: n = A,T,C or G
tggcgtgatctcagctcactgcaacctctgcctcccgggttcaagcgattctcctgcctcagcctcctgagaagctgggactacaggtgcgtgccaccacacccagctaatttttgtatttttagtagagacatagtttcactatgttagccaggctggccttgaactcctgacctcgtgattcgcccgcctcagcctcccaaactgctgggattacaggtgtgagccactgggcccggtcatgaacacattatttctttagagaacagtcttttggtagtaagcactgggatgcttctgtataaaccggaatggcaagtggccagtgtggtcagatgcagccattccttttatgttcctttaaatattcaccttctgtgttggtacttccacctgcacatcttccagttctgactgtctggtattccagagctgtgttaggaggattggcttccacctcaactgtcagtagcactttcagactggcttctttcacttaacaatatgcatttaagattgttccatattttttcatggcttgatagcacatccctttttatcactaaagtattctaccgtatgaatgcaccacagtttgtttattcacctattgaaggacatgtttgttgtttccaagttttacaaatataaataaagctgttgtaaaaattcctgtgcagttatttcccagctttattgagatattaattgacaaataaaaattgtacgtattcaagttgtatgtgatgatttgatatacatatgcattgtgtcatgatcactacaatcaaattaatcaacacttccataaccacacataggtatgctgtccgtgtgtgtgtgtgtgtgcgtgtgtgtgtgtataaggaggtgaggaaacctaagatctactctctcttagcaaatttcaagtatacgatatgatattatcaactctagtcaccatgctataaattacatcctcagaacttcttcatcttatacctgaaattgtgtacccttttaccattatctccacatttcccttaggctttcaggtttttgtgtggacaaacgttttccactcatttgtgtaaatatcaagaagtgtgaattattgaattgtatggtagcgctatgtttagttttgtaagtaactgacaaaatgtcttccaaagtggctatgccatcttggattcccaccaacgatgattgagagctcctgttgctctaaatccttgtgttttaatacaattttgtaaaagtattatagtccaagaatacgaaatgtgcccaatatagaaaattcaaatttatccctaatcctattaaaaaaactattttctgctactatgtgtgtatttatatatacacagtcatacagtgtatatatgtttgctttctgcctttttcatttaaagacacatcatcaaagaataccatgtttttgcacactcttcagaagagcacttttttttgggggggtgggcgggcagggagatggagcctggctctgttccccgggctggagtgcagtggcgtgatatcgactcactgaaacctctgcctttcaggttcaagcaattctcctgcttcagcctcctgagtagctgggactacaggcrcacgcttccatgcccagctaactttttgtattttagtatagacagggtttcgcggtgttgtccggctggtctcaaacccctgagctcaggcaacccgcccaccttggcctcccaaagtgctaggattacaggtgtgagccaccacgcctggctggggtagaagagcacttataatggtagattaattctgcattatttggatttgctacaattgaatagctatttctccattgtttggaattaatgtggtttttaattacctcatcataaataacaatgagatcaatgtacttgggcctgttagagtcctccatctaaaaattggttggatttcagaatatgctcaagtgcttagcacttttaagttttgaaagcaggaaataaatgttaaattaacatttaggaagttagaaaaggcccaaaatgaggatcacggaaaacccatatatgatacctactttgacccggtattctaagcacgtaattggtattaactcaagtaatgctcacaagaatctgaggagactttgaagcattattagcccaattttacagctaatgaagttgagtttaagtaatttgcttaaggcattgtacctagcaagcatgggattgatgattcaaatctatacagcctggctctaagcaatggtcttcacagtttcactccattgttgagagaatatttgacttgcatgatttaaggtagaataaaaatcttgatagggccatatagatctcattatgtcctctagtcttacatatggtctattgtctctttagattacctgtcctacatgtagaggcatttgagtttgcagccccatggcaaagtaatgaaaaacctattggttatgaggtcactagtgcagcctaacaaagacatggcccagctgcttatgttgcaagtgttggaaaactgatcaattttctannnnnnnnnnnnnnnnnnnnnnnnnnnnnnnnnnnnnnnnnnnnnnnnnnnnnnnnnnnnnnnnnnnnnnnnnnnnnnnnnnnnnnnnnnnnnnnnnnnnaaagccattgaattgtactccttaaataagtgaattgtatggtatgtgaattatataccaatgaggctattaccccaaaaaaacaccacatataggaaaattatgatatacaagtaaaattaatggtgtttaaagaacttaattgatcaaaagcagtatacaaaacactatgcacaatataatgtactgtttataaaatgtataagaaaaaatgaatgataagaaaagtattttgaaattgtaatcaagaagagaactcgaacataaatcaaattttaatcattaagaaaataaaatcacaataaagatattttaaaattataagataatactgtcaataaaatatgctaataagtataatttctaatttaaagtaaagtttctatgcaaaataaaattatcttaaagcaaaagtcttgaaagaaacaatgacaatggaaaatattgaaaaaggtaataaagcattactaaaaatatagcactagtttcatttggttttacagagaatttatttaaaatttcaagatcggataattaatatgctgtataaactcttctgtcacttataaaaataactaagatttatattttgctaagctagtttaaaactaataccatgaccttatagataataacacaaagttgtacagcctgatcatgcacatgctaatttaaaatatattttcaacaaaccccccctagcaaatcaaactcatttgtgtataaaatgatgctattctgtggtgaggaaattattgtttcatcaatgaaaaaatagctttatattt

SEQ ID NO: 676915 - DNA, 2365 bp, Homo sapiens
aatactaaaatactgaaataaagcatttaatgtaaattcgcatagctgtagcagtataacacactattttaacttgcttctgtcaaacactcctgttagtcaaagctaaaaataaaaagcatccttccaaatgattcatcaggttatttcctaatcaatagtacataatcctgacaaaattacattgactaatagtttaataacatctgcagtaacaattttattgttttcaaagaaattayactttccatcttgatttaatttacttcaggtgcaacatttccttattaataacaggaaatattaaatgttaacaaaaaagaaaccggtacatgcatttttgaccccagaaagtaaacattcaccacagtttaagtcaactctgcattgaataaatttcctctatccctctgatttctgccaatcgatttcatttgagaaaacattaattttctgaaagctcttcgctagtcaaaagtaaacacagcctctgaaaaaaaaagacacattcgaccttgatttgtataaaggtcagattgctcagtttacggtccagcatatacatctgtctttcctactctattctacaatgtttgagagtaggggctctaaataatttcagcattccctgtatctaatatcttgctgaaacagagtaggttacatcaaccatttttggaaagaaaaagtgaaagcatgaatcaatcagaactagaatcaagttcctctgtgtctaaggcttccttctactatgtttatactgtctcctattaacaggtacaaatttatcccagaacaagtgctaacttgaagtttgctacataataggcattaaaagaatacaatcatctctcattatccatgggagagtgtttctaggatccctgtggatatcaaaagccaggaatgctcaagtcccttatatgaaatggtatagtatttgcaaataacctgcacacattctcctgtatactttaatcatctctagattacgtatgatgtctaacacaacgtaaatgctattcaaatagttattgtactctatcatttattatctgtataatttttatgttgtaattgctattttgttggggttttaaaatattttcaatttgtggttaattgtatccaaagatgggaaatcagtggatacagagaatgagagggcagctgtatttgttgaatgaataaaagaactcacaacaaacagttgatgcaagtataacagtgaaagaaaaataattctttgtacctacaagtctcctctaaaaagatgaatcccgtctatttctacttagaaattcatttttcacgtctgtgtagctgtatgggtttggatatgcaggcttgagaatcaaggctgagagagacaaacacatctgcctaacatgaggcaaagaatttggatttctccatgcagtactggatggagggtatgagaagtgggaagaggaagagaagagaaagtagccagtatggcatgatggtgtgatgttagaaactgcatggaaggaaagtgtctgtgcaaatactccagagacgggtggttggtgagcgtttttagaatacagatatctaatactgaaattaagctttttggtactttgaaaatgcaaattctttcctcagtctctatccttcacaaaccttgaataaactcgactacatttccaaagagtttgtggcatgttttatgaaaaccaagagagaagctgtgttatgtatttgaattgatactatgagggaacagagacaggactcatcggagcaagattcccatgtcagtggtgatcattaaaatatctccgtgaactgatgaacgtcttgaagagtgtgttaggctaccacagggtgtgtcatccgggctcaagccaattaatcatatgcccaagttttggtaacacttgctgacacctggattcctcagggtatgggaaagtactaatttttataacattaatgtgctagaaatataaagggaggtttgtactcagtgaaataaggctctcaagaaaaaaatcacattctatataggcaatgcattaaaaagagctaaatatacttttctggatgggtaccaaaagaaataaattatatattttaaaacatttcctgagaggaaatgaaattttaaaaaggcttgtgtaactcacatttaagtgagcaaggaacagcaaaatggcaatttctcacttcatccaggaagagaagacatgctgaacaggaagaaagcaaccgtaatgtaagtgacttttgagtggtgcagggagagactcctaacagcattcaaaatagaatttgtccattcagggaatcacataaaactacctctaggacagctgcattgggctttaatttgagtgta

SEQ ID NO: 676916 - DNA, 2365 bp, Homo sapiens
aatactaaaatactgaaataaagcatttaatgtaaattcgcatagctgtagcagtataacacactattttaacttgcttctgtcaaacactcctgttagtcaaagctaaaaataaaaagcatccttccaaatgattcatcaggttatttcctaatcaatagtacataatcctgacaaaattacattgactaatagtttaataacatctgcagtaacaattttattgttttcaaagaaattacactttccatcttgatttaatttacttcaggtgcaacatttccttattaataacaggaaatattaaatgttaacaaaaaagaaaccggtacatgcatttttgaccccagaaagtaaacattcaccacagtttaagtcaactctgcattgaataaatttcctctatccctctgatttctgccaatcgatttcatttgagaaaacattaattttctgaaagctcttcgctagtcaaaagtaaacacagcctctgaaaaaaaaagacacattcgaccttgatttgtataaaggtcagattgctcagtttacggtccagcatatacatctgtctttcctactctattctacaatgtttgagagtaggggctctaaataatttcagcattccctgtatctaatatcttgctgaaacagagtaggttacatcaaccatttttggaaagaaaaagtgaaagcatgaatcaatcagaactagaatcaagttcctctgtgtctaaggcttccttctactatgtttatactgtctcctattaacaggtacaaatttatcccagaacaagtgctaacttgaagtttgctacataataggcattaaaagaatacaatcatctctcattatccatgggagagtgtttctaggatccctgtggatatcaaaagccaggaatgctcaagtcccttatatgaaatggtatagtatttgcaaataacctgcacacattctcctgtatactttaatcatctctagattacgtatgatgtctaacacaacgtaaatgctattcaaatagttattgtactctatcatttattatctgtataatttttatgttgtaattgctattttgttggggttttaaaatattttcaatttgtggttaattgtatccaaagatgsgaaatcagtggatacagagaatgagagggcagctgtatttgttgaatgaataaaagaactcacaacaaacagttgatgcaagtataacagtgaaagaaaaataattctttgtacctacaagtctcctctaaaaagatgaatcccgtctatttctacttagaaattcatttttcacgtctgtgtagctgtatgggtttggatatgcaggcttgagaatcaaggctgagagagacaaacacatctgcctaacatgaggcaaagaatttggatttctccatgcagtactggatggagggtatgagaagtgggaagaggaagagaagagaaagtagccagtatggcatgatggtgtgatgttagaaactgcatggaaggaaagtgtctgtgcaaatactccagagacgggtggttggtgagcgtttttagaatacagatatctaatactgaaattaagctttttggtactttgaaaatgcaaattctttcctcagtctctatccttcacaaaccttgaataaactcgactacatttccaaagagtttgtggcatgttttatgaaaaccaagagagaagctgtgttatgtatttgaattgatactatgagggaacagagacaggactcatcggagcaagattcccatgtcagtggtgatcattaaaatatctccgtgaactgatgaacgtcttgaagagtgtgttaggctaccacagggtgtgtcatccgggctcaagccaattaatcatatgcccaagttttggtaacacttgctgacacctggattcctcagggtatgggaaagtactaatttttataacattaatgtgctagaaatataaagggaggtttgtactcagtgaaataaggctctcaagaaaaaaatcacattctatataggcaatgcattaaaaagagctaaatatacttttctggatgggtaccaaaagaaataaattatatattttaaaacatttcctgagaggaaatgaaattttaaaaaggcttgtgtaactcacatttaagtgagcaaggaacagcaaaatggcaatttctcacttcatccaggaagagaagacatgctgaacaggaagaaagcaaccgtaatgtaagtgacttttgagtggtgcagggagagactcctaacagcattcaaaatagaatttgtccattcagggaatcacataaaactacctctaggacagctgcattgggctttaatttgagtgta

SEQ ID NO: 676917 - DNA, 2365 bp, Homo sapiens
aatactaaaatactgaaataaagcatttaatgtaaattcgcatagctgtagcagtataacacactattttaacttgcttctgtcaaacactcctgttagtcaaagctaaaaataaaaagcatccttccaaatgattcatcaggttatttcctaatcaatagtacataatcctgacaaaattacattgactaatagtttaataacatctgcagtaacaattttattgttttcaaagaaattacactttccatcttgatttaatttacttcaggtgcaacatttccttattaataacaggaaatattaaatgttaacaaaaaagaaaccggtacatgcatttttgaccccagaaagtaaacattcaccacagtttaagtcaactctgcattgaataaatttcctctatccctctgatttctgccaatcgatttcatttgagaaaacattaattttctgaaagctcttcgctagtcaaaagtaaacacagcctctgaaaaaaaaagacacattcgaccttgatttgtataaaggtcagattgctcagtttacggtccagcatatacatctgtctttcctactctattctacaatgtttgagagtaggggctctaaataatttcagcattccctgtatctaatatcttgctgaaacagagtaggttacatcaaccatttttggaaagaaaaagtgaaagcatgaatcaatcagaactagaatcaagttcctctgtgtctaaggcttccttctactatgtttatactgtctcctattaacaggtacaaatttatcccagaacaagtgctaacttgaagtttgctacataataggcattaaaagaatacaatcatctctcattatccatgggagagtgtttctaggatccctgtggatatcaaaagccaggaatgctcaagtcccttatatgaaatggtatagtatttgcaaataacctgcacacattctcctgtatactttaatcatctctagattacgtatgatgtctaacacaacgtaaatgctattcaaatagttattgtactctatcatttattatctgtataatttttatgttgtaattgctattttgttggggttttaaaatattttcaatttgtggttaattgtatccaaagatgggaaatcagtggatacagagaatgagaggrcagctgtatttgttgaatgaataaaagaactcacaacaaacagttgatgcaagtataacagtgaaagaaaaataattctttgtacctacaagtctcctctaaaaagatgaatcccgtctatttctacttagaaattcatttttcacgtctgtgtagctgtatgggtttggatatgcaggcttgagaatcaaggctgagagagacaaacacatctgcctaacatgaggcaaagaatttggatttctccatgcagtactggatggagggtatgagaagtgggaagaggaagagaagagaaagtagccagtatggcatgatggtgtgatgttagaaactgcatggaaggaaagtgtctgtgcaaatactccagagacgggtggttggtgagcgtttttagaatacagatatctaatactgaaattaagctttttggtactttgaaaatgcaaattctttcctcagtctctatccttcacaaaccttgaataaactcgactacatttccaaagagtttgtggcatgttttatgaaaaccaagagagaagctgtgttatgtatttgaattgatactatgagggaacagagacaggactcatcggagcaagattcccatgtcagtggtgatcattaaaatatctccgtgaactgatgaacgtcttgaagagtgtgttaggctaccacagggtgtgtcatccgggctcaagccaattaatcatatgcccaagttttggtaacacttgctgacacctggattcctcagggtatgggaaagtactaatttttataacattaatgtgctagaaatataaagggaggtttgtactcagtgaaataaggctctcaagaaaaaaatcacattctatataggcaatgcattaaaaagagctaaatatacttttctggatgggtaccaaaagaaataaattatatattttaaaacatttcctgagaggaaatgaaattttaaaaaggcttgtgtaactcacatttaagtgagcaaggaacagcaaaatggcaatttctcacttcatccaggaagagaagacatgctgaacaggaagaaagcaaccgtaatgtaagtgacttttgagtggtgcagggagagactcctaacagcattcaaaatagaatttgtccattcagggaatcacataaaactacctctaggacagctgcattgggctttaatttgagtgta

SEQ ID NO: 676918 - DNA, 2160 bp, Homo sapiens
gaaactgaggcatggaacataaaacactttgttttagtcttataaaatattcccaaaatacacttgggattcaaattgaaatcctcctgactcttgtttattttgaaggattaagatcagttcactctttgatgtttgcaacgttgtgaaagagtcattaaaggacgaggatgctccctttttcatcctttattttttcctgttcatcatactgcagctctgatgactagacctcaggcagccatcttggtccagaaggtggaaatgacattttgacagtagaaggataatctgataatcacagagttgccatgcaaatcttgaactgtttacttctaatctttgttaatgtgtgagagaaataaactttttttaaaaaaaacagtagtttattcattgaagggagtagaaggacatagtktttggtagataggttctcctgtgttctagcctgggaagtgtgccaacttatggaaaaagtcattattcttattcatcaggtttttttcacataatgaaaattttacagtgaattctggctggaaaatgcatgggtgtagtttgttttaatgacttctatgaatgataatttatttaactttcttatctaaactgaaaattaagtaagggcctcataacacattgcaggttgcctgagaatgtcaagtaacactaatgctcagctttacgtttagcctatcatttggttttttatctgaaactcttcatagactgtttctttattccttgactttaaaaatgaacaataagtgaccaaattctatcagaattttacatactatctcacaaatgaacatttattgcttttgtacgattaatttcttagagtggtgtgtatccaaaatgccatcatctgagaaagcagatcaatattttattgtgattataggccccgccacacttagaatattctccaggctgtccctcttaatttcaactatataaagaaaaattgcgaagagacttgacctagtattttgattaaactattcttttcacaaatattgatctatcatatgtcaaatttcactagaattactgagtatttggattatagttcagtcttctccatttatacacatttaatttaattgtaaagatagctgcatctcatgcttttacaaatatttttaagaagaaatacattttccatgccccgatttgttcttcatttcttttaacacttctgtttctatcacatccaatgtttttactaatatttttgtgtccaatgtttttactagtattttttctgcaatatttttttctacaaagaaacctcttttctactaaaatcttggccctaaatccatttttgattccaaaaagaaataaaatgtgggtgtataatccatttgaaaattaacaaataatgatttatgtgaaagaaattagttactttattatttttaatagcagcatcgttaaatacttgcattctaggtttgaagagccttacctatgtatgttgacccagtaagttgaagtggagattgaaatctagtttttagaaaaacattcatgtgtttctgttgcagctgtttcacaagatcaaaactctgccagaaggatacgcctcctgtcattttataccagaaatagtcaaaattatcccatgtctgcaagttagaaatttaaaattctccttgtcattttaataattaatttcaatattccaaacactgttttattttgaatgccatgggctgaccagatggtgtccagaagtacctactcctctaaaaataaaatgtggagactcagattcttcttcaaaatgttttctttctatatccaaaggtcaatatccaaaatgatgtaataaacatttgcttaattttttagtgctgtggttcattggtttagatttaaacctgttttccatacagctattatacattcattgattttatacacaatatgcgtagtatatagatgttgttactcagtgcttcatgatgtaaaaaaataaaggtaatactgaattacatttttctttattaatcttatatgataattaaaatctattttcagaactagaggcaatagagcaagtttgtcgaatccatataagtgtcatggtttagctaggtgaattcttaataaggacttcaaaacaggctaaattaatggtattaa

SEQ ID NO: 676919 - DNA, 650 bp, Homo sapiens
tcttatcagatagcctatatctgagctgctgtacagtactcacaatgtttttcacatttaggtaatttcattgatttcaaattccttgaaactaataagtcaatactgaggatttttgtgcctggcatatagtacgcacttaataaatatttattgaatggataaactgagcctactgtatgtccagcactcagaggactcagagacaagcaagggccgggtgtagtgactcacatctgtgattccaccactttgggaggtcaagatgggaggattgcttgagcctaggagttcaagagcagcctgggcaacatagcaagacccccatccccacaaaaataaaaaattagccaggcatggtagcacacgtagacccagctgaggctgaggcaggaggatcttttgagcccasaaggtcgagactgcagtgaaccgtgattgcaccactgcactccagcctgtgtgacagtgagatcttgtctcaaaacaaacaaacaaacaacagcagcaaaaaacaatgagcaaggtttagtttccgccttcaaggagttgatcgtctagaagaaaagtcaagggaataaaagaaatcataattccatagggaccagaataaaatgttctggaggaaattgaacctggatatgtacaat

SEQ ID NO: 676920 - DNA, 664 bp, Homo sapiens
ttgcaacctccaccacccaggttcaggcaaatctcctgtctcagcctccctagtagctgagattacaggcgcgtgtcaccatgccggctaakttttgtatttttagtagagattggatttcaccatgttggtcaggctggtctcaaactcctgacctcagatgatccgcccacctcagcctcccaaagttctgggatcacaggcatgagccaccacgccccgctaagcatcacctctttgttgttccagaacactttagtcaccccaaaaggaaagagttcccatgaatcaatgacactccattctttaagccactctagcccctggcaaccacaaatctgctttctgtctctgtggatttacatgttctagatgtttcttataaatgaaatcatatgatatatggtcttttgtgtctggcttctctcattcagcataatgttttctaggttcattcacatcataacacgttagtacttctttcctttttatgattgaataatattccattgtatggatataccacatttgtttattgtagtttctttattttcattttctcttctaaggcaccctattcttgttcctggaagcaggttgcctataggattgaatccatgggggtgggaacacataaggatgacagctaaataactacactcaa

SEQ ID NO: 676921 - DNA, 884 bp, Homo sapiens
caatcatgactctaattgtggtctcttatttagttccactgactcatacctctaataactatggaaatattgggcatccctttctcattccttgttttagaagtacctctagtttcttttacttttgtttctgatgaagtataatgttggctttaggactaagcatgtatattgcattgtgttaagaaagcagccacgaattcctatattcttgagtgcttttttccagaatgagagttatattttgctaaaagtattttcagcatctatgtagatagttacaactcgttcctttaaaaaaatctactgaaacaatgtatcataataatggatttcctgatagcataccaactttaaacctttagaataaatcccactttctcatagtgtgttattagtttaatatagtggtggattttgttaatattttatttagtacatttgcatcgatattcaaaaatgagataaatctattgttttctttttaatattagccttttcagatttagataataaggttatacttgcttcaaaaaataaaatagtaaaattttctttattttcaaagctctgaagtaatttcaggcttattgggacatagaagattggaaaaacttctctgtgaaacatctgggattcatttcatgttaggtttctccaaagataagaaaccaacaaggtatgtgtgtgtgtttttatatatgagtataaatatataaataaatagatgtatttatatgtttataatgcatataatatacatatagagtatatgtatactttacatacatatataatttttatatgtacagaaagagagaaaaagawaaaggaaaaatttattactttaaataattggcttacactagcacggagattgtcaa

SEQ ID NO: 676922 - DNA, 1217 bp, Homo sapiens
cttcatccagctcagtttagtttaaattataacttaattttttttctttgccttgtggtttagttacagttataactactatagatttaacgaacttttaatctttttaaggcatgctggagtcttataaaaatacttttggaaaaattgcttctatattttaactaacacaaacaccgtcgtgatattcctataatcagtctcacatcacctccctcaggttgttggcctcattttaattctacttttaaacaaaaggtatttgatttctcttcctcttggctaccctttgcataacccctaatttaaaactgccagttccttacattcatcacttaaaaagaaatgcattatcaggtaagaaactcgctcactataaaagtgcagaaacactttttgcttcatttttattactgtggcatgtatgtctgattagtgtccagtactggtttttataaagctccatgagaaacagcacattttaaaaaaattatccaagatattaaacaatatggataacacatttcttactctccaaatgtaagtgtgaatctactttatctgaaagatgacagactataatttagcaggttagtaggtggtcatacagtagtagcatgaatggggagtcatttttaggacactcgtttttgcacagaaacatggtgcgggcctaggacgaaatgcatactttgtaggaaaatcaagcattggaaagtacaaatctttgtagcagcctgttaacctgtttgctgacttcattcttaaaccctaccaatccactgatgttggtgtgatccttgttatgcaaatcaggtcatgycattttcctagtaaaaatatgctaatagctgctcactctactcaagagaaagtctttaactgcttattagtactcttgagatctgtatcatctactgtccatgcccctctgctgacacttctattttcaactacctgtttttacgccccaccacttgtaaccctgcccatgaaagcgaaagtgacctattttcagtattgttcaaacagctgcatgtctccctttgggcctttgcatatgctattcttcttgtctggatccttcctccaacctaccctactttcaatcatgttcacgtaattgggaggattgcttgagccctggaggtagaggcgttggtgagctatgaatgcaccactgcactccagcctgagtgagagagtgagatactgtc

SEQ ID NO: 676923 - DNA, 1217 bp, Homo sapiens
cttcatccagctcagtttagtttaaattataacttaattttttttctttgccttgtggtttagttacagttataactactatagatttaacgaacttttaatctttttaaggcatgctggagtcttataaaaatacttttggaaaaattgcttctatattttaactaacacaaacaccgtcgtgatattcctataatcagtctcacatcacctccctcaggttgttggcctcattttaattctacttttaaacaaaaggtatttgatttctcttcctcttggctaccctttgcataacccctaatttaaaactgccagttccttacattcatcacttaaaaagaaatgcattatcaggtaagaaactcgctcactataaaagtgcagaaacactttttgcttcatttttattactgtggcatgtatgtctgattagtgtccagtactggtttttataaagctccatgagaaacagcacattttaaaaaaattatccaagatattaaacaatatggataacacatttcttactctccaaatgtaagtgtgaatctactttatctgaaagatgacagactataatttagcaggttagtaggtggtcatacagtagtagcatgaatggggagtcatttttaggacactcgtttttgcacagaaacatggtgcgggcctaggacgaaatgcatactttgtaggaaaatcaagcattggaaagtacaaatctttgtagcagcctgttaacctgtttgctgacttcattcttaaaccctaccaatccactgatgttggtgtgatccttgttatgcaaatcaggtcatgtcattttcctagtaaaaatatgctaatagctgctcactctactcaagagaaagtctttaactgcttattagtactcttgagatctgtatcatctactgtccatgcccctctgctgacacttctattttcaactacctgtttttacgccccaccacttgtaaccctgcccatgaaagcgaaagtgacctattttcagtattgttcaaacagctgcatgtctccctttgggcctttgcatatgctattcttcttgyctggatccttcctccaacctaccctactttcaatcatgttcacgtaattgggaggattgcttgagccctggaggtagaggcgttggtgagctatgaatgcaccactgcactccagcctgagtgagagagtgagatactgtc

SEQ ID NO: 676924 - DNA, 1217 bp, Homo sapiens
cttcatccagctcagtttagtttaaattataacttaattttttttctttgccttgtggtttagttacagttataactactatagatttaacgaacttttaatctttttaaggcatgctggagtcttataaaaatacttttggaaaaattgcttctatattttaactaacacaaacaccgtcgtgatattcctataatcagtctcacatcacctccctcaggttgttggcctcattttaattctacttttaaacaaaaggtatttgatttctcttcctcttggctaccctttgcataacccctaatttaaaactgccagttccttacattcatcacttaaaaagaaatgcattatcaggtaagaaactcgctcactataaaagtgcagaaacactttttgcttcatttttattactgtggcatgtatgtctgattagtgtccagtactggtttttataaagctccatgagaaacagcacattttaaaaaaattatccaagatattaaacaatatggataacacatttcttactctccaaatgtaagtgtgaatctactttatctgaaagatgacagactataatttagcaggttagtaggtggtcatacagtagtagcatgaatggggagtcatttttaggacactcgtttttgcacagaaacatggtgcgggcctaggacgaaatgcatactttgtaggaaaatcaagcattggaaagtacaaatctttgtagcagcctgttaacctgtttgctgacttcattcttaaaccctaccaatccactgatgttggtgtgatccttgttatgcaaatcaggtcatgtcattttcctagtaaaaatatgctaatagctgctcactctactcaagagaaagtctttaactgcttattagtactcttgagatctgtatcatctactgtccatgcccctctgctgacacttctattttcaactacctgtttttacgccccaccacttgtaaccctgcccatgaaagcgaaagtgacctattttcagtattgttcaaacagctgcatgtctccctttgggcctttgcatatgctattcttcttgtctggatccttcctccaacctaccctactttcaatcatgttcaygtaattgggaggattgcttgagccctggaggtagaggcgttggtgagctatgaatgcaccactgcactccagcctgagtgagagagtgagatactgtc

SEQ ID NO: 676925 - DNA, 1217 bp, Homo sapiens
cttcatccagctcagtttagtttaaattataacttaattttttttctttgccttgtggtttagttacagttataactactatagatttaacgaacttttaatctttttaaggcatgctggagtcttataaaaatacttttggaaaaattgcttctatattttaactaacacaaacaccgtcgtgatattcctataatcagtctcacatcacctccctcaggttgttggcctcattttaattctacttttaaacaaaaggtatttgatttctcttcctcttggctaccctttgcataacccctaatttaaaactgccagttccttacattcatcacttaaaaagaaatgcattatcaggtaagaaactcgctcactataaaagtgcagaaacactttttgcttcatttttattactgtggcatgtatgtctgattagtgtccagtactggtttttataaagctccatgagaaacagcacattttaaaaaaattatccaagatattaaacaatatggataacacatttcttactctccaaatgtaagtgtgaatctactttatctgaaagatgacagactataatttagcaggttagtaggtggtcatacagtagtagcatgaatggggagtcatttttaggacactcgtttttgcacagaaacatggtgcgggcctaggacgaaatgcatactttgtaggaaaatcaagcattggaaagtacaaatctttgtagcagcctgttaacctgtttgctgacttcattcttaaaccctaccaatccactgatgttggtgtgatccttgttatgcaaatcaggtcatgtcattttcctagtaaaaatatgctaatagctgctcactctactcaagagaaagtctttaactgcttattagtactcttgagatctgtatcatctactgtccatgcccctctgctgacacttctattttcaactacctgtttttacgccccaccacttgtaaccctgcccatgaaagcgaaagtgacctattttcagtattgttcaaacagctgcatgtctccctttgggcctttgcatatgctattcttcttgtctggatccttcctccaacctaccctactttcaatcatgttcacgtaattgggaggattgcttgagccctggaggtagaggcgttggtgagctatgawtgcaccactgcactccagcctgagtgagagagtgagatactgtc

SEQ ID NO: 676926 - DNA, 1303 bp, Homo sapiens
tccatatatgtagaggaaatacttaagatagttacattataatgggagagtaaaaggacacagaaaaaggtttctttctttatttgtaatctggtagaactttccagaggtatagaggtaatgtttctacctttcactcaaactggtaaaatgtcaacaccagtagactgtgataagttactgcactccagcctgggcgacagagcgagaccttgcctcaaaaaggaaagaaaaaaaagaaaaaaagaaaagaaaaaggaacacataccaaacttaaatgtgtacgtaccaaacaacagacttgaaaaataagtgaacctggccaggcgcrgtggctcatgcctgtaatcacagaagtttgggaggccaaggcaggtggatcacctgagatcaggagttcgagaccagcctggccaacatggtgaaaccccgtctctactaaaaatacaaaaattaggctgggcgtggtggctcacggctgtaaacccagcactatgggaggccgaggtgggtggatcataaggtcaagagattgagaccatcctggccaacatggtgaaaccccgcctctactaaaaaaatacaaaaattagctgggtgtggtggtgcacggctgtaaacccagcacttggtaggctgaggcaagagaatcgcttgaagctggaaggcagaggttgcaatgagccgagatcatgccattgcactccagcctgggcaataagagtgaaactccatctcaaaaaaaaaacaaaaaccccaaaaaacaaaacaagaaaaactattagacagaaagtcaacagggctgagtgtgtggctcacacctgtaataggatatagaatttaacactaccattagccaacaggatgtaatcagcacttatagtacatcaacaacaaaaaaaacacattctttttaggcacccatgaaacatgtatcaagatcaaccatatcttgggttataaaacaaacctcaacaaatttaaaagaattgaaatcatacagagtgtatgaccaaaatggactcaaacttagaattaataacacaaagacaatctccaggaagatcttcaaacacttgaaaactaaataacacatttctaagtaatctatgaaccaaagagcaatcctcaagagaaatacaaaattcattaacctgaatgaaaatgaaaatacaatgtatcaaaatttgtaagatacagctaaatcacaactaggaaggaaattaatagcactaaatgcttacattagaaaagaggaaaaaaacctcaaatcaataatacaagcttccacctcaggaaatta

SEQ ID NO: 676927 - DNA, 1303 bp, Homo sapiens
tccatatatgtagaggaaatacttaagatagttacattataatgggagagtaaaaggacacagaaaaaggtttctttctttatttgtaatctggtagaactttccagaggtatagaggtaatgtttctacctttcactcaaactggtaaaatgtcaacaccagtagactgtgataagttactgcactccagcctgggcgacagagcgagaccttgcctcaaaaaggaaagaaaaaaaagaaaaaaagaaaagaaaaaggaacacataccaaacttaaatgtgtacgtaccaaacaacagacttgaaaaataagtgaacctggccaggcgcggtggctcatgcctgtaatcacagaagtttgggaggccaaggcaggtggatcacctgagatcaggagttcgagaccagcctggccaacayggtgaaaccccgtctctactaaaaatacaaaaattaggctgggcgtggtggctcacggctgtaaacccagcactatgggaggccgaggtgggtggatcataaggtcaagagattgagaccatcctggccaacatggtgaaaccccgcctctactaaaaaaatacaaaaattagctgggtgtggtggtgcacggctgtaaacccagcacttggtaggctgaggcaagagaatcgcttgaagctggaaggcagaggttgcaatgagccgagatcatgccattgcactccagcctgggcaataagagtgaaactccatctcaaaaaaaaaacaaaaaccccaaaaaacaaaacaagaaaaactattagacagaaagtcaacagggctgagtgtgtggctcacacctgtaataggatatagaatttaacactaccattagccaacaggatgtaatcagcacttatagtacatcaacaacaaaaaaaacacattctttttaggcacccatgaaacatgtatcaagatcaaccatatcttgggttataaaacaaacctcaacaaatttaaaagaattgaaatcatacagagtgtatgaccaaaatggactcaaacttagaattaataacacaaagacaatctccaggaagatcttcaaacacttgaaaactaaataacacatttctaagtaatctatgaaccaaagagcaatcctcaagagaaatacaaaattcattaacctgaatgaaaatgaaaatacaatgtatcaaaatttgtaagatacagctaaatcacaactaggaaggaaattaatagcactaaatgcttacattagaaaagaggaaaaaaacctcaaatcaataatacaagcttccacctcaggaaatta

SEQ ID NO: 676928 - DNA, 643 bp, Homo sapiens
tcaaaacacatataatttgttttaggaaattataagtaaagttgacattaatcctgtgttgtggcttgcaaattcttacacattaccccactcatattccataataagcaaatgcattctttgctcctgaatcaggaacatatgttctcagcagtctcatttctgtgttcttaggacccttgatacctagtgcayaaagctcccctccattaccactggaagacccccctttagaatctacatatctggctagaaagaagcttagactagtattagttataatgtgaactcatttcatacgtactcggaacattcatgaattcaattctacctgctagtattctttggtacaaccacagcttttatctggtactcgaccacagaactagtttgtattaatgctggagcaaaatcagtcttctttggacttcttgagaaatttgtatctgtatagggttgatatacaaaggtttctgctttagatggacaatttggaagattttcaaggataatttttgattactaaaattttgccttaccttttttttaattctagaaactaggctggcacaaaagtaattgcagtttttgccattacttttaattgcttattgtccaattccacattgaaagtaatggcaaa

SEQ ID NO: 676929 - DNA, 1122 bp, Homo sapiens
cctctgcctcccaggttcaagcaatctcctgcctcagtctcccaagtagctgggattacaggcacctgccatcatgcccagctaatttttgtatatttgtagagatggggtttcactatgttggccaggctggtcttgaactcctggcctcaggtgatctacctgcttcggccctgcaaagtgctggggttacaggcgtgagccagtgcgccctgtggttaatttaattttgcgttagaatctaaggaagagccacactttacatttgaatgatatgtctcttaagtttgtttttgtttttgttttttttaagacagggtctcgctctgttgcctaggctggactgcaacctccacctcctgggttcaaacaattctcctgcctcagcctcctgagtagctgggatyacaggcacacactaccacgcctggctattatttgtatttttagtagagatgaggtttcaccatgttggttaggctggtctcaaactcctgacctcaggtgatccgcccaccttggtctcccacagtgctgggattacaggtgtgagccaccatgatcagccttcagtttgttttaatctacagatttacccttatttcgtttttcttataatttgtttgtcttaagaaattttctaccttctggattttgctgaatgtatccttttgttgtctttaacatgtttctttcaaccttgaatttctgtcaagtggcaagaatgcttgataggtgatattatatacttcctgtgtaatacatcgggatacatagatatctgattttatctcttattgtgaaattaggattgatctgttaatacaccacctttttgtatcaaattacagcatatggaaatttgaggacaaagagtctaaacagtcaattttagaaatttagcaggaaaataatttcttataaaagctgaaggaagctgggcatggtggctcatgcctgtagtcctagcactttgggagtccaagacaggaggatcacttgagcccaagagtttgagaccagtctgggcaatatagctaatttttttaaattagccagatatggtggtgtgtgcctgtagtcccaggtacttgggaggctgaggtggaaggatcacttggg

SEQ ID NO: 676930 - DNA, 662 bp, Homo sapiens
tatatgaaagtgcttggagtatatagtgcaatacaaaggtacagtggttagatacataratatctctgctcttgtcttctttttactgatttgactgaggtgccatttatttatttatttatttatttatttatttagagacgaggtctcattttgttacccagactggagtgcagtgatgcgatctcagctcagtgcaacctccgcctcctgggttcaagcgattctcctgcctcagcttcctgagtagctgggattacaggtgccatgccaccacacccagctaatttttgtatttttagtagagacaggtttcaccgtgttggccaggctggtctcaaactcctgaccttaggcatccacccacctcagcttcccaaagtgctggattacaggcatgagctactgcactcagccagaggtgccatttagataagaaaataagagcttgatcacttgaagaacaaaatctacagaatagagctaggcaataccaacattttccaggcaggaaattgccctttgctttaagattacattttagatagaaagtattctattgactcttagagataggaaaggtaagcaggagtattaagagttcgtatgtgggaaggaggctgcagatgaactgcatgggcaacttgttgactggaacttta

SEQ ID NO: 676931 - DNA, 662 bp, Homo sapiens
tatatgaaagtgcttggagtatatagtgcaatacaaaggtacagtggttagatacatagatatctctgctcttgtcttctttttactgatttgactgaggtgccatttatttatttatttatttatttatttatttagagacgaggtctcattttgttacccagactggagtgcagtgatgcgatctcagctcagtgcaacctccgcctccygggttcaagcgattctcctgcctcagcttcctgagtagctgggattacaggtgccatgccaccacacccagctaatttttgtatttttagtagagacaggtttcaccgtgttggccaggctggtctcaaactcctgaccttaggcatccacccacctcagcttcccaaagtgctggattacaggcatgagctactgcactcagccagaggtgccatttagataagaaaataagagcttgatcacttgaagaacaaaatctacagaatagagctaggcaataccaacattttccaggcaggaaattgccctttgctttaagattacattttagatagaaagtattctattgactcttagagataggaaaggtaagcaggagtattaagagttcgtatgtgggaaggaggctgcagatgaactgcatgggcaacttgttgactggaacttta

SEQ ID NO: 676932 - DNA, 1575 bp, Homo sapiens
aaaaaatgacccaaatcactcagtgttatgttatctttcttactgttttatttcttatcagtcatgtgaaaataatactgtttgctttaaagagctactttgaaacaaattatatgatgacaatctactgtgaattgtattatgccattattttctaataatgttctataatttgcaggtaatatttactggaaattggagttgattccagataatcatttgatattatcagccttgcttattcacatataattatttggaaggtaatgtggttaaatgctagatatcctgaaatgcacactggaaggagccaaataaaaacttaatacatcacattcataatgacaggggaaaaataactgcttatctgccttatgattgtatttcataaaaaattgtcattttcctctcctttatagtattatttcacttttctcaaaagtgtgattaggaacaaaatattttaaaatactattaaggtttcagaagtgtttgtgagggtgaagaaggttatatttggcatgtaactagaaactaatgtttagacgaatgccttttttgactcttaagtttagtattttatgttcaaatattttgactagagaaggagatcccataaactctttcaattattaatgcttctgactatttgaatctctttatagttttgaaggtcagcttcagagacaaccacgaaatttcttgaagctttagtataaacacatatgaagaagacagataaaatggaacagggtgaaagaatatgagatgggaagaattttgcaagtcatttggtactttgaaatcagccttgatgaaagcattgatggcatgaaaatgtgcaaatgccacaaagcaggaattctcttttccccaagcactagtttaatagcacaaccactggcaattgggagaaatgaaaggaagattctaaagatagtcatgtctaattcagatctgaattctagcaaactaatgccacatggatactcttggccctttccatctagagacttgtttatagagggctatttggggttcaaggtcaggagttaactcagttaaaacttaattatgcttttatgcaaatgcatggaaagtaaagctgaccttttccgaagagatccctaggagggaaaagaagaaaacaaacttgaacgacttattctgaactatagtactaccaataattattttataaatacactttattcttaagagcagttttagttttacaacaaaattgagcagaacgtgcaaagagttctcayacactacacaggcaagggctcccgcactatcagtattctacacaagagaggtacatttgttacaatttgaacctacaggtcattatcacctagagcttatagtttacattagggttcactcttgttgcacagtttatgggttttgtataattatatgcattcaagattataatgtcagagaaaattgttttattgtactaaaagtcatctgtatatcttctattcatctctccctcccctccaacccctgataatcagtgatcttttttactgtctccatagttatgcctttttcagaatggca

SEQ ID NO: 676933 - DNA, 1641 bp, Homo sapiens
ttatttcagattggcttgcacataatgagataaagcataagcatgcacattttgataagctctattgcatttctgtcttttttccttcctagttcttttgaaagtggcacacttgcttctacagaagatataccagtaagtgttctttcttttcatcctactgttcaatcggtggtcaggatttattgagcccttgctggaagccaacacctctccagtcccagggttctaccaaagaagggagaatgtgaggtgtcactggtatagaaatcttgtccctgactgggcagcagcccacaaatggctctgtgccacaggagtagcccttcctaccacccctgtgcctgcctgtatgggtcctggccccctcatccccgcagatgtcaggaggccaaggcagtggggttaggcttaggttctgacacctgtctcagtccttcccagcctggtgtgtgcttgattgtctctcacttgctttcttatagccatgtaagcaacagtgaggtatgaggagaaagtgttcaggtcaatgaatgacatatcctttgttgggggcacataggctagggagagattagtggaaccccacattggaatcttcagtgcatttccccatggcaacaccatctttgatgcctgcagccctgggcacgtaggcacyagaaacacattagcagcgtgcacgctacagcaccgtccttggcatgcacgttagttaagtaggacttagccagccaggtgaaggagcccatcaaaattctaatgtgtgctttgggattgatgtagaaatatctttttggactatgatctattaacttgggtactgcctatatttgtccattttagcagtggatgttataaatacaaaagttctgtgacacacggatgggaagcttatttcttaaatgtgccagcctaaccccctctcttgtggtttgactgttaaagggccccctggtaagtacgtgtgtgctggacagtgaaggagctagcagtggtggggcacctcagtgcctggtgtcacacatcttttatttcttttaatcctcatggcctaaaagccctccctgcctgtctgtgtggcccgtggttttgccggggccctgcgctcaggtgtgtgtgctccctggacagagggggcactggcagtgggaggaggctgtgggatgagggatgcccttttggaatcaaaggtgatgtcttaccaaggggggacagcatggggctttctctgaatagtggcctcgcactgattctctgagcctattgctgtttgtcaccagtgggaccctcaccaaaccatcaccagcagatggtgactgtctggaagctcttcttctatgtggccacggagaatgcttttagacttgccagctggggaagcacccaaccagagccccaagacttgtgagggcaggagggagggagagccgtccgagggagtgtccttctgttctgtcaccggattcttggctgtggccgaggaagtggatgaacttctgtgcgcccgacagctttggggttttctgtccttgcagcatcgaccccgtgcccgagtcatcctttcctcagtaccttgacgtgctggctccttacgtgaaccaagtgaacctcatccgagcgggggtcccaaagatcgtg

SEQ ID NO: 676934 - DNA, 671 bp, Homo sapiens
aaacactgcacagtggtgaaggccaccccatggctaaagatctgatggtgctcttttgttctattttatgcagcaaaattttattcaatgtggaaactagtagtgctcaggccttggagaaattttgtaatgagtccataccagaatatgtaaataactcttagaaatcaataagaaaaatacagaaaacccaatagaaaaatggacaaatgacttagatccttcgcaaaagatgatctccagacaataaatacagtaaattggttaattaatcataagagaattgctaaccaaaactacaatgcagtacacccatcagaatgccaagaggaaaacggaggaaatttgtgttggcaaggaagcaggacaactgcaactctcaaacacagctggtggaagtgtagttgtacaactactttggaaaccatttggcagaatccactgaagctgaacatactcataccgtatgacccagcaattctactcctaggtatacacccagcagaaatgcatctatatgctcattacagatgtgaacttgaatgctcacagcaacactgtttgtaargcataaagctggaaactacctaaatactcatcaacagtagaacaaataaattatgctttattcatgcaatgaaattctttaaatggcctatatctacacacaa

SEQ ID NO: 676935 - DNA, 693 bp, Homo sapiens
attaaggataaccttgtattatacctgatgcaaataacattccaattaacttgtgatctggcttatactgtttgaggcaaggaatatattaaactctcattaggtagcctaaaagatttatcttttcctttgtcatttcatccactgcctttaacttttaaaaagtcatgctcctccccagccctctctttgaatgcattccccaaccccatacagatcactggcaagagtgaaacctcaccgtcagaggtgtttttwggttttttagggacacaatcttgttctgtagctcaggctggaagtgcagtggtgcaatcatagcttactgcagcctcaaactccagggctcaagcaatcctcccacctcagcctcccgagtagctaagactacaggcatttgccacccagcccaggtaattttggttttttctagagacatggtcttgttatgctgcccaggctggtgtcaaactcctagcctcaagcaatcctccctactaggcctcccaaagtgttgggattacaggtgtgagccgtaatacctgaactgttaaaggtgtttaagcacaatctttggtgaatctttggctgaatactaaattatgctacccaaaagtgaatcctagaaagacagaattaaaaataaaaacaagaataaaaaaataaaaatagacatcagtgactatgggaaga

SEQ ID NO: 676936 - DNA, 1246 bp, Homo sapiens
tgagtagttatctgcagttggttgaattcacaaatgcagaactcacagacacggttgggtggccaactgaacctggtctgttcatctaagactacttggttaaaattttatttcaagtaactgaaattgagatgacaaaaaaatctcaaattcaaaatccaaaaatttatggccacattttacagcctattacttaaaacatgatcaatatcaaattataaaaatgtagtacctttcatcacaacaatttgtacttagacgttattgtgtgattatacacatatttattccaccttctgatgggttacccaggcctttccgtttctctatttctctcctattctgataagcagtcactacaaatggatatttttcactaaagtatggacaaaaaaaccaacagtgttgacccttggcaaaaagtcttaatgtcatagacgggatatggtacgacaccagtaaaatactgaaaatggttaaaaaaaaagaagcttctggataatcgagattccgtgaaggatttaccctgctcatcctatcttcacagctgcagccgtctttgataaaagctaaagcagttgagaagtcctcttccctctctctccttttctcagcattaaacaatacatgacactaattggaaccaccacactgcaggtgattaacaaaacgagcaagtgagattaagtgacagtcgagctggaaagggcaccaagtcctaaatttgaggatacatcagtttctatgctgagataatacagaaatcatccagttctcaaaaggaccacctgtggtgtccgaggccccagcagcacgtgcccacatgtcagctgttgtgggcacgcagatgccagcagggtaaatgacaggcacgctgcatcagccgccaccctgctgtgcttcactggcaacaccggaggaaaaatttaaagaaaaaaagccaccttagggccgagcactgtgtctcacgcctgtaatcccagcactctgggaggctgaggcgggcagatcacctgaggtcagsagttcaagaccagcctggcccaaagggtgaaaccccatctttactaaaaacacaaaaaaattagccgggcgtggtggtgcgcacctgtaatcccaggaactcaggaggctgagatagaagaatcacttgaacccaggaggcagaggttgcagtgagccaagatcacgctactgcactccagcctgggtgacagagcgagactccgtctccaaaaagaaaaaa

SEQ ID NO: 676937 - DNA, 609 bp, Homo sapiens
ttgggattcgaaaggctcccctactgataccccgatattagtgactttgcctcaccccacttccaaattcataggaagtgtagaaattcaggaatatcttccacagaataaaaacagcaaagcaaactacatcacaaaatagatcgtgtgatatgtctaatatataacacaatgtacattatgaaaatacttcatataataaagatcctgtgtcagaacctttccactacaagcaagtaaacccaactcaaattggcttaaacaaaaaaaggaaattattggttygcacaacaaacaagtcaggaatggcaagagccacaagctcagaaccggaaggctttctccgctctctttcctactctcctgagtgtgcgccacagtttcaggaacggtctccctcatcaggcaacaggaccactggcagccccaggcccacaccaccaggtcaacacctcagatgcatctcgctggacccagagcccaccacgtgaaccaatttcacagccagtgaagcagaacaaggagagctgtccaaggagccaacaataacggacacagcattctggcaaacccacacataaacatgtattaataatttagagcacaaaa

SEQ ID NO: 676938 - DNA, 1192 bp, Homo sapiens
  misc_feature 1169: n = A,T,C or G
ctatgcatggtgacttttacattaccttcaagactttgctcaggtggcaccagtggggagcccctctatgaactgaatcaagtactacatctagaagttccttgtctgcaaaatcccatatcacatctaacacatatttattcagcttccgccatgtgcaaagcattgtgctagatgccaggaacgaagcagtaaatgagacaggtgcagtcctacctccgtagacttttgtattcaaacttacattgtgtcaccatattttcattgttgctttatttggttactgcaaccaatagattgmgaattctacgcaagcagcgactctcttgtctttgaatttccctgtgcctggattaagggctgaaattaaggagtttaatccaccatgagaaatagcccaaagaaacagtacatttggacttttcatttccctagcgtaaaagatccagaaacaattactgaaacagggtacctttaaacttctagcttacctaaaagttaaatattccaaaatacatttttctctactacaactgaacttacaaatttaaaaaggatattgcttttcctttatctccaacaggtattggtaatccttttttcctgcaatataaaatttcttccacttaattccatgtatttggtagaagtaaagctgcatgacaaagaataggtactcagcttcacttctgctgagctgttactttctgcccttaaaataggcagaggacacagaggtcaaacacgataacctcattctgtgtgacaggtcaactaatatctacaaagctgaaatggagttcagtaataaaaaaattttgcaattgctgtagaacaatttgggtgctgctttatcttgatttaggtagcagactattagagatgtctcaggattcaaagaatgtgcacaggaagagggcaaggcattcagcctcagagaattctctgtgaaatgaacaattacaaacccgggtgtctgatctaagtagtgttctttgccaacgagcctaaagagaaaacttactttatactatttatttcagcaggaaggcttctaagaatgtgtaactgtagattttgccttaagcccatttacttttttccatctttcaatttcaccattttcttcctcccatcacatgctatgtgttttgtgtgtgcacacgccnaaccatgcttatctgagtgcata

SEQ ID NO: 676939 - DNA, 600 bp, Homo sapiens
gtcagtagctcctataaaacatcaaaaggatgcctatacttttggcccagatgctaaggtcctctgagtctctctgtatcctccctacaaagtggaatctctttcagcctcccaaggaaggtcccctgctgctgttggattgtgccagcaccccatccttcaatgacagggctagttcctattttctccaacactgctcctagcttaggagcaccccaagctggcaaagcatcttgttcacttcatctctgccctgtcttcaraagtgtgccctcactttctatgtggatgacctagactacgtcacttctccaacttccccatggaccttcacccctgctcagtggtggaataggggtggctggagtgtatccttgttcctccagttccatgtcaactcctgcttcagtgcaagtttctcttctgccaaatcttcccttcaactcctgctggaaactaataatggacagaagtgttttgcaacttgctctccttgaaaatattaatccattttctcctgccctatcttctaaggccaaatctgaagtttttcagtgcctgcagtatgttcagaacaatggtatgaataacttcagaatc

SEQ ID NO: 676940 - DNA, 1093 bp, Homo sapiens
  misc_feature 116, 151, 167, 219: n = A,T,C or G
cccagctctaataatattagaatgaatagacaaggatactaaacattttttattgtattccagatgttcaaaatagagaggcaaaaaagtataaaaaggactcagttatawtctanagatgaaaactggaacatttgagaaaaacatacangatgagactgagtganaattagatatgggaaaagaaaaaaaaaaacagtgaaccttaagtcatagcantagaactatccaaaataaacagagagagaaaaaatggaaaatgaaaaaattgaaaagatctgtagaccaattcatggggcttactatacatgtgattagagtcatcaatggggaaaggggaacagaaaaagtttgaagaaataatagcaaaccgtatctaaatttgatgccagcttaaaacccactggtcaaagaagctcactgatacttaagcatgataagttttggggatatgttaacacaaggatctctcagagtctttgtgatgcataaatatttgagacatagaaacaatcagggctatatttactctaatcgtaacttagtcacaaaacttatttaccacataccagacaatgtaataaattctacaggcattatttcatttaatttggatggcagtacttttcagttgatataatacttgtcacttcacaggtaaggaaaatgaagttatgaagcttaagcgatttgcccagaattgtatatctcttaactgtgctcaaacattaattctggtttaaagaaaatattataatactaataattctacagatccatttcagattaataggtttttaaagtaaactttaaagacttatgtctcattagtatatatatgaagggaaagtgctttcaataagcagattaagtaaataaaatcaccgtaatgaggtattaggttggtgcaaaagtaagtgtggctttttccattataagtgatggtaaaaaccgcatttacttttgcaccaaactaatatatgcagtatggaattgatgatagtaatattgtcttacctctgctaatgttttaaagtttgatgacatgttgtgcaaccttctttccagtacatttgatctcatttgacatttg

SEQ ID NO: 676941 - DNA, 1093 bp, Homo sapiens
  misc_feature 116, 151, 167, 219: n = A,T,C or G
cccagctctaataatattagaatgaatagacaaggatactaaacattttttattgtattccagatgttcaaaatagagaggcaaaaaagtataaaaaggactcagttatattctanagatgaaaactggaacatttgagaaaaacatacangatgagactgagtganaattagatatgggaaaagaaaaaaaaaaacagtgaaccttaagtcatagcantagaactatccaaaataaacagagagagaaaaartggaaaatgaaaaaattgaaaagatctgtagaccaattcatggggcttactatacatgtgattagagtcatcaatggggaaaggggaacagaaaaagtttgaagaaataatagcaaaccgtatctaaatttgatgccagcttaaaacccactggtcaaagaagctcactgatacttaagcatgataagttttggggatatgttaacacaaggatctctcagagtctttgtgatgcataaatatttgagacatagaaacaatcagggctatatttactctaatcgtaacttagtcacaaaacttatttaccacataccagacaatgtaataaattctacaggcattatttcatttaatttggatggcagtacttttcagttgatataatacttgtcacttcacaggtaaggaaaatgaagttatgaagcttaagcgatttgcccagaattgtatatctcttaactgtgctcaaacattaattctggtttaaagaaaatattataatactaataattctacagatccatttcagattaataggtttttaaagtaaactttaaagacttatgtctcattagtatatatatgaagggaaagtgctttcaataagcagattaagtaaataaaatcaccgtaatgaggtattaggttggtgcaaaagtaagtgtggctttttccattataagtgatggtaaaaaccgcatttacttttgcaccaaactaatatatgcagtatggaattgatgatagtaatattgtcttacctctgctaatgttttaaagtttgatgacatgttgtgcaaccttctttccagtacatttgatctcatttgacatttg

SEQ ID NO: 676942 - DNA, 1227 bp, Homo sapiens
ttataatttaaaayagaaaacaacttaaaagtaggcatttctcataaataattttcatatcttgctgttagatgtgtacgtaaaaataacttaaaatacattttatggcaatatgtttaatattagtcattacattaaaactgaaaagaaacttttcagtaaatatcatgcttgactatgaaatctgctagaatggaccttccagacattatagctattatgtggctttgccagtcacaacaaaggaacactgtggaatcacaacgtgagagaattactgatggcagagtcaataaccataaggggacatgaaataaacaccatatgggagaaaaattcatggcagtaccgcagcaatataaaacaaatgtttacaaatatcagctggtatctatatgtggccaagtagctaatttcattttatttgagtagctatcactggctgcattattattccaggcaaaagtttgagccatctaggtatagtaaatacaaacattattatcagatcctcctcagagaacccattttgctttgatttgttttattttatttttctaacactgttctccacaaattagtatgaaaattactagtttgattgggtttattattatttttagataaaggatagatattatatatgtgtatacatccacacatatacacatatgtacacatgttatgctatctatcaattatatttaaagattttatcacagtgctgttattagtataatgccctccctcctctatatgtttttgtaatcatggcataatatgccacaaaatgcaatgtgcatatatattcaaagcaataagccttaatacagaaaaataaaatgtatagtcacaaaaatctttgtactcaaattgcctgaattcaaaccctggctttggaacacacaaggtagttattcatttaataaaataatgccgattaagtacctaaactacagtgaacacttgataaatgttagatttttacatcatcactttttcaattcaagaactggataaaataagcgcaagaataattgtcctttaattgatgtagcaacctagtgtattaccttgtaacaaattagtatctagtgctggttgatgaaaagaaataagcataataaagaggcagatcaaataacttaatcactttcttgttgttgtctatgctatactgaaaaatgttattactctgagccttttttttttttttcccaagacaga

SEQ ID NO: 676943 - DNA, 1227 bp, Homo sapiens
ttataatttaaaatagaaaacaacttaaaagtaggcatttctcataaataattttcatatcttgctgttagatgtgtacgtaaaaataacttaaaatacattttatggcaatatgtttaatattagtcattacattaaaactgaaaagaaacttttcagtaaatatcatgcttgactatgaaatctgctagaatggaccttccagacattatagctattatgtggctttgccagtcacaacaaaggaacactgtggaatcacaacgtgagagaattactgatggcagagtcaataaccataaggggacatgaaataaacaccatatgggagaaaaattcatggcagtaccrcagcaatataaaacaaatgtttacaaatatcagctggtatctatatgtggccaagtagctaatttcattttatttgagtagctatcactggctgcattattattccaggcaaaagtttgagccatctaggtatagtaaatacaaacattattatcagatcctcctcagagaacccattttgctttgatttgttttattttatttttctaacactgttctccacaaattagtatgaaaattactagtttgattgggtttattattatttttagataaaggatagatattatatatgtgtatacatccacacatatacacatatgtacacatgttatgctatctatcaattatatttaaagattttatcacagtgctgttattagtataatgccctccctcctctatatgtttttgtaatcatggcataatatgccacaaaatgcaatgtgcatatatattcaaagcaataagccttaatacagaaaaataaaatgtatagtcacaaaaatctttgtactcaaattgcctgaattcaaaccctggctttggaacacacaaggtagttattcatttaataaaataatgccgattaagtacctaaactacagtgaacacttgataaatgttagatttttacatcatcactttttcaattcaagaactggataaaataagcgcaagaataattgtcctttaattgatgtagcaacctagtgtattaccttgtaacaaattagtatctagtgctggttgatgaaaagaaataagcataataaagaggcagatcaaataacttaatcactttcttgttgttgtctatgctatactgaaaaatgttattactctgagccttttttttttttttcccaagacaga

SEQ ID NO: 676944 - DNA, 654 bp, Homo sapiens
gaaaggacccacttcttaccaaacttaaaaaaaactttcaccaatctcttgggtgtaaattctatctcctggttgtttatcttgcttgtctttaattatgtgtaagggtgagcatcttttcatatactaagtcatttgcacgtttttctatgtagcctattcagtccaacactatttcaggtgttgcaaatatatttcctagtttatcattttaaaaatattttagaaaagcttggagcaagaagtattttctaaacaaccaaaggcttatcagaaaattcaggatgccacaatactttactaccttagcttgaagaagaataaaaagaatctgaataggcaaataaaatttaatactgtttattcyctagagagctgggctggctgaatctggctcaaggggtgagggcatcagcccctttatagacaggcaggatatgactttgccttggatccagtcttgagtgacctttatcccttgaaaaactccaattatatcaattttttcctttattatatgttggactttaagcagaaatggttaaagcatttatctccatgatctcattcagttattcctttaaaaaacatatcttagggtaacaacatgagatttcctcccaacctttcaatcctaaaacttttgtcaggtcc

SEQ ID NO: 676945 - DNA, 654 bp, Homo sapiens
gaaaggacccacttcttaccaaacttaaaaaaaactttcaccaatctcttgggtgtaaattctatctcctggttgtttatcttgcttgtctttaattatgtgtaagggtgagcatcttttcatatactaagtcatttgcacgtttttctatgtagcctattcagtccaacactatttcaggtgttgcaaatatatttcctagtttatcattttaaaaatattttagaaaagcttggagcaagaagtattttctaaacaaccaaaggcttatcagaaaattcaggatgccacaatactttactaccttagcttgaagaagaataaaaagaatctgaataggcaaataaaatttaatactgtttattccctagagagctgggctggctgaatctggctcaaggggtgagggcatcagcccctttatagacaggcaggatatgactttgccttggatccagtcttgagtgacctttatcccttgaaaaactccaattatatcaattttttcctttattatatgttggactttaagcagaaatggttaaagcatttatctccatgatctcattcagttattcctttaaaaaacatatcttagggtaacaacatgagatttcctcccaacctttcaatcctaaaacttttgycaggtcc

SEQ ID NO: 676946 - DNA, 742 bp, Homo sapiens
cgttgtcatgtctagcccacattttyttctgatctctagacatatatcccactgcctacccataatctctacttggaagtgacattttaaactcaacacgtccaaaaccagactagtttcactggattttattcccattgctccctctctaacttaggtaatactcttcctgcccttgtcagaatagattttttaatatcatttagtcttaatgtcaattctcattaaaggtcttgcttggatgtgtttattggacagagactgtcatttaaagctttccagatttgaagaatgtgtggaaggccagaaagaatgacaaataatagtgaccattggtggatatgtgcagaagagtttattgtcatatattgctgatagaaatgggatttttatagctctttatggaaaaaatgtggaataacgtacctatcaattccactcctgggaatctctaacatagaaataaaaactccaatatataataaatacatttgaaagagcattgtttatagttgcaggaaaaaatcctgccaataaagtgaaaatccacctatcaggaagaaatgaataaaatgcaatataaccatatctaaaatgttcatgcacccacgtaaaaactaatgaaatttatacagctaatttggagggatttcaacaatgaatacaggaagctggacaaaggtatatgtaatatcattatgtgtactgctgtgtacgtttgggaatgtttctatttgataga

SEQ ID NO: 676947 - DNA, 2850 bp, Homo sapiens
tcccagctattcgggaagctgaggcatgagaatcacttgaaccagggaggcggaggttgcagtgagctgagattgtgccactgcattccagtcttggcgacagatcaagactctgtcttaaaagaaaaaaagaaagaaatacactcatgtcattaaatgcaaatcaaagcactcattatactccattcagtggtgctgctttgcttgcctagctctcagcagagttctcccatggcctctacggaggacatgacttcctccaaaataaaccaaggactccatttaggtaggcttagattatagcttcttgcgtgcagctctacacatgggagtgcagtgtcaatatattccactgctgctaygttgcacacttggaaaaacttttcactttctttccttgggtatctccctccttcaggagttgggctcattcttttcaattctagaaatacagaagatttattccatgttatttctctgatgacaaagcatgatagactcaggcttttggtatacacagagtctgtttcacattatcttctgttcctgggtttgacaacttctctttatccctttaaaacaaaagcctgatatctctgaaagaaagagtataactttcaaaatgacaatctacaagttatattctagggtatatgtgttttgtccatataatatttaacacattttttttaaattaattgccagaattgaaaagggaagataattctgtaaaaatctagatttatatctcctctttaaaaacaaaagtaggctgagcatggtggctcatgcctacaatcccagcactttgggaggctgaggcgggaagatagcttgaggccaggagttcaagaccagcttgggcaacatagcaagactcttgtctccacaaaatagtaaaacaattagtcaggtgtggtggcatgcacctgcagtcctagctactcaggaggctgagaggattgcttcagcccgggagtttgaggctgcagtgagctgtgattgcaccactatattccagcctgaatgacagggtgagactctgtctctgaatagtaaaactttaaaaataaataaaacaagaagatctgatctcacggctgcagcattctcacatggcaacatttggcaagagctaagtagcaacttcttttaggcagggcctaggagtgtatgctctttggtttgtctgaatcaccatttagctggcttcgctcatttcacatacctgcctgacccttctacaggcgtttgagtttagacctctgcagtagaatttcatatcctctcaggtctatttatcctttatagtaggccgaggaatggcccaaagatatccaagttctaatcactagaacctgtgaccattaccttatatagcaaaagagccttgcagatgtgattacatcttgagttgcggagattattttggattatctgagtgggccctaaatgcaatcacaggggtccttataagaggggggaggcagagagagatttgatgacagaagataaagagtcaacatgacagtggaaacggggagaaaaggtggtgtgatgtggggccaagccccctcaggaatgaggacggcctccaggtgctggatgaggccaggtgaaggattctcctctcgagcttctagagggggacatccctgccaacaccttgatttcaggccggtgaagcttcttttggacttctgacctccagaagaaaataaatggtgttttaagccacagaatttgtgttgatttgttgcagcagccacaggaagctcatacaacctctctggatggaaaaatgggtttgtgacagtcttgtaatgctatcacatattttcccatgttaagctgtttctagctcagggttttttggtttttttcttttattttctttctttcctttttttttttttttttgagagagagtctagctctgtcccaggctgaagtgcagtggcacggtcttggctcactgcaacctccacctcctcggctcaagcaatcctcccagctcagcctcccaagtagctgggatcacaggcatgtgccaccatgcccggctaatttttgtatttttgtagagacagaatttcaccatgttgcccaggctagtcacgaactcctgggctcaagagactcgcctgcctcagcctcccaaagtgctgggattacaggtgtgagccaccatgtctagccaggagttttgtttttaacatgttacccccaggatcatattggatttactcatatagagggatcagtatgagtaaaccactgtgtaagcaaatgggagaatatctgaatgctgctttacatatttgctactgtctactttccttcttcaccactggaacctataaagggaaaaactgatagaataattttgagttgctaggaaagaatcccaagtttctatatggttaggtggttggatagcatatagataattagattacctatttttacctactaaaatcctccagtgaatctaacaaaatattggtctagaaaagtccattttagtcataaaattcaattgtttcttctttcagtttggaagagagaaataaacatttagaggatttaattagaaagcccagagaaaaagccagaaaaccaaggtaagtttccctttatttttaaaattaataatgtctttaaaatataggtaatatggccaagtgcggtggctcacgcctgtaatcccagcactttgggaggccaaggtgggtggatcacctgaggtcaggagttcgagaccagcctggccaacatggcaaaaccccatctctactaaaaatacgaaaattagccgggcatggtggcacgtgcctgtaatcccagcta

SEQ ID NO: 676948 - DNA, 1443 bp, Homo sapiens
gttatgggcccggctagtgtgaagacaggcagcggctgtcttactcagctgtgactccccagagcctggcactcagcaagagattcatacttatttgtaggcctttcaattcagtttatttcagtctaatctgattcagggcaattcaactccactcacgtcagcacaagggaagagygccccggagcccacaatgggcaccaacacacagacagtggcctcaggcagcccggctggaaggagcccactggtctcacaggcgtaacccgtgtttgcaggcataactcgtgcgcacgtgtggcactgctcggcctgggcaccgagcgctccccgtgcctcaggtccctccagacatgccccctccaccgcccctcctgaggacgctcatctttgaaaatgtcctaagacggaactggaagctctaaggtacgcgttccaaccatcacgtggcaggggctggtgggcttcacgcagagccccctgtcttctggcctcattcaccatcagtgtagtgggtggggacagctgacccaagggccctactgcatgggtcgcacggttcagccagtccttgctggcgggacctgcatccccatcctactggctggcagagtaggactggtttcctgggacatctccacccagaaacagcacacgacagctgttattcatcagccacaaagccctagtgacacagccatgcccagcggtgacttcccagagccatccggcggagggcccggttgaacaggcggctgctgtcctaagtttcacaaattgcaaaacgatgcagaaaagatggccgggtctccaggaacggctgtgctgggggatgtcctgaagcagccacggcggaagcgctggccttgcacctggagactgcgaggcgcccgagctgcaggagcggcccgatgtcatcagtgcgtctccctcctcctgcgtctgaaagagcaaagggagacagtgacctcctgagaggcttccagacgccccgccaggcacttccctactggtgcatgaagtgtgtggctggacagaggcagcagggcggggggcccaagactctctgctgctctgtccaggccaaatagttcccacaatcaaagacccagagactctcccctcacacccatccaccctcccatgaagaaacacatggaaaaatctaggatggggttccaagtttctaaaactggtccattctgtgattccccaaaggaaggataaatatcatgcttttttcttgggatttgatcagagtttcatgctttcagtgagaatctggcataaaaagaaaccccaacatttagccatgcttcacgagtaaagcagtgaaaactgcacacaaagacctatctggagagatttggaggtttctgctttgtaactcaatcagctccgaaatctcactcattctttcattcactcaagaaatcttaatat

SEQ ID NO: 676949 - DNA, 1432 bp, Homo sapiens
cacttattagatttgcttccctgtccttaaaagggtagccacagagaattktgtactttgggtaggggaaaaagggagaaggagaaggagactgtctgaaagataaacgaatcctgaagtggcatgggtgggtggtaggcttgggaatgcaggagacaaactttgcctatgttattatttacccacactcttcctaggctctagagtctcgtgcatggtattacagggtcttgagcagaaggatagctcaagtaaaaatataagcattgactttggcaggtgatgatacgtattaggctgctcttgcattgctataaaggaatacctgagactgggtaatttataaaacaaagaagtttaattggcttatggttcttcaggctgtacaggaagcatatcggcatctgtttggcttctgagtagacctcaggaaacttacaattatggctgaaggcaaagggggaggaggcacatcacatagtgagagcaggaacaggagagagatgggggagctgccacacacttttcaaccactatatctctcaagaactcactcattataatgaggacagtaccaagggaatggtgctaaactattcaggagaaatctgcccccaggatccaatcacctcccattgggccccacctccaacactggtgattacatttcaacatgagatttgggtagggacacatatccaaagctatatcacaatgtcataatccttaatatcaattttctcatctctaaaatgtaattacaatagtgtaaataataatagaaatgaaacaattgaggtaatgcttatgaatgtcttcggacagtgctcaatttaatgggcctcagggcagtcctgaccatagaatgctatccagaataactgaaggtgactggctattgtttgggaattaattacaatgacctagcctggccatttggccagtacattggtttcctttgcttattataaagccagagtttagggaagtctctctacctggagagactttctttgcagggcatcttgaattattctgattttttagttgcgttcagaaatggctaattcctggagagataaaccagatgcagattataaacttgtgtgatggacctactcatgtggggaaacccgtggcttcctggcagtgaacttggttgcagcaaccaagaaaagaaagacccttgagcaggattggcgcataatcactcccctcaatattatcactccatgaaccaatgttagacctctgcacaggtggaggttcgtgcttgagggccattgaacactacccatttccctaatgcatcataattaaacacctgtgctaagtaacttcttactgatccactgtggaaatttgctgggtgctcaacagtccttaacattttctatctcttacttgggagggaggtctcacggttattctt

SEQ ID NO: 676950 - DNA, 665 bp, Homo sapiens
tgtgttatagtactacatctttatcttctatattagaaagtcaatatatgcttgaaattgaaaaaatcaaggaataccagtatatatgtagtatttaaaaatacagaggtggccaggcatggtggctcatgcctataatcccaacactttgggaggctgaggtgggaggatagcttgagtccaggagtcagcctgggcaacataatgagactcaagtctctaacaatatatatttttaaattttatatatacatatatattttttaaataaaataaaaatacagaggcaaatgaaagaagaaaaaaattaagtattgtwattgcttacctctaattaaaattacattccatgggtggggagaggtacggccgaggattagggcttgttgattagaaaccttgcactgtttgctcttttaaactatatgcatatattacttttaaaaataaaaattatacttaaatacatttttttgtattatgaagtgacaacaagtaatgatataaaaagatgacataaaattcagatcctctgtaggaccagaatctacaccatgtttatcaaagaggaaaccctcaaagcactttcaatgaaattcaatgccaagtagagttcaaaatttcttttgtcaaagctgtatttaatgtcttttcttttataataa

SEQ ID NO: 676951 - DNA, 1169 bp, Homo sapiens
  misc_feature 82, 83, 84, 85, 86, 87, 88, 89, 90, 91, 92, 93, 94, 95, 96,97, 98, 99, 100, 101, 102, 103, 104, 105, 106, 107, 108,109, 110, 111, 112, 113, 114, 115, 116, 117, 118, 119, 120,121, 122, 123, 124, 125, 126, 127, 128, 129, 130, 131: n = A,T,C or G
  misc_feature 132, 133, 134, 135, 136, 137, 138, 139, 140, 141, 142, 143,144, 145, 146, 147, 148, 149, 150, 151, 152, 153, 154, 155,156, 157, 158, 159, 160, 161, 162, 163, 164, 165, 166, 167,168, 169, 170, 171, 172, 173, 174, 175, 176, 177, 178: n = A,T,C or G
  misc_feature 179, 180, 181: n = A,T,C or G
tctatttgtaactttttactatatatgtctattcatatcttctgcaaaaatgacaaatttttttcccccaggcctttatttnnnnnnnnnnnnnnnnnnnnnnnnnnnnnnnnnnnnnnnnnnnnnnnnnnnnnnnnnnnnnnnnnnnnnnnnnnnnnnnnnnnnnnnnnnnnnnnnnnnntgttttcacccttccaaggacagccattatgtccaagaatgttgattatccttgtttccttggggagtaaagtgaggagggaaggtctgattttggctcacccttacatagccatttgacatcccacttttatgggggaggaatgtcctcctattagactccttatcttagatatmtgccttgaatttgtttcttgttccaataccctgtgaggccatcgagaaatgtggttaggaaggaagccagttccatttctccacttacctttctgagttcctgacttcgcttagataacagacctaagattttcttagtttactgtcagttcattgatacatttaagaaaatattattaaatatattttaccagaaatgttctcttgtttttatcagagaattaaggtaggcatctagcctgccatgtggtcagaaacgggcaaatgaattttagaactaaaaaagaaaaaaaaaacagactaaacttctgattcttcagacaaggtgcaataactagtttacatgtgctctttgaagtaaggccagttttctaagccattttgaaatcctttttcaatgacaatgctaaggttcttttgtttgtttgtttttgttttggttgttgttgttttgttttgttgtttgcctcttccaacaaaagccatatactatgtattccacaacagaagggaggaaaagaaacagtgcattgattgcaccctgaggtcattttttttttctaatgaaaacacattattccagaaaaaatatctccatgccaacacatgttaaaccagtgagttgcacatcaagttttgaaaaaaaaccctacacaaagttcttcacaattggttgacatttcttaaaaataacagtaatgtttcagcattcctcagagatcacattattcttttatagtccatttgagttacttctgcatgccacatcaaaaaccaataagtcttcagaaacagtgccaaataaacagagt

SEQ ID NO: 676952 - DNA, 1169 bp, Homo sapiens
  misc_feature 82, 83, 84, 85, 86, 87, 88, 89, 90, 91, 92, 93, 94, 95, 96,97, 98, 99, 100, 101, 102, 103, 104, 105, 106, 107, 108,109, 110, 111, 112, 113, 114, 115, 116, 117, 118, 119, 120,121, 122, 123, 124, 125, 126, 127, 128, 129, 130, 131: n = A,T,C or G
  misc_feature 132, 133, 134, 135, 136, 137, 138, 139, 140, 141, 142, 143,144, 145, 146, 147, 148, 149, 150, 151, 152, 153, 154, 155,156, 157, 158, 159, 160, 161, 162, 163, 164, 165, 166, 167,168, 169, 170, 171, 172, 173, 174, 175, 176, 177, 178: n = A,T,C or G
  misc_feature 179, 180, 181: n = A,T,C or G
tctatttgtaactttttactatatatgtctattcatatcttctgcaaaaatgacaaatttttttcccccaggcctttatttnnnnnnnnnnnnnnnnnnnnnnnnnnnnnnnnnnnnnnnnnnnnnnnnnnnnnnnnnnnnnnnnnnnnnnnnnnnnnnnnnnnnnnnnnnnnnnnnnnnntgttttcacccttccaaggacagccattatgtccaagaatgttgattatccttgtttccttggggagtaaagtgaggagggaaggtctgattttggctcacccttacatagccatttgacatcccacttttatgggggaggaatgtcctcctattagactccttatcttagatatatgccttgaatttgtttcttgttccaataccctgtgaggccatcgagaaatgtggttaggaaggaagccagttccatttctccacttacctttctgagttcctgacttcgcttagataacagacctaagattttcttagtttactgtcagttcattgatacatttaagaaaatattattaaatatattttaccagaaatgttctcttgtttttatcagagaattaakgtaggcatctagcctgccatgtggtcagaaacgggcaaatgaattttagaactaaaaaagaaaaaaaaaacagactaaacttctgattcttcagacaaggtgcaataactagtttacatgtgctctttgaagtaaggccagttttctaagccattttgaaatcctttttcaatgacaatgctaaggttcttttgtttgtttgtttttgttttggttgttgttgttttgttttgttgtttgcctcttccaacaaaagccatatactatgtattccacaacagaagggaggaaaagaaacagtgcattgattgcaccctgaggtcattttttttttctaatgaaaacacattattccagaaaaaatatctccatgccaacacatgttaaaccagtgagttgcacatcaagttttgaaaaaaaaccctacacaaagttcttcacaattggttgacatttcttaaaaataacagtaatgtttcagcattcctcagagatcacattattcttttatagtccatttgagttacttctgcatgccacatcaaaaaccaataagtcttcagaaacagtgccaaataaacagagt

SEQ ID NO: 676953 - DNA, 677 bp, Homo sapiens
agaagtattcacactaccaattatatcaaattgactgggaaactggcttttagataatcctctgactttaaacaaatgacacaatcttttttcatccaaaaacaaattataaaggagcaactgaacwgaactaagcacctttttttttttttgagacggagtctcgctctgtcgcccaggctggagtgcagtggcgcgatctcggctcactgcaagctccgcctcctggtttcacgccattctcctgcctcagcctcccaagtagctgggacaacaggcatatgccaccacgcctggctaatttttttttgtatttttagtagagacagggtttcaccgtgttagccaggatggtctcgatctcctgacctcgtgatccacccgcctcggcctcccaaagtgctgggattacaggcctgagccactgcgcccggcgtagattacttctaaattactgatattttctgctccagtaactcaccagtttgctttgtggtggataatagatgttaatgtaaataattttaataagttataacagaaaacatccttgaagtgtgacttcaagtgtcaattttatatttaaaactacaacaatattatcaattgcccagaattgttctactccctttgaatggttgtttttcttcggtatcttgaattttttaaaccttgtt

SEQ ID NO: 676954 - DNA, 677 bp, Homo sapiens
agaagtattcacactaccaattatatcaaattgactgggaaactggcttttagataatcctctgactttaaacaaatgacacaatcttttttcatccaaaaacaaattataaaggagcaactgaacagaactaagcacstttttttttttttgagacggagtctcgctctgtcgcccaggctggagtgcagtggcgcgatctcggctcactgcaagctccgcctcctggtttcacgccattctcctgcctcagcctcccaagtagctgggacaacaggcatatgccaccacgcctggctaatttttttttgtatttttagtagagacagggtttcaccgtgttagccaggatggtctcgatctcctgacctcgtgatccacccgcctcggcctcccaaagtgctgggattacaggcctgagccactgcgcccggcgtagattacttctaaattactgatattttctgctccagtaactcaccagtttgctttgtggtggataatagatgttaatgtaaataattttaataagttataacagaaaacatccttgaagtgtgacttcaagtgtcaattttatatttaaaactacaacaatattatcaattgcccagaattgttctactccctttgaatggttgtttttcttcggtatcttgaattttttaaaccttgtt

SEQ ID NO: 676955 - DNA, 662 bp, Homo sapiens
ctggtctgttttggcatctgcattttctggaaggttattcccctccttgccagaatcagcttttcccctttttctctgtgggtacctcttcttccttctttgcaggggcctttttaggctttggctttggctttggaggagcgggtttagcatacaaccttgcggatcttctctgtggttcgtccttcaccttggctttatctcctttagcatccccttcagcctttgtcttgggcatggtggcggcgtcgacggcggcgggatgtaggcgctgggcgcgggacgcagcggcgcccaggctttggtcagtcagggtgtcgttcttgtctcttcttcttcactgctcgggctccggggggtttataaagtgaaacttttcacatgacaatctggaaaactgggttctaatcctggctgtcttgtaaaattgcaatgtggccttgaacaagtcgcttggataagtagccaaaaaggaggaaggggtctcctgtggaaggtccttgttttttttcatagttgttcaatttytttagttttctcaactgtaaaaaggaggacataacattatttaccttgggtttgctgtaaggaaattgctcgtcacataataacaactcaaaagttaacttgttagattttattatttttataatcattattaa

SEQ ID NO: 676956 - DNA, 662 bp, Homo sapiens
ctggtctgttttggcatctgcattttctggaaggttattcccctccttgccagaatcagcttttcccctttttctctgtgggtacctcttcttccttctttgcaggggcctttttaggctttggctttggctttggaggagcgggtttagcatacaaccttgcggatcttctctgtggttcgtccttcaccttggctttatctcctttagcatccccttcagcctttgtcttgggcatggtggcggcgtcgacggcggcgggatgtaggcgctgggcgcgggacgcagcggcgcccaggctttggtcagtcagggtgtcgttcttgtctcttcttcttcactgctcgggctccggggggtttataaagtgaaacttttcacatgacaatctggaaaactgggttctaatcctggctgtcttgtaaaattgcaatgtggccttgaacaagtcgcttggataagtagccaaaaaggaggaaggggtctcctgtggaaggtccttgttttttttcatagttgttcaatttttttagttttctcaactgtawaaaggaggacataacattatttaccttgggtttgctgtaaggaaattgctcgtcacataataacaactcaaaagttaacttgttagattttattatttttataatcattattaa

SEQ ID NO: 676957 - DNA, 639 bp, Homo sapiens
aaaagaaaaaaaaagatcccttcttcaaagaggttagcaggggagatgggcaagtaaacaatggggctgcgctagtgtggtaaccaagctgtggagccagagagaagccgttattaatctcatctgccggaatggggtgaggttcccaggggtggtaacatttcagatggttcttgaagggtgaatagaattctgacaggtagaaaagggggaaaggaaaagttggagcataaaaagccttctcatgtggctaaagcaagtgcttctcaggaatagaggccagaagcgtgagcatttggataggattactgtgaagggcctgggatgccatacacaactttgtttttgttttgttttgtttttttgagatgcggtctcactctgttgcccaggctggagtacagtggcatgatcacagctcactgcagccttgacctcccgggctcaagaaatcctctaacctcagcttcccgagtagctggaactacagacatgtgtcaccaagcctggctaatttttttgatttttatgaagagtgaaatctcgctatgttgcccaggctagtcttgaactcctgggctcaaacaaactccttcctcagcctcccaaagtgctagkattacatgtgtgaaccaccat

SEQ ID NO: 676958 - DNA, 1088 bp, Homo sapiens
atgcagtactaaatgataactggccaggcacaatggctcacacctgtactcacagcactttgagaggtcgaggcaggaggaatgcttgagcccaggagtttgagaccagcctgggcaacatagtgagacccatctctacaaaaaaacaaaataattagctgggcatggtggcacacgcctgtggtcccagctactcagtaggctgaggtgggagtatcagtaaaggttgcaatgagcgatgatcatggaatgcaatccagcctgggtgacacagcgagaccctgtctcaagtaactactaaataatcataactgcataaaattaactgtagtacacgctatactgctgtgataatgttgtagctatctaatactgcagtaagctcacgtgttatgaggatctgcttaaaacgttgtatgatgtgaatcatgtcatctcagcaagagcagttcatctctccaataaattgcatattgcagtaaaaaagtggtctcttgtgtttcttgtgtactattcatgatgcttagtgcaatactgtaaaccctgaataacaccatgggacccacacaatgtgccactaatgatgctggaaatgctcccaagaagcagagaaaagtcatgacattgtaaggaaaagtttaatagtttgatatttcctatagattgagatctgcagctcccggtatccgccacttcagaaacctgattcatcttgtaaacagatgatgtaaacttgtggcatgcatagatttagtacagaaaaactgtaaatgtayttatcttccttatgattttctgaataatgttttcttttctctggcttactttattgtaagaatacaatatataatacatatacaaaatatgtgtcaatcaactgtttgttatcagtgaggcttccagtgaacagtaaactattagtagtaagtttttaggccaggcacagtggctcatgtctacaatcccagcaatttgggaggccaaggcaggtggatcacatgaggccaggagttcgagaccaccttggccaacacgatgaaaccccgtccctactaaaaatacaaaaaattagccgggcatggtggcac

SEQ ID NO: 676959 - DNA, 1185 bp, Homo sapiens
cacaaaagacacattcttcacctagaaactgacaagagccatccaaaccagaaacttgaggaatcacatgtaaagcacagttggcaaggtttctactaacaaactgttaagtctgcagaagattttttatttttatttttttgagacggagtctcgytctgtccgccaggctggagtgcagtggcgcgatctcggctcactgcaagctccgcctcccgggttagcgccattctcctgcctcagcctcccgagtagctgggactacaggcgcccgctactgtgcccagctaattttttgtattttcagtagagacaaagtttcaccgtgttagccaggatggtttcgatctcctgacctcgtgatccgcccgccttggcctcccaaagtgctgggattacaggcatgagccaccgcgcccggcccgcagaagattttactaacaaatctgagctataaacatcagacacataaatcatcgatttctgaaacttaagttcttcttagaaagatgtgactggctgggcatggtggctcacgcctgtaatctcagcactttgggaggctgaggtgggcggatcacgaggtcaggagatagagatcatcttggccaacatggtgaaacgccatctctactaaaaatacaaaaattagccgggggtggcagtatgtgcctgtaatcccagctactcgggaggctgaggcaggagaatcgcttgaacccgggaggcagagtttgcagtgagccgagattgcaccactgcacacaagcttgggtgacaaagcgagactccatctcaaaaaacaaacaaacaaacaaacaaatgtgactaaatgtgaaactaaaaagcaacaagtaatcctgtcaaaggttcagttgattcagcttctatatagacagcataaagaccatttatttgtcaaaatctctctaatctctagtttacttaaataaactggtttatttacctaaattagcccctcttcaaaatagtcacaaatttctaggagaaaaagcaacccaactaccatcatttcaatttctagctccaaaccttttaaaaattataggcacacacacacatgcagttatgttctcaaatagagcagaccctaagactttctctttctctctcctctcctccccactctttttgagagtgtcttgctctgttgcccaggctgga

SEQ ID NO: 676960 - DNA, 975 bp, Homo sapiens
tatgtttaaatttacattaaaataaaatgtttgaagtgtaagttttttacgcctccctaaataaaaaaacaactaccaggctgaaagcctttttaatataatgatgtggccaagttaaactgcaagattaaacaagcaacaagaagtggctctgctccaaatcaaaactgagaaaatgtatctataaccttcccccttcccacaaaatggaacaagctcatctacccttctcttcagtataaatggccaaaagccaggatgaggcaaggaaacagaagagaggaaaagaaaaacagaagcaacctatcctgcttttagtagcacgaggtcactggacaccatccaattataatgataaaccaagtatttctttttctttatcattaataattgaccaaatttaatttgttacaatagtacatttagacagctaattagataatttatgtaaatattccaccctcagaggtggagcacaactccccattttcaagctttggctacacatactgacttccttccattaagtgtcagctatgcatagtaactaaactaaatggarcaaactagaaagacagacattcaaacttaccaggtcccactggcatcatcccaggaggaggagggcccatcattggcatcatgggagggccccccatatggggtgctggcatcataccagggcgaggaggacccgctgaaataaagaatggagcctgtggttaaggtgtgctcacatattaacattttctcttctttttttttgagacggagtttcgttcttgttgcccaggccggagtgcaatggcacaatctcggctcaccacaacctctgcctcccaggttcaagcaattctcctgcctcagcctcccaagtagctgagattacaggcatgtgccaccacgcccagctaattttgtatttctagtagagacagggtttctccatgttggtcaggctggtcctgaactccc

SEQ ID NO: 676961 - DNA, 722 bp, Homo sapiens
gagttcggttgttttcttgacttcctcaaaagaaacaaataaaaaactcttactatgtatcttagtgggtagcatcttttactgaatgtttgggaagatagagaagggtttacattgtagaactcaaaacatattcaaatgaggtaattagatattcccttgctttgcaaatcttttctccacatcatgtagtttggcaatatcctattttcttctctagttgttcatatctcccccaaatttctactaatttctaatgccaatcagattaactgtctttttgttttagcctcctgcttactcattaggctcttgggatcttaacttctatgtccatggcttatctaagtgggaggtttccatacacctctctcagtaaatgataaaacaaggagaaagcttgaataacacaattaattgaagtgacatatgtagaacagtgctccaaggaacttcaagttactcattattttcaagtgcctgcagaacatttaccaaaacagaccatatgctaggccaaaaagcaaggctcaacaaatgtcaaaatattgacttcatacaggattatattttctgatggtgataagactaaactagaaacaaataacaaaaagataatgrgaaagtcccaaatattggtaatataataataaacttctaggtaatccatgggtcaaaaacgaccacaatggaagttagaaaatattttgaactaaatagta

SEQ ID NO: 676962 - DNA, 572 bp, Homo sapiens
tactgcagaacataaagaagaattgagcaggctgggtgcagtggctcacgcttataatccgaacactttgggaggctgaggcaggcggatcacgaggtcaagagatcgagaccatcctggccaatatggtgaaaccccatctctactaaaaatacaaaaattagctaggagtggtagcgcgcctgtagtcccagctactcaggargctgaggcaggagaatcgtttgaacctgggaggtggagtttgcagtgagccgagatcatgagtctgcactccagactggcaacagagcaagactccatcgaagaagaaggaggaggagaagaagaagaattgagcgaagatttggagccataaaataagtgatgttttgaggaatttggctagatcaggaagatgatagaaaggagtgtaggggccagattactgaaggctacagatgttttctacccagaattattgatcctatgatcattgcagaggtacatatggtatagaaacagaagacataatctaattctattcctccaaggaatgtttagtgatatttgggaaaataatgcacacatga

SEQ ID NO: 676963 - DNA, 979 bp, Homo sapiens
ctaataatctttagaagaaacgacaatagagtaatgttacttgctgtggccaaagtccagcggttctagggatgacttgtgaataagatttcttgtctcattggacctaggtagaacagaataaaatgtattatctgttgagcttgattctctactctttttattgccattgtttttcattgttttcatcatcatgctrtgtagcaagtaacttggaaggacttttggaaggattagaagttctgattgattgtccatgcttccaatacggcagttccttaaaagctccctggtaatttggcaacatattattctgatcacttgtgtaaaatgtacttgtgtatgatgacctttctcaaactacatggtaaaatgagggtgaggttcagtgggaagcttgttgagttccttagaggtcatcaagattatgccatagaaaataattaatttttaatgtcagcacctaaattgatgtttttcgcatataaaaaccaaatctagaaagaaaagaagaagaaaaagtgagttttgctaattgcaaaatctgacaaaatagtcacctttggtaaagcccatttggtgagaaaggtaattttttttttttttttttttttgtgacggagtctcgctctgtcgcccaggctggagtccagtagcgctatctcagctcactgcaagctccatctcctgggttcacgtcattgtcctacctcagcctcctgagtagctgggactacaggcgcctgccaccatgcccagctaatgttttgtatttttagtagagacagggtttcaccatgttagccaggatggtcttgatctcctgacctcgtggtccgcccgcctcggcctccgaaagtgctgggattacaggcgtgaaccaccgtgcccagccttgagaaaggtaattattagagttattttttcttggatacaaacctatggattctcaaattcttttaaaaataaaaaagccatt

SEQ ID NO: 676964 - DNA, 979 bp, Homo sapiens
ctaataatctttagaagaaacgacaatagagtaatgttacttgctgtggccaaagtccagcggttctagggatgacttgtgaataagatttcttgtctcattggacctaggtagaacagaataaaatgtattatctgttgagcttgattctctactctttttattgccattgtttttcattgttttcatcatcatgctatktagcaagtaacttggaaggacttttggaaggattagaagttctgattgattgtccatgcttccaatacggcagttccttaaaagctccctggtaatttggcaacatattattctgatcacttgtgtaaaatgtacttgtgtatgatgacctttctcaaactacatggtaaaatgagggtgaggttcagtgggaagcttgttgagttccttagaggtcatcaagattatgccatagaaaataattaatttttaatgtcagcacctaaattgatgtttttcgcatataaaaaccaaatctagaaagaaaagaagaagaaaaagtgagttttgctaattgcaaaatctgacaaaatagtcacctttggtaaagcccatttggtgagaaaggtaattttttttttttttttttttttgtgacggagtctcgctctgtcgcccaggctggagtccagtagcgctatctcagctcactgcaagctccatctcctgggttcacgtcattgtcctacctcagcctcctgagtagctgggactacaggcgcctgccaccatgcccagctaatgttttgtatttttagtagagacagggtttcaccatgttagccaggatggtcttgatctcctgacctcgtggtccgcccgcctcggcctccgaaagtgctgggattacaggcgtgaaccaccgtgcccagccttgagaaaggtaattattagagttattttttcttggatacaaacctatggattctcaaattcttttaaaaataaaaaagccatt

SEQ ID NO: 676965 - DNA, 1823 bp, Homo sapiens
tgtgtggagagcttcctgtaaggttcctaagagggaggggacatttgaggatgtctgtcctccaccccagcctgagctccctgcaagcaccctgggcttcctcctcctcagccaaatccaccttgcctccatgcagcacacgtgccttaaagagttaacaacgaatatgagtccattgcctccctgtcccagtgagatttatgcctgagcaggtcaccatgccttgaacctaaagaaggagattttcaggcccaggtgacaggcagtcatgtggtggcagtgcacattcccagggagcccttcaactgcagccactttgctgcctctgccagccccttcccaggccagcccagtaaggtcctttcagtgagctctgtagatcccagaaccctccagcggggcacatggggagcctgggagcctggagtcctgaccaggccactgtgctaggggtaggattgcaggggaagaaggtgtggtatctgctgcctctgtggtcccagatagggagactagagctgggcagatccctttggaggaaaacccaaccagctctcatcatcttcccacaaagccccatgcgggccaggggaggagaagtattcaggactggctgacccttggaaatagcagactcagcctgaaaatagaggcagtgggagggtgaggggatgtgcggtcccagccctgcttttttcaacccaagactctggaagtacctggctccaatgcccctgggagcaggtgcaaggcctgtgcatcaggggtcacacaccacgccaacctccagctaagtttggccccagggagcaccagttagaggcttgtctatggaaggatgagaatttccttgaaggggacatttaataataaaggcccttgttggggggtgaggtaagggagctctcacctcacgaagttggacgggctcactgtcctcccctgagctcagagatcagggggtcagggacagccactgccctcctgctctggggtcagagcctgaggtccagtgtctcttcttaggaatgcagatcccaaggctgcacctggttcgaaggtgagcagaaattgtgactttccattgttcatttattcaacaaacatagcctgagagcctcctgtgtgctgggcaggatgacgcattctatagcagagcttctcagatgatctgtagggaaagaccacagttcgtcgtttttaatttctactccatcatggcctgatacatggtcctactgcatgggtgtactgcattgatgacactgttctcttcgtgtgtgtgtgccagctgggatttgccatgtgactttgacaaacccagaatggtctatagtccacccacatgcatggaagtggctgcagattgccatagaattttccaaatgcttactcaatgcctacactgacctcatctcagagtgatakcgacggtgtgcagccgcacctgcccacagcctgcacctctagcagcagtgccccgggacactggttcatttattccatcacagactttcaggcactgttctagatgcagttgacacagcagtgaacagagctaagtccctgctctcaatgatgttatattcaggtcaggagagatgggtcaaataaattaacaaatatatagcgagtcaagttttgacaacagctaaaaacaaaaacaaatcaggctaagaagatagacagttggggggtgagagccaggaaggtctcagtgataaagtgaccttcaagttgggccctgaaagaaagaaaaaagtgagtcatgaggatatctggggaagaacattgcaggcagagagaacagcaagggcagaagc

SEQ ID NO: 676966 - DNA, 566 bp, Homo sapiens
tgaataattatcccacatgaattactaagattttatatagtaattaagtcttttggaaaataatgtttaacaggttgaaatcttagatcatactagttaggaacagtatttttaggaattataaaactttatactattaatagttaagtttttcaggtaacacagtttatagagcatacttgataaaaggtattaaaatcttacgtacagtgcaaaagcctatttgtttcaaaagaaaatttatggttgttccttttcactccttgcagagaccattataaaacagaatatgaaaataaactacatgatgaactagaacaaatcagattgaaaaccaaccaagaaattgatcaacttcgaaatgcctctagggaaatgtatgaacgagaaaacaggtaaaaaaaaaaaaatgcttgtatggtattttatttatctttggaggttttagaagctttattgaaattaaatgctatttattatataatgtcttttttaatacattagagaaaasttgtcataaattgaaatctaagtataatgagaacatgaaagttctaaagtcttag

SEQ ID NO: 676967 - DNA, 566 bp, Homo sapiens
tgaataattatcccacatgaattactaagattttatatagtaattaagtcttttggaaaataatgtttaacaggttgaaatcttagatcatactagttaggaacagtatttttaggaattataaaactttatactattaatagttaagtttttcaggtaacacagtttatagagcatacttgataaaaggtattaaaatcttacgtacagtgcaaaagcctatttgtttcaaaagaaaatttatggttgttccttttcactccttgcagagaccattataaaacagaatatgaaaataaactacatgatgaactagaacaaatcagattgaaaaccaaccaagaaattgatcaacttcgaaatgcctctagggaaatgtatgaacgagaaaacaggtaaaaaaaaaaaaatgcttgtatggtattttatttatctttggaggttttagaagctttattgaaattaaatgctatttattatataatgtcttttttaatacattagagaaaacttgtcataaatygaaatctaagtataatgagaacatgaaagttctaaagtcttag

SEQ ID NO: 676968 - DNA, 613 bp, Homo sapiens
  misc_feature 3, 4, 5, 6, 7, 8, 9, 10, 11, 12, 13, 14, 15, 16, 17, 18,19, 20, 21, 22, 23, 24, 25, 26, 27, 28, 29, 30, 31, 32,33, 34, 35, 36, 37, 38, 39, 40, 41, 42, 43, 44, 45, 46,47, 48, 49, 50, 51, 52, 53, 54, 55, 56, 57, 58, 59, 60,61, 62: n = A,T,C or G
  misc_feature 63, 64, 65, 66, 67, 68, 69, 70, 71, 72, 73, 74, 75, 76, 77,78, 79, 80, 81, 82, 83, 84, 85, 86, 87, 88, 89, 90, 91,92, 93, 94, 95, 96, 97, 98, 99, 100, 101, 102: n = A,T,C or G
aannnnnnnnnnnnnnnnnnnnnnnnnnnnnnnnnnnnnnnnnnnnnnnnnnnnnnnnnnnnnnnnnnnnnnnnnnnnnnnnnnnnnnnnnnnnnnnnnnnnagtctgtgagtgttcattattccgctactactaaagcaatgaccaacgaaaagggcatgggctcatctcatgcccatagggtccagtagtgggcacctactggattgcttatctttcttctctttctgagacatgcccctcctcccttccctcctctccccatccacagactgcagtggggattgccatatccctgcaacatgactctacttctggccataattccagagtgaacagctgaccctagccagaccactaggttccttcccaaggaattcygcaattctgggagtctgagatcaatctctccctgcttatctagactgtaatgtaaaattcaggagcagccggcagccatgttatgccatgtggactaagaaagaaacagaggaagccagtgtgagcaagaaagaatgaggcagatacacagaaaccgatgagcagtagggagaagagacttcctggttgtccatgtgctccagtcttcagttctattcccaagacccaaatg

SEQ ID NO: 676969 - DNA, 616 bp, Homo sapiens
tgagctctgcccttgactgtacaagagagttaattatatcgagcacccagctcactccctggcacgaggcaggctctgaacaaatattttctggaagaatgaatgatttcagaccctcgaatgacaaactgaggaagagctgaggttttcattcgtggtttcagttaatattttttgagagaaaccttgttctaagaatagcagacccaattcctcttaaccagatgcacttgggattcccctgctctcggtctcctaaggaacagacytcaccagccacagtccttgtctctgactttagcccagttcaggactagtgtatgggtgggtctgtggtggcatggaagttattagtaaagagaaagcaaagaaggaacagaaacataagctcccttccttccgtctttttgtcactattttactctatcaccacttccctagattggttcccactcccacttcatcctaccttactctcctcgttcctctgcagaaaattccaggagagcaggttttcctctgaaatttagataaacctctcattcactgctggtgggaatgcacaatggtacagccactttggacgcagtttggcagttccttataaaactaaaca

SEQ ID NO: 676970 - DNA, 1088 bp, Homo sapiens
tatcttttttttgacagctttgggtgactactttttagaaggggtgcccagcacaatcccattgggacaattcacataaaccttactctatggctggaaaaggtggggaaaactagtagtgattctgcaaatgacatggtttactccaaacatgagtttgctacttcttgaggctccaaaaatgtcagggaatggctttccctgtgattaagatacccgtagggtaactcagaactctgaaatttaaattcccccttcattctggagaagttactactgtataatmacaaaatgattattccatttctctgtttcctttttttttttagacggagtcttgctctgtcacccagactggagtgcggtggcgtgatctcggctgactgcaacctctgcctcccgggttcaagccattctcatgcctcagcctcctgagtagctgggattacaggcgcccaccaccatgcctggctaatttttgtatttttagtagatacggggttgtgccatgttggccaggctggtttcgaactcctgacctcaggtgatccatccgccttggcctccgaaagtgctgagattacagaaagtgctgagccaccacgcccggccttgtttcttggattagtctgctatctgggagaataatattaatttatccgtaagctattagctaataataaaatactgaagcatctgcatacaattaaagaagtttatttctgaacaattagtctgaattttcagttggaatctatacttgttcccatttaatgaatttcatcctgaatagtgatcttttgcaagttacttttaacaaagtataatcatatttgacttgtaattgagaacatgagatttaggatttatcaagtttctctttgaaagaaaatttcatttttctattggatagtaatctatttacaataacattaaccaaaatccccccaaccaatgcaaagcaaacattgattgtggcttggtctggaaacctttcattacaaatttagctgggccatttaaaaactcttataggtgcaaggcactatgagagtttcttgggggccaccccatgacatatcagagca

SEQ ID NO: 676971 - DNA, 601 bp, Homo sapiens
tcaagggtgttaagggaaattatggaaggtttacaaattagttgggattatcacaccccttggtatcccccttcctctggaaaggtagaaagaataaatcaactctcataaagcatatcaccaatctaatcttagaaactaagatgccttgggattgtccttctatgggttatgatatggactcccatatttgggcagggctacagatcttcttactacggaaaccaagaayaaattattaagaaattgtatactgaccatatcctccaccctgtcatccctcaggttaaaaggacttctgactcaaactccacttctagagttcaggttcagcacttccagcccggcgacttggtgctgattaagacttgggaagaagacaagctccacccaaactgggaaggtccctaccaagcgctcctgaccactgagacagctgtgtgaacagtggaacgggggtgagctcagtatacttgagtcaagggactggtaagagaaaccctggaaaggaggggaaaagaccagtggaaagtgcacaggtcacctgaggaacccttgaagttaactctgagaaaaatctaaaaagaaaacatgggctggc

SEQ ID NO: 676972 - DNA, 601 bp, Homo sapiens
tcaagggtgttaagggaaattatggaaggtttacaaattagttgggattatcacaccccttggtatcccccttcctctggaaaggtagaaagaataaatcaactctcataaagcatatcaccaatctaatcttagaaactaagatgccttgggattgtccttctatgggttatgatatggactcccatatttgggcagggctacagatcttcttactacggaaaccaagaacaaattattaagaaattgtatactgaccatatcctccaccctgtcatccctcaggttaaaaggacttctgactcaaactccacttctagagttcaggttcagcacttccagcccggcgacttggtgctgattaagacttgggaagaagacaagctccacccaaactgrgaaggtccctaccaagcgctcctgaccactgagacagctgtgtgaacagtggaacgggggtgagctcagtatacttgagtcaagggactggtaagagaaaccctggaaaggaggggaaaagaccagtggaaagtgcacaggtcacctgaggaacccttgaagttaactctgagaaaaatctaaaaagaaaacatgggctggc

SEQ ID NO: 676973 - DNA, 1049 bp, Homo sapiens
ttcttgctaatatcttttggataagtggtctccaacctttttggtagcagggacaggtgtcatggaaggtaatttttgtacagatgggtgaggggtggggtggcttcaggatgaaacaattccacctcagaacatcaggcattagttatattttcataagacatgtgcagcctagatccctcgcctgatcagttcacaatagggttcwcgatcctatgagaatctagtgcctctgctgatctgacaggaggcagatctcaggtggtaatcctctcttggtccccactgaccttgtgctgtgtggttcagttcctaacaggtcaccatccggtactggtccacagcttggggattggggaaccctgctttacataaccagactccttctagagtagcctgattccagttcatctcccataacattactagactggtactcctaatgtacaaatctgaccatgttgctcgcctatataaagcatgtaggccaaacacattagcgtagtaataaagccctttatttatagctcactcctgccttctgttccagtcacatatgctgggcttctcttatttctaagacatagaagccaaaataaactatctagagtttctcaattttcagtgttcttcaattccaccaaaatgatgttttctctgcttagaatgtccagctccttttttttgtttttgttttggtagctaatccatacatgccttttatagtcaaattcacctggataacaaaaacatagtttttaatttaccagttttgtgttcaagatggcgttcatctttctgagattaagttattgcctgtgtaaaatgaggaaaattaaaaatggtctcatagaaaaaaaagagttagcaaagttttcctataaagggacattctgtaaaccatatagtcttagtcacaattggttctgttgttgtagtataaaaatagccataaatggcctggcacgacggctcatgcctgtaatcatgagcacttgggaggctgaggcaggtggatcacaaggtcaggagtttgagaccagccaggc

SEQ ID NO: 676974 - DNA, 1049 bp, Homo sapiens
ttcttgctaatatcttttggataagtggtctccaacctttttggtagcagggacaggtgtcatggaaggtaatttttgtacagatgggtgaggggtggggtggcttcaggatgaaacaattccacctcagaacatcaggcattagttatattttcataagacatgtgcagcctagatccctcgcctgatcagttcacaatagggttcacgatcctatgagaatctagtgcctctgctgatctgacaggaggcagakctcaggtggtaatcctctcttggtccccactgaccttgtgctgtgtggttcagttcctaacaggtcaccatccggtactggtccacagcttggggattggggaaccctgctttacataaccagactccttctagagtagcctgattccagttcatctcccataacattactagactggtactcctaatgtacaaatctgaccatgttgctcgcctatataaagcatgtaggccaaacacattagcgtagtaataaagccctttatttatagctcactcctgccttctgttccagtcacatatgctgggcttctcttatttctaagacatagaagccaaaataaactatctagagtttctcaattttcagtgttcttcaattccaccaaaatgatgttttctctgcttagaatgtccagctccttttttttgtttttgttttggtagctaatccatacatgccttttatagtcaaattcacctggataacaaaaacatagtttttaatttaccagttttgtgttcaagatggcgttcatctttctgagattaagttattgcctgtgtaaaatgaggaaaattaaaaatggtctcatagaaaaaaaagagttagcaaagttttcctataaagggacattctgtaaaccatatagtcttagtcacaattggttctgttgttgtagtataaaaatagccataaatggcctggcacgacggctcatgcctgtaatcatgagcacttgggaggctgaggcaggtggatcacaaggtcaggagtttgagaccagccaggc

SEQ ID NO: 676975 - DNA, 1049 bp, Homo sapiens
ttcttgctaatatcttttggataagtggtctccaacctttttggtagcagggacaggtgtcatggaaggtaatttttgtacagatgggtgaggggtggggtggcttcaggatgaaacaattccacctcagaacatcaggcattagttatattttcataagacatgtgcagcctagatccctcgcctgatcagttcacaatagggttcacgatcctatgagaatctagtgcctctgctgatctgacaggaggcagatctcaggtggtaatcctctcttggtccccactgaccttgtgctgtgtggtycagttcctaacaggtcaccatccggtactggtccacagcttggggattggggaaccctgctttacataaccagactccttctagagtagcctgattccagttcatctcccataacattactagactggtactcctaatgtacaaatctgaccatgttgctcgcctatataaagcatgtaggccaaacacattagcgtagtaataaagccctttatttatagctcactcctgccttctgttccagtcacatatgctgggcttctcttatttctaagacatagaagccaaaataaactatctagagtttctcaattttcagtgttcttcaattccaccaaaatgatgttttctctgcttagaatgtccagctccttttttttgtttttgttttggtagctaatccatacatgccttttatagtcaaattcacctggataacaaaaacatagtttttaatttaccagttttgtgttcaagatggcgttcatctttctgagattaagttattgcctgtgtaaaatgaggaaaattaaaaatggtctcatagaaaaaaaagagttagcaaagttttcctataaagggacattctgtaaaccatatagtcttagtcacaattggttctgttgttgtagtataaaaatagccataaatggcctggcacgacggctcatgcctgtaatcatgagcacttgggaggctgaggcaggtggatcacaaggtcaggagtttgagaccagccaggc

SEQ ID NO: 676976 - DNA, 614 bp, Homo sapiens
caaaatgctggaattgatgacccatttacgggttggccagaaggttggtttggaaaatggaaaggcgtggtagcttcagttcttacatctctcataattgtggcaggagtcctaacagcagtgggatgttatattatcccttgtgtgaggagactagcacagagattaattgaaatagctattaataaacaaamgcccatgagttactgacagaataacctgctaccatctgaaatcaaattaaactcagtctcctatgaggaagaaagtaaaaaacttctagagcaattcgaggaccaaaagggtttagatgaaaataagaccaaaagaagtaaatagaaaagaggagggaatttgtgagaaaacattttaaatggtccacttcaaggcatggtaaatttaagtactggcagccagcctgcaaatgtaacaaatcacagggctcatgcacctaggtcacagtaagtgaacagaatgtagaggaggagtcagctcacaaaagggaagaaagcttcatcattgggaaatcgaaacttaagcagaagtggacttgggtataactttctaagggggataatgaaacttaggcgatgtctgggaagattgtaacccca

SEQ ID NO: 676977 - DNA, 618 bp, Homo sapiens
aaagggccttgccagggcaggactaaccaaatcctaggtgaattaacatggtgtctccacatcaaatattctgtcatggttgcattggtttgcttacccactaatctcctttaaaaataataatgagcaaccattttatttatttatttattgagatggagtcttgctttgtcgcccaggctggagtgcaatggcgcaatctcggctcactgcaacctccacctcccgggttcaagtgattctcttgcctcatctctcatacaggtgggattacaggtgcgtgccaccatgctcggctaatttttgtagttttagtagagatggggtttcaccatgttggccaggtttgtctctaactcctgacctcaggtgatcctcccacctcggcctcccaaagtgctgggattacaggcgtgagccaccgcacccarcaagcaactatttttaaaaggtaaatataggcagaattccttatactaatttttaaccctcgaattgacattcaagtacaaaatcttagtttcctgtcattttaactgaaaggtaaaaacaaaaaactaatgccctttaaaaagaaaccttactttatagagtacaagatcttattttccaataatc

SEQ ID NO: 676978 - DNA, 1371 bp, Homo sapiens
ttatacagattcattttctaacattctcctacaaatcttctactatctcataaaatcgcagagatctggaaattttctattgtatttaagatatttatacctcttaatacaaaaccaagtgaatggtaatcactgcaggctatttaccaacttgaaaaaataaaatagttcactaatactccaattaaaagcagaacggttgaacacagtttatcataggtactcagattcaggaactggtaatagtcttaccttatcttgctcaataattgcctaataataaatctagccaaagaattctgaatcacacattttattcctttcaccatcttgagaaaaaaggtaccattatagagtattctagatatttctcattagagagaaagtcccatttggtaggctatgaagaattctacattttccaaaaaaaaagactaaaatattaaataaaaattaatagtcaatgtttattgagtggttattatgtctctcactgtgctaagtgcttaatatgcataatttcatttaatgtcacccaagattattccacttttagacgagtaagctaagactcacagactttaaaaaacgtgcctacaatccccaagccagcaagtggcagagaaaagatcttaaaacctagtttttatctgcagcatagtttgttcttgtcccttagaattgcaggaaaaaaaatgtaatattttcctacttgtagataatgcaaagctttatagcattaactctgatccatacttcctatttccctcctctactaagctagaaaccaaagcgagagaaaatgcaaagaaaaataagctctgttaaaatgcctttgagctcttcatatcgccttcaaatattgactcaaatgtcattttctcagtgaggtaggcctcattctgaccactttatttaaaatttcacctatcccactcttcataccccaagctctctcactctgtcctatttttaacgtaatttgctyattgattatgttaattctttattgcctccctctccacccctaaccatgagtgctagaattgaagccctatgagggtagggatttttatccaaaacacctagaagaaatgcctgtcatatattaggtgcataacaaatatgcattgagtagataaaatgtagttttcatcactttatacacacacacacacatacacacacacaattctgaggcctcttaattctagtagtaacaggagagagtaacaatgtgaaaacgaaagattaagggggaaatgaaaatgcattattctcattttttaaggtaatatttaccttaaataataaggcaaatttaaggtaatattaagtaaatatacttcctcatttggaatttattttaag

SEQ ID NO: 676979 - DNA, 1415 bp, Homo sapiens
aaaatatcttttatgcatccagtttatcagtgaccaccttcatttattattagtagtagcaaaagcagcattctggaaaccctgtcaggtggtccaactaaaagcaaaattagatacataaccatttaaagtgtgactctaagaaaaattaaatatattcctagaaaaatccttatttggaaatgttattacaaggaaaaggtcctaaaaaagtttcttctcctacttggactgactcattagtaaagagaaattgattaaaaagtacaaaatagttgtttttatatctaattaaatttgtgtttatactccttaaatctaggatatatacataaagagaagaattttgttttaaaaagtaacattttaatagcatgagaaaacttaaatagctgcaaaattttgatggcactttggcttaactgtgaaataccactgatgaataatatttttttaatttcytaagaataaaggtactaaatatggtagccaaacaggtgttaacagaaagaaaaatcaaatttgacccagaaggctccaatattaaggtttgaattgggatcagttcattcctttcccatggggtaacttgtataaatgtaattctatggtttcataaaagcaggtcaagtttctgtccctgggggtcttttggcaatttgaagcatggaagcactgttcctggctacaagttcaaatctgcatgtaccatactgtcaacagtgcgtaagaaaaaaatcagtgaacagcagacatatattcatctttgattatagtacacacttatcagagcattcttagagggtaagaataaaggtgtcagagatgacaatcataaaatattttgaaactattttcacttacttatactttctcctaccagaagatgcaaaaagtaatgtgaaatacttgtatttatgtaaatatctaaatgcaaagatgaactttttaccgaatactgtgtacaaggttttatattttgtacaaagtttttttaattccataagctttagatgaagcagaaacttctaagtcatcactgttttataagcgtctttctatgttgcaaaaaatgtatgcctgcttgcactcttaccgatgacgtaatgacttgacataggccatggaattattgagaaagtaattgatttcaatttaactggatctttactaggtgttttcaaagacaattatagtccactgcaagaagtggtaatacacatctccttatgtagacctgcagattaacccactgacctcattcctaactcatctcattgatggcaaagcttttagaacagtctcttttcctttatgttatgaaattgttttcctatcatttattcactgattctaaaggatatgctggctctaagtgcaagaagcaatgaaataaaccaataaaagaaagagag

SEQ ID NO: 676980 - DNA, 599 bp, Homo sapiens
tgacttgtaaagacttgggtagctgtgcttaaaacaacatgaggctgagtttagactgactctattcctcctttccttcctctttccttttcttttcttttctaacttgttgcactgaagtatttattcaaggatttttgactaacatatcatttgaatatgggtcaaatctatttgctgctcatgtctccaagtatcttcaattagttagcctttgaaccggtccacacatgttcagtaagttcataagatatgaagcaatgctttagcatttgacagatttttaaaataaactrttagtagcaggttcacagggttgggaaattttataataaaatttttgccattctggtgttgaaatgatcacatttctctatatcattttaagcctttgaactctgtgaatcgcagtgtcaaatagtgcaggaactgtctaccgaaaaatagaaatatgacactatggactaattagtgtatgattatactaaaatttttgggacatagcagttaaatcaggaggctttcctgggagataagaattcagaaaatcgattgttgcagaaaagtccatgaacttctgcaaggacaactaaagttta

SEQ ID NO: 676981 - DNA, 513 bp, Homo sapiens
aaattcccatgtgttatgggagggacccagtaagagataattgaatcatgggagtaatttctcccatactgttctggtagtgaataagtctcacgagatctgatgattttatgagggatttcccttcacttggctctcattctctcttgcctttcaccttcagctatgattgtaaagccatgttctcacaatctcacagttcccagccatgtggaactgtgagtccattaaacctctgtctttataaattatccagtcatgggcatatctttatcagcagaatgaaagtggrctgataacactttgcttcaaaatcaagctggaaatagcaagaccataaattcatgtatgcgcatgcatgtatgcatgtgtgtgtatgcccctgtgcaagcctatatgcatatgcatgtatgtgtgtatgtatgcctctgtgtgtgtgcatatgcttatacatacatatgtatgtataaataataggtagatacatattatggttatttctgtgcaaaacca

SEQ ID NO: 676982 - DNA, 513 bp, Homo sapiens
aaattcccatgtgttatgggagggacccagtaagagataattgaatcatgggagtaatttctcccatactgttctggtagtgaataagtctcacgagatctgatgattttatgagggatttcccttcacttggctctcattctctcttgcctttcaccttcagctatgattgtaaagccatgttctcacaatctcacagttcccagccatgtggaactgtgagtccattaaacctctgtctttataaattatccagtcatgggcatatctttatcagcagaatgaaagtggactgataacactttgcttcaaaatcaagctggaaatagcaagaccataaattcatgtatgcgcatgcatgtatgcatgtgtgtgtatgcccctgtgcaagcctatatgcatatgcatgtatgtgtgtatgtatgcctctgtgtgtgtgcatatgcttatacatayatatgtatgtataaataataggtagatacatattatggttatttctgtgcaaaacca

SEQ ID NO: 676983 - DNA, 600 bp, Homo sapiens
caccatttacaaagcgaattggtttttctgaggtataaaaatacacattgaaattggttttctggctaccttacttttactaagctgagttctttttattggtgtttttgttattcctgctctcctaattattgaaaaatcagtgaataaacataaacagcacagccaggaattcttggctcatgcaaagggatttttcttaatgctcattttatcatctactaaataattgaagggatgatgatattcatgaatcttggtgggatcgtggaagcatttgaatgagagctataaaactagtgataaaatgtttactgatggtatataatttgcctagactttacagaacaccrcaagttgtcacttttctattatcacgacagtttcaaaaataggaaaattgaaactcagaaaattttggtcaaggaaaacggcaagcagctaaacaaaaactcaaacctcggatatttggttccaaacaccatgccctactttctaccccatactactcctctgtacattagagatcagtacattagagatcagacctaaacatttaaggcagtatttatagtgtacacacacacacacacacacaca

SEQ ID NO: 676984 - DNA, 1928 bp, Homo sapiens
tgtcaccttaactcttaaaaatgcattccttatcttaaattactgacttccttatttctcatagccacatatgtttaagaaaaggaatctaaaaaattgaaactttagcagcaatcagtttgctaatccctaacactaaagaactaatgatccctgagaggcagcaaagctaaacaatattccaaactacactaagggaaatcaaggccaggagcagtagctcacacctgtaatcctagcactttgggaggccgaggcaggcggatcacctgaggtcaggagttcaagacaaacctggccaacatagcaaaatctctactaaaaatacaaaaaaattagctgggtgtggtagcatgtgcatgtaatcctacctactcgggaggctgagacaggagaatcacttgaacttgggaggtggaggttgcagtgagccaagaacacaccactgcactccagcctgggcgacagagtaaaactctgtcttaaaaaaaaaaggggggaatcaaattccagataaggcccagcctgtgaatgggattcagaggttccagattaagtctaggacctaagagtgactaagaagtttggcctgctgagccccaggaccaatctagtgatttggttttactccaaaacagatcaaggcagtttttcctacagttacactagaattctcattggagcataccctcatgacttttgtgaaacttcccagaccaggttttctcaagggaaaacctaattcagacaatagctgctttcatattactttgttttacgattaaagagaaagcaaatgactacctaaatatccaagctaataaagagttcctaaaactaggggtctactgaagtgtcattcttcaaagttcgcattgttagaggagaatcaaggaccacactaaactggataccactctatcctaagaagagtactgtgatcctaaaccaacactctgtggaaagccaatgccaagagtacttgataacaattcattaacattttaccccatgggactaaagcagtagaaagaaatcttgacagttactatcatctgactagacttttttaagagcttaaaactggaagaaaataaagatattatagcctatataaaatacccatttcttaacaaaaygtttacctgattgcttttctgcagctcttgtaccttcttggcaaattccttggcttctttctgacattgttgctctagtttctctactttcctctgaatcctttcatccattatctggagttcctgaatatgatttacaaattcttctaataatctaacagaggaaagtttgaatatgtatcaatctacctattattaatccttaggaactgaccagttaacttataatcatagtcttaataagaagagttccttgagcttgaaatgatcatgttaattttttctatagcatcttgttagaaatttcttcatcaaaagataaagtctttctgtaatttcataacttcctcatagttttgtccaggccacatggctttaaagcaaacatgacatttgaaaatatagccaggctttaactattgactttttcgtggatcatctcagaggtgaatgaaaacctcacccagaatccccaataaacccctagaatagaaatacactttatagcctacttaaaatagtcaagaaggcaaatgtactatataaaaataataatatacattccagagttcagtgactttgttcccccaatttacaaatatatttaaaacaatgtatttaatgtttttattttagaagtataatcatttctagtttatgactcattagaagaaatgtcaaattcttatactcaataaaattacttcctgcataccagttaaattgcttctttaaaagaacgtcaaagaaaaaatctcaaacttttaatgctctgttgtattgtctttt

SEQ ID NO: 676985 - DNA, 1928 bp, Homo sapiens
tgtcaccttaactcttaaaaatgcattccttatcttaaattactgacttccttatttctcatagccacatatgtttaagaaaaggaatctaaaaaattgaaactttagcagcaatcagtttgctaatccctaacactaaagaactaatgatccctgagaggcagcaaagctaaacaatattccaaactacactaagggaaatcaaggccaggagcagtagctcacacctgtaatcctagcactttgggaggccgaggcaggcggatcacctgaggtcaggagttcaagacaaacctggccaacatagcaaaatctctactaaaaatacaaaaaaattagctgggtgtggtagcatgtgcatgtaatcctacctactcgggaggctgagacaggagaatcacttgaacttgggaggtggaggttgcagtgagccaagaacacaccactgcactccagcctgggcgacagagtaaaactctgtcttaaaaaaaaaaggggggaatcaaattccagataaggcccagcctgtgaatgggattcagaggttccagattaagtctaggacctaagagtgactaagaagtttggcctgctgagccccaggaccaatctagtgatttggttttactccaaaacagatcaaggcagtttttcctacagttacactagaattctcattggagcataccctcatgacttttgtgaaacttcccagaccaggttttctcaagggaaaacctaattcagacaatagctgctttcatattactttgttttacgattaaagagaaagcaaatgactacctaaatatccaagctaataaagagttcctaaaactaggggtctactgaagtgtcattcttcaaagttcgcattgttagaggagaatcaaggaccacactaaactggataccactctatcctaagaagagtactgtgatcctaaaccaacactctgtggaaagccaatgccaagagtacttgataacaattcattaacattttaccccatgggactaaagcagtagaaagaaatcttgacagttactatcatctgactagacttttttaagagcttaaaactggaagaaaataaagatattatagcctatataaaatacccatttcttaacaaaacgtttacctgattgcttttctgcagctcttgtaccttcttggcaaattccttggcttctttctgacattgttgctctagtttctctactttcctctgaatcctttcatccattatctggagttcctgaatatgatttacaaattcttctaataatctaacagaggaaagtttgaatatgtatcaatctacctattattaatccttaggaactgaccagttaacttataatcatagtcttaataagaagagttccttgagcttgaaatgatcatgttaattttttctatagcatcttgttagaaatttcttcatcaaaagataaagtctttctrtaatttcataacttcctcatagttttgtccaggccacatggctttaaagcaaacatgacatttgaaaatatagccaggctttaactattgactttttcgtggatcatctcagaggtgaatgaaaacctcacccagaatccccaataaacccctagaatagaaatacactttatagcctacttaaaatagtcaagaaggcaaatgtactatataaaaataataatatacattccagagttcagtgactttgttcccccaatttacaaatatatttaaaacaatgtatttaatgtttttattttagaagtataatcatttctagtttatgactcattagaagaaatgtcaaattcttatactcaataaaattacttcctgcataccagttaaattgcttctttaaaagaacgtcaaagaaaaaatctcaaacttttaatgctctgttgtattgtctttt

SEQ ID NO: 676986 - DNA, 972 bp, Homo sapiens
tgctatgggggaaaatctggatataataatagccactttgagtggttgttatggtgatcaaatcagatacatcaatggagataagttttaaaaccacatcaagtcataaatgaatgtcagcattaacccaagtttttctaggacttaacctgtccgtgtacataaataaaatgtaatcaatagtaataatccaaattctacaggctttccctcccagaatatttacacagggtcttggccatctacagtgtcctttagctatttctgggggatttcccaaaactggaaatttttttttaaagagatgaggtctcactagattgctcaagctggcattgagctcctgagctcaagtaatcctcctgcaagagcctcccaagtagctgggtctacaagtacacaccaccacatctggcccggattctgtgaattcacatgagctcayaagcaagtccattcccatgtggttccctgcagctccgttgggctctgcgggctcccaccgcagctggcatgccagagcacatgagatgccaagctgagtcgtgttcagtgataagcagtgaaaagggactctttctctgtctttacattacactcttctgtaaggatacaaattcaagattgtttgcacccgtgtctctaaagattctcttgtgaaaactgttccattagcatttgcccagtatctcctttctccagagtccagacaccagcaagtctgcggccaggctgggaaagacttcatgctattctctccatttcccattgcctgttcccagcagcctctgcactaacctcctcatcacaggtcctcttttcctccagcaggaaggttatgcaattgtgctgttggggagctctaccacttggcagacagagcctgagaagtctgcattccctgtaggctcaggtgggaattctgtcaaactggctattaatttttactcctaataaagtgctacaggcatt

SEQ ID NO: 676987 - DNA, 2126 bp, Homo sapiens
acactcaatgtctgatctaactcaaatcatctgctgtggtcagaaccatctagaacaacccaaatttcttagaaccatattacttcccacctctgaatgtttgcatatgctcttccttctgcctggaattccctttctcctcccttcctttcttctttccttctcctgtgctagaggcattggatacaggatgggcaaatggacaaggcccctgcccacacatcagttccagactggcagaaaagatagctaaacaaggactaacaagtaagggcagaaactgcagggagtgctgagattaggcaatggggtgaacctctgtctctctatactggctccctgacaaaacccagcttttctttcgagatacaactcagtatcctcttttttgtgaggctttcttctgtaaggctgttctggacccctcaagttaggctgacttccccatcaatggactgcaaccctggggtagcacctttcactctgaccccacttctagactgtgagcttcttgagtgcagaaatgtgtctaattcatagcttggttcctaggacaatggcacgcacatagtaagtgctcagtaagtgttgctgaatgaagatgatttgatgaatgattaattttgtgactagcggatttctccctatgaagaacctcaaaaaaatataaayagccaattgtgtttagctcccttttttactgggtctcagtatagtctctgtaaacagggaattagagtaatcagcatatttcctctcttctattttcctattttgtctttcttttcttttgttctttgagtagaacctttccatcaactgcaattgtacccagaagcccaaggtgtaatgtaaataaagtctgaacttctctgaagctagagatgggactcaaatcctcaaagctcatctccactttccttttgccaggaagagtacatttcaataccctccatcctccctgtcaccctaatgctaaatcagcctgaaattaactatatctcaagtagccagaaccactgggaccaggtattacagccgggaaaataataacaaatatttatagagtgcctaatacatgccagggcagccagggctttttaaaaaggatcttgtttctgtttttttttttaaagatctgtttaattttaattctttttattttcagtttttatgggtacatagtaggtgttctttttccttaccacccctttctcttagtctcaaattatttcttttcaaattaaaactaatcttgtattgttagccaccttaaatacttttgagaacaagttaactttataaacagatactaatacaaaacacagtattcatttaatcctcacaacaaatctgtggagttagttttagaaattctgtttcatacctgagatcagcggggctcagggagaaagagaagttgcccaacatcactccaggaagttcgcaagcacaatcctagctctctgctagtggggcttgccatgcctggcaccactctcactagcaggtttacgtttactaatttatttaatccccataaaacccagtgagatggataccgctgctgtcgccactttacagatgagaacacagaggattgcacaggtgaagtagcttgtccagggccacgtgaccaacaaatactgggccagcccttgaaccaaatcatcctgatccatgcccaagcctgtgtttgtaccaatgtggagcccatctcgccagtctgacttgccctgcttctgtgacatgggtgacagcagagagctctgctggggacctgagaacctcatcttgtattaatgccttcttgcctcagaagcctcctgcctcggaagcccttaacttccctcctccctttaagggccttctccttccctcctgagcggggctggaggaaatgcagaaaggctggggccatcagagtagagtcaaggcaagtaccatgatcattaagcaaaccagaccatctgggggcaaatctgagtctccctgcagcctggctattgacctctcccaggttagttaatgtaagtctccattttctcagctacaaaatggggattataatagtaacaatcccagaggtattgtagtagggcatgaaaagtgcttagaacagtatc

SEQ ID NO: 676988 - DNA, 1594 bp, Homo sapiens
caaatccttgactcagagtcagtttttcagggagttcagactaagatggtgaccatgaatgacagctgggccatctggtaagactgggaagatgtgcctcttcctgcctggggaaattggagaggcactgaatgacaggtaggcactgtgaacctaaccaaattgggatgggtggaggctaggtcaggacatgcagacagcaggaactcctggctgctgacttcccagtgtcccacacagacacagggcagctgcgggagccttggattccatttctctccttggcacccttctgcaggcccatcacccagtgaaattgcccactggccaggagagggaaacaaacacatcaaaatacwtcattctcattatgcatggcactcagcactgatgaaatcagataatgcctgcttcacctgcaagagagacttctttcaaaggagagattagtggagggaataaaatgggaaagctcctgattgttttccatccctcttcatccatctggtctcagcggagaagcccaacattcaccctaaacggtcccaaagaccagggccactcaggccagccatgagttaggaacaacaaagaatgtgtagtgtgagcaggggcagaagtcagctcctctacaaaggaaaaagaaaatgaggctatgtctgtgtggcagactgctggctgcccactgcccatccctcaccccactgtcctcattctgccctcttccttagatatgctgctttatgactattctggccaatacattgtagtggaagttcactggagtgttcctggagacagctttggctgacctgataaaggtgctcccctgcccccacctccaccatgcttccaccttctttctgctggaagtgtatatatgatggctggaactgcagcagccatgctgcactcacaagggaaagactaacaatctcagattttggtattgacatccttgaacctctgccagcagctgcctatttctatatttcttcttataggagaaaaataagcctctcttttgtgggcagtggagttgggtattctgatggttgctgctgagcacagtccttgctggctgtgctttcttgttctgttacgactgcattgtgaatctgacactcatgtgccctacctcacagcctctcagccgaacctttcattgtggccattgctgcagaatcagccacatgcggtgtcctctcacagcaccctgcctcagcagcaccacttctctctacacctcggcagtgactgcccccaggaagctgcacagccagctatacagacataggcacaacgccagaggtgcgaggatgtcagcaccccaatggcagggggcaaccattgcccaatggtggccagaaaccgaaggataaatggtcccctctttcccctctggagtggacccttctgaagccctcagcaagcccatcatgtgatggaacctgcactgctcacagcagaacccagcttggtagggcacgcttgtgctggcttactctccttcctacttcattcttccagcccctatttctgtcccctcccaaaatatactatctgcatctaaaatggtgtttcagacttttca

SEQ ID NO: 676989 - DNA, 1339 bp, Homo sapiens
atcctctgaaagccacccctgtctcccaagccctgcccagagaaaagtcaacaagccttccctgagcccacctgtgccaggctatgcaacagaggggacgcagcccctgacctcatggagggtactatctaatgtggaaagagcttctaggtaggaaaagcaggaggcctggtgagcactcataagggatggagctacaagaaaggtttccaggaagaagtgtcttctttgttgaarcctgggagaagtggtccagtaaaaccatatggggatgctggagagagggaagggcatgccaggacaggaaagcttatgcaaaggccaggaggcaagagagagtatggcaggtttgggagctgcaagtcatcctggaaaactctccctcagccaattgcagaagccactgctccctggggcatctacctctggagggctccccctatggccatggctcccaccttgcctgaggcctccagggtaccagatttgagcagcacagggagtggcccaagtaggtgcttagatcctgggcctccagtttaggattccattcaagatgagaccaaaagggaggctttcaggttaactttctttttttttttttttttttttttttgagatggagtctcactctgtcacccaggctggagtgcagtggtgcgatcttggctcactgcaagcactgcttcccaggttcacgccattctcctgcctcagcctcccgagtagctgggactacaggcacctgccaccatgcccggctaatttttttttttttttgtatttttagtagagacagggtttcactgtattagtcagggtggtctcaatctcctgacctcgtgatctgcccgcctcagcctcccaaagtgctgggattacaggtgtgagccaccgcacccagcctttaggttacctttccacaggtcaagtggcaatgaaggtatgtcattcattcattcaacaaacactaaacacctactgtatgacagcctccttgctgggtgcaagagacacaaagataaataagccttgtcaggtccttgccctccctgagtccccagcaataagaagatagacatatatacagataattacagaaaacccaagataaataacagtcactgacgaaacacagaaggttattactacttcatattaatcaatttcagaagtaggcagcctgcggctggtatggcagctcaatactcatctgagacccatgtgcctatcttgtttctccaccttcctcagcacatagcttctactgtgtgatccaagatggatgctggagcaccagccatctcatccacattccagccagcaaaatgagaaatga

SEQ ID NO: 676990 - DNA, 2670 bp, Homo sapiens
caggggtgacatcttcatatcacacacagcctactctctggcttcttttcgtttcaccctgggcataggtaccaataagaggcccagggcagcctcccttaagactgcaatttctaattagcctttgctctgtgaaaagagtaaacttctacaagaatgttagtctctaacaaaaacaattaatcttgctggggttggtgatggggccagtggagcctctcagtcctccttgatgaaggcagcacaatagaaaaaaaggactggaaggaagtggaccaggaatccaatcccagtctgttactaactccgtcagtgacttcggaaaaggtccatcctctctctgggccttgatgtcctcattgatgaaattaggaccttttttttgagacagggtctcgttctgtcacccaggctggtatacagtcatgtgatcacagctcactgcatcctgaacttcctggactcaagcaatcctcgtacctcagcctcccaagtagctgggaccacaggtgcacaccaccatgctgggctaattgtttattttaatttttggtagagacagaggtctctctatgttgctcaggctggtctcaagctcctgggctaaagtgattagtctacttgagctctcataacaaatttgccagagactgggtggcttaaatggtagacattaattttctaacagttctgttccttggatttcctgtctcggcctcccaaagtgttgggatgacaggcacaagccaccacacccagccaacrtgagagtttcaacagccattcccttctctgattccagggagaactcatcaaagattgcagcacggggaacagatatttactacctgctatgtgctagagcattttctccaatgaactaattctgcactatgaccctgttatatgatgattaactcctgttttatagatggagacatcaaattttggagaaatcacataacttgcgtaatgtcacagagttggcaatgatggagctggggagtcagcctttccattgtaataggctttctcccctgttaccactggccaggtgggaagagaatctttattctctcctggaaactccctcaaggggtccctaagaatgaacatgggtagcaggaagaagtgtgcatgtttgtgtaagtgtgcacacataagtgtgtttgtacatgtgcatgcacgtttgtgtgtgcatttgtgattgtgtgtgcatgcatgaccgtgtttgtatacatgcacatgaacatgtgtgagtgtgcctatttacatgtgtgtttatgtgtatgtacctgtttgtgtctgcttatgtgggtcaagatgtgtgtgtgtgtgtgtatgcacatgtgtggtatctgatcaatgtttagttctctgagactaacttgacagcaggcatcccatgtctgactctcctcttgtttttcctttctttcttcccctactccttccttccagtttatgggcaggaccacctgaattggttttcttttgcaaggaaaacaaagcctgcttttacctgctggaagatccataacaattaaccagatctgccaggggaaagaaaaacctgggacccgctgagatggctttagcaaaggcaggatgttctccagaggtgggcactggttaaaaattcagaaggagcattggcatgtgatatgaggcgcagtcttttgctaaagagatttaatggcccacaattcaatttgaactgaaagaatccccccaatgactccttataaagtcttcctgagccctgaatcgatatctatggggctggtgaggagcaactatcgattagctgtctctgccaatgagcattacaagccaaggaggttggaggggcgccttgtgcaccattacacgagcagcacctaataaaattggtacctattgactggctgcagtgccatgtaggccaggaaaaagggtggccaatgcagggcctgatcactaatcaaattccctgggaacccattagaacaaatgaattgagtcctctctcctacctgtggacatataataggggaccccgaagccatatttccaatatttcaagccagaagatcctgagggtaaagccagagtttcattgtgttctaaccagtttagatcacaaaagaaacagagaaattactgcattaccaaccacaatttgcttatggcacttatttgacctcagctgtccaagaatatgacaaggattctagtataagaaaaaatggcttctgggcatttacaaagtcctcatgataatgtctatgcattaaaatcctaaaaaagtctatttaaggaagaacaattcagactgtcactcagaacctattaactcttgctttatatacaatactagtgaacttgatttttctggtctgacataacactttagtactagtaaataatgggtaagattgaagtaggtaagggatggctctgctaatggtagcaaccctgtcagcagcaagaggtaataactggcagagctaaggcaaagaaactgtaaaacgagggtgagagggcactgaaatttggaactttttcaggcaagggcaaacagttttaggctcttgggtctctgtattagtctacttgggtgccataacaaagtgccagagactggttggcttaaacaatagacatttattttcttacagttctggttct

SEQ ID NO: 676991 - DNA, 1753 bp, Homo sapiens
ctaggcaaatgctaattcctggatcaacccaccagaaatttgggccctaagagccaaggcaaggcctggaaatctgaattttaataaagaaaccaggtgcttctgctgcaggtggccctcacattttactagctccttaactgtcttgatgctagaatcgcctgggaagttataaagagcatagcttctggagccttccctggagactctggtcagtgagccagcctagggctgtggttctcaaagtgtagccccaggagcagcagcagcagcactggggatttgtggggctatgcccacactagacctgctgaatctgaaccccagggttaacaagccctccaggcaattctgatgcacgctaaagtaagagaacctctggctcagagtttgtgttgtttaacaattatgcaggtgattctcagcatcytgaggggttgggaaaccttgcaagtatcaagcatgctcccagctgccggtgcctgaggttctaggaaggcctggattgtcctcaacttgcctctgagcctccccaggaaaaggtgtctgggaaacagccaggatatcctttttataagcaagcaacattcagaagagccggggaccaggtgactaaaatttctcatcccagcctcacaacttacaaacccattcactcctccacgtctaacctcccagcattcccctgagaagtggaggccatggaaaaacttcccaaacccaggatttacagagaatggggccaggtcaacagggtctacttcttttcattaattcattccttccagctgacatctcattttcttgaaggtgacctgcggaggttggctccctcccccaccagctcaccccctcctttctctctctgccaggcaagatcacccctctaagaataataaggagatgagagcaggccgctgggcctagctgttattggaagatgaactgctccctctgctcctccttgtaatacgtaattccggggcagacccaccatctcaaggctgccacagggaagagaggttcctggcctcctgctcctgtgttccccaaagctgtggctcacacaaatcctctctccgtgtcctttcctcataggatgtctaaaatttcatcatcaatgcagctttccttccatcctctcacctacacacacatactttattgatttattaatgcattcaacctttatttactgagcacattcttgctcttggtattgtgctaggaattgaggatgcttgcagttgcatgtcatctgaaaaaatattttaaagcttagcagacaaagcttgaccctagaagcttcatcagagcttccaatagttggtaaggagatcttataggtagaagagatgggccataggctctagagcctgcactgttaaagaaaaccttttagattgttttcaaaccaaacttgagtctacctgcccagcctagcaagctaaacactgacattgggatcttcagagagagaaagtgaggcacttactgcagagtgccaagcaaggagaatcagacacacctcatgcttaagacccaaacttctcaatggctcacacgtaagagtttgtttgtttttctttttgtttttttgagatggagtctcactctgttgccaggctggagtgcagtggcacgatctcagctcactgcagcctccacctcacgggttcgagtgattctcctgcctcagcctcctgagtatctgggactacaggcatgtgccaccacgcccagctaattttgc

SEQ ID NO: 676992 - DNA, 1655 bp, Homo sapiens
tgctttgtaagttattttgaaaatccatttcttttagtaggcaacttaagctcattctcatatactgatatgactattatattaggtgtaaagttcctgtgtcaatttatcctataatttttctatgtattgttatgtttagtgtgtttctttctttatatgatatgtcttccttgatctttttaaaagatttcccttgagatttaaaaaaaatgtacgattttgctcagtagttacctttgcgttggtgtcttttaaaatatctttattcatcttttttcttacttaaccttttactatgtggattgtgcattctacatggtataatttgacatctgcctgttttctatgcaacaatgatcttattctactttcctctttctgtctttattctcagctcaaattttaagttgtattctttctaccttgttagaacatacaatacttataaattattttccatccttgtccctgattcttatttaaatcttagatctgcagtaaatataccacatgctcaccatcattattttgccaatgtttccgtttagcagattatccaagaagggttcatgtgtacaaagttctctcattccttgaataaatcatttgtttttctatagtcttaataattgaatgatggttttgctgcaataaagcccgtggctcacagttcattttcttttctttgattacttgaaaataatgttccactcttgccttgctttgcaggtttttcttgaatattgtgaggcttatataattttcatacctttctagatattatggttgttgtgtgtggaggccataagtattgtttttttttctctctttaatagtctaatagttgtataggctatgtctcagaattaattattctcagtcaatttttccaggcacattggcccttccataaatttaggtttcctcttatttctataaagagtgcttgtatttcatttaaaaaaatattagctctattccatggtgcctttcacctgttagagacatcaatttcttaaacatgtatgaaggaaggggatgtagtagaacagtggagaaatggcttttaaataggaatgtggctagttcatttaccataatggtcataatgggggagacatggaggtggatgtctaaggaagggctcttctaattgctgtggtttccttaatggtagggaaacatgtgctaagctaactctccaatctcccacctgagaaacaggatggagatgagtgcatttgccaattttagattcatggcctcaatgtgaatcacatatcaaaattcatgaatgatgtcctagaaggagctcagagagcaatcagttcctgattcttctacttagtagaaaacccagagttacttcctcctgaaaacagcattaatggggaacatcaactatggaaggttcagtttcaaggataaccttggaggaatctggaggactgtcctgtgggaggtggtcaaggtctgctttgyattgctttaggagcggtgagagaaagacatagggacatggattttgagtgagcataggaaagaatgtcagaggaccgcaaaaggctgttgtgtgaggtaatgaagtctttctcccagggagtcttatttcttcattaagtggctggacatcatgatgtcaggggtgttgg

SEQ ID NO: 676993 - DNA, 641 bp, Homo sapiens
tcatgaaaaaaaaaaaaaaacaaaacwaacaaacaaaaaacagagttctaacccccattcagcctcagcagcaagtcatgctctccctctgggaccaggatttaaatttctagggatagttctgactgtgacaggaaaggtataggactagataatgtctgatttccctttctagctctgacattccatcaggggccagccaactctttctctaaagggctagcaagcaaatactttacatttataggccataagttatctgtcatgactactcaactctgctgttgtagtatgaaagcagccattgacaatatgcaaaaaaaatgagcctagctgtgctcagataaaactacctataaaatcatgtgctttggtccaagggccatattttgccaactcccatgctatgtaataaatgtgatgattctgccctggggtaaccgattttcagtggacatgtggatattcactggtggtttcctgacgcatttttccctgccctcctgaccaacagcaccagacattcctttgggtcactgctcctcctcctttgtctcccatgtggtttgggtgtgatgactttaagctggactctgaggggattgagggagtcagcatacccctcttgaaccacagagatt

SEQ ID NO: 676994 - DNA, 1222 bp, Homo sapiens
tgtaatttgcttatggagatagcactgagagttactaaatggtttagaaagaactttagttgttagtcatatggaatatttttcttgccaacaggtacaaacccaggcacaatttttctttttttatgaaaatttttttgtttcctttcatttatttacctccctctttgaacacaggtgcccactcttttaaggctgcttggggtacctcgcataaaaaagaaggtagttaagaaaactaacttaggttaaaatgtggcaaacttttacacattggaacactggaaccagagtagaatatagagcaaatgcttcttacaaaatcggtttggtttttttcttttttctttcgataagtctaattctgtgscccagctggaatgcaatggcacaatcatagctctctgcagcctagaactcctgagctcaagtgatcctcccaccccagcctcccaagtagctagggctacaggcacatgccatcatgcttagctagctactttttaaaattttttgtagagatggggtcctaaaatacttgcaatagtaaaggaaaggaaaagtgggcttcaggggaactggaaaaaaatctatgctggccatggtggcatgtccttaaagattcatatttaatctaataaacccatgtgaaatttgccagtgattctgccttgatgatgtcaccaggagccttgcagaagcaaacacaaatcttttctgaggaatatactctaaaggcagatctcaaagaattttcacagataaaatgctgacagggcacaagctcacagtttaaaatccccaaacccacagggaaacaagccaccatgagtaagagtaacaaaaaatgtttaaaaaataggaagcattgtaatagtttgttacccagcatattagggttatttagagaaacaaaaccaaaaggatatatatagatatacaagaggagatttattatgagaattgactgatgtgattgtggaggccaaggagccctacaaagacgtctgcaagctggagaaccaggaaggaggtaatgtaatttactacaaggctgaagaactcaggatggggtgggatggggaggacgggtgttagtccttgagtctaaagaagcagaaccaggagctccaatgtccatgagcagaagatggatgtctcagctcatgaagcaggggtagcctggggggagtttgcctttcctccacctttttgttctatt

SEQ ID NO: 676995 - DNA, 634 bp, Homo sapiens
actaatttcactgtggccactgattagagttatctttcccaattcttacgccctagagtcatttgtgatagtcacagtaacagcttaatgaaaagtagtatttgatataaccttacaatggctctgatgcagcatatgccatagcttcagaatttcttacctccccctatattctccttctctaattgtttgatttttacttttcctaactgtccctttttgtttttctagatataaactstaggcttaaagttcatctttcatgtctttacagcaacatgttgaaatagtaagcggtactcttaaaatgcttagtatgtgagagctgagtgagtttaaaatgaaaaattaattttccttatctcacagataaagactcagagaagtgctaaccactgtaaaattaaggcatttaggggactctgtccatgtcagagctatatatggtagtaataaagctcagaaaaggactgagactttgagggaacaatcatgaggcagcgcccagccacacaggaatgcagaccaaagcatagtagagggtatctgcaaattgtggtcctcagggcaaacctggagatgataaagaaagaggcatgagactgggaggacgcaggtaaaaattttaccagat

SEQ ID NO: 676996 - DNA, 634 bp, Homo sapiens
actaatttcactgtggccactgattagagttatctttcccaattcttacgccctagagtcatttgtgatagtcacagtaacagcttaatgaaaagtagtatttgatataaccttacaatggctctgatgcagcatatgccatagcttcagaatttcttacctccccctatattctccttctctaattgtttgatttttacttttcctaactgtccctttttgtttttctagatataaactgtaggcttaaagttcatctttcatgtctttacagcaacatgttgaaatagtaagcggtactcttaaaatgcttagtatgtgagagctgagtgagtttaaaatgaaaaattaattttccttatctcacagataaagactcagagaagtgctaaccactgtaaaattaaggcatttaggggactctgtccatgtcagagctatatatggtagtaataaagctcagaaaaggactgagactttgagggaacaatcatgaggcagygcccagccacacaggaatgcagaccaaagcatagtagagggtatctgcaaattgtggtcctcagggcaaacctggagatgataaagaaagaggcatgagactgggaggacgcaggtaaaaattttaccagat

SEQ ID NO: 676997 - DNA, 621 bp, Homo sapiens
agtcatttgaacttaactcatcaatatgttagtttgtcagtggatgtccaagtaaatatttagagcagcggtgtccaatcttctggcttccctgggccacactggaagcagaagaattgtctcgggccacacataaaatatgcaaacattaacaatagttgataacgctaaaaaaaattgcaaagaatcttataatattttaagaaagtgtaccaatttttgctggtacactttcaaaaccatcctggcttatatacagcccacaggctgcgggttggacacacttggcttagagctttttggctaaaaacatacacacacatttttaaaagattgattttatggtaccatttwaaaaaaatttctgagagaactacatacacatctttcctttgcgtctttctgctgaagtgttcaggtgtgagcccacaaaagtgctgctttgaggccccaggtcttccagggtagccttgaagacaggacacctgcccacatctcctgctgtacaggaggccatggcattccccagtcctccacctgtggctgggtttcccaaatgtggctgtggcttttctttccttttgggtctttgctcattctacttttctgatatactttcca

SEQ ID NO: 676998 - DNA, 811 bp, Homo sapiens
atgtatggtcattcataatgtccaaggacaagcatgtggacttagaaaagcatggcttccttgactagagccagaaaatttacctatttgtcaccatcaaggaaagttattgtagtcagacaatcaaattttcaccaagagacttaaatggatatgaaggtaaaatgggtttttcattttgaatgtcactggtctaagaatgtaggtccattccactcctattgacttggaattagggaaacaataaattattacaatatattaattcagatttcaatcacattatgctcattcaatcagtctttcattaataatggtacatcaaatgaaatgcaaatgaccagaagtgatattaattatgaattaataaactttctctgcaaagtagcttccaggaatttaactaatttcagctcacacattcaggtgaatgcattttgttggatgtattttgttggatgtctatggtgtatccatcacagtgctagatgttatgggagcctatcagatgcatgtcaatcacaaggattgatgtgtgtcaatcacagggattgacgcatgtcaatcagagtgctagatgttgtgggagcctatcagatgcaacctcagcagatagaagctagacctcccagagactgctcagcacaggaaggaccatttgtatggtttgagtcatcagagaggcatagatgggggtgtgcatgcaggaagagagaaaggggaggagtaggaaagggaagatgagtatttagaggaagaagatcctattgcagcccatagtcattgggctgtgatttcaragtaactaaca

SEQ ID NO: 676999 - DNA, 958 bp, Homo sapiens
tttttttctcacttkaaaagatgaatgtgtcttcctctttcatagatggcctgttatgatgaattcagcagaatatagcaagtaactctaagcctctaattttcttttgtatttaactataaaaatattttaattaataaaataaaaacactcacgtataattttaccaccctaacacactactaacattcttacctattctcttccagatattgtccttatgccattaaaattgcataagcatattcaaaatcaataatttatatttttgatttttactgttgagtttctaaagtccatatattgttataagcctctttaaacccttcttgcaaaagacaaagaataagaggataaagaatgtatggaacctggccaggtgcggtggctcacgcttataatcccagcactttgggaggccaaggcgggcagatcacctgaggtcaggagttctagaccagcctggccaacatggtgaaactccgtctctattaaaaatacaaaaattagccaggtgtggtggcagggtgcctgtaatcccagctaatctggaggctgaggcaggagaattgcttgaacccaggaggcggaggttgcagtgagccaagatcacaacattgcactccagcctgggtgacagagtgagacatcgtctcaaaaaaaaaaaaaaaaaaaaaaaagagtatgggaaactaacttcagtgctggaacataagacaaggaaaaagacgagtcagaagtagcacagcccctgatcaaatgtgctgtcctcacatccctgtcatctggaaatgccattccttaacctggaaaaccttcttctcccagattcatattttgcctcaccatttactttgatccctgcaaaggtaatgacattgattccatgtttctaatttttctagaaattcggggatctgctcagcagaccggaacaacccaggaggcatctgggctc

SEQ ID NO: 677000 - DNA, 958 bp, Homo sapiens
tttttttctcacttgaaaagatgaatgtgtcttcctctttcatagatggcctgttatgatgaattcagcrgaatatagcaagtaactctaagcctctaattttcttttgtatttaactataaaaatattttaattaataaaataaaaacactcacgtataattttaccaccctaacacactactaacattcttacctattctcttccagatattgtccttatgccattaaaattgcataagcatattcaaaatcaataatttatatttttgatttttactgttgagtttctaaagtccatatattgttataagcctctttaaacccttcttgcaaaagacaaagaataagaggataaagaatgtatggaacctggccaggtgcggtggctcacgcttataatcccagcactttgggaggccaaggcgggcagatcacctgaggtcaggagttctagaccagcctggccaacatggtgaaactccgtctctattaaaaatacaaaaattagccaggtgtggtggcagggtgcctgtaatcccagctaatctggaggctgaggcaggagaattgcttgaacccaggaggcggaggttgcagtgagccaagatcacaacattgcactccagcctgggtgacagagtgagacatcgtctcaaaaaaaaaaaaaaaaaaaaaaaagagtatgggaaactaacttcagtgctggaacataagacaaggaaaaagacgagtcagaagtagcacagcccctgatcaaatgtgctgtcctcacatccctgtcatctggaaatgccattccttaacctggaaaaccttcttctcccagattcatattttgcctcaccatttactttgatccctgcaaaggtaatgacattgattccatgtttctaatttttctagaaattcggggatctgctcagcagaccggaacaacccaggaggcatctgggctc

SEQ ID NO: 677001 - DNA, 958 bp, Homo sapiens
tttttttctcacttgaaaagatgaatgtgtcttcctctttcatagatggcctgttatgatgaattcagcagaatatagcaagkaactctaagcctctaattttcttttgtatttaactataaaaatattttaattaataaaataaaaacactcacgtataattttaccaccctaacacactactaacattcttacctattctcttccagatattgtccttatgccattaaaattgcataagcatattcaaaatcaataatttatatttttgatttttactgttgagtttctaaagtccatatattgttataagcctctttaaacccttcttgcaaaagacaaagaataagaggataaagaatgtatggaacctggccaggtgcggtggctcacgcttataatcccagcactttgggaggccaaggcgggcagatcacctgaggtcaggagttctagaccagcctggccaacatggtgaaactccgtctctattaaaaatacaaaaattagccaggtgtggtggcagggtgcctgtaatcccagctaatctggaggctgaggcaggagaattgcttgaacccaggaggcggaggttgcagtgagccaagatcacaacattgcactccagcctgggtgacagagtgagacatcgtctcaaaaaaaaaaaaaaaaaaaaaaaagagtatgggaaactaacttcagtgctggaacataagacaaggaaaaagacgagtcagaagtagcacagcccctgatcaaatgtgctgtcctcacatccctgtcatctggaaatgccattccttaacctggaaaaccttcttctcccagattcatattttgcctcaccatttactttgatccctgcaaaggtaatgacattgattccatgtttctaatttttctagaaattcggggatctgctcagcagaccggaacaacccaggaggcatctgggctc

SEQ ID NO: 677002 - DNA, 630 bp, Homo sapiens
gtttaaaatgtatttattaaaaatctacttttgctgtacataaggacatagaaacttctagaattggcactgcaatttagaaatcctttcagattattcattatttaaatatatttatttttaagttgctctttccacaaccaagtaacaaatatatatgtatatatgtgactttaatttaaatataaatatatttatatattttataagatatatatttaaaaatatataaatatacattttaacatacataaaatatatataaatatatatttttacatatacatttgtgacttggctgtggaaagagcaaccttaaaaatatatttaaatgaggaatacatacatatatatakagagagaatacattttatacaggaatacaaggaattgtacaaaagaaatacattttatatatatatagagtccagactatttttgctttattagagataaataatgaatttattctcctagacatgaaagacaagcagaaacatcaggaagacagtttgacagtaggaagctgtatgcctgtgtcacttttgccactgcaagtatgacactcttctgatcactccaaatgcatgcttgtgaacagctgtcctcttaatgacaaagctctcctaa

SEQ ID NO: 677003 - DNA, 1052 bp, Homo sapiens
gtgcacaaagagatttgaagagacagaaggctgaaagacaaagacttatttactacctgcaaaggagtctggcttaaatgtgaaaacaatggggagttcctgagatatttttagcagaagagacacaatagaaagaaccctgtattagcaatagagagaatgaaggaaattgatgggcacaggtctggaggaagggagagcaattaggaaatcactgcaaaagtccagatgagaaatgttgaggtcccaaccagtgtgggcaactgtaggaatgagtagagctactcatataatgatctggtgaccgactgacctgatgactgattggacacaatcgatgtctccaagtcatttgtgaattatggatctcagttggtctttattggtatgaccgatttcccttttcttttcctttcctttcctttttcacatcctcagtttacaactaattacattggggctacaccagcagcaatgcccctgcattctgctttactcattcagtaaacattcacgaagtggctaatagcttaaataaatgacaccagtaagaatctcttacgggccaggcatgacactcaatgcgttatgtatgctatcacatgcatccctcttaacaactccttaaaatagctttgttgmcccagttcccaatacagaggctcacactactcagctgacccaggattggaatctagggtcgtttgacttcaaaagttttccattaactaagttgccattccttgcccatatgcagtttacgaaagaaacagaagatacaaggagtattcaggtctcaaaggccaaatgcaagcaacaactagaaaaatagaattgaacgtaccaacaattttggattgcagatatgtagcatacgtgtgttcttgctgggacaatgggaacacaagcagcaacaactggcttatgacctaacataagaagatggaattatttagataagagtttttaaagaaagtcttagtggcacctcagaaaacataagcagcacagaatagtggataattgaaagcaaatccttatgccaagagaat

SEQ ID NO: 677004 - DNA, 661 bp, Homo sapiens
tgctcgtgtgctgcccagtcccgctggctgacccatcagacagtcctgggccatgttttgattgctggcagtgagagatacagaaggcccagccacttccatgcaccctgaatgctccttacaaacaccttgggaggtccrattattacccgcccctctcagagatggagaagctgaggctcagacaggcaaaggaatctgccaaggtctcacatccagaacaggcagggcatcactgatcccactctcctgccccagtcaccacggtgtgatgcatttgcctgtgagcccagcctgcagcggaggttcacatgtggggtcagaaaggagagccctgtgacaagaacgctaggaatgcaggaaggggccttgaggtgacctcaggaattcttggcgcccgccaggacaaatgatgggaatagctgggagggtgacatcccaccttggtagccagtcgtcaccagcagcatgcatttgtgctccatcagggctggagaatgactaagctgagggctgagggttaggaagaaaaagaaagcatggatgtggcccaaggccacaagctctctcaggggagagaaaggacaggtgtgagctaagcagtgaccccgcagtcccctgagagccagtgcctgctgccgagcgagggcactatatgtcg

SEQ ID NO: 677005 - DNA, 661 bp, Homo sapiens
tgctcgtgtgctgcccagtcccgctggctgacccatcagacagtcctgggccatgttttgattgctggcagtgagagatacagaaggcccagccacttccatgcaccctgaatgctccttacaaacaccttgggaggtccgattattacccgcccctctcagagatggagaagctgaggctcagacaggcaaaggaatctgccaaggtctcacatccagaacagkcagggcatcactgatcccactctcctgccccagtcaccacggtgtgatgcatttgcctgtgagcccagcctgcagcggaggttcacatgtggggtcagaaaggagagccctgtgacaagaacgctaggaatgcaggaaggggccttgaggtgacctcaggaattcttggcgcccgccaggacaaatgatgggaatagctgggagggtgacatcccaccttggtagccagtcgtcaccagcagcatgcatttgtgctccatcagggctggagaatgactaagctgagggctgagggttaggaagaaaaagaaagcatggatgtggcccaaggccacaagctctctcaggggagagaaaggacaggtgtgagctaagcagtgaccccgcagtcccctgagagccagtgcctgctgccgagcgagggcactatatgtcg

SEQ ID NO: 677006 - DNA, 661 bp, Homo sapiens
tgctcgtgtgctgcccagtcccgctggctgacccatcagacagtcctgggccatgttttgattgctggcagtgagagatacagaaggcccagccacttccatgcaccctgaatgctccttacaaacaccttgggaggtccgattattacccgcccctctcagagatggagaagctgaggctcagacaggcaaaggaatctgccaaggtctcacatccagaacaggcagggcatcactgatcccactctcctgccccagtcaccacggtgtgatgcatttgcctgtgagcccagcctgcagcggaggttcacatgtggggtcagaaaggagagccctgtgacaagaacgctaggaatgcaggaaggggccttgaggtgacctcaggaattcttggcgcccgccaggacaartgatgggaatagctgggagggtgacatcccaccttggtagccagtcgtcaccagcagcatgcatttgtgctccatcagggctggagaatgactaagctgagggctgagggttaggaagaaaaagaaagcatggatgtggcccaaggccacaagctctctcaggggagagaaaggacaggtgtgagctaagcagtgaccccgcagtcccctgagagccagtgcctgctgccgagcgagggcactatatgtcg

SEQ ID NO: 677007 - DNA, 362 bp, Homo sapiens
tgattcataatcagttgkttatgcactgtagtccaatactaattgtcactattaatcagactggcctgattattagaccactttccaattctgattttcttccagagctggactgaagttcatggtggccttagaaggatcaaggtgacttgctactttcactccactaccattaggagttctttaaagtcacttaaaaattcataaatattaattcattttttctgtaattgcctatgtcagttgttactaacaaaaactagtgtaagggcaccacggccaacctctcagcgtccttatttgaagagatgacagcccccagaagtgcaggcttaataacacaactgcaatgcttcccaggc

SEQ ID NO: 677008 - DNA, 2161 bp, Homo sapiens
ttaggaaataagagatctgaaggcgcaatcagagttggctcttggtacctgggtgaagtctggtagaggactggttctctgctgtgttgcatgctacggggttaacctctatctgtttttttttacctgctgaatttcaccaaggagtcaagtcttttcttgcagaatatgagctttgatgatttgaatattttcccccagcttttcttctcatcccatatcctacctttattcattcatacctaagtgatatttcataaattctctcaaggaaaatagttcatccatttttgcatttggatagaacatcctgaaaaagaacacctgtaaaatacctttgctattattataatgctaaraaatacaaagaaggtaaccagagcatcagtgaagagctctcaggaagaattcattgtgagtgcatttgtaacaagtcatgacatagagttaatgccatgacttacagtccattgtaactagcctgttagaatccgtgaaaagacacattaatctatatacataggtatatagcagtaatactttttttttttttgagacggagtctcgctttgtcgcccaggctggagtgcagtggcgcaatctcggctcactgcaagctccgcctcccgggttcatgccattctcctgccttagcctcctgagtagctgggactacaggcgccagccaccacgcccggctaattttgtttgtttgcatttttagtagagacagggtttcactgtagccaggatggtctctatctcctggcctcgtgatccgcccgcctcggcctcccaaagtgctgggattacaggcgtgagccactgcacccagccagtaatacatttttatataatctcttggttaaatgtaaatgtaataattggttttattatttaaatatagtctagttttcagaatttgaagtagtccaaatgtgataattacagccctttcctccactgagtttgctgtgataagatatgtagatatgtaaatacaatatgatgtgttactgaaggtatttcttatggtgttatttgatatatttttttttcctcaagattagggtagagaaaaggcctagatgtaagccccaagtgtgtatgtaaggggaagggtagatgtgaagctgggaagctatataaaacaatatgaaaaaggatcattttcattcttcccgaatcagaatgaaaaattaggatttttttttttttccctacaggaggaacaagtgaaagtgaacctatgctaagccatacggtcaggaagcatcttcggaaaactagacttgaattactacacaaagaatatgaggtaaacagtaatcaaagtttaaaattatgttagcagtgaattcaaggtaaaaactgacctacctcagtccccagacttcttagagtaaatatccaatgaaattttattttaaaagcctataaaaagaaattgtttgataaattcttttttcttttttcctttcgtattttaaatagaggaaagagattttttgttttattttttttctttaagtaccaaggaatgggggaatgggattccagaaaaaaggaacagatggaagcatttctttcttttttttttttttttaagttaaaatttgtacctccacagacatatcattttgtatttgcttcctcaagaagttgggagaaaaaggaaatctccttgtgaaagccagtctgacctctgcagtcatcagttgcttctgcctatgaagttactgatgattataagcctgatcaattctagtaaagtaaatactataccttatgtcaactgccagcacagagattttagtgtgaaacatgctgtttcctaattattgtctaaaggtgaatgaacaggatgattggacatggtgatgctatttttacaaataaattcatgctaatagaatacatacacttttgaatagtacacattaagcccagttgtcattttatgttgactgaagaaggagatatcgatcccctcttgactcaaaatatctttcagtttaactgtgtacatggaaggtgcctcaactgcctcaaaaatttttggaatgcagtggggtataaatacatgattgaatatatgtttattcatatatgtgttccttacatatatgaatttgcttgttttatgaaaatgctatttaag

SEQ ID NO: 677009 - DNA, 1352 bp, Homo sapiens
aaaggctggagatgacttgagagttgaggactagcaacacctggaggcattgtcactcacactgctgtgactatctctggaaagcataatcagcttattctaacagattcaactcaggaacagccaaatgggggagacacacagggtaaggtatgcggggatgaggggtgcacggagctcccatgccctccctggcatgccaccccctcccagcacctcgatgtggtcaccaacccggaagctcctctgtctgaattttttttataatgactttatcttttctgagattctgatgaagacarcttttcttgtgttatctcttgaagtatcatcgtttcaggcatttctttccacagcacccccgagtgccaagggcaggtctcccagagttacacattctcctcttatctttcccatggtaataaaacatcctgacctattaaggacagtctgcctggcaacaacactcaagggcaacagcagaaatccaagtattacagttaggctgctggtcactcacagcagtccccaggcaaccaggggaaacagacttctacttgtctactgtagaacgaagacagcccacacaaactcagagtcctcttccaggtgacatgtggctcacaagagccattccctcctacagaaattatgacagaaaccataaatgggaaatttcatcctgagaaagatgaggcttaagactgaaagaaagagtataaaacacaaaaagtatgatccatgatattgtgttaaaagctacggcaggtgaaagaaatgtccaaactaatgagtgttttaacccctgaaaacagaaaaatagacttaaatagagaaatgcataccttgttcttagatgggaaaattcagtatcataaagattctagtttttcctacataaacttataaagtttaaatagcaataaaagcttaaagttactttctggaggtagacaaattgattagaaagtttaatgggaagaataaacaaacaagaataaataggaaaaccctacaaaaaaaaaagcaagaaggtagctaattctaccagttactaaaacctataacaagtttctatgaggctgggcttgcctgtaatcccagcactttgggaggccgaggcaagtggattgcttgaggtcaggagttcaagaccagactggccaacacagtgaaaccccacatctactaaaaaaaaaaaaaaaatacaaaaatcagccaggcatggtagcgcgcacctgtaatcccagctactcaggaggctgaggcacaagaattgcttgaacccaggaggcggaggttgcagtgggctgagattgtgccttgcactccagcctgggcaaaaaggactc

SEQ ID NO: 677010 - DNA, 1472 bp, Homo sapiens
ttcatccagaagagaattttagttttgttgttgttcttttgttgtgttttaaaaatgattttgaatgcayttatatgaagagaggaggaatagttagaaccaaaagttgaagactcaggagagagagggaatgactgatgaagcatgattgctgagtaagctgacgggtgtaggaatcagagcgcaggttaagagatcagcattgaacgggagacagaaagcttacagaggcaggtgtgaccaggaagtttatatatttcaaaaccaaatactgttttctcattgaaattgaaggataaggttatttgctgtgagtgaaagttgaggatggttaatagtggcttctatagaaaaagataatcgaaactgaacagggacctatagatgattactaagtagtgagtggtgtctaccaaagattggagatcaagtttagtaatgttgttactcgctgtgcttataacattttctttaagtgggagtagagaacaaacaaatgaattgatccagggttggtggtttatagggcatattggacagaaagagaaagggagagattgctagatatttgagggattgttaactcatccatctccctgctcttctcagtttttgagactacagtacaaagagtaggggacagctttggctgaacaggatccaacaaccactaaatgcagagcttctgatgaattgttggagacctaaggccaaaaccttgcttattccttctttcttccacttgaaggtggggtagggtgagatagaaagaacttcaccagtcctactagtaggattagccacttgcttttccctgagcagtgaagaataatcgtctctctgctggagcctcatggagggtgaataaggttttcccccaatcaacatttatttgttttttaatgctttttatttttttaatgacacacaatgattgtacatatttgtaggatacatagtgatgtttcgatatatgcaatgtacagtgatcagatcaaggtaattaggatatccatcatctcaaacatcaaccatttctttgtgttgcacacattcaatattttcctgtggctgtttgaagctatataatatgttattgttaactatagtcatcctacggtgctatagaacactgaaaattattcttcctatttagctagaattttgtatcctttaagagtttaatctgaaagagggtttcagaatttaagatttgaagcatgcattaatttctggtgaagacaaggtctagggttttggagtaggaaattattcaaatccttatacaggtctttcttggcccttcagctgggcttgtgatctctcctgtaatgtctttcttacagaatttagcatatgctgccttatacttagttaagtatttatttttgaccaggcacagtggctcacacctgtaatcccaacactttgagaggctgaagcaggaggattacttgaggccaggagtttga

SEQ ID NO: 677011 - DNA, 1472 bp, Homo sapiens
ttcatccagaagagaattttagttttgttgttgttcttttgttgtgttttaaaaatgattttgaatgcatttatatgaagagaggaggaatagttagaaccaaaagttgaagactcaggagagagagggaatgactgatgaagcatgattgctgagtaagctgacgggtgtaggaatcagagcgcaggttaagagatcagcattgaacgggagacagaaagcttacagaggcaggtgtgaccaggaagtttatatatttcaaaaccaaatactgttttctcattgaaattgaaggataaggttatttgctgtgagtgaaagttgaggatggttaatagtggcttctatagaaaaagataatcgaaactgaacagggacctatagatgattactaagtagtgagtggtgtctaccaaagattggagatcaagtttagtaatgtygttactcgctgtgcttataacattttctttaagtgggagtagagaacaaacaaatgaattgatccagggttggtggtttatagggcatattggacagaaagagaaagggagagattgctagatatttgagggattgttaactcatccatctccctgctcttctcagtttttgagactacagtacaaagagtaggggacagctttggctgaacaggatccaacaaccactaaatgcagagcttctgatgaattgttggagacctaaggccaaaaccttgcttattccttctttcttccacttgaaggtggggtagggtgagatagaaagaacttcaccagtcctactagtaggattagccacttgcttttccctgagcagtgaagaataatcgtctctctgctggagcctcatggagggtgaataaggttttcccccaatcaacatttatttgttttttaatgctttttatttttttaatgacacacaatgattgtacatatttgtaggatacatagtgatgtttcgatatatgcaatgtacagtgatcagatcaaggtaattaggatatccatcatctcaaacatcaaccatttctttgtgttgcacacattcaatattttcctgtggctgtttgaagctatataatatgttattgttaactatagtcatcctacggtgctatagaacactgaaaattattcttcctatttagctagaattttgtatcctttaagagtttaatctgaaagagggtttcagaatttaagatttgaagcatgcattaatttctggtgaagacaaggtctagggttttggagtaggaaattattcaaatccttatacaggtctttcttggcccttcagctgggcttgtgatctctcctgtaatgtctttcttacagaatttagcatatgctgccttatacttagttaagtatttatttttgaccaggcacagtggctcacacctgtaatcccaacactttgagaggctgaagcaggaggattacttgaggccaggagtttga

SEQ ID NO: 677012 - DNA, 1472 bp, Homo sapiens
ttcatccagaagagaattttagttttgttgttgttcttttgttgtgttttaaaaatgattttgaatgcatttatatgaagagaggaggaatagttagaaccaaaagttgaagactcaggagagagagggaatgactgatgaagcatgattgctgagtaagctgacgggtgtaggaatcagagcgcaggttaagagatcagcattgaacgggagacagaaagcttacagaggcaggtgtgaccaggaagtttatatatttcaaaaccaaatactgttttctcattgaaattgaaggataaggttatttgctgtgagtgaaagttgaggatggttaatagtggcttctatagaaaaagataatcgaaactgaacagggacctatagatgattactaagtagtgagtggtgtctaccaaagattggagatcaagtttagtaatgttgttactygctgtgcttataacattttctttaagtgggagtagagaacaaacaaatgaattgatccagggttggtggtttatagggcatattggacagaaagagaaagggagagattgctagatatttgagggattgttaactcatccatctccctgctcttctcagtttttgagactacagtacaaagagtaggggacagctttggctgaacaggatccaacaaccactaaatgcagagcttctgatgaattgttggagacctaaggccaaaaccttgcttattccttctttcttccacttgaaggtggggtagggtgagatagaaagaacttcaccagtcctactagtaggattagccacttgcttttccctgagcagtgaagaataatcgtctctctgctggagcctcatggagggtgaataaggttttcccccaatcaacatttatttgttttttaatgctttttatttttttaatgacacacaatgattgtacatatttgtaggatacatagtgatgtttcgatatatgcaatgtacagtgatcagatcaaggtaattaggatatccatcatctcaaacatcaaccatttctttgtgttgcacacattcaatattttcctgtggctgtttgaagctatataatatgttattgttaactatagtcatcctacggtgctatagaacactgaaaattattcttcctatttagctagaattttgtatcctttaagagtttaatctgaaagagggtttcagaatttaagatttgaagcatgcattaatttctggtgaagacaaggtctagggttttggagtaggaaattattcaaatccttatacaggtctttcttggcccttcagctgggcttgtgatctctcctgtaatgtctttcttacagaatttagcatatgctgccttatacttagttaagtatttatttttgaccaggcacagtggctcacacctgtaatcccaacactttgagaggctgaagcaggaggattacttgaggccaggagtttga

SEQ ID NO: 677013 - DNA, 732 bp, Homo sapiens
ttaaggttattattggcttcctcacaccaaagtcttagggcgtaagaaaccattggtccttttgtagctagacgaaaatcttggggtgaagataaggtgtggaagaagaacagaaccggtgtctccaccttcactagtagccttccagaaatctttcaaatgggctttctaaagtaaggcaagacccagtgagcatgtcctcggttcttctgccaactctggagctctgggaacctaggacttgcttgcaaaaccagaccaggggagtcccaggacatagatcagtttcatcaaagggtccgaggtggttaatagacactatcaataggttgggagagggcacttgtcatccaaagagctgtgtcggacttkcagtcagggtgtcatgatcatttgctgtgcctggtgttaccatgttccccttgcccttactgaagatccatgactcggaaaacatagtgctcctgctcagtaaccttcaacctgctgcctctagtactttttctgtcctagtctgttgcacagcagcccactccccatctatctgtccacttccaggactgcccttagaattcattcattcatttatttaacaaatatttatcgaagagttcattatatatagcaggcatttgtgctagattttggatatacagtgctaaataaaaaaaattggccactgagtaccaaatttttaaaaagtttttgcttgaatttaaacaaatttaaagg

SEQ ID NO: 677014 - DNA, 602 bp, Homo sapiens
caaacgtacaacattgtaccatttacaagttttatttcaaaaggagwtttaaatttttatacagtcaaatttctgccaaaagagagattccaaattaatttttgtttatgcaaagcccatatgttgttttccacagtctcaaaaagagtgcaaattgacagattcctgcatctgtatctcacaggatacatatgtatcattgctaccactcacttatttcctgccagatttttagcaattgtgtttgaaaagaaaacctgtagaaaggtagcagaaaacaaatgggtagtgggatatgtgtcagctagttccctaactatagaaacccttgaaataaggcaaaaaacttgtgttaacctgggaaggaaaggaaaaattgggcagcaggatatgaaggggccatggaaggagcggtgggtcctcctgagacgctttcctgctttataattttttccattttgactgtgggagatactactgtaatactttcctagatatagcagccgctcaataaatgttgactccttttttttttttttttttttttttgagacagagtctccctctgttgcccaggctggagtgcagtggtgcgatcttgg

SEQ ID NO: 677015 - DNA, 602 bp, Homo sapiens
caaacgtacaacattgtaccatttacaagttttatttcaaaaggagatttaaatttttatacagtcaaatttctgccaaaagagagattccaaattaatttttgtttatgcaaagcccatatgttgttttccacagtctcaaaaagagtgcaaattgacagattcctgcatctgtatctcacaggatacatatgtatcattgctaccactcacttatttcctgccagatttttagcaattgtgtttkaaaagaaaacctgtagaaaggtagcagaaaacaaatgggtagtgggatatgtgtcagctagttccctaactatagaaacccttgaaataaggcaaaaaacttgtgttaacctgggaaggaaaggaaaaattgggcagcaggatatgaaggggccatggaaggagcggtgggtcctcctgagacgctttcctgctttataattttttccattttgactgtgggagatactactgtaatactttcctagatatagcagccgctcaataaatgttgactccttttttttttttttttttttttttgagacagagtctccctctgttgcccaggctggagtgcagtggtgcgatcttgg

SEQ ID NO: 677016 - DNA, 602 bp, Homo sapiens
caaacgtacaacattgtaccatttacaagttttatttcaaaaggagatttaaatttttatacagtcaaatttctgccaaaagagagattccaaattaatttttgtttatgcaaagcccatatgttgttttccacagtctcaaaaagagtgcaaattgacagattcctgcatctgtatctcacaggatacatatgtatcattgctaccactcacttatttcctgccagatttttagcaattgtgtttgaaaagaaaacctgtagaaaggtagcagaaaacaaatgggtagtgggatatgtgtcagctagttccctaactatagaaacccttgaaataaggcaaaaaacttgtgttaacctgggaaggaaaggaaaaattgggcagcaggatatgaaggggccatggaaggagcrgtgggtcctcctgagacgctttcctgctttataattttttccattttgactgtgggagatactactgtaatactttcctagatatagcagccgctcaataaatgttgactccttttttttttttttttttttttttgagacagagtctccctctgttgcccaggctggagtgcagtggtgcgatcttgg

SEQ ID NO: 677017 - DNA, 997 bp, Homo sapiens
aggaaactcgttcttcctgtttttcttaaaatgaatttaaaattttaccatctctatatatctatgtgaatatatatttatatgccccacttctataaagcagtatttgatttggtacctatggataactattagcctaatactgccataattacaattcaattaagtttataacctgacttgttcactagttgggaagtaactatgcatttgttggcattctggtttaaaaactttacatttgcttgaaccaatctgtctaaatttatagaacagagtacttacaaatgtctaattgtttattttaaagttatattgtttctatgtcattgcttgttattttcttaatagaattgaaaacttttttgattttatgaatacttatattttgatttttgtaaattcagtagttttaggtcacaacaagtaatgttttgtstttcaaatttaatttgattttcattttattttaaacttttatgttcaggggggtccatgtgcaggtttgttacccgggtatattgtgggatgctgaggtttggagtatgagtgatcctgtcacccaggtactgaacacagtacccaacagttaattttttaacccctccccacctgcccatctagtagtccttagtgtctgttgttcccatctttatgtttatgagtacccaatgtttagctcccacttataaatgagaacaggcagtatttggttttctgttcctgcgttaatttgcttaggacaatggcctccagctgcatccatgttgctgcaaaggacatgatttcattcttgtttatggctgcatagtattccgtggtgtatatgtaccacattttctttatctaatccaccattgatggacacctgggatgattccatgtttttgccatatgacaagtaatttttgagagacttcaaatttaattcagatcccatttatgtggtaagcttttcagtcactccagacttgcctgttctctcctggcaatgaat

SEQ ID NO: 677018 - DNA, 997 bp, Homo sapiens
aggaaactcgttcttcctgtttttcttaaaatgaatttaaaattttaccatctctatatatctatgtgaatatatatttatatgccccacttctataaagcagtatttgatttggtacctatggataactattagcctaatactgccataattacaattcaattaagtttataacctgacttgttcactagttgggaagtaactatgcatttgttggcattctggtttaaaaactttacatttgcttgaaccaatctgtctaaatttatagaacagagtacttacaaatgtctaattgtttattttaaagttatattgtttctatgtcattgcttgttattttcttaatagaattgaaaacttttttgattttatgaatacttatattttgatttttgtaaattcagtagttttaggtcacaacaagtaatgttttgtctttcaaatttaatttgattttcattttaytttaaacttttatgttcaggggggtccatgtgcaggtttgttacccgggtatattgtgggatgctgaggtttggagtatgagtgatcctgtcacccaggtactgaacacagtacccaacagttaattttttaacccctccccacctgcccatctagtagtccttagtgtctgttgttcccatctttatgtttatgagtacccaatgtttagctcccacttataaatgagaacaggcagtatttggttttctgttcctgcgttaatttgcttaggacaatggcctccagctgcatccatgttgctgcaaaggacatgatttcattcttgtttatggctgcatagtattccgtggtgtatatgtaccacattttctttatctaatccaccattgatggacacctgggatgattccatgtttttgccatatgacaagtaatttttgagagacttcaaatttaattcagatcccatttatgtggtaagcttttcagtcactccagacttgcctgttctctcctggcaatgaat

SEQ ID NO: 677019 - DNA, 1684 bp, Homo sapiens
atcaagcaagaaagaaaaagacagaaaacaaatgcgaaaccacaggtaattttttacaatttattttagatcctttcttttttgagctgttccttggtcaagggacagacccagaaaataggaaaactgtcccacggatttccccaccactctcttcccatcgcaatctcttttcttttcccccatcaggtgtcctcttgttcgtccgattttagactttgtaagctttttgtaggcttttttttttttttttggagacaagagtctcactctgtctcccaggctggagtgcagagtgcaatggcaccatctcggttcacgtgcaagctgtgcctcccagatgcaagtgattctcctgccttagcctcccgagtagctggaattacaggcatgatgcaccaccatgcccggctaatttttttttttttagtggaaacgggggtttcaccatgttggccaggctggtctcgaactcctgaactcaagtgatccacgatccacccgcctctgcctcctaaagtgccgggattccaggcgtgagccaccacgcctggcctactttgtatgcatttctttgactcattgttattgtttctgactttattagggtaacttttattaaagcataatgtaagctttggatccaaatagaagttctttattgtgttaaataaattgaagccttcgtatctggctgacttgaagcagcacttagctagttttaaaagatatggaaggcaatcagaaaacaaagatacatatccccactcccttctcttcccaattctaaccgcagctcacattttgaagggcctcacacatgcatgtgtgaacatctcaacatattagcggtggcagttatctgtaaggagtctgcagcaacattaattcttgcctcctcaggagaaggaragaattcgattgaggagcataatgccgaaggagagaccgaggcaagtcttagagcaggggtgaaaaattattgaaaatatttagagcactaatgaaggaaagtacacttggaagagggccaagcaggcgacttgagagaccaagtgcacggcttgacctctagacctggggtcgtaaacgttggcatagttcctaaatcttgtgttatttctccccactcctgagatcttattgggaagtgaccgaccaccagtttcacgtgttttctatctgttaagaaactgcctttctctgtcagaggaagaatcagtttaaactttatagatttcttttaaaacgtatttattacaagtccccaagagggctttatttttgctttcacacatcctgtttttcagcttccttggctctttttgcccatatgccgaagagccgagcattgccgccaagcattggcaccggccatgcggagactagcgaaagctttgcaattcctctacttctcagtgatgactcgggctttctccttacattcttgatgggcatgaccggtcctgtcagctgggtggccaatttctgttcttcagcagaactgtctcccttcttgggggccgagggctttctggggaagaggatgagtttggagcaatactcattcagacgctgcacattggcctgcagggaatcggtggacttgttctgccgcctcggatccacagagatgccagtggtccgggtcaccttcttgtgaatgcccgccaccctgagctcc

SEQ ID NO: 677020 - DNA, 651 bp, Homo sapiens
tagttttaatcatatatttaacaacttataattgtttcagcaatttttattagattttatatttgtctacatgatttattataaatatttttattttttactattgtcaatgatattaatattttattgagtaataaaaagtaagtcatgtaaattatgatttaactcaaaattatgaatgactaagttagttctcaacaaaagcaataaaattttatttctactgttgccgttatcttattcgaaccctacaggtgaactacactgggctcattccactcttataatccattcctcattatttcaccaaaaaatatatctctctttatttcgtagagrcgaggtttgaatgtattgatctatttttagggaattgacatatagagatattacatcttccgacttgtggtctatctgtgtatttacttgttgtctttcattttactcagtactattttgcactgtagagatcttttatgtcttttgtcgtatttttgaatattcctattgtttctggctattgtaaatagtactagttttaaaatgttattttcttgtttctttttttttatatttatcttgtatcctccaacattgttaaactcatttattaattctggaagctattttgtagatttttacagttttttt

SEQ ID NO: 677021 - DNA, 1456 bp, Homo sapiens
tgagtcactatcatggcactttccctcaaggagaccaatcagccacttggtggcaaggaaattacatcagatgccttccatcctggattgtggaggcaattctctttattattggaattggcatatatcctagctatgagctttcctttcttcccttggccagcatgactacctgggaacttacagagcgcttgctgcctcaataggataccacacaattttgttggagatcaagggaccagctttacaaaaaagggattttagtagtgrgcttatatccatgagattctctgatcctatgacatactgcataatttagatgctgctcacctataaattgatgtaataataaagaatcaattgagaagccagcttgagaccatatcttaaaaggatggggtacaacccacaaggatatggtatgtaacctaattaaatgacctttatataatgccatctccccagtatgtatcatacatgtctctgagagcccagaggtaaaagtaggaatggccctgcttataatcaccctcattgacccacttggcaatgtgtgcttcttatctctgcaacttcaggctctgtggatgcattcatttcctattgctgctgtaacaaatttccacaaacttagcagctaaaaatgacacaaatgttaacccatagttctgtagctaagatgttatggttggctctttctgtcaagggtctcataaagctgatatcaaggtatcgactgatgtggcatcttatctcaaggttctggagtagaatctactaccaagattttgaggttgttggatgaatttagttctttatggatgtaggcctggggtcctcatttcattgctggctctcagctggaaacctgtttccactcattaaggtcacctgcattcctcatcatgttgcctcctccatcttaaaaccagcaacagcgtatcaggtccttctcatgctttaaatctctgactttttcttctaatgcatctcttcttttttttttttttttttttttttttgagatggagtcttgctctgttgcccaggctggagtgcagtggcatgatctcggctcactgcaagctccacctcccgggttcatgccattctcctgcctcagcctcccaagaacactttcctgcttttaagaatcccatgtgattagtttgggcctacctggctaccagaataatttctctctcttaaggtcggctgattagtaaccttaattacatctgtaagttccatttgccatgtaatgtaacatagtcacagtgactagggattaggacatagaaattttcaggggtctagaaatcctggttccaagggagaatgtgcttaaaccagggatatagtaaaaatccttattaactttaagttacagctgccctctggtaactttaggctctgagaaccaagagaccaacaagcaaaaaaattagtcaccata

SEQ ID NO: 677022 - DNA, 1265 bp, Homo sapiens
  misc_feature 810, 864, 865, 866, 867, 868, 869, 870, 871, 872, 873, 874,875, 876, 877, 878, 879, 880, 881, 882, 883, 884, 885, 886,887, 888, 889, 890, 891, 892, 893, 894, 895, 896, 897, 898,899, 900, 901, 902, 903, 904, 905, 906, 907, 908, 909: n = A,T,C or G
  misc_feature 910, 911, 912, 913, 914, 915, 916, 917, 918, 919, 920, 921,922, 923, 924, 925, 926, 927, 928, 929, 930, 931, 932, 933,934, 935, 936, 937, 938, 939, 940, 941, 942, 943, 944, 945,946, 947, 948, 949, 950, 951, 952, 953, 954, 955, 956: n = A,T,C or G
  misc_feature 957, 958, 959, 960, 961, 962, 963: n = A,T,C or G
ttttaatgaacactgactgggaggtgactttctgctgggatagagaagggagagaacaagagaagatcctgaaggaaatatgtcatatcctttttcgctttcctttgtgatctgaaaagacttaagcgtaacaaagatggctctaatatatttttaaagtactgcagtgggagataaaataaacagatgggagggaacacaaacagcttgaattttcccctatgattctcactgttcactgggctccctccatytaagtactacgggatagcaaacctgtcgcagcttcaggatattcctataaggcaggtagaggggagattcgagtaaagaaaggaacacagcatttaagggtggtgtccctgaagtctctaaaatgctttctcaatatgaaagtggcaattagtatgcagcgagtatattctttggccacatatgttttgcttttcaaaaagcaaagcacttatttgcatgctatttgtttttaactgtcagggagacactagactaagctagaaataaactttcaccttccttccaccttttcctcaaacatcacaaccatagaagagtcagtcctctgaaattccaaactacccaagccaaagacttctgtgttcttagcaccatttcctttctatacctgcagtatgagataattgtaaactttaaaaatcactctagacctaactccagaggagggagagagggagtatgtatttttatgaaccatctcaaatggttcttattagttcagttcaggaaatacctaacaagccggctttagagtgctgagcaaaaccttgattntggactccaagggactttggtcactctccatctggcactgatttacttaaattnnnnnnnnnnnnnnnnnnnnnnnnnnnnnnnnnnnnnnnnnnnnnnnnnnnnnnnnnnnnnnnnnnnnnnnnnnnnnnnnnnnnnnnnnnnnnnnnnnnnaaatcagatgattgattagatctgggtcacatgtaggaggtagagttctgtcccaaccatacagactacaaatgttaaataagtaaataaataaaataaataaaatgcttatcatttccccagcctaaaattcacagggcttatttctttacttacttcaaatctttgctcaagtgtcactttctcagtgaagtctttactgatcatcttatttaaaattgcaacctctactatctttcacattccctattcaatactctttcatgacttattgtttaaataacatttaccacctttgaata

SEQ ID NO: 677023 - DNA, 1265 bp, Homo sapiens
  misc_feature 810, 864, 865, 866, 867, 868, 869, 870, 871, 872, 873, 874,875, 876, 877, 878, 879, 880, 881, 882, 883, 884, 885, 886,887, 888, 889, 890, 891, 892, 893, 894, 895, 896, 897, 898,899, 900, 901, 902, 903, 904, 905, 906, 907, 908, 909: n = A,T,C or G
  misc_feature 910, 911, 912, 913, 914, 915, 916, 917, 918, 919, 920, 921,922, 923, 924, 925, 926, 927, 928, 929, 930, 931, 932, 933,934, 935, 936, 937, 938, 939, 940, 941, 942, 943, 944, 945,946, 947, 948, 949, 950, 951, 952, 953, 954, 955, 956: n = A,T,C or G
  misc_feature 957, 958, 959, 960, 961, 962, 963: n = A,T,C or G
ttttaatgaacactgactgggaggtgactttctgctgggatagagaagggagagaacaagagaagatcctgaaggaaatatgtcatatcctttttcgctttcctttgtgatctgaaaagacttaagcgtaacaaagatggctctaatatatttttaaagtactgcagtgggagataaaataaacagatgggagggaacacaaacagcttgaattttcccctatgattctcactgttcactgggctccctccatctaagtactacgggatagcaaacctgtcgcagcttcaggatattcctataaggcaggtagaggggagattcgagtaaagaaaggaacacagcatttaagggtggtgtccctgaagtctctaaaatgctttctcratatgaaagtggcaattagtatgcagcgagtatattctttggccacatatgttttgcttttcaaaaagcaaagcacttatttgcatgctatttgtttttaactgtcagggagacactagactaagctagaaataaactttcaccttccttccaccttttcctcaaacatcacaaccatagaagagtcagtcctctgaaattccaaactacccaagccaaagacttctgtgttcttagcaccatttcctttctatacctgcagtatgagataattgtaaactttaaaaatcactctagacctaactccagaggagggagagagggagtatgtatttttatgaaccatctcaaatggttcttattagttcagttcaggaaatacctaacaagccggctttagagtgctgagcaaaaccttgattntggactccaagggactttggtcactctccatctggcactgatttacttaaattnnnnnnnnnnnnnnnnnnnnnnnnnnnnnnnnnnnnnnnnnnnnnnnnnnnnnnnnnnnnnnnnnnnnnnnnnnnnnnnnnnnnnnnnnnnnnnnnnnnnaaatcagatgattgattagatctgggtcacatgtaggaggtagagttctgtcccaaccatacagactacaaatgttaaataagtaaataaataaaataaataaaatgcttatcatttccccagcctaaaattcacagggcttatttctttacttacttcaaatctttgctcaagtgtcactttctcagtgaagtctttactgatcatcttatttaaaattgcaacctctactatctttcacattccctattcaatactctttcatgacttattgtttaaataacatttaccacctttgaata

SEQ ID NO: 677024 - DNA, 1450 bp, Homo sapiens
ttgatcattaaatatgcagttatatatctcattgggatgaatgggaatggctaggattgttactgattcttgcccctaaaaagagaagttgaattcagaatctcttagaaggcataaaaatttaccatcaccatggcattgaggaaggcaacacaggcataaagtgatctcattgttcaacctcgtcaccatttaaccagctgtttccttacatatggtggcaccctttctgagagcctgtaagtattttttatagccctaatcatgtgctgtccctcttaatcctgggcatttaccctgctgttccctctgctgaacctcacacatgtgttccctctctaactctggttagacatttaggcttctttctgttggagagacctgccctggtccttcaatcgtggcttgggctctgtgttctctgacctcttcctctgctgtattcctggccatcatgtcaagtgtttctcaaaatgtgttccgtgggaccccacccaggtgctattctccacaaaatctattctcrgaaagttctagaatggatagtaagatagctgcactacattgtgaaggtactaaatgccaccaaattgtacattttaaaggttaattttttttgttatgtacattttaccacaacacaaaaacatcttttgaaagatgtttctcaaaagaaagtctcagactcaaacatgttacacttacctcctggaggttttacaatgcatattagtaaagaatctgagatgtcttaaaggaacccgcttaattttgcttgattcaatgttcccaaagctattaatagactttaagaaaatgcacaactacctgttaatgtccagctagttaatattcttagggatacaaattgtaattgcctgcttaatcatgctctcctatactaagtggtagggatgggaccatatttgtagttctagaccagagatcaggataagccttcagtaaatatgtattgaatgaaatgcttaagtgaatatagtaatatgtagaatgtggtggggcattgtgaaaggaacacagagtcacagagatcaagggttcaatcctcccatgatcacatttagctgtgtaaccttcagtgagccacttgaactctgacctttgatttcatcctgtattaaatggaaatacaccccagttaaaatggcgcttatcaaaaagacaaaataatagatgctggcaaggaggcagagaaaggggaatgcttgagcactgttggtggcagtgtaaagtagtacagccactgtggagaacagcatggagatgcctcaaaaaaccaaaaatagaaccaccatacgggccgggcacagtggctcacgcctgtaatcccagcactttgggaggccgaggcgggtggatcacctgaggtcaggagtttgagaccagcctggccaacatggtgaaaccccatctctactgaaaaacaaaa

SEQ ID NO: 677025 - DNA, 573 bp, Homo sapiens
aaggcctatattaatcaccatctccacaaaatcagcttcatttagtggaaacactcccttgaaattattaacgtgcacttgaaaacttaattttgtgccaccttatagtatgtattaattgcttgctctttgagtattaatcttgtttttccctccaatttgaatatctgagattagggaccatgctttactaatgaaatgatcaataggaaataggaaatgctcctagaataatcctatgtgattcctgaagtctctaacaattaatacttgacagacacagactgttatcaacagcagaatctttggattaactttcttaatattgaagaagggtatcttatactggtataaarcagttcaatttacaaaacaagtttatatgtattatttgtatttcgttaggatctgcaggatacacatgaatgatctcatttggaaacaatggattgtcagtgtttagaggaaatgtttttcagtggtgccaatatgattcaacaattttattatggtcttcaattacattttcttccttatttctttagtattgcttctaaattcttaaagcctact

SEQ ID NO: 677026 - DNA, 609 bp, Homo sapiens
tagtggtcaaaacattcagaaaacttcaaagagctgcatgcttagggagaggaggtacaagggaagctgtgggtgtgactttgtgatggagcggaccagggaggagaaatggttgggattccctttggttcttgcttttgctctgggaaatcactgaactgccctgaggaaaagtggctcctggtgtagtgaactccaatgctcctataagtgtttaccatcagcaaagaaccagtgcctgcttctgagtaacctagttctacctagaatggactgcaggcatgcaggtgggctgaatttgttcactagtaatattacttctaytgcctttggggcagtgggtctagggatgcagtggatgtgggggacaaacaaataccattcatcttctggctaccctatttaactcctgaaaactggaacagggatgtcgacagtcagaggaggagaagggcagaagtgtgcactagaacaccagatgtttgaggctgaaaatgatatggatgcagaataaatagccccaaaataaccttctatctgtggtgtcccgtccccctccttggccaggcatcaaagctacatgttgttcatttaaaacatgaacatcct

SEQ ID NO: 677027 - DNA, 2735 bp, Homo sapiens
aaagttgggaagaatcaagttcatcttagttaacaacctggggaaaatgtcctattgagaaaattaaagccatacaattctagaattagatcttcacatcattctatcttaaagatgaggaactgaggcttagataactcatagtaacttgatgaagtcatgtttggttagtattttagagcttaatgagctttcaaggtgctgttctttttctgttccctttcctttagtcgctttggtctgtgggtgatctgttccggggccaccatctctaaaatactgaaattcctacagtcctcactgagggaggtgcagaggacagggagcaaccatttacctctcaatcctgggtatgcttacccagtgacttctgtatagcagacactcaatatatattttctttgtgaataactagattagcagaaaaaaacaacaccataggaaagattctctttgaaggactctttggagatcatttttcacatctgataatctgcctccagtttcattgttttgtgaatcgggtttttttagatacattttgtcctttattctcaatttacactgtacagatcgttgttctgtagattgattggaacattattgaagctaattaaaaaatttagagaatttagcattctgatcaaaaaattatttagatcagagtatgtgctttagttggtaccattcccaaagaaatcctcaatgggatccacagcccttcctccctcccctcccacctcattagttaatttggatccctgtttatttcacattgactcgccaaattttaacaggaaacaaacagccctagggtatgttttctggatgcttgggcaattcttagtctgcttctggatttttcctgtccgttctcctcttccacttcttttaaacccgttctccggagacttgtttactggggttggagaatcagaagcttggccggggtggtgtgaacctagtgccctcttgtggaattttgtgagaatgacaaactcccccaaagcttgagtgctttgagttttttcttgagtagcctttagtgggaggacctttctgttacatcttaaatctagtaagttaataacatgcaggcttattgcctacactgaatatttgaaagctattatgttggggggtatcacttgattaccagaggcttattgttatagaattaagcctcattacaggaaacaggcagctaagtgtttgtgctttttcatcacctcccattaatgtgtaagagaggtaaagagaaaaggaaggctcccaaagaaaagtaattgaaaaaaggctaggaaccaagagtaaaggggaaatggcaaactttagaagccttggtcaaaaacaagtcttatccccagctcttgctttggatctgagcccagaaatgtaagacccagccagaagttgagagtctgccagattctcaccccccgggggagatgggggtcagggtaggggacagaaagtgttgcataaacccactcctaagggaggtctagggtgtttacactgtgctgtttgctttacctgggctttctggcttgttttcttttctttctttctttctttctttctttctttctttctttctttctttctttctttctttccttccttcttttcttttttcttttttttttaagacatagtctcactctgtcacccaggctagggtgcagtagtgcaatctcagctcactgcaacctccgcctcccaggttcaagtgattctcctgccttagcctcccaagtatctgggattataggtgtgggccaccacacctagctaatttttgtatatttagtagagacagggtttcaccatgttgaccaagctggtctcgaactcctgacctcaagggatccgcccgccttggcctcgcaaagtgctgggattataggcgtgagccacagtgcccagccgtctttcttctttctttcacaatttcatttttttcattttgagataacttgtttctccattgccattagcaaagtcactgtggcccagaggacacagtcacacttgcgtcagacacacctgcacttaaattcctgtgttgcctcataccaactgtgagacttgggcaagtcaacctgctggagtctcagttttctagagactccttatagaaacatttgtgaggattaaaaacaataacagagtcaacttcagaaacaagttactggattttattataccccaaaacaaggaagagagtgggtgcattactaaggcagtgactcagtgttcaggactgttgttgtcacccagagagattcacaaaacctccaacctgtccagcaatacatttagaagaaacaggattagggaagactctggaagcaaagaaggctttattaaacataaccatgatccatagctggagtatacataggaaatttggtaacttggataaggcaaagtcttttccctttaggagcctgtactttagtgggtgaggaaraaccttctgaaagaaaatgatttcagcagcagtataaaagaaagtgggtcacctgtatgagcaaactaacaaagcagatttaatgtaagtgcccaagagttccaaaacaagggaatcagtaagagttctggagaaggccactatggggatacttggtgcggtgtgggggtggatgtaggtttattgtgggaatcgaataacatggtaaatatgtgactgtagtaggcctggatgtgatcagcaagtaaaagaaatttgc

SEQ ID NO: 677028 - DNA, 621 bp, Homo sapiens
tccatcgcaatcacagctgcgcttggatcccatttctatgactcaccagctaagtgatttggcaagttatgcgacctttctgagccccacttttttaacttgttcaaaaaaaaaaagcatgttggaaatacatgggaagcacttatcacaatgccttgcacttactaggtacctggaataatagatatgattagattatacattataaaaatacaatggctacaacagttgatactggcataaggagaacagtatgaaayatagacaccatatgaataaaccctagtatacactttaaaaatcttttttttttttttttttttttttttaggcagagtcttgctctgtcgcccaggctggattgcaatggtgtgatctctgctcactgcaagctctgcttgccgggttcacgccattctcctgcctcagcctcccaagtagctgggactacaggtgcccgccaccaaacccagctaattttttgtatttttagtagagacggggtttcaccgtgtgttaggcaggatggtctcaatctcctgacctcatgaccagcccgcctcagcctcccaaagtgctgggattacaggcgtgagccaccacgccaggccaaaaatctta

SEQ ID NO: 677029 - DNA, 907 bp, Homo sapiens
gatggggttggggaaaaaaatcccaattgaataagatgaattttctgcccacatatggaatggagcattgaaatgagaatgaatttaaaatagattacatttccagcccatctgaatttcagactgagaatatctgctgcacataattcaagatcccacagtctcaagagrcttgggtcctgggctttgacaatgactcttttcctgggcagaaggttgtacatggacactgggagcacctaggcctggaagctgggagaactaggctctcctgtctgatgtcactttccctgtcactttcccagggaggccttccctgactgcctgacttaaaaggaacttcctctaccaccctggccattctctattcctcttcttaacatcaattgacacaccacaagttttcattttttttttttttttttcttgagatggagtctcactctgtcacccaggctgcacccaggctggagtgcagtggcacgatctcagctcactgcaacctccacctcccaggttaaagcgattctcctgcctcagcctcccgaatagctgggactacaggcacgtgccaccacgtccagctatactgatgtgtttattgtctatttccccacttgactgtaagtttcaaaatggcagatattcctctctctctctctccctcttttttcttttcccttttatttataaaaaacttcaaacatacagaaaacctatcatgaagacccatttaccgcttacccatcatctagatttccaactgttaacattttactgtatttgcatcatgttttttggtgctggcattttctgaagtatataatattcttcactatatttccttttaaaaaattgaagatggccgggcgcggtgtctcacgcctataatcccagcactttggga

SEQ ID NO: 677030 - DNA, 907 bp, Homo sapiens
gatggggttggggaaaaaaatcccaattgaataagatgaattttctgcccacatatggaatggagcattgaaatgagaatgaatttaaaatagattacatttccagcccatctgaatttcagactgagaatatctgctgcacataattcaagatcccacagtctcaagaggcttgggtcctgggctttgacaaygactcttttcctgggcagaaggttgtacatggacactgggagcacctaggcctggaagctgggagaactaggctctcctgtctgatgtcactttccctgtcactttcccagggaggccttccctgactgcctgacttaaaaggaacttcctctaccaccctggccattctctattcctcttcttaacatcaattgacacaccacaagttttcattttttttttttttttttcttgagatggagtctcactctgtcacccaggctgcacccaggctggagtgcagtggcacgatctcagctcactgcaacctccacctcccaggttaaagcgattctcctgcctcagcctcccgaatagctgggactacaggcacgtgccaccacgtccagctatactgatgtgtttattgtctatttccccacttgactgtaagtttcaaaatggcagatattcctctctctctctctccctcttttttcttttcccttttatttataaaaaacttcaaacatacagaaaacctatcatgaagacccatttaccgcttacccatcatctagatttccaactgttaacattttactgtatttgcatcatgttttttggtgctggcattttctgaagtatataatattcttcactatatttccttttaaaaaattgaagatggccgggcgcggtgtctcacgcctataatcccagcactttggga

SEQ ID NO: 677031 - DNA, 771 bp, Homo sapiens
tgccaaaaaaaaaaaaaatagtgagtatccactccgcaggggtattgtgagtattaggaaggtaattcctccatgttcttcaactgaagctattattatcatcctgcctgcaattcttggcaagtgttgtgaaggcaaagactgggaatcctcttgtttgtggagaagaggaaacgtgtcgggggcaaagtcacaggggcaaaccaggtttaccctctctgaagctctcacggccacaggtgcccaggcctggccattcctccatgggaagcttctgcactcacttcctcagtgctggcctgggtctgcggggcaagctgagtgtcccggggcagaatgctttctggagaggactccgctaccagctgtggctgaaggacctggcacagggcctgttcctggggcccttggcacaccatcctcctccagccgagagccgtaaggaaraagtttccctagtgaagggcatcaacaggccccaggaggtcctcctgcctgccaggacacccgtggtcctccccatcctaactagttacaattaaaatgaatctagcaaacacagacagccaggccctcccacgccctgctctgggatccaggaacaacgacggcgcccaggggagcccacacacttaaggggagcagcttacagtctcactgtttattgagcagctactgtgttcttgatgcttttgtaaaccagaaagtgtctgagacaggtctcaatcagtttagacatttatttttccaaggttaaggacacgcccagta

SEQ ID NO: 677032 - DNA, 642 bp, Homo sapiens
acatcagggagaacccaagggcagaagtaggggccaagtcctcttcatcacctccaggttggctgacaaacttggttgcaagtggccccatcacactggcctggtctttatctatggcccctttgtcagaggcgttagaccagagcaactccattttgagtaggggctgggtaaaataaggctgagtcctactgggctgcattgccagacgatgaggcattctaagtcacaggatgagatgggaggtcggcacaagatacagatcataaagaccttgttgataaaacaggctgcagaagctggccaaaacccaccaaaaccaagatggcgacgagagtgacctctggtagtcctcactgccacactcctaccagcgccatgagagtttacaaatgccatgccaatgtcaggaagttacactctatggtctaaaaaggggacacatgaataatccacctcttgtttagcatgtcatcaagaaataaccttaaaaatgggcaaccrgcagccctgagggctcttctgtctatggagtagccattctttattcctttactttcttaataaacttgctttctctttgtggacttgccttaaattctttcttgcaggagatccaagaacactctcttggggtctgga

SEQ ID NO: 677033 - DNA, 2041 bp, Homo sapiens
  misc_feature 516, 517, 518, 519, 520, 521, 522, 523, 524, 525, 526, 527,528, 529, 530, 531, 532, 533, 534, 535, 536, 537, 538, 539,540, 541, 542, 543, 544, 545, 546, 547, 548, 549, 550, 551,552, 553, 554, 555, 556, 557, 558, 559, 560, 561, 562: n = A,T,C or G
  misc_feature 563, 564, 565, 566, 567, 568, 569, 570, 571, 572, 573, 574,575, 576, 577, 578, 579, 580, 581, 582, 583, 584, 585, 586,587, 588, 589, 590, 591, 592, 593, 594, 595, 596, 597, 598,599, 600, 601, 602, 603, 604, 605, 606, 607, 608, 609: n = A,T,C or G
  misc_feature 610, 611, 612, 613, 614, 615: n = A,T,C or G
aatcctagattttcaatttatgatggagaagtgcaatagaatactttttaaattttaaatagggaggtcaagataggcctccatgagaagaagacatttgagtaaagaggtgcgagaattgccctgagaaggtctctggaggcccacccaagcagagccgtaaggccctagttcagacataataactgaaggctgggaatgaggattactgacagtgaagttggcggaaaaagacctgctagaacatattttggaagtagagctgacttgtctcgccgattaactggactggtggtttgcgctttctccagaaggtgtagagatgatttttgaaaccagttcaggcactagatggagacacctgatgaaacatcacttatgaatccgtctcagcccacattgagctgtttgatggctgagaaaaagaagaagacttgctgagtaaaagagagaggagagagtcttatagggggagccaagaaggagagaactagatgcagagccttgtagccctannnnnnnnnnnnnnnnnnnnnnnnnnnnnnnnnnnnnnnnnnnnnnnnnnnnnnnnnnnnnnnnnnnnnnnnnnnnnnnnnnnnnnnnnnnnnnnnnnnncttcccatttatacgaattcgagctcggtacccgttaataaaaaagccaattaaacaatgctcattccccatccatcccatttaaataggcatgcattgcatgtgcgttaaaaacgtttgtctactgggatcttacactcagttctcagagcaagtgcacagggaacatctccgagtcacagcactaagtggtaaaacagtgtttctgacacagcccagaagtccctccacaccgaaggcactgaaacgattccccctttttactcttctctaaacaggatacacacatgtaattgggcaccaggaaattcctgtatagcacattggcaatgaatagttgtcttagtggcttataattaaggagagtgataatgttgggaatttaactttggtggtacttaactctgaaatacttttcactagctcaatccctgttgattgcttattaaaatgactcctgaaactcccaggaaaacaacatggaaggctgagtaaatgcttttgtattgtgaagatactctttaatgaaatacttctttcccacagcaacagacctactctacaatccaggaaaatggttttaataaatgcttctgataataatctttataatgatcattgtgttattggttatggygatgaataataaaacctccttcaaaaaggctctaaaagataaggtactaattcaaaagaaggtggtggtggttgtttttaattccaacatgcttctgagagatccacttaaacatttgcaataacagtggaaaatctttaagcagaccaatgaaaattttcttcttattgtgttttgagtagtcaaattgcacccagtattgtaaaatcaaagtgctttgttgctaggcaattccatgaatcatcccaaatcaggttttaaccagattgataaaagtgttacccccccccttgtttttttttactagaacacagtttttggttgagcaacaaaatatgtgaactgatcacatgggaatagaatttttatagcaataaataaatcttgccccaatgataatatttaatgatatgcataattattgttataacacacgggaatcagatataagtgatataaagcccaagtgatgattgcatttagcattatgttgacattgcagataaaagcagctttgagatcagcatggaggaagaaggaataggaagaagctgctctgaactccctccagaaacacctacatttacatccaaggcaccagctgttgagtttccctgacttgagaaatggcatcgctcttggccaacatctcccaaggagactaaatagaatattaatgtattagtagaatattaatattaatatattagtagaatattactaacagattagaatattaatattaatatattagtagaatattactaagtaatagattagtagaatatt

SEQ ID NO: 677034 - DNA, 646 bp, Homo sapiens
tcagggagaaggatttgaggttccttctcatcaccttgttcattgaccctacgattaaacctgttttttgctgcgaactggtgtcttggcacactgacttgctgtgtgcatcaggcagctaatctattatgcttgcagtgccccagcagggcagtgtcttcctagctcccatggcaccggctgctctgtgggctccacagccctcagcagatgtcatggaaaggacagataccgcggggtcatgaggaggaattgacactttttgaaaggggacagattggaagagaaattgggggtcctgggatggtgagtgtgggcaaagtttgagaatgtctgtgtctgaccatccagagacccaagacttgcctgtgggctgggctgggctggcctgggaagcccaggttgtatttatgagtgcattgtgcatttatgtacccatttatatygaggaagccacagaggggacactgatggacaggaagttgacgaaaattgtagatgtgactatgtaacccaaaaactcagaaaaaaagagacaagaatgatatatttgatagaaaaatgcaagccaggctttagcactggaaatcaacttagacctgtggcccaaggcagaaggcactgtcttgagccagggtgagtgcag

SEQ ID NO: 677035 - DNA, 583 bp, Homo sapiens
taaggatctagagcataatgggagatttcagaggtcactgaccaatatttattaaacaagtcattgatccaaagcatgtgaataggcaaagaaaattttcatggaactgtcaaacacatattccttcttatgtattgtgtgtgggagaagctctgaaaaccctgctcttttatccatagctcctgaaaggaatgagaagttctttccattccccagtatctgaaaattccatgcaaacaataactttagaatcgtcacaggcaaaagaattgtaacgattaaggaaggaggcagagacaaaaagtagtgcgaagtggtgctgaggggagtggagacagtgtctgaaaattggagtctccacagaactgctgcatcattcagtgtcagaagatgcctagaattgttgtcatattttgagatttttttgtcttttctcagcctaaaactaagtattaaccggctttgaactggcactgcaaggaccagtgctccrgtgattaaggaccagaatgaattacccatctttagtctttgatctaaaacaactgacctggcaaagatactgcctaattgtctgggaccg

SEQ ID NO: 677036 - DNA, 1114 bp, Homo sapiens
acgtcttcagaaatgtattcatcatttgcaatttctctgctgtaactaccccaccactgatcactgacttgaaggtcttcagaaatgtatttgtcatttgcaatttctctgctgtaactacccctatcactgatgtgaacgtcttcagaaatgtatttgtcatttgcaatttctctgctgtaactacccttatcatgcctttttgcctatacatatatcaaatctcttatatttttcttattcgtttgcttactttatccttcaaaaatcaaagtaccgacttgtgaattacgtggataagtttgctcattccagtcttcttggtaatgaccccaaaccagaaccaacctgaagctcagcagcaggattcaattgttcaaattatggtgcctacttctggaataatgctcttcaggccttcagagattgagatcgatttatcaatatttggaaggaaattcttgatacatttgttcagaaaaaaatagtagatttttcaatrtgacatgcagaataatccattttataaaacaaacaaaaaacaaaagcacaaatttggagactcttggcccctcccttgttcttggctgccacatcccatccatcaccaagccatgccactactctctcctaaatttctctatcctacccaccagtgtcccttgcctttatccctcatgcaagactctctcagctctgcagtgacttgtttctctgtccagacatgctgcttcctctgtgccaagcaggcagctcctgttcctggaccaaagtctgcttcttctcaggcatcaccttagctgaggcttccctcctggatcctcaagcctggccatttgctccccaggtacccagcagtctggatagcattgttttcccttgtcttctctgtacctgaatttgccctctaagctgctgtttcctccactagagtaaggatgagaaaaaacaggggctgggtttcatttgctattggattctcagagatagctctctacacaagacatgtagggaccccaggaaagtttgtcaaattccttgtgtgttgttctttatacatggaggtaatgcttatgccatattcttgacaacacacatgctttggaatgatgca

SEQ ID NO: 677037 - DNA, 673 bp, Homo sapiens
ttctgggaaatggcatgcaatataaaaagttgggaaataaatagaccaatggggaaaatgtaggcagacatatgccaggcatatggaatttctgtgttgcaaatctctgggttttcatatttcaccgtacccctagctaaatgatgatgtgatactttaaattggacttgaccaaattttttaccttgtcctcccaaaataaaaatttgcagacaaggcraaaactcattttaagatgccctatattctctgtttcaaattattacacaacctgtatctaaaaactctgccaccccaattctgaatgcattcaagtgaaacatagaattgtaatcacaagtccaaaactcaaaactgcaaactctctgctatgtgacaaagaaatattatgtctttgaaaggagaaatagcacccgacaatgaaaattgaatcccggaaataaccaggtgatttaaagctttctagataatcaccagcaactagaatgataatactttaatgacatattatatttaaataacacctttcaaactccatcatgttaatctacacaacatgttcacaaagtaagaaggaatgggtattactcccattttagattagaaaattgaagggtaatagaggacggcttaccaaggtctcttctcttcctggcagtgggtccaggattgg

SEQ ID NO: 677038 - DNA, 3063 bp, Homo sapiens
atgttgatgaagacatacagcaactggaactttcatacattgctagtgatggtatcaaatggaacagtaactttgaaggactgttcaatatttccaaaattaaacatacacctaccctgtgacccagcaattcccttcctaaagtttattccagataaataaaaatttatgtcctaaaaagacttgtacaaaaatgcatataatgatcttactcatcatagccaaaaactagaaatgacctaaacgttcgttaacaggaggataaataaatttcaatatattcatatagtggtgaaatatttaacaattttaaaaggtaaactactgttacatacaacaacatgaatgattttcacaaacattatatcaaatgaaacaaagcagaacaaaaaagaatacactgtatgattccatttatatgatgtctaacatcaagcaaaactaactgatagtagtaaaaatcagaaaaaagttgctccagggtgagaaatgtgtactgaacagaaggagggataagagaatttcttggtgtgatgtatgttctatattggagggtagatagataaatgggtagatacggttggtcaaaatatagatataggcatagatagatgtggatgtatatatgaaatagtggattgattccacaaataattattgatcagctactatgtacaaggtactgctgtggacactggggatccattagtgattaacacagacaaaaactcttctttctcaatggggttcacattccagtcagcatgtaattaaattaattagctgcattattatttgaaataggtaacaattggaaacaatctttatgtccatcaagaggaaagtttaaataacttatgttacatccttgtgatgggatattattcagctataaaagtgaataaattttttatatactggtgagaataatctttaagacttcttgtttactgaagatagcaagatacagtaaaatgtgtatagtgtgcagccatttgtacaaaaatgagaagcaaacatatatgtacttagctatctgtttatgtataaaatttctctgaagtattacttaagcaattgataagataggttgcttccaaaagataaaaactacaggataggagtgcatgatcttttatacattttaagtttggagccatgtaaatatataacctataagcaaataaataaaacaaaaattgtttaaaatattttacaattggagaaagcaaacacgtatttctttttttattaaactttaagttctagggtacatgtgcacaacgtgcaggtttattacatatgtatacatgtgtcacgttggtatgctgcactcattaactcatcatttacattaggtatatctcctaatgctatccctcccccctcccccaccccatgacaggccccggtgtgtgatgttccccaccctgtgtccaagggttctcattgttcacttcccacctgtgagtgagaacatgcggtgtttggttttctgtccttgcgatagtttgctcagaatgatgttttctagcttcatccatgtccctacaaaggacatgaactcatctttttatggctgcatagtattccatggtgtgtatgtgccacattttcttaatccagtctawcactgatggacatttgggttggtttcaagtctttgctattgtgaatagtgctgcaataaacacacgtgtgcatgtgtctttatagcagcatgatttataatcctttgggtatatacccagtaatgggatggctgggtcagatggtatttctagttgtagattcttgagaatcgccacactgtctttcacaatggttgaactggtttacagtcccgccaactggcaaacacacatatttctaaagcaactttaaatcctccatagccggggttgactaggtactgagcgtgccaggctctgcagagtggagacttaaatccaaggtcatggcaaaacatctgaaattcaccgccaggactgagatggtacaggaaggaaacgtggaaggtgcatacaggaccctaaacagaatcctcactgtggatgggctccttgaggacattaaatgtccatggtataatgaaaagccatgccgccagcgacagaggaaaagctataaaaggtgctggcagatctataacatggaaatggctcgcaagatcaacttcttgatgcaaaagaactgggtagatccgtggcagggctgctgaggcctgtggatgggacacccagtatgaaaccctcatccaaatttgtctccatctcttttctttctacaatcccatttcctattaccgttctctacaataaactcaatcacatgtttgcaagaaggactccacatatagaaacaatcccattagtcagcagtggaccctctcttattaagtgaaagaagaaactgagtctgaaagtagtctaggagtagaatggtgtttgctggggctggaggagggggcaatgaggagttattgtttaatgggcacagagtttcagtttgggaagatgaaaaagttcagaagatgatggctgggcatggtggctcatgcctgtaatctcagcactttgggagactaaggcgggcggaccacttgaggccaggagttcgagagaccagcctggccaacatggtgaaacctcgtctctactaaaaatacaaaaaaaaaaaaaaattagccaggcatggtggcaggcgcctgtagtcccagccacttcggaggctgaagcaggagaatcacttgaacccgggaggcagaggttgcagtgagccaaggccacgccactgcactctagctcaggtgacagagtgagactccatcaaaaacaaaaacaaaaacaggagatggatgatggatggtgatcatggttgcacaaaaaggtgaatgtgcttaatgccactgaactgtatacttaaatggttaagatggtaaattttgttttactacaatgaaaaatttgttgaaagtaaaaaaaaaaaaaaatcctccatagctgataggatggtgtaaattcatttctgaaaagttggctctgcctctcataataagttcaa

SEQ ID NO: 677039 - DNA, 616 bp, Homo sapiens
atgcttagtcattattctaaaacctagaccaatgtggtaagggtggcaccactggcatagtaagaaattgtacctgaaatctacactagttagaccaaggaaatggagcttaactaaaggcagtttttgcagccttataaagtaattatacgagcggttgggagtgacataatttgaggtattaagagacttggtaagctcctgcttatggcctcctgcaacctgcaacctgaaaggacctcaacctggacaggcaaaatgccatctccaccagctggggcagtgttctgtaaagaacaggagaaagtcaagaagccacactcacctcatctcccttggatgaggtatatgagcatccaatgctaagaatgcatcctttgctcttataatatcctttgctcttataagcttataccaactcataaacaacataaatttatttctcatagtcctgaattacaaaaaaaaatcacccaacccccagtgctaaccttagtgtccagtggcacttataaggtgctaaatgattacttgttgaactgwttgttttattgagatttcaaccctttgacagtatatactaatgaggtatccttctcacagattctcccagaag

SEQ ID NO: 677040 - DNA, 882 bp, Homo sapiens
gttaataacagtaaacaatcaaaaatttcacatttttaaaattacattttacagtgctagtaacagtggaacctgactcctaataaagtctattctgcagccataccatagcttctatatttctaattaaaatatcatgtaattgtaatacagattccctatcaaagtcaaatgaatgatttagaaactcagcttttgttcttctctaaaggarctacacacacacttgtatatggttacacacacacaacataaacaagaaagagctatggggagtgtatgttaagacatagtaaatagtctgttgagaattatagatcagcttgtgctattgagactcaatgttgagactattttttttcttcttatttttaccagtactgcatttgtggttctggcttttagtttcacctcttggtctcccagctatactgtatctcttttgccttcccgtacagcccacacatggctccccaaataaacatctgaaaatatagccctactcatactacttctttgagcaaaaactttcagtagcttcccattagctaaacaacatattccaaatgtatagccaattattcaagcttttaatttcatcctaccctgtgtctcaatattccccttgacattaactactctaggcaactagttctcaactgggagtgttattgccccctaaggggaagatacggaaatgtcaggagcgttttgggtttgtataatgattgaaaacatgactggtgtttagtggatgaggccagggatgccaaacctctcccatgtgtgggacgtctccatgatgatgagtcaccccctgcctaatgtcatactaatacctccactgagaaatgctgcaagtctagtccaaggagattattc

SEQ ID NO: 677041 - DNA, 882 bp, Homo sapiens
gttaataacagtaaacaatcaaaaatttcacatttttaaaattacattttacagtgctagtaacagtggaacctgactcctaataaagtctattctgcagccataccatagcttctatatttctaattaaaatatcatgtaattgtaatacagattccctatcaaagtcaaatgaatgatttagaaactcagcttttgttcttctctaaaggagctacacacacacttgtayatggttacacacacacaacataaacaagaaagagctatggggagtgtatgttaagacatagtaaatagtctgttgagaattatagatcagcttgtgctattgagactcaatgttgagactattttttttcttcttatttttaccagtactgcatttgtggttctggcttttagtttcacctcttggtctcccagctatactgtatctcttttgccttcccgtacagcccacacatggctccccaaataaacatctgaaaatatagccctactcatactacttctttgagcaaaaactttcagtagcttcccattagctaaacaacatattccaaatgtatagccaattattcaagcttttaatttcatcctaccctgtgtctcaatattccccttgacattaactactctaggcaactagttctcaactgggagtgttattgccccctaaggggaagatacggaaatgtcaggagcgttttgggtttgtataatgattgaaaacatgactggtgtttagtggatgaggccagggatgccaaacctctcccatgtgtgggacgtctccatgatgatgagtcaccccctgcctaatgtcatactaatacctccactgagaaatgctgcaagtctagtccaaggagattattc

SEQ ID NO: 677042 - DNA, 654 bp, Homo sapiens
tggtagtggcacttccttcctctgggcacctaaactagaaaccaaagggacagtctagactcttccttcttcctggccttcatactctactggmcactaagtccaatcaactctgtctccttaacttctcttacacatgtctcctccccctcatcctgccgcccttgctttcgttggagcctcaccatttcttgccaaggctgtagtaaccgcctccagtctttcctattttcatccttcacatactgccagtgatctttttcaaccacagacctgaccagtgactctcctgctgaagacacctccattgttccttcttgatcgtgcagcaaagtcttaactccttagcatcacgtgaatccacagtgatcctattacccgtgtggcgccatctctacctcaccccacacctgcacaccaaacaccttatgttcttagggtaccttatgtaataagagacacataacatagtgttaaaaaaaaatgtagtcttgagccaaactgcctaggttcaaatcccaatgctgctttttaacctatgtaattttggaaaagttccataacctctcagttcttggtttttttcctttgcaaagggagcataataagaatacctaccacctaggagtgttctaaaaaataagagttcctgga

SEQ ID NO: 677043 - DNA, 668 bp, Homo sapiens
ctggctaactttttgtatttttagtagagatggggtttcaccatgttggtcaggctggtcttgaattcctgatctcaggtgatctgcccgccttggcctcccaaagtgctggaattacaggcgtgagccaccgcgcccagcgagatctgacagttttataagaggctcttccctctttgcttggcacttctccttcctgccgccatgtgaagaaggtgcctgtgccctttgccttctgtcatgattataagtttcctgaggcctccccagccatgctcaactgtgagtcaattaaacttctttcctttataagttacccagtcttgggcagttctttatagcagtatgaaaacagactaatacacacaccatacgctccaaatggacatctgttattgaatgtcaatgatacctcaataaagttagctaaatagaaaaggkaattgggaatgggaaactcacagaagcccaaggagaagtgttgggacctagaatcaatttacatttttttttttgagtaagggtctcactgtatcgcccgggctggagtgcagtggcacaatctcggctcactgcaacctccacttcccaggttcgagtaattctcgtgcctcagcctcctaagtagctgggattacaggtgcacaccaccacgcccatctaatttt

SEQ ID NO: 677044 - DNA, 638 bp, Homo sapiens
tgcagacagaaagaaaagctttaacagattttttttttcctaaggctccagcatttgtagaaaatttttaaaatgaagcacggtggaaggaaccatggaaaccaaggaggtggcacataccttttgaggtgaagagatcaacctcaacagtgggattcccgcgagagtcaaagatctccctggcatggatcttgagaatagacatggtgaacttctgtagaagaaacacacagttcatgttttccataagccataatgctgcatttcctcactcattcaaggaatcacttccgaggttcgtggactagagagaatcagcactggactaaatactggatgtaggaaagctggctagggtggggggaaaagcctgctggaaagcagtgrgaattctcctaattaagtagttagggcctagctgcggaaggccttaacctttttatgcctagtattccattactggaacgctaagggcgtgggagttacttttatccgactgctcaagtcattgccaaggtctgatttttcacaaaaaaagatttgcaacctctggcataaatgggttaaaccctagcaattgaggtcttgttctgtaagaaaaaagaaaaaaaaaaaaagagagagaaaaagcccacaaa

SEQ ID NO: 677045 - DNA, 639 bp, Homo sapiens
atagaatacctaagttttaatgcaaacaaattgcactttctaaataatgaaatagtgtatccattttttggtcttatttaaactttatgggctgctacaaataaaaaaatctaagttcaaaatatacatcttgcatatctttagtaaatactgttgcatatctttagtaaataatgttaccagttatgctttaccctgaagggcttaaaatgagtagatctaaacaataaatttcaagatgatctaaagtgattttttgggatgaatattgctacactgagttaattacaacaagaaagtaattgttcatgttaatctgattttccactgggaaacagttcaaattacttgagacagaggtcaccaacaagatgggcaattgtggcctctgatacaatttaaaacatgataacattwtggtgtattaaggtgtcacaccctgcaaatctctggctgccttctctgtttatatattccccttgagaaaattcattctcttccatgtgtccagctaccaccaacattttgatgactgccaaaaatatatcccattataatttgattctgacgatcaggcctataattccacttgtccccagatatctattcttctatgtcccacagacacccaaactcagc

SEQ ID NO: 677046 - DNA, 562 bp, Homo sapiens
  misc_feature 524: n = A,T,C or G
aaggacaagaggcgagatgagaggagacagaagactcagcagaagacactggagcatgaggtcatcaggagaaacaggaagccctagagcatcctcagagacatggtgggtgagaggctgcccytccacccccaaactcagtacaagggtgggaggtgttctaatgagtgtgtaagggctaggtggctgcaaaggctgaatatcatgggacatccaagcagcaaatattgaggggcaccacagaggttcagagagtgggttctaggcacaggcagacctcgatttgaattttggttccactcacaggctacccctttctctagggaattgttcccagtgagagaggcccccttgcccaggaggaggggtcactcacctgggcccctggaagcagcctgccatcaataaccaactaataatggggctcacaagaactggcggtcccttgcttcagggtggggacaatctgcagtatgacatattctttggagcccctacccacactgcccaccttgcattagcanaggctagatcttggcaaaggcacatctctgcccaactc

SEQ ID NO: 677047 - DNA, 781 bp, Homo sapiens
ttttttagagacagtgtctccctctgtcaccctggctggaaaacagtggggcaatcacggctcaccatagccttgaactgggctcaagtgatcctcctgccttggtctccctaagtgttgggattacaggcttgaaccaccacacccagttccattttctgtaatgaatacctcaaccctcgacctatttctcagacctttttttttgagacagagtctcgctctgttrcccaggctggagtgctatggtgcgatctcagctcactgcaaccttcacctcccgggttcaagcaatcctcctgccttagcctcccaagtgctaggattacaagcatgtgccaccatgtctggctaatttttgtattttttggtagagacagggtttcatcatgttggccaggctggtcttgaactcctcacctcaagtgatctacctgcctcggcctcccaaagtgcaggaattacaggtatgagccactgctcctagcctctgaggctcttaagtgcctctgtattgcacacatgtcactggaatactgttctttaatcctgggaagcaactgctttaaaatgagggaacacacaggtacaaagcacaggaacttcctgggacgaattgttacaatttctttagctcttatgtgaggcaattgtttaaaacctgacacctgccctgtgaagttggaactactgtccccagttgataaataagggacatgaagcttggccacgtcctgtgacttgcttggggtcaccaggctcaagggagggagctgggctt

SEQ ID NO: 677048 - DNA, 608 bp, Homo sapiens
ttatttgactcataaaagtcatcagcaaagtattttcattgtcaggatttctcattcctaaaattcacaactactgttctttttctcattacatttagttaaaatcatttgtactgttttgttagttctcatacttagtatgtacaatttgggtgttcagataaatgaaaggcctttaacactctcaaaatcaaataatacggtcaatttttcatgaagagaattatttttgaggttagtgatttactatgtaatccccctgcagttgtgtaaacctctttgagtcagggtagtgtagtctacagctccctaagtgtaatgaaagctacctgagctatttccctttggaatgaaatgcattgctttctgcaactgaacaagcctatagtgagtcataatcttcatttttggaactatctgatataattaatatgaatttttaaaaccaatcattttccttttcatttagtagacatatgggaaagcaatccatgttttttgcctgccaaattttgagaagcttctaatctagcaagagaatattcatagaaayatgaattatcttatgctccctagtatactataaacttcctttgtttgtttggtaa

SEQ ID NO: 677049 - DNA, 638 bp, Homo sapiens
ttaatatatctaattttatagaagaattccatcagaatttaattctagctcctggaatagccttagctttaggaggctacacaatcaatatgcagaatattagacatgttagggcttccaaaaaacattcattgaaaattgaaacattgaagatactatgatgaatactataataatttttgttgttttgttttacaagaaagactttttggactgtgagttctccctatgatgactgttccatggctagggtccttatagtactaagaaatatatttcctctcaaaatctcccctgaagtagtcattataatatctcctcccaaaacctgtccacaacaacaacaaattgcgtccttttcagggttgggtacrgcacaaaacagagattgtgaaaagatacttgttgtaaactgttttctgtttacaaatgcaacagcaacaaataattttcttatcagaacctaaattctgacaccatacctcagtacaacactgtgccattcaaaaaaaaaaaaggagaaataagctgggcatttggaaacgcactgggaaacatctccctataccctgaggagacctatctttatgccaaattgaattattttgaaaactcgtgaatgacattagctgaggtta

SEQ ID NO: 677050 - DNA, 659 bp, Homo sapiens
tgacaaaaaatgcactcagaaaattcattctggattcaatgacaaaaaatcctgaccttaaggacctgatggacaaaagggaaaagcagataaattaatagacagttaaaatacactataattaatagaacataatgtgggaatgcagacatgggataactaatttagcttgttgagcagagcaacacagagaaaaatttgtaaggtttcccaaaagcactatctgatctgaacctttaagataagtaggaaataggtaggtaaggaatggaatatgttcagagtgggaagcagtgtgaggtaaaaagagaacaggtttggagaaaagaaaacacttctttaggatcagaccaaggagtgtggcagatattagtgtgaggtgcagagagctgttggcatctgtggagtaacttcaggcaggggagtgatatagtcagcttttcattttggatttaktactgtagtctagtggatgtagagagaatggattagagaggagaccagttaggagttccttgcatcaatctagctgagaaacgatggctggaaatcatgtagtagcagaggacatgaaaaaaataaaataatggaatcctgagatttgaaggaatttgaactaataaatgtgggtgatggactggatgtggaaatgtagagtg

SEQ ID NO: 677051 - DNA, 619 bp, Homo sapiens
taatctttcctcattgttctaattgtgaatttctttggaactttggtgatgttttctatgttcccatttagttctgagtaccagaattagacacattatatttattattatctttgacaaaaatagtgctaaaaaagccttcctaatatgccatatgcatcacggccgtaggaaaataggcgtaccacttgtcacttccctaaaacaggtgctcccaaaggcaattcctgcatgtcctagaggacttttgtgtgtgtgtgtgtgtggtctgtgtgtgtgtatttttaactgccgtttttgaaccaatgtaacatgatagaacatgtattaggatgtaattggttccaggttagttaagtaagaaatgcatttaattctttctcaccccttgaagaatatttctacttctccrttaaataaatcagattttaaacaaaaatggaataatccctcaaatgtaattcaaaatacaacacacagtctcttgatttgtgagaattagctattgtacttcttcttttgaaaataaccctttaaacattaaaatcaacagatgacagctttagtaatctgagacaatttcatgaattgcaatatttacttatttgggaggatgtta

SEQ ID NO: 677052 - DNA, 677 bp, Homo sapiens
cagcttctctggaatcttaattccaaggtgcagtgcatttttccatagtccctagtccccaggtctccagagggcccgggcccactcctagcatcccctctgtgcagtggcttgagtgagaggttagttggcgtgactgaaaccaggacttgggattctcatgttggtgcttcttccagcagcwctttgagaaaaccaggaaccactagcacatcactctcaagtctgtcttcccgttttttctggaaagtaaaagttactgttaggaaaaaagattagtgtttgagaaaacaaaatgttggtgcgccttctgtcagtggcattctagctgcctcaaatttcttttcattttgagtcagggaataaacgaccaaaatgtacttagtaccctggccacatgtatggaagccaaaggcagaatagcgacttgggttagatcacaagggagaagcgtaatttcagccacatctatcttcacaatcactgctcctctacattttcgttgaaaaccatcctgacttaaataacctgattcccaatagtgcatttggtttcagtgctgtttccaaccagtttaaaacaaaatcacaagccttgaagaatttgaagaatttaaattttatttctacaaaggataattattgaaaggtatagcttcctgggcttatggtcacaca

SEQ ID NO: 677053 - DNA, 677 bp, Homo sapiens
cagcttctctggaatcttaattccaaggtgcagtgcatttttccatagtccctagtccccaggtctccagagggcccgggcccactcctagcatcccctctgtgcagtggcttgagtgagaggttagttggcgtgactgaaaccaggacttgggattctcatgttggtgcttcttccagcagctmtttgagaaaaccaggaaccactagcacatcactctcaagtctgtcttcccgttttttctggaaagtaaaagttactgttaggaaaaaagattagtgtttgagaaaacaaaatgttggtgcgccttctgtcagtggcattctagctgcctcaaatttcttttcattttgagtcagggaataaacgaccaaaatgtacttagtaccctggccacatgtatggaagccaaaggcagaatagcgacttgggttagatcacaagggagaagcgtaatttcagccacatctatcttcacaatcactgctcctctacattttcgttgaaaaccatcctgacttaaataacctgattcccaatagtgcatttggtttcagtgctgtttccaaccagtttaaaacaaaatcacaagccttgaagaatttgaagaatttaaattttatttctacaaaggataattattgaaaggtatagcttcctgggcttatggtcacaca

SEQ ID NO: 677054 - DNA, 1964 bp, Homo sapiens
tgaccgaaatcaatttaaaaatgaggatgatatgtctcagttggaaacagtagaacttcagtagcaaacatttattgatttatagaaggatagaaacttccttttttccagaaacagccgggttggttttttccacttgagctctctgcaaaccgctaataaggtctttagctttgtgatcttagcataattcatggttgtcaagagaaatatttgctgacttaaaggatatgttgactcttatcaatgaaatgcaatgaagctgatatttgtactcagaatttttatttcaggcatactgggcctgttctacatacataggaagaccagaacaataatacttgctctgtgataaacagaagggtatactgattttggaaaatatgtcagctcaatttggaagattgctaaaccacctaaaacagagcctgtttaaaaaataaataaataaaaaataaaaaaaaggctggcacggtggctcacacctgtaaatcccagcactttgggaggccgaggtgggtgggtcacctgaggttgggagttcaaggccagcctgaccaacaaggtgaaatcccatctctactaaaactacaaaaattagccaggcctggttgcaggtgcttgcaatcccagctactcgggaggctggagacatgagaatcacttgaacccagaaggcagaggttgcagtgaaccaagatcacaccactgcactccagcctgggcgacagagagagactccgctgaaaagaaagaaagagagagagagagaaagaaagtggagagaaagaaagatggaaagaaagaaaagacggtgtgcttttgtttgctgaatgatgggattcagagcagccagtgttgtcttctgcaacccgcaaacacccatgggaaggagagcttgtctggttagttagatgactttggatagatgaagagtacaaatgcatggcaggaaaaaggttttcaaggcatgatcggttttcctttgtgagctgaacttggactcttcagaagtcctgaggacgggccagcttggcaagttttctccttttcagcttccagtgtgcactccttctttccactctcacctctgaatgctgtgtggaggcgctgatctgcctaagacccaggctgtgagccaagctgtttttaatgaccgtccttaagcttcagcccaacagctgttttacaggtgcacatgattcagcaactagctcactgtgagtgtatgatttaaaaggtgcatgtaaatcatttgaaaaggtattttaaatgctccagtgggctcgctatttaaaggaatccttcagcaaatcttttttgaaagggaagactctccttctaatgccagtaatgatcaccgccccctaggtttggccttatgtatatttgatagatttaaagtggggtgagatatattttcaggccgctacgctctgcagagttccagattgaacttcaccagcttgtttatcaatgttgtcactgccttcctgccccacaggagcatcagctggtttggcaggaggaaaaggcagatcatctgtgcctctatctgactcaccctccctgccatacagagcagtttcaggcttgtctccacattccctctttctgtgaatgaagaatcacatggtcacataaaaaatattattggagcttcaaggatgaaaaattcaggaaatatacttaatgaagttkaatttcaaaacaggaaatatcttctaatttgggaagtgtgtgtgtgtgtgtgtgtgtgtgtgtttaagctaaataatgaaatcttataaaaacttcctgcctgaagaacttgcatgactgtataaacagctttttgatactgtgtatcacatgctgttcaaataacctgtcagtcccagtaggtcctaggtcaacatcccttcctgcattgttgcagtcatgatgacatagtgttcgctatttttgtcgaaatgttgacaaag

SEQ ID NO: 677055 - DNA, 594 bp, Homo sapiens
agctgagcaggtcagatatcctagtttagatgagttaccccaggcatgccaatttcatctagtcctccactgtttgagagagaccaagagatctgtggtttaagatgtgtagctggttcatgaaagagtcaggaaattccacccattcttttcaaaagaatgtaattaacctgggttgcagtagttgagaaaatgctttgcaaagcaggtggagcttcctataagcctaagtgacgagaagaacagggcaggtagagttcaaagtcagtccattctctayattaagggaagctgtgaaaggaaggccttggaaacattgaaaagcacataggggcatggaggatcatgagctgaccgatcttttctgacatcaagtacattaaacacaagttgagcaaatcgatgcaactattttgtaatgaaataaagtgttcaactatgatgtattttaaaacaacaaaaatagaagcttggtctggcctctaactttggatttgggaggcttagaaattgtgtgagagaacatattaaagaaaagtaaaatattaacacaggcagtactttcccatactttaatatcgagactcttgacga

SEQ ID NO: 677056 - DNA, 594 bp, Homo sapiens
agctgagcaggtcagatatcctagtttagatgagttaccccaggcatgccaatttcatctagtcctccactgtttgagagagaccaagagatctgtggtttaagatgtgtagctggttcatgaaagagtcaggaaattccacccattcttttcaaaagaatgtaattaacctgggttgcagtagttgagaaaatgctttgcaaagcaggtggagcttcctataagcctaagtgacgagaagaacagggcaggtagagttcaaagtcagtccattctctacattaagggaagctgtgaaaggaaggccttggaaacattgaaaagcacatakgggcatggaggatcatgagctgaccgatcttttctgacatcaagtacattaaacacaagttgagcaaatcgatgcaactattttgtaatgaaataaagtgttcaactatgatgtattttaaaacaacaaaaatagaagcttggtctggcctctaactttggatttgggaggcttagaaattgtgtgagagaacatattaaagaaaagtaaaatattaacacaggcagtactttcccatactttaatatcgagactcttgacga

SEQ ID NO: 677057 - DNA, 632 bp, Homo sapiens
gctgaaggtagcagagcagtaactttttttttttttttttttgagactgagtttcgctcttgtctctcaggctggagtgcaatggtgggatctctgctcactgcagcccctgcttcccaagttcaagggattctcctgcctcagtgtcctgagtagctggcattacaggcacccaccaccgtgcctggaagatttttgtatttttattasagacggggtttcaccatgttggccaggctggtcttgaactcctggccttaggtgatccactggcctcggcctcacaaaatgctggaattataggcatgagccaccacacctggccccagagcagtaatcttaagcgatgcttataaggagccgaagcttaaacttgtaacacctagagtcatcagaattcactggtgagcaccacaatccagtttgcatgtgtcaccacttttctaatcaaccagcacattgttaaaattagcaattatatcacacttatttatctttattcccaattatgaaataaccatgaaaataaattcaattaagcataattcagatggaactgtttgaacaggctgcggttgtgtacactgtcacactcaatttccaaaacaggcttttatagcaaacatttctat

SEQ ID NO: 677058 - DNA, 632 bp, Homo sapiens
gctgaaggtagcagagcagtaactttttttttttttttttttgagactgagtttcgctcttgtctctcaggctggagtgcaatggtgggatctctgctcactgcagcccctgcttcccaagttcaagggattctcctgcctcagtgtcctgagtagctggcattacaggcacccaccaccgtgcctggaagatttttgtatttttattacagacrgggtttcaccatgttggccaggctggtcttgaactcctggccttaggtgatccactggcctcggcctcacaaaatgctggaattataggcatgagccaccacacctggccccagagcagtaatcttaagcgatgcttataaggagccgaagcttaaacttgtaacacctagagtcatcagaattcactggtgagcaccacaatccagtttgcatgtgtcaccacttttctaatcaaccagcacattgttaaaattagcaattatatcacacttatttatctttattcccaattatgaaataaccatgaaaataaattcaattaagcataattcagatggaactgtttgaacaggctgcggttgtgtacactgtcacactcaatttccaaaacaggcttttatagcaaacatttctat

SEQ ID NO: 677059 - DNA, 652 bp, Homo sapiens
gccgacatggtgaaaccccatctctactaaaaataaaaacaataaaaataaatggccaggtgtggtggtgtgtgcctgtaatcccagctactcgggaggctgagacagaagaatcacttgaatctgggaggcagttgcggtgagctgagattacgccactgcactccagcctaggcaacaaagcaagactctgtctcaaaaaaaaaaaagaaactcaatgtactaaatatacatgggagaatatcaaattggtaaggagagcaattatccacagcaaatgtcaaacactcaatggaaaaaacaatttatccgtaatattaagcaccttaatgttagaaggacccttccaacagaagaggacccctccccccagtctaaaggttaytggaagctaagttatttcacaatttatagtgaagatgtgtgatttgttttcgtttctgctggaagaagcagaaggtaaaacaggctggaaagaagaaatgggcagaagcgtgtctgataaaaagcttagagatgtgactgacatcggttaaaaatgaactggtactatttgccttttcaaatctaatccttcacttaagctgccaaataaatgttctggggcctttaatcattgtatcagggaaaaatttctttcttccaacttgtg

SEQ ID NO: 677060 - DNA, 684 bp, Homo sapiens
ttatcagttaatgcgtgcacagagcatactgcatttcctggcacatagtaagccttcacaaatggtaacaataattattactgtccactatgttcaaggcatgccaggaagaaaaggggtgacaaaaacaattgctctcctggagcaccgagggtcttgggcacctggccttttacccaattaacaaaatggcactggctactcasggtatttccaattaaatgattcagcctgcatactccagactgttagtcttgcactggtttttaaccatttaaacaactcatggcttcattaattactacttgaatctatttgtaaagtttgaaagattaaatataaacatctctgtaaatttataaaaattaaattctaattcattgttacaccatttaactgtgaactttaagttttaatgtgtagaggtaagcacagccatctttaaatgtttaagaaaaactttcaggaatggacattgaaaaatttgggaaaataggctatctcacactctgtaatacatttaggttcacctagtttatacatcacagtcccagcttagtgcctgttaagtgctgacaattcaagaatgttgcttaacaatgttttctcattttggctttcaaaaaataagtatgctgggtatggtggctcatgcctgtaatcccagcactttggaagtccaaa

SEQ ID NO: 677061 - DNA, 684 bp, Homo sapiens
ttatcagttaatgcgtgcacagagcatactgcatttcctggcacatagtaagccttcacaaatggtaacaataattattactgtccactatgttcaaggcatgccaggaagaaaaggggtgacaaaaacaattgctctcctggagcaccgagggtcttgggcacctggccttttacccaattaacaaaatggcactggctactcacggtatttccaattaaatgattcagcctgcatactccagactgttagtcttgcactggtttttaaccatttaaacaactcatggcttcattaattactacttgaatctatttgtaaagtttgaaagattaaatataaacatctctgtaaatttataaaaattaaattctaattcattgttacaccatttaactgtgaactttaagttttaatgtgtagaggtaagcacagccatctttaaatgtttaagaaaaactttcaggaatggacattgaaaaatttgggaaaataggctatctcacactctgtaatacatttaggttcacctagtttatacatcacagtcccagcttagtgcctgttaagtgctgacaattcaagaatgttgcttaacaatgttttctcattttggctttcaaaaaataagtatgctgggtatggtggctcatgcctgtaatcccagcactttggaagkccaaa

SEQ ID NO: 677062 - DNA, 996 bp, Homo sapiens
caatgcgcactttccctcctcctttaaagaaggatagagtatgacctacatgatgatttgttagaagttagggacttcagaaattgagattaaaatttaaaaatgaagtgaaatgtgacctttcttaccctaaaaatccatttctgtctcagaagaaaatttctagttattggatttcaaatgcactcatctttgaaaaacagaaataggtatatagccttacagctgatttataagccaagcatcaggatctgataatcagcaaacctggcattgtaatttagtttgttcattcaagaaggagaaggacttagattcataattcaacgctgacctctagacttgactaatcatttcaaaatgcatgatataccatctgctggtaataactcaaaaagacattttataatatgcatgatttcatttgatgatcagagtaactgtgggatttggatagcatcattatccccatttcacagactaaggaattaaagctcagagtgcttatatgtttcacccaaggttacaccactattaaattagtgaagcttaaattgattttagttcttctcacttcaaatcctatacattttctgaaccctagggaactggtacaaaagaatgtagggaaataaacatagactcattccttgtatcagcaaacagctcaagatacagctctctaatgacagaaaaatgttattttcatatataacctagatgtgttcagatagcaattygtgctcctcagagctggcacttgatgaaactgagcacaagaacctatgctgcaatgcctccaaaggcagttgagtgacaccagggataggattattctgagtgccccaggaaacttttctacacctccctggcatgtatttaaattggtggcataacagagatccagcatgttatccctcggaatatggctgcccacttctattctaacaaatttggaatgacctcaggcctggatagagattcattcattcctaa

SEQ ID NO: 677063 - DNA, 996 bp, Homo sapiens
caatgcgcactttccctcctcctttaaagaaggatagagtatgacctacatgatgatttgttagaagttagggacttcagaaattgagattaaaatttaaaaatgaagtgaaatgtgacctttcttaccctaaaaatccatttctgtctcagaagaaaatttctagttattggatttcaaatgcactcatctttgaaaaacagaaataggtatatagccttacagctgatttataagccaagcatcaggatctgataatcagcaaacctggcattgtaatttagtttgttcattcaagaaggagaaggacttagattcataattcaacgctgacctctagacttgactaatcatttcaaaatgcatgatataccatctgctggtaataactcaaaaagacattttataatatgcatgatttcatttgatgatcagagtaactgtgggatttggatagcatcattatccccatttcacagactaaggaattaaagctcagagtgcttatatgtttcacccaaggttacaccactattaaattagtgaagcttaaattgattttagttcttctcacttcaaatcctatacattttctgaaccctagggaactggtacaaaagaatgtagggaaataaacatagactcattccttgtatcagcaaacagctcaagatacagctctctaatgacagaaaaatgttattttcatatataacctagatgtgttcagatagcaatttgtgctcctcagagctggcacttgatgaaactgagcacaagaacctatgctgcaatgcctccaaaggcagttgagtgacaccagggataggattattctgagtgccccaggaaacttttctacacctccctggcatgtatttaaattggtggcrtaacagagatccagcatgttatccctcggaatatggctgcccacttctattctaacaaatttggaatgacctcaggcctggatagagattcattcattcctaa

SEQ ID NO: 677064 - DNA, 2163 bp, Homo sapiens
ttttttgagaccgtctcactcttgtcctccaggctggagtgcaatggcacaatctcagctcactgcaacctccacctcctgggttcgagtgattctcctgcctcagcctcctgagtagctgggattacaggctcccgacacygtgcccggctaatttttgtatttttagtagacacggggttttaccatgttgaccaggctggtcttgaacccctgacctcgtgatttgcccgccttggcctcccaaagtgctggaattacaggcatgagctaccgtgccctgccaaagaatttttttaaaaaaatgacagtcaggacactcgatttctgctagtcccagtctgctagaaagaatgtacttttacaaaaaccagttcatctcaattttgctcactatgttagcagagtatgtctcacttgtctactttcttgtttgtttcttgagctacctgttacctctctcagtgagggaagttaaagctgcagcaggagcttggagagctttttcaactggttgacagctcttattgtcacaccttagttcatacgctatctataggcgactattgtttcagtgggttgtggtttataaagtgctaacaaggcttgagacataaagatactattatttcaggtgacactacttgttatgaatctgcagcttctcacatccctgactcttgtgaaaatactccatatacaattttccggtctgtttcagctatatcatttgacttccctgaagtatgggacttcatgaaagcgtgattccctttcattccaactcctgatgtgatttccaagtgaatttacattattttactgtatcattttacattattttaatatcttagtgagtttttaaatcagcagtcatgcctcagctgaatctcaagggacattatatggccaccaggaaaagctagtgctaattaagtttttctctggatttctcattactgacaaacagctcttgacttcacaaaaacaccagtggcttcacagaagtagcatccagtagttggtcaatgttatttctgtggttgctataaccacataaggcagctctttgacccctgaggatcttatccctggccattcctgtttgagtcagggatatacacttttcccaaatttattgactttattaagtggacaaccacctaaatcaatatctctctctccttctccctctttcccctctccccttctccctttctttatcctctctctttttttcaaatttgagagtccatgattgggtattgatgagcaggatagcttgggggcaagaaacctatttattagcaatgacctaatgtatgagcatagaaagaaaagactgaggaaagccaaagatggagaacctgacagttccgagaaaatatgactgacctcaacctgtgaggctttcatgttctcaaatgacacagaaatgactaattttcttctgttgaatttacttgagttagcctcagtggatttctatttcttgcaatggaaagttaatcagtacaattgaaactttagtttattaaaagttatttttaaatgcatttatcaaatatggatttttcctttcaataaaagtaatagtagttttgcatttggcaaggaatttaactttttcacaattcttttacatctgttatagccacagaagatagaacaactgctttcctctatttggtagatgaagcaagagtctgaaaagatcagataatttgcctaaaatctcacataaaactagaggtagtactggaactaagtccctgaccctcaagcattgattgtcttcagtgatggcctgaacttgcttgtaacagtttaccaattctgcacctgatatcaacttaatttcgtgttcagttttcagtgacattgtgctgacagcttgaaattagccatggtgggagtatttatgtcacagaaatcagcgaacaattcaactaaaagctttaaaaaaaaaaaaaaaagccagttttcaaacatttaccacttcctcaaacaaactgaatattttataaaatcatttattatatattctggagccaagggtatccatgtatctttaaagcaaagctgaaaactcttaatttacttttaattggaactttacaatttttcaccaggagagcttccagttgtgggtgaaaacctgta

SEQ ID NO: 677065 - DNA, 2163 bp, Homo sapiens
ttttttgagaccgtctcactcttgtcctccaggctggagtgcaatggcacaatctcagctcactgcaacctccacctcctgggttcgagtgattctcctgcctcagcctcctgagtagctgggattacaggctcccgacactgtgcccggctaatttttgtatttttagtagacacggggttttaccatgttgaccaggctggtcttgaacccctgacctcgtgatttgcccgccttggcctcccaaagtgctggaattacaggcatgagctaccgtgccctgccaaagaatttttttaaaaaaatgacagtcaggacactcgatttctgctagtcccagtctgctagaaagaatgtacttttacaaaaaccagttcatctcaattttgctcactrtgttagcagagtatgtctcacttgtctactttcttgtttgtttcttgagctacctgttacctctctcagtgagggaagttaaagctgcagcaggagcttggagagctttttcaactggttgacagctcttattgtcacaccttagttcatacgctatctataggcgactattgtttcagtgggttgtggtttataaagtgctaacaaggcttgagacataaagatactattatttcaggtgacactacttgttatgaatctgcagcttctcacatccctgactcttgtgaaaatactccatatacaattttccggtctgtttcagctatatcatttgacttccctgaagtatgggacttcatgaaagcgtgattccctttcattccaactcctgatgtgatttccaagtgaatttacattattttactgtatcattttacattattttaatatcttagtgagtttttaaatcagcagtcatgcctcagctgaatctcaagggacattatatggccaccaggaaaagctagtgctaattaagtttttctctggatttctcattactgacaaacagctcttgacttcacaaaaacaccagtggcttcacagaagtagcatccagtagttggtcaatgttatttctgtggttgctataaccacataaggcagctctttgacccctgaggatcttatccctggccattcctgtttgagtcagggatatacacttttcccaaatttattgactttattaagtggacaaccacctaaatcaatatctctctctccttctccctctttcccctctccccttctccctttctttatcctctctctttttttcaaatttgagagtccatgattgggtattgatgagcaggatagcttgggggcaagaaacctatttattagcaatgacctaatgtatgagcatagaaagaaaagactgaggaaagccaaagatggagaacctgacagttccgagaaaatatgactgacctcaacctgtgaggctttcatgttctcaaatgacacagaaatgactaattttcttctgttgaatttacttgagttagcctcagtggatttctatttcttgcaatggaaagttaatcagtacaattgaaactttagtttattaaaagttatttttaaatgcatttatcaaatatggatttttcctttcaataaaagtaatagtagttttgcatttggcaaggaatttaactttttcacaattcttttacatctgttatagccacagaagatagaacaactgctttcctctatttggtagatgaagcaagagtctgaaaagatcagataatttgcctaaaatctcacataaaactagaggtagtactggaactaagtccctgaccctcaagcattgattgtcttcagtgatggcctgaacttgcttgtaacagtttaccaattctgcacctgatatcaacttaatttcgtgttcagttttcagtgacattgtgctgacagcttgaaattagccatggtgggagtatttatgtcacagaaatcagcgaacaattcaactaaaagctttaaaaaaaaaaaaaaaagccagttttcaaacatttaccacttcctcaaacaaactgaatattttataaaatcatttattatatattctggagccaagggtatccatgtatctttaaagcaaagctgaaaactcttaatttacttttaattggaactttacaatttttcaccaggagagcttccagttgtgggtgaaaacctgta

SEQ ID NO: 677066 - DNA, 2227 bp, Homo sapiens
tgcatatatataactctatatgtatatccatatatgtatatacacaatatacatttaatttgtatatattatataaataatgtagtattaaaaattcagtacagtgtctcactagtgacttgtctaaatctatgttaaccaagatattggagttctttaggctcaaaagattttaccattagtttgagaatgaactactccttaccaggatttgttaatatagtaggcaagtcatttgacttctctggatatcaactaaatcatctataaatatagcatgcaccttataggtttgttgtaaaaattaaatgagatagttaaatactaagtgcctagaacagagtagaaatacagtaactggtaaatttcctgtttctttctgagataagattacagccagctgtgaactcatctagtcattgtatcatctgggtcaggtttctgctaatttagctgtcgcatgaagtagaatgtcccagttcaggaaaaaaataaaagaaaggtgattgagttatttttgaatagctggttttgctgttcctatataaatgatgacaataggtacactaaactttcaggggatgagatcatacttaagaatttagaaaatatataatgagatgcctcaggattcaagttwataagagaatgagcagcattctactctcatgagtaaaaatattgctcgacttggagaatttaattgagattatttttattttattgagtaatgaaaagttttctttaaataaatctaaaattctggcccagatttcccccctcatgtttttttccaagtgtttctcaaaatgtaagaaagttcttagatttgttgtaccttaagaggagaagatggaatagaacaaaatggaatgagttttcagtcctggttttgccatttactaattgcatgatttcagcaagttatcccaaatttttgagacttggctctataaaatatgggaaatatctaccttacttataggttgttgaaaaggttaaatgagaatgtaattacagcagtcaccattgggttcctggttctatagcaggcactaaaaataatcactcttctacctcttataatattatttatttagaaaaaatgccacatatcaaatgcattgttaaatgatgtatattaccaacccagctcagtgtttcttcaagttgaatgattcaaacttcttccataaaatattgttatctgaataataatggaagattggttttaaatattttcgatgctttctgaattacagagcacatggcttccttcaaaatgatcactcacataaaggctctaacttaagcaagttcttattttgaacaatgaaagcagattaaaatacatttccccttcaaatccttatagctaagaataatagcagaaccatgagaaatttcaaagagtagattatattgtttggcaaccagtcattcttgaccagcctttaaaattatgaggaacacagaattaatgagccaatatgtcattcttattttgacacagaaataatatttaagcgatactgacagctaaattttccatttgccatcatttcaaatccaccccctaagtatttcttgcttctatttcctcttctgcattttaagctcattgccctacttcaggtcctcattatctcccactggaatgtggcaatttaaaggatctgttttcccggattctcagctctatatgctacctctccaatgcatgttttatattgaagataatggagcaaactatttaagagacaagtcagactatgctaacaggatgtcaatgctacaagagagtctcatgttgaagactctagacccagaagagaaggaaagcagagataagtgagcctgacattgtgtggtttgataatcctaaattgaacaagcagcagaaaattggggctaaagactaagaaattagaagaatcttaggccatctcacaatttcaagaagacagaaattagaatccatgcggggcatggtggctcacacctgtaatcccagcattttaggaggctgaggagggtggatcacctgaggccaggagttcgagaccagcctggccaacatggtgaaaccccatctctacaaaaaatacaaaaattagccgagtgtggtggtgcacacctgtaatcccagctactcgggaggctgagacaggagaattgcttgaacttgggaggcagagttgcagtgagccaagatggcgccactgca

SEQ ID NO: 677067 - DNA, 593 bp, Homo sapiens
ttatcaatacctactgctgtgcaacaaattacctataaacttagtggtttcaccagcctagaaacatagcaagaccctgtctctacaaaaaataaaatattagccaggtgtggtgggacacacttgtggttccaggtacttgtggggctgaggtgggaggatcacttgagcccgggagataggaggctgcagtgagctatgaacacaccactgcattccagcctgggtgagagagtgagaccctgtctctaaaaaaaataataatttataaacaaataaaaaacttcgtrgtttaacatgacaataaaaatcaattatttcacagtgttgtaactgggtggtgctggctcagggtgtcccatgaggtggcagacgtgaaattggctgggaactgaataatacagcaaatctgtgagtgagactgccttgagtttcagttctggctctgccacttactagccatgtgaccttatacaagtaccttaaccattttaagctcttaattttctcatttgtaaaataaggataacagtagaacttacctcgtaagactgttgtgatcattaaacgaaataacatcattaaatacgtaa

SEQ ID NO: 677068 - DNA, 2552 bp, Homo sapiens
ggataaatgctgattaaccayatattggggtaagaattatggtttgtttgtgtaatggaatattatactgtagtaaaaataaatgaatttcagctatatgcaacaccatggacacaagaatggatctgaataatagtgaatgaaaaagacaaatcccagaagatggcatagtatgataccgtctttgtaaagtacagaaacaaaatttaaacaatattttgtttaggattacatacatataagataaaactgtagagtaaaagaaagggaactcaatattggcttatctttgaggtagggtagggagatgggctgaaggaagagcacatagacaggacatacataagttattggccatgttttggttattgagttcaaggtgggttcatggatgttaattatggatgttaattgcatcactataaacacagaaataaaaataaatacataaatagaagtaggaaataaaaaatatatattttattagaaggactgaaagactaggctctcagtggagtttccagaaatcacttccagagcccttacctaattgaccacatgggggatctctacatgggaggccaagacaactgaattcaagaacactccattgtatctgtgagctaaatattggaaatcacaaagccactgcaattgccactaaatcttgatacccagaaagctgaaaaatggacactggaggttgtgctgcagaaaaaattctctgctttttataatgcatttaccagtagaaagcagccagagggtaagatggcctttgcctcatttcctccctccagatttcatttgggtaactggcagaaccgaattagcagacccaacttagcccccagaactctagtggcaaggagcctaatagtaagttttagcttcccagccttggaagtatagaaatgaatactagaaaggtgaaatggaaattgagcaagccaattaatagtatctgtggcagagactgctgtgttttcatcaaacctatttcattttcttctcggacataaaattaaatttcccattctcccatgatgttagtagtgccacgtgatagactctagcaagtatacagaagtgatatgctactcacaggcctggctcctgaaacatgccatatgatcatgttctctgtcctctcccagctgctggctgcatgttggtgaaccttaggagtcatgcattaaagatggtggggcctctgttagcttagtctctgcttgactgcagggagcagaggtccctctctccaccccacccccctacattggacagtagagtgggaactgaactttatgtgtgtattgtgttaagccactgagatatggagattgtttttatacaactagcactactattatgactaaaaccacaaatgggaccttgaagtaggttgctcctaaaacaaaaacctaaaatagatgccactggcttagcataccagttgtgggaagaaaggaaactaatgccagaggcagcaaaggcagcaatccatgctatgcagcagtaaaacatttggcaaaaattctcgcttatagtaacttaatagatgggccatatgtttactaatgtcagctccaagagaagcagttggaaagaaccaaactgttagtgtgtattggctactactggctggccagtataggcagtgtacaaagataaatgaaagaaaataagaaaattacataaatttggagtcttaaagtagactactacttctagatcccaaatagaaggaaataagattgggcaaactctgagaaaccaaggtctgctaggtcactgccttagggcaaagatcacattaaagttgtggccttcccactcagtcctaacagaatcaaggtggctgccagtaggtaggctgtctcttgggagaggcatgggaaaaaagacataaagaagatgaagagctatgtcaggaaagtatttgggatgttgtttgtggcacaggatgtctagaaaaaagtcaatgagaagcctgttaagtttctgaggaaattttatttccaaagaaaatgtaagtctgggacaaagaatagtcaaggcataaaacaaccaccacccttgggctctcagctttccatgagaaggaagttgactccaaaatctacatatcccatagatagcttactccctatcacccacttcggatatcaccacagaggataatggcaatgaagagaattccgaaagagtggagccagggaccacagaaaaatgggcaaaataatttctgccatagaacagaaacagtccaagtaaatttcctaatgcttcttggtcaaggaaacttcacaatgcctaccagactgctctagacaagtgatggctttgtgtctttgatctttcccctttccaaatgagacactgcagttctttgtctctgcttaccattgtatatttggtgatgggaaaggagcaggaggtagaaagctcttctttttagtttataaattactcaaccagaaagaaccatatctataccagatggacatgcatcccagggcttttagctgaacacaacaactgggaataat

SEQ ID NO: 677069 - DNA, 1915 bp, Homo sapiens
tggagtttttataaatacagcttttaatagaggtgacatacatacagaagaaggctcaaattataagcttacagtttaatttacacacacaagcaaccctgtatagccatcacccagatcaagaaatagaacattataggtactcagaaagccccttgagccccctctcagttgaatagttgaatgttagtgtatgaggcagtctttatgatacatgggtgttagccctgcctttgagttctgggttgacaaaaaacatactctccttgcataacactgaacagagtatgttactggcctgcagatcagcgayatacctttttggaagccctcagttcagacggagtttaaatgggaggctgatactcagagaaaagagcattccagagatgttttttcaaagtccacttgagtcatgggactcaatgtaacagagtttatttcttgacattaacctttaaagggaatttttccaagtaatgaaacaagccccaagaccaatatgtgtgtagttggctgtactcatgggctctcaaaggtcagctggtaacaacccttgccccacagagcaatagatgccctttcccctactttccgcagagctggcttcttgtgctttttgctggagtgagccagcaggtcagcaggtcttttcacaggcatcagaatccctttgggagagagcaactgactttacttttcacttttgatttcaatttcaatattgttgattggtggagtagagcgagtgccaatttgaaaatgtagccatgttatacactggtttgagcaactattttatatgtttctgtggggctgaatgagtgaagggaatcaccagtcgccttggggccaaggctctaccagagggtgtccagtcagtgcagactcccagtggccgcaccagtgactggcagtgttgcatttcccatgagagcagccaccaagtccctcagtccttgctttgctctctggagtcactgatttgagaacctttgattgcagccatttcattgagggacaccacgtttaccaaatctaaaacatttttgctgtgattcttgagatgctgtgaaatgcttccccatcagttataaattttctgattcaaatttttggatagataatacaaacacataatacagacttctaagacattagaaggatacacaaggaagtgagtcaccatttccacttctgtctctcagtgttaacctcagtagaggctgccattttttttagggtttttttgtttgtttttattgtacgtattacaatatatctttgtttatattgtatgtaatgtaggatacatttatctttccaaaggtagcaaactctatatagcattctttttacaaaataatagctttattgaaatataattatatgctatacaattcaccctccatatactattctatatcttgctttatcagctttttattaagaaaattcataaacatatgtaaaggagagagaacagtataaagaacctccattaatccatcagtgcagattctgcaatcattaaggcttcacaacacatgctttctctatattttcttcttcctcctccctctggtcctctctccttcttccctcttttttgctaaaatactagaaaacaaatcccagatattatatcaatctaccctatatattttaataagcatctctaaaaatactgccttttgctttttgacgtaataacgcatcttgaaattgatcatatcagtatattttaaattgcttcatttttaatggccatatagcattttaacatatagatatgctgttattgatttgttcaatttcctaatgatatttaggtttttccagtcttttactattatttaaaaattcagtgtatttgtatacggtatacacacatatatgtacacacatgtatatt

SEQ ID NO: 677070 - DNA, 669 bp, Homo sapiens
ttatattggaagtaatagtctttctaactttctacatcttaggtgaaagccaataaatagtaatacctcttgacattgtgtttaagtattaacttatcagagttagaggatttacctagaaatacaaccataaaagttgttaagatccacatagttttgggatttttcagaatcctttagatagcacttaatatctgtagtgtgatattctgtcagacataaagaatatggaaaacatacagaatttcactaactccaaatattaaatatgtaaatattttgagagccaaggtgttacartcttgccaatgcaccaccatgtcgcagtttctcgttgcctgacgtagtaatccagagttatttgtcttatgaccaagaaagttaaggagtgttaacacgaagggtgagggtggagtgaaagtttaataagctaaagaagaaagctgtccgctgtggagaggagaactggaagagggttgccatttttacagttgaatgcaaaagcgtttataggaaaccactgagggctgggcatctcatttgcataaggcctaagtttctggtagctccaccttgtccttctaatgcacatgcgggcccttagcttgagttactccataatagctttgttccctttaccattcacgtgtcagggaatggaatttcccc

SEQ ID NO: 677071 - DNA, 669 bp, Homo sapiens
ttatattggaagtaatagtctttctaactttctacatcttaggtgaaagccaataaatagtaatacctcttgacattgtgtttaagtattaacttatcagagttagaggatttacctagaaatacaaccataaaagttgttaagatccacatagttttgggatttttcagaatcctttagatagcacttaatatctgtagtgtgatattctgtcagacataaagaatatggaaaacatacagaatttcactaactccaaatattaaatatgtaaatattttgagagccaaggtgttacaatcttgccaatgcaccaccatgtcgcagtttctcgttgcctgacgtagtaatccagagttatttgtcttatgaccaagaaagttraggagtgttaacacgaagggtgagggtggagtgaaagtttaataagctaaagaagaaagctgtccgctgtggagaggagaactggaagagggttgccatttttacagttgaatgcaaaagcgtttataggaaaccactgagggctgggcatctcatttgcataaggcctaagtttctggtagctccaccttgtccttctaatgcacatgcgggcccttagcttgagttactccataatagctttgttccctttaccattcacgtgtcagggaatggaatttcccc

SEQ ID NO: 677072 - DNA, 665 bp, Homo sapiens
atttgcatgtgggagatttatttgggaaaatcctcttagaaacaaaatatgaaggatggaagaaaggattgggcagatggagaataagaggcattcacaacctaggcttcagctgcttttgtgggaagtcctggactttagggggctgtcaggattgtccaaagttgaggcgaaggtgctcaccgtttgccctcttttatcagccagattttaaatgtaggctgatgccagractaggcaactacctttagccaaatcctagggaagttactgggtgtggattcagctgtgagccttcagcaggccacagcttagggaactgaaatgagtgtcctggtactgaagggggatgagggatggcccaacacaccaactactgtgttacagaaactgtattagcctgttgttgaggctgttactaggacttgaggattacaaataaagctactgtgaacattcatgtaccagtctatataagggaatatgcttttacttactttaggtaaatacctaaaagtagcatgaattactattgtaacgttgacaaaaatcaagggaaattataagtacatatctctttcttcattccctattctgtcctattggtatatttctctatatttatgccaataccactttttttcaaaattcctgtagctttacaa

SEQ ID NO: 677073 - DNA, 593 bp, Homo sapiens
caaattgaagttctaggaatacattatatcaaaattatacattcttacatgtgtttggctctcattttatttagttcattcttatttaccttttttttttttttttgagacagattcttgttctgttgcccaggctatagtgaagtggcatgatcaatctcggctcactgcaacctctacatcctgggttcaagcgattctcatgcctcggcctccccagtagttgggattacaggtgtgcgccaccatgcctggctatttttttgtatttttagtagagacagggtttcgccatgttgcccaggcaggtcttgaactcctgatctgaggcattctgcctgcctaggcctcccaaagtgctaggattacaggcgtgagccactgtgcctggccagttttatttactttagattagtagggttcaatccataagtaacctgtcactgtttaccttgtgactctgttacaaacttggaacatcagtacatctatgttctttcaattttgagattcgctttagctttttcaaagaagcttttgtttttttktgtgtgtgtgtgtgtgtgtgtgtgatcattttctattggaattaa

SEQ ID NO: 677074 - DNA, 593 bp, Homo sapiens
caaattgaagttctaggaatacattatatcaaaattatacattcttacatgtgtttggctctcattttatttagttcattcttatttaccttttttttttttttttgagacagattcttgttctgttgcccaggctatagtgaagtggcatgatcaatctcggctcactgcaacctctacatcctgggttcaagcgattctcatgcctcggcctccccagtagttgggattacaggtgtgcgccaccatgcctggctatttttttgtatttttagtagagacagggtttcgccatgttgcccaggcaggtcttgaactcctgatctgaggcattctgcctgcctaggcctcccaaagtgctaggattacaggcgtgagccactgtgcctggccagttttatttactttagattagtagggttcaatccataagtaacctgtcactgtttaccttgtgactctgttacaaacttggaacatcagtacatctatgttctttcaattttgagattcgctttagctttttcaaagaagcttttgtttttttgtktgtgtgtgtgtgtgtgtgtgtgatcattttctattggaattaa

SEQ ID NO: 677075 - DNA, 774 bp, Homo sapiens
tgtatttcattgattctaagatgcacattttataaaacatattttagggttgccgaagtcaggatgcatcttgaaaccaacaagtatctttaagttaataaagctaagaatatttaatttcctctttccatcttttaacaatatatatggcaggtcccacaacttcctagtaacttttgagtaaaaacaacccraagttcatttcaggccagttgaatactttactttcatatctagtttaactctttcacctcttctttatctttagtacccatcaggactttgcctgtgacatctgcagaagggaacacatatttcttttctacttatctttgtatttgcattttacacaaaggcagagagatatgttttatcaagtactacatatttcttttctcaatgcctaaattttcaaaatacaaaatggcagaacgcaaaaatgtttcctggtcgggtcctaggggaactcttctccctccctatatttcttctgttggggttagaaagaggaataggatgtatgctatgttggtgtatgtttaattataaccaagtgtgtttactttataccatttattgaatgtttgcttaatatgcttagttctcatggcaacacttaaaagtattattatctccatattagagagatgagatcattgctagaactaggatttaaccatgtttcttggccactaggaaaaatattttcttaaaacaccatattaaagaactacagtgttggcattgatcattgagacataggtatatatgcac

SEQ ID NO: 677076 - DNA, 1092 bp, Homo sapiens
catcataatacaattgttttacaagttaaatttgtcctagcctgtttactgatgattgtcctacaatgcacaattatgtactccttttctagattttttcagagaaccaacaagatcatcaatgccatgagtgggaaggatgaactttcataaaatattgaaactggtcatagcagattactttcacttttaaccaacctccacatggtacaaattgaatacacatttataatcattaaaccatgcccagaagttcttttccatcacatttttcatgtatttatgacagtttccatttagttcccatatattccctattgtttattttctgaattataagtctggaaaacagagttgaaagacaccattaaactcacttttgctgttttttaaagagtgtttaaaagttttaaacagttgctggtttttaaagagtgtttttctatttttaaaatacattatctgaactgtatcttgcttttatcaggaagacagtcacaatgtgcgctctaagatacttttatatgcacaattttttttttttttttttttagatgggttctcactgtgtcgcccaggctggagtgcaatagcgtagtcttggctcactgcaaccttcgcctcccaggttcaagcgattctcccacctcagcctcacaagtagctgggactacaggcgtgtgccatgataccctgctaatttttgtatttttagtagagaccgggtttcactttgttggccaggctggtctcraactcctgacctggtaatccgccttcctcagcctcccaaagtgctgggattacaagtgtgagtcacagcgcctggctgccgaagtgtgtttctttgggtaatagatattatcttgaacacttagtgtaagttgtacttctttaaaattgagtgtgcttgttcatttagttacatcataattgtagacacagtttaatatatctttctaattgctctttaattggcagtgattcccagtattttctattatctcctctttcctcatagcttctttatcaaggaatgatttgaccaaaatataatttcaccagaggagttaacaatttaaaggaattctg

SEQ ID NO: 677077 - DNA, 1717 bp, Homo sapiens
gctaattttaaaatactttgtagagatggggtcttgctatgttacccaggctggtctcaaacttgaggcctcaagtgattctttcaccttggcctcccaaagccctgggattccacgtgtgagccaccatacctggccaagatgctatatcttgatgttaaactctaggagagcaaattctttccagagtggcctgtggactgaaagaatatgaggtccagggctctgcagcctgccgaggttccactcactgctgccctggkccctgaagtccacacaactgcctgggttgaggtctctgggcttgtgcctgtcagaccccagcagactctgctctgaaagtacatgcctgtctgctctctggacagtgggatcctccgtagcaggccctggtgtgacaaagcagggactccttaggatagcagagggttaagagccaggtttagtagtcatgctggcctgggtttgaattttggttatgcatctacccactgggtgacctgtccatgttatgtaaacattattttttttcttttgagacggagtcttgctctgtcgcccaggctggagtgcagtggcatgatctcggctcactgcaacctcttcctcccaggtgcctgccaccacgcccggctaattttttgtagagactgtgtctcactgtgttagccaggatggtctcgatctcctgacctcgtgatccgcccgccttggcctcccaaagtgctgggattacaggtgtgagccaccgcgcccggcaatgtaaacattctaagtctcagtttctttacctgtatgatggaacgatgtatttacctaacatgattttcctgcagattaaataaagggatatgtgtaaatcacacattgtatttgcctggcacagagtgttgaacgattggtagttgttaatagctattatttttgaattaccggaaagggaaccagtggagaccatatttccatccccggatgcacagtggagtttttgtggggctcagcaaacttctcttcattgttccaacccaatatatcctgttacgctgcctcagccttggggattggggcggatcagaaggctcagaaggcacagggttctggtgcattaatgagctctggggccatgctggaagtagctgagcgtgggcaccgggcctggaggttggtggaacactggtgctgggccagttcttggtcccagagaagcacctcttccttaccaacatgtccttctcttcaatgaatcattacagggttcaggtcagcctctgtgattccaggtgtggtggctcacacctgtaatcccagggcttgggaggccaatgcgaaaggatcacttgagggcaggagtttgaggccagcctgagtaacatagcaagaccccatctctacaaagtattttaaaaatagctgagcgtggtggtgcacacaagtatacagcccatgtgctattcctgaagagcaggagaaactgcctttaacagttatcagcctgatccagttcaccagctcggccaccaactagactatgtgaccttgggatgagtcattctctgtgccccagtgtccttccttctctggtcagttgcatatcctagacccaatcttttttttttttttttaaagttaaggtctttgatttggttgattgagagggagcaggagtagacaactcacaacagtggctaatctgaggaccttctgacccctccatcag

SEQ ID NO: 677078 - DNA, 1717 bp, Homo sapiens
gctaattttaaaatactttgtagagatggggtcttgctatgttacccaggctggtctcaaacttgaggcctcaagtgattctttcaccttggcctcccaaagccctgggattccacgtgtgagccaccatacctggccaagatgctatatcttgatgttaaactctaggagagcaaattctttccagagtggcctgtggactgaaagaatatgaggtccagggctctgcagcctgccgaggttccactcactgctgccctgggccctgaagtccacacaactgcctgggttgaggtctctgggcttgtgcctgtcagaycccagcagactctgctctgaaagtacatgcctgtctgctctctggacagtgggatcctccgtagcaggccctggtgtgacaaagcagggactccttaggatagcagagggttaagagccaggtttagtagtcatgctggcctgggtttgaattttggttatgcatctacccactgggtgacctgtccatgttatgtaaacattattttttttcttttgagacggagtcttgctctgtcgcccaggctggagtgcagtggcatgatctcggctcactgcaacctcttcctcccaggtgcctgccaccacgcccggctaattttttgtagagactgtgtctcactgtgttagccaggatggtctcgatctcctgacctcgtgatccgcccgccttggcctcccaaagtgctgggattacaggtgtgagccaccgcgcccggcaatgtaaacattctaagtctcagtttctttacctgtatgatggaacgatgtatttacctaacatgattttcctgcagattaaataaagggatatgtgtaaatcacacattgtatttgcctggcacagagtgttgaacgattggtagttgttaatagctattatttttgaattaccggaaagggaaccagtggagaccatatttccatccccggatgcacagtggagtttttgtggggctcagcaaacttctcttcattgttccaacccaatatatcctgttacgctgcctcagccttggggattggggcggatcagaaggctcagaaggcacagggttctggtgcattaatgagctctggggccatgctggaagtagctgagcgtgggcaccgggcctggaggttggtggaacactggtgctgggccagttcttggtcccagagaagcacctcttccttaccaacatgtccttctcttcaatgaatcattacagggttcaggtcagcctctgtgattccaggtgtggtggctcacacctgtaatcccagggcttgggaggccaatgcgaaaggatcacttgagggcaggagtttgaggccagcctgagtaacatagcaagaccccatctctacaaagtattttaaaaatagctgagcgtggtggtgcacacaagtatacagcccatgtgctattcctgaagagcaggagaaactgcctttaacagttatcagcctgatccagttcaccagctcggccaccaactagactatgtgaccttgggatgagtcattctctgtgccccagtgtccttccttctctggtcagttgcatatcctagacccaatcttttttttttttttttaaagttaaggtctttgatttggttgattgagagggagcaggagtagacaactcacaacagtggctaatctgaggaccttctgacccctccatcag

SEQ ID NO: 677079 - DNA, 627 bp, Homo sapiens
ccagtctcaagtgctgtggaaggtcatgagagtggcaaggctgaacctcaagaccagtttcccaagcagggaggagagggtgactccaacactgcctagcctctcccatgccgtccctttctggtctcactcaggccagggaggactgttttcccaggatggcccaccctgaaatgtaggaggcaaaagaaaggagcgctatcaaaaatccctggggcagtcttgttgccacttctctgaatcctttcaaaggaaaagagctcataagcaaggccatgaaattgttcccacttgtataagcagaattctcacacttgtgactattgagcttgtgatgtgaaattacttgttccatgtctgtctttcccaccgggcagtaactgttaccagggaagggaccaggctggtcttgttcacttgtgcctaggagagtgcctggtacacagctggtgctcaacacatatgtgttgggtgataaactgtgcatggacgctggtcttcttctagcccttagttaggaattagtatgaacaagacctcttcccacccttctttaccggaccagcctgyagatgctcttgctcccctctcccccgtccaccagggcctcattttgcatttgcagag

SEQ ID NO: 677080 - DNA, 443 bp, Homo sapiens
  misc_feature 432: n = A,T,C or G
tgagacagggccttcctctgtcacccaggctggagtgcggtgacatgatctcaactcactggaatctccacctcctgggttcaaagattctcgtgtctcagccttctgagtagctgggatacagacgcatgccaccccrccccgctaatttttgtatttttagtagagacagggtttcactatgttggccaggctggtctcgaactccttaccccaagtgatccacccaccttggcctcccaaagtactgggattacaggcatgagccactgcaccgggccataatccaatcttatttaatgacatggacatgttgatatgaattaaggaaacatctgggaacacatacactaaatcggtattcttatattcaagttggaggattatggaggccttttcattgctacatgtctgtattctttgcattcattntatatatatat

SEQ ID NO: 677081 - DNA, 607 bp, Homo sapiens
gagctattcaacactttgttatgaaataagctttgtgttacatgatttttccagctgtaggttaacgtaagtgttctgagcatgtttaaagtaggctggactaagctgtgttgttcggtactttaggtgtattaaacacattttcaacttagtgatattttcagtttacagtgggtttgtcaagatgtaacctcatcataagttgaggagcgtctttatgggaaatttcccacaatcaccaatcacaaacatgaaccgtgtatatgaagcccagcttggtgaggaccaacactaggcatatagtttttctgtttttcaaactaacactaaaatgtttagttttgtgagaagaaggggagggggaggacaatattgagaagctatccagtgatatttgcatcttcaggtacaaccaaaaatccactgggcctgctgtcatatctcccaggttatttggtgttctctgaaaaacacccaccttcttgcttttctgtagtgaacagctgtgtgctgtctgataaaaggccacaggayagctgtgcaggtagagctggtgaaggcacttttgagtggcccctgattctgtgctttgttctgcctgtctgca

SEQ ID NO: 677082 - DNA, 594 bp, Homo sapiens
cttctcttgaattagcgtgacctgagagacacccacttccaaatcttactgcagtgataggcctcttaggacttaaatcaattctatctagaccaacaggaaggatactatctgctttgttaacgtccaagtaraaatcatcgttgtctcttagtggtgtgatagagttattttctctctcctttttagaatgtaaactctggtcgacaacaactgttaccacctccgggtcatcactccctgcaacacatgcagtgtcagtacaaaagctaccaggtgaatgtgcagtgtcagtacggaagccaccaggtggatgatccatctcacttcctactcctgagttacagctctcactttctcccaggacacacgcatgacttagtgagtcactgtccatgttgttatttaattcagggagtaggtcaataccatgtagtgcactactttctgcgtaatttttagggaattcagtgcaagcttctgcctgtaaagcctccatctgcacgttatcagtgtttgcttcacaaggtgcatggctgaacgccacaggctcagggcaaggcttggctttcccactgcattcccctgtccttt

SEQ ID NO: 677083 - DNA, 594 bp, Homo sapiens
cttctcttgaattagcgtgacctgagagacacccacttccaaatcttactgcagtgataggcctcttaggacttaaatcaattctatctagaccaacaggaaggatactatctgctttgttaacgtccaagtagaaatcatcgttgtctcttagtggtgtgatasagttattttctctctcctttttagaatgtaaactctggtcgacaacaactgttaccacctccgggtcatcactccctgcaacacatgcagtgtcagtacaaaagctaccaggtgaatgtgcagtgtcagtacggaagccaccaggtggatgatccatctcacttcctactcctgagttacagctctcactttctcccaggacacacgcatgacttagtgagtcactgtccatgttgttatttaattcagggagtaggtcaataccatgtagtgcactactttctgcgtaatttttagggaattcagtgcaagcttctgcctgtaaagcctccatctgcacgttatcagtgtttgcttcacaaggtgcatggctgaacgccacaggctcagggcaaggcttggctttcccactgcattcccctgtccttt

SEQ ID NO: 677084 - DNA, 888 bp, Homo sapiens
aaaatatatagtgagagactacaagctcctcggggaaggtggggaaaaggaacgttaacaaacagcacaggtcacagtggataatatggcaatattcaaattacttgcagtgggatgtagagcgtaaactctctactgctaccaaatctttatattctacattgctcactaatgcttacatatgtaygggctttgtcctcaaagataaggacaaatggtcagctgacttctggaatgcatatttatggaacaatagagtattaagcaatatactgcatacctggggttcaaagaagaaatgctaacccttgcagctacatctctataaaggataatttaggctacacaaactacacttaatttcccaagctatgtgaaatagtaataaattctagtttgtaatccaaggcagccatctcaaagttatctatggtaatgagaaataagcacattaacaaaactgtagcaaatctgtaaaaaaaaaaaaaaaaaaaaggctaatctttggaaatttttctcccatttggagctgaaatttcccactgattgttgctttaaaaatgattagagccacacatggtggcacatgcctgtaatcccagtgctttgggagactgaggtgggaggaccacttgagggcagttcaagaccagcctgggcaaaatagcgtgactctgtaaaaatgattagcggggcatagtggtgcatgcctgtagtcctagctactcaggaggctgaggaaggaggactgcttgggcccacgaatttgaagctgcagtgacctataatggtgccactgcactccagcctgggcaatagagtaagactctgtctctaaaaaaataaaaataataaaatattactcatttatagttacaaatttgattt

SEQ ID NO: 677085 - DNA, 596 bp, Homo sapiens
attgactgtccatgttttagcactgaaagtcccgtgtccctggaaacctatcagtccaagataaaacataacagttagtcactctgaaagtatccagcctatgatggagtattgcacttagctatcacgtctcttaatgatttctttgaatgtgaaatttcacacatttttaattaaagttgtacatttttctcaggatatcaaatctagacatgcaatttgaacagctatgtataaatgttcctccttttatatattagtatcttatggtccaaacaaagtgttatctgcaactctttagaacaaaacaataaattgtgtaataatgagtcaagaaaaggagacttaagttggattcagagctctgatagatgcagacacaattaaaatataaaaaagttgtcatcattgtttstaaagagttgtgttagattaaatattatagtcaatacacacactgtgtagttattataaatttaattaatcaatgttaaagaaatactttaagaacccctcaaaaattaattaattaagaagtttcatcattgactaaacatctgtagttctcttataatgctatgtgtttatcttgtcca

SEQ ID NO: 677086 - DNA, 596 bp, Homo sapiens
attgactgtccatgttttagcactgaaagtcccgtgtccctggaaacctatcagtccaagataaaacataacagttagtcactctgaaagtatccagcctatgatggagtattgcacttagctatcacgtctcttaatgatttctttgaatgtgaaatttcacacatttttaattaaagttgtacatttttctcaggatatcaaatctagacatgcaatttgaacagctatgtataaatgttcctccttttatatattagtatcttatggtccaaacaaagtgttatctgcaactctttagaacaaaacaataaattgtgtaataatgagtcaagaaaaggagacttaagttggattcagagctctgatagatgcagacacaattaaaatataaaaaagttgtcatcattgtttgtaaagagttgtgttagattaaatattatagtcaatacacacactgtrtagttattataaatttaattaatcaatgttaaagaaatactttaagaacccctcaaaaattaattaattaagaagtttcatcattgactaaacatctgtagttctcttataatgctatgtgtttatcttgtcca

SEQ ID NO: 677087 - DNA, 603 bp, Homo sapiens
tactgctcattaccattaaaaaacaaaacaaaacmaaaccctgacttttccattagagtcagagcagtaggtttcattttgattgaaaaactccaacttcaagaatgaatgaacgcattccagccgaatcaaagcctgagctgaggctgcagacattttgtttcctccctgcctctacccggggcgtcatctagcgtccgcccttaggtactacactctcctgccaacgtaagccttttactccagagttggtttcagtagaaaatcatgagacctgacaggagaaaaaaaaaaactggcctcaatgatagatatttttcaaaagcggttgagcaataaagacttcccatttattggatttcacacatgattttgcttgagccaaaccaaagactcatgactcctaaaaaacaatgaatagacagagtacagagtgcttgggcatttttctcagggctctctgttcttcggaaagatgtttatgtgcaaaaataaaaacctgactgatttacatacggaataggaacacacatttttcaaggtgtggtatcttacaagtaacatttatttggacccctcttagggctgaattttacccctctc

SEQ ID NO: 677088 - DNA, 603 bp, Homo sapiens
tactgctcattaccattaaaaaacaaaacaaaaccaaaccctgacttttccattagagtcagagcagtaggtttcattttgattgaaaaactccaacttcaagaatgaatgaacgcattccagccgaatcaaagcctgagctgaggctgcagacattttgtttcctccctgcctctacccggggcgtcatctagcgtccgcccttaggtactacactctcctgccaacgtaagccttttactccagagttggtttcagtagaaaatcatgagacctgacaggagaaaaaaaaaaaytggcctcaatgatagatatttttcaaaagcggttgagcaataaagacttcccatttattggatttcacacatgattttgcttgagccaaaccaaagactcatgactcctaaaaaacaatgaatagacagagtacagagtgcttgggcatttttctcagggctctctgttcttcggaaagatgtttatgtgcaaaaataaaaacctgactgatttacatacggaataggaacacacatttttcaaggtgtggtatcttacaagtaacatttatttggacccctcttagggctgaattttacccctctc

SEQ ID NO: 677089 - DNA, 1176 bp, Homo sapiens
acctgacttaacaaaatagaccaaaacaataatggaagagttacatctagaaccagactttcagaaagttaagaggcaaagtgttgaaataaatctacaaaatactgaggggattcagttatgtgctgtcataatgaacatttttaataagacaaaatttgggggggtaggattagtaaataaaactaattattttttaaatgatagaaaagaagtcttgtgaacagatgccagcctctgtcacttactataaatcagaggggtcagataaaagaaacacccaaaggccgggcayggtggctcacacctgtaatcccagcactttgggaggcctaggcgagcagatcacctgaggtcaggagtttgagaccagcctggccaacatggtgaaaccctgtctctactaaaaatacaaaaattagctgggcgtggtggtgcatgcctgtagtctcagctactcgggaggctgaggcatgacaatcgcttgaaccaaggtcacgccactccactccagtctgggtgacagagcgagacttcatctccaaaaacaaacaaacaaaaacacccaaagttaccaacgtgtctgattaaagtggggaagagcatagtaactccattcctgccctagtctctcaatctgcatggtgcatcacacatttccaagagctttcacatgttgttactagactgcagactggggttcagtcaaaaaatacgtcctttcacgtccacagtctcatgccacgggcagtgcctgtacctgcactgtctcctgcagtggctcagtaagagctgattgtatagttgggtgactgcaaaatggataaaggaaagaataacggtaaggagaagttattaataaattgattgactttcacagctacctaggaaatgaattgggatggtatcattggcctcatttttcaaatgaggaaattaagtaccaagccctagaagagttaagtgatgataaaaattgcaaagtagctaagagaccctaggattgaccctgtggtcccataagtagcagtggagtctcccctaatgatcatggagggatgtgctgcctccctgtccaacctacatgactgtgtttgttatcacagctcacactggccaagtatgccaggccatgatttactgaatttcacttgaactgattttgtgggtacatca

SEQ ID NO: 677090 - DNA, 1176 bp, Homo sapiens
acctgacttaacaaaatagaccaaaacaataatggaagagttacatctagaaccagactttcagaaagttaagaggcaaagtgttgaaataaatctacaaaatactgaggggattcagttatgtgctgtcataatgaacatttttaataagacaaaatttgggggggtaggattagtaaataaaactaattattttttaaatgatagaaaagaagtcttgtgaacagatgccagcctctgtcacttactataaatcagaggggtcagataaaagaaacacccaaaggccgggcacggtggctcacacctgtaatcccagcactttgggaggcctaggcgagcagatcacctgaggtcaggagtttgagaccagcctggccaacatggtgaaaccctgtctctactaaaaatacaaaaattagctgggcgtggtggtgcatgcctgtagtctcagctactcgggaggctgaggcaygacaatcgcttgaaccaaggtcacgccactccactccagtctgggtgacagagcgagacttcatctccaaaaacaaacaaacaaaaacacccaaagttaccaacgtgtctgattaaagtggggaagagcatagtaactccattcctgccctagtctctcaatctgcatggtgcatcacacatttccaagagctttcacatgttgttactagactgcagactggggttcagtcaaaaaatacgtcctttcacgtccacagtctcatgccacgggcagtgcctgtacctgcactgtctcctgcagtggctcagtaagagctgattgtatagttgggtgactgcaaaatggataaaggaaagaataacggtaaggagaagttattaataaattgattgactttcacagctacctaggaaatgaattgggatggtatcattggcctcatttttcaaatgaggaaattaagtaccaagccctagaagagttaagtgatgataaaaattgcaaagtagctaagagaccctaggattgaccctgtggtcccataagtagcagtggagtctcccctaatgatcatggagggatgtgctgcctccctgtccaacctacatgactgtgtttgttatcacagctcacactggccaagtatgccaggccatgatttactgaatttcacttgaactgattttgtgggtacatca

SEQ ID NO: 677091 - DNA, 1028 bp, Homo sapiens
tgttagttcagaagaaatgcagctaaggccattgcctccctctaggagcccattcaaagcattcagtttgtttagggggctatcttctacgattatagtcatctcattgatatctcctttgttctttttgacaatcttctttttgggtgccatgttggcaaatacactgtyacaggcaagagcttgctaaaaagagaaaaaaaaaaacatggttttgttttaattgtgctttagactttgaaatactacattgagaaactttttcaaaagataatagttttcatggcataaaatagattaatttttaaaatagatttaaagacatattaaactagatgtacattttacagacagtttacttcagcatgaagcattgaagacaattctaggaagatttatgttatcaaatgaaatctctccataactgtattgccaagtaattatatagaaaaagtgaccacattttctttctttcttttttctttttttctttttttttttttttgagacagagcctctatctgtcgctcaggctggagtgcagtggcatgatctcagctcactgcaacctctgcctcccgggttcaagctattcttctgcctcagcctcccaagtagctgggactacaggtgtgcaccaccatgcccaggtaatttttgtatttttggtagagatgggtttttaccatgttggccagactggtctcgaactcctggcctcaagtgatctgcccacctcagcctcccaaagtgttgggattacagatgtgagccactatacccaaccaacattttctgattgagctatatagtagaatagtagttaaatatcatttaaagggcttagtttactgtcatgaaaaagtgaattataaacactctgaagattttcctcagtaaaatactaaaattcaggaatacatgtgaaatgtagaaaatattatggaaagattattttatttgcagtagcaatgaaacctgttatattttaagagatatatatacttgactctaatttagtgagacac

SEQ ID NO: 677092 - DNA, 1028 bp, Homo sapiens
tgttagttcagaagaaatgcagctaaggccattgcctccctctaggagcccattcaaagcattcagtttgtttagggggctatcttctacgattatagtcatctcattgatatctcctttgttctttttgacaatcttctttttgggtgccatgttggcaaatacactgttacaggcaagagcttgctaaaaagagaaaaaaaaaarcatggttttgttttaattgtgctttagactttgaaatactacattgagaaactttttcaaaagataatagttttcatggcataaaatagattaatttttaaaatagatttaaagacatattaaactagatgtacattttacagacagtttacttcagcatgaagcattgaagacaattctaggaagatttatgttatcaaatgaaatctctccataactgtattgccaagtaattatatagaaaaagtgaccacattttctttctttcttttttctttttttctttttttttttttttgagacagagcctctatctgtcgctcaggctggagtgcagtggcatgatctcagctcactgcaacctctgcctcccgggttcaagctattcttctgcctcagcctcccaagtagctgggactacaggtgtgcaccaccatgcccaggtaatttttgtatttttggtagagatgggtttttaccatgttggccagactggtctcgaactcctggcctcaagtgatctgcccacctcagcctcccaaagtgttgggattacagatgtgagccactatacccaaccaacattttctgattgagctatatagtagaatagtagttaaatatcatttaaagggcttagtttactgtcatgaaaaagtgaattataaacactctgaagattttcctcagtaaaatactaaaattcaggaatacatgtgaaatgtagaaaatattatggaaagattattttatttgcagtagcaatgaaacctgttatattttaagagatatatatacttgactctaatttagtgagacac

SEQ ID NO: 677093 - DNA, 1028 bp, Homo sapiens
tgttagttcagaagaaatgcagctaaggccattgcctccctctaggagcccattcaaagcattcagtttgtttagggggctatcttctacgattatagtcatctcattgatatctcctttgttctttttgacaatcttctttttgggtgccatgttggcaaatacactgttacaggcaagagcttgctaaaaagagaaaaaaaaaaacatggttttgttttaattgtgctttagactttgaaatactacattgagaaactttttcaaaagataatagttttcatggcataaaatagattaatttttaaaatagatttaaagacatattaaactagatgtacattttacagacagtttacttcagcatgaagcattgaagacaattctaggaagatttatgttatcaaatgaaatctctccataactgtattgccaagtaattatayagaaaaagtgaccacattttctttctttcttttttctttttttctttttttttttttttgagacagagcctctatctgtcgctcaggctggagtgcagtggcatgatctcagctcactgcaacctctgcctcccgggttcaagctattcttctgcctcagcctcccaagtagctgggactacaggtgtgcaccaccatgcccaggtaatttttgtatttttggtagagatgggtttttaccatgttggccagactggtctcgaactcctggcctcaagtgatctgcccacctcagcctcccaaagtgttgggattacagatgtgagccactatacccaaccaacattttctgattgagctatatagtagaatagtagttaaatatcatttaaagggcttagtttactgtcatgaaaaagtgaattataaacactctgaagattttcctcagtaaaatactaaaattcaggaatacatgtgaaatgtagaaaatattatggaaagattattttatttgcagtagcaatgaaacctgttatattttaagagatatatatacttgactctaatttagtgagacac

SEQ ID NO: 677094 - DNA, 1028 bp, Homo sapiens
tgttagttcagaagaaatgcagctaaggccattgcctccctctaggagcccattcaaagcattcagtttgtttagggggctatcttctacgattatagtcatctcattgatatctcctttgttctttttgacaatcttctttttgggtgccatgttggcaaatacactgttacaggcaagagcttgctaaaaagagaaaaaaaaaaacatggttttgttttaattgtgctttagactttgaaatactacattgagaaactttttcaaaagataatagttttcatggcataaaatagattaatttttaaaatagatttaaagacatattaaactagatgtacattttacagacagtttacttcagcatgaagcattgaagacaattctaggaagatttatgttatcaaatgaaatctctccataactgtattgccaagtaattatatagaaaaagtgaccacattttctttctttcttttttctttttttctttttttttttttttgagacagagcctctatctgtcgctcaggctggagtgcagtggcatgatctcagctcactgcaacctctgcctcccgggttcaagctattcttctgcctcagcctcccaagtagctgggactacaggtgtgcaccaccatgcccaggtaatttttgtatttttggtagagatgggtttttaccatgttggccagactggtctcgaactcctggcctcaagtgatctgcccrcctcagcctcccaaagtgttgggattacagatgtgagccactatacccaaccaacattttctgattgagctatatagtagaatagtagttaaatatcatttaaagggcttagtttactgtcatgaaaaagtgaattataaacactctgaagattttcctcagtaaaatactaaaattcaggaatacatgtgaaatgtagaaaatattatggaaagattattttatttgcagtagcaatgaaacctgttatattttaagagatatatatacttgactctaatttagtgagacac

SEQ ID NO: 677095 - DNA, 677 bp, Homo sapiens
tttgatttaataaatcctgcattttggaaaattcagacggaaataatacgtatttctcgcttgcttggatgacactactttgtacaaactctaagttgcccaaaaatatatatattttaggtcctaattttactctccagattttttcacttaattgatgaagatattttatcttttatcctggtaattcttaacaacagttggtattctctataaattataaaaatgaaaatatatttaacaaaaacatgtaaataaattagcagaagcatttataagcattatcacgaaacaaaacttcaatttacttcagatgtcgacgttttcaatacagtgagcaactctgcgatcgtttattattagtattcttttgcacatatgatttgtacaattggctatggattctatttaatttatagttataaaacagtacatctttaggggtaatgaaacaataaggaataaaatagcatgtacctgctttagaaaagcttactatataagaggaatttctaggtgtwtatattatgaacaattggtccagtataagaaaacagtaacattttacatacgtaatgttttccagaaatttcccaactctttctaatatgtacaattcccaaaataaatgcagagctagtagctgttctgaggaatcttcaagcaaatttttcaat

SEQ ID NO: 677096 - DNA, 1179 bp, Homo sapiens
cagtgcagaaaataattttctgctcaaacctttctttcttagaaaggtttcaatagtctcatgtgtctattgtctatgtcttatctttcatctcataatttgyaattcaatactcttttactccacactcaagtataatttctgaagttggatttaagatcagtaattctgactgaagccatacccattccattatttcctcatttttctcagggatttatctttgtgttttcgattctgcaaagtcctttatttctatttcttggttttcttttgtgagtcagcctggatccaatcaacaaaatttttaatgccattatctttcaattaccactgagattgaacaatagacatttcaagttctcttctacctcctccattacaatgtcagtgggagacacttgatctatctgtgccaatcaatcccctcttgcactttctgacttctgttacatatcaagtgagtcttcattgtatgatcatagtaataaatataggcaagcaattgccagcagaaagattatacagcctgtaatcccagcactttgggaggctgaggtgggcagatcacctgaggtcaggagtttgagaccagcctggccaacatggcaaaacctcatctctactaaaaatacaaaaattagctcggcatggtggagggcacctgtaatcacagctacttgggaggctgaggcaagagaatcacttgaatctcagaggcaggttcaaaaaaaaaaaaaagaaaaaaatagaagattgtatagcccatttggtaagtctgcctgggtttaaattccagctctttactccctacctggatagtgtacttctgtttcctcagccataaaatcaagataataataacagtaaagtcatggaatcattgtgataattaactatatggaacacttagccaatgcttgatacatagtcagtgccgaaatagtgataactgtaataatggctcacagtgctgttagcagtagagcatctttaattccttgtgtagtatagatctgctgtagggttttctgaccattggtcactatcagacacctcacaaaaaaaggaaagttttctctccaaggatattggagatgaataaattggaaggctggattccctacattgaagtagatggttgccgagggaagtggcctgggggagcttccagttcca

SEQ ID NO: 677097 - DNA, 1179 bp, Homo sapiens
cagtgcagaaaataattttctgctcaaacctttctttcttagaaaggtttcaatagtctcatgtgtctattgtctatgtcttatctttcatctcataatttgtaattcaatactcttttactccacactcaagtataatttctgaagttggatttaagatcagtaattctgactgaagccatacccattccattatttcctcatttttctcagggatttatctttgtgttttcgattctgcaaagtcctttatttctatttcttggttttcttttgtgagtcagcctggatccaatcaacaaaatttttaatgccattatctttcaattaccactgagattgaacaatagacatttcaagttctcttctacctcctccattacaatgtcagtgggagacacttgatctatctgtgccaatcaatcccctcttgcactttctgacttctgttacatatcaagtgagtcttcattgtatgatcatagtaataaatataggcaagcaattgccagcagaaagattatacagcctgtaatcccagcactttgggaggctgaggtgggcagatcacctgaggtcaggagtttgagaccagcctggccaacatggcaaaacctcatctctactaaaaatacamaaattagctcggcatggtggagggcacctgtaatcacagctacttgggaggctgaggcaagagaatcacttgaatctcagaggcaggttcaaaaaaaaaaaaaagaaaaaaatagaagattgtatagcccatttggtaagtctgcctgggtttaaattccagctctttactccctacctggatagtgtacttctgtttcctcagccataaaatcaagataataataacagtaaagtcatggaatcattgtgataattaactatatggaacacttagccaatgcttgatacatagtcagtgccgaaatagtgataactgtaataatggctcacagtgctgttagcagtagagcatctttaattccttgtgtagtatagatctgctgtagggttttctgaccattggtcactatcagacacctcacaaaaaaaggaaagttttctctccaaggatattggagatgaataaattggaaggctggattccctacattgaagtagatggttgccgagggaagtggcctgggggagcttccagttcca

SEQ ID NO: 677098 - DNA, 1823 bp, Homo sapiens
ctattcaaaactcaaatcataagttttggcagatgtcctctagctgtaattggcttctatccaatacttccacgtaacaggtcaaatcattcagtcatctatgaatatatttggccaattaatctatcttgaagagtcaccaggagttacattgcttaaaatgagatatgttttatagatatttttgtgagatattttatgtctatggtgtggagtagaatggatattggtaaccaccaccttgaaattaatctgggctatatgtctaatttttgaagcagaggcagagttatttttgagaaaaatctcaacccttctctcagtcattcctttggcccacttccaagcaaaggtgacatggccagttttcaaaaatgtattttatgcctattctgtgttcatcaagtgtcaggcacataactccactttaaaattgcaacatcgaattttactctttttgtcaaacaattttaaccttgaactctctggtgtccaaatcttcccaaggattcatttcaagaaacaatatttatgaaagagatattatccacagattattgtaggtattcttaatttcattctggggtcaggccagctacatatttataacatattgttttgtgataataaagattgcttttaccacatttttttcaggagaatggcattgacatcattaggggacataataaaaagcataataagaaacagcaatcattagcagggctatccctagggataattgagggcattttcacttttatcaagcataaaggagatctcataacactgtttcccttacaaaaattttctctcccttaaggaactgtgatccaatttctttttttggaaaacagcttacaactattaactagaatttttggtatacatgcttgtgtactaaccttacttctggctttatttatttatttatttatttatttatttatttatttatttgagatggagttttactcttgtggcccaggctggagtgcaatggcgcgatctcggctcactgcaacctctgcctcctaggttcaagtgattctcctgcctcagcctcccgagtagttggaattacaggcatgcgccaccacacccagctaattttgcatttttagtagagatggggtttctccatgttggtcaggctggtctcaaactcctgacctcaggtgatccgcccacctcggcctcccaaagtggttggattacaggcctggcctcatttacttttttattcaatttcctcatctctttttttatcctattccatgtcatgtgttgtagtaatgtgataatatatacgtaatataaatttcaaataaaatattttcatggctatatattaaataaacagaarcgttcaggatttcagaaatagagccatttcttctgtggttagattgtgaaaggtgataatagaatttggttagtagcaaagagtggagctgaagttctttagagggtcaagtgacacaagctactgcattagttttattattcaggaatctagaagctgcttaagatgataacagcaggtagagtagaaaggagcacacttggttaactgtatcagtgtttgaagatcatcattgggtgcctggaagctcatataagaaaaatgagagagttgtaacactcacagttaatggcatgggcaaatttaatgtaagagggcaaaagtattttgagaaaagatatttagaacatagcggatttccataggaaacagtgaaaagattggtgtaggtacgggtgaggaagagcatatcagagtgagaaagggaataagaaaggttagtgcttgtgtgtggtgg

SEQ ID NO: 677099 - DNA, 1823 bp, Homo sapiens
ctattcaaaactcaaatcataagttttggcagatgtcctctagctgtaattggcttctatccaatacttccacgtaacaggtcaaatcattcagtcatctatgaatatatttggccaattaatctatcttgaagagtcaccaggagttacattgcttaaaatgagatatgttttatagatatttttgtgagatattttatgtctatggtgtggagtagaatggatattggtaaccaccaccttgaaattaatctgggctatatgtctaatttttgaagcagaggcagagttatttttgagaaaaatctcaacccttctctcagtcattcctttggcccacttccaagcaaaggtgacatggccagttttcaaaaatgtattttatgcctattctgtgttcatcaagtgtcaggcacataactccactttaaaattgcaacatcgaattttactctttttgtcaaacaattttaaccttgaactctctggtgtccaaatcttcccaaggattcatttcaagaaacaatatttatgaaagagatattatccacagattattgtaggtattcttaatttcattctggggtcaggccagctacatatttataacatattgttttgtgataataaagattgcttttaccacatttttttcaggagaatggcattgacatcattaggggacataataaaaagcataataagaaacagcaatcattagcagggctatccctagggataattgagggcattttcacttttatcaagcataaaggagatctcataacactgtttcccttacaaaaattttctctcccttaaggaactgtgatccaatttctttttttggaaaacagcttacaactattaactagaatttttggtatacatgcttgtgtactaaccttacttctggctttatttatttatttatttatttatttatttatttatttatttgagatggagttttactcttgtggcccaggctggagtgcaatggcgcgatctcggctcactgcaacctctgcctcctaggttcaagtgattctcctgcctcagcctcccgagtagttggaattacaggcatgcgccaccacacccagctaattttgcatttttagtagagatggggtttctccatgttggtcaggctggtctcaaactcctgacctcaggtgatccgcccacctcggcctcccaaagtggttggattacaggcctggcctcatttacttttttattcaatttcctcatctctttttttatcctattccatgtcatgtgttgtagtaatgtgataatatatacgtaatataaatttcaaataaaatattttcatggctatatattaaataaacagaaacgttcaggatttcagaaatagagccatttcttctgtggttagattgtgaaaggtgataatagaatttggttagtagcaaagagtggagctgaagttctttagagggtcaagtgacacaagctactgcattagttttattattcaggaatctagaagctgcttaagatgataacagcaggtagagtagaaaggagcacacttggttaactgtatcagtgtttgaagatcatcattgggtgcctggaagctcatataagaaaaatgagagagttgtaacactcacagttaatggcatgggcaaatttratgtaagagggcaaaagtattttgagaaaagatatttagaacatagcggatttccataggaaacagtgaaaagattggtgtaggtacgggtgaggaagagcatatcagagtgagaaagggaataagaaaggttagtgcttgtgtgtggtgg

SEQ ID NO: 677100 - DNA, 611 bp, Homo sapiens
ttgtagtatagagagaacactggggcacaaaacttacagagaaaatcttaaaagttaggttgtggctatatcatgaaggacaaaataatgctttgtaaaaatgttgtggttcatcctgtagtcaatgaagaataatcaaagtttttaagatcatagagtaacccaattatattcatagtttaatgagagaattctggtgccagtagttatttatttcacaaagttattgaactttcctttgtaccaagcactatgttaagtcgtggacatactgcaaaaaacaaaatgaaaaaggtgatcttgccttcacaagtctcttacaatctattgaggaatatgtccacaagctactataataaatcaaggtaygtttttggatgaaggtataggtgatattggagcacaaaacaggggtcctaggacaaaggtaggaggttcagagaaggtatttgagaactgacactaacctaatactgaaatgcaaatggaagctaaatgaggaagaaaggggaagaatggcccaaacagagggactggcattccagatggaacagagggaagtacgcatattgcatccacggaatcaaagggattcagtatggctggcaata

SEQ ID NO: 677101 - DNA, 611 bp, Homo sapiens
ttgtagtatagagagaacactggggcacaaaacttacagagaaaatcttaaaagttaggttgtggctatatcatgaaggacaaaataatgctttgtaaaaatgttgtggttcatcctgtagtcaatgaagaataatcaaagtttttaagatcatagagtaacccaattatattcatagtttaatgagagaattctggtgccagtagttatttatttcacaaagttattgaactttcctttgtaccaagcactatgttaagtcgtggacatactgcaaaaaacaaaatgaaaaaggtgatcttgccttcacaagtctcttacaatctattgaggaatatgtccacaagctactataataaatcaaggtatgtttttggatgaaggtataggtgatattggagcacaaaacaggggtcctaggacaaaggtaggaggttcagagaaggtatytgagaactgacactaacctaatactgaaatgcaaatggaagctaaatgaggaagaaaggggaagaatggcccaaacagagggactggcattccagatggaacagagggaagtacgcatattgcatccacggaatcaaagggattcagtatggctggcaata

SEQ ID NO: 677102 - DNA, 1495 bp, Homo sapiens
ttgctgacaagaaaactaagaggtcagaatttagtgacttgttttcttaatttgtttattttgctataacagaatacctgtacctggtttgtaatgaacagaaatttatttggctcacggtctggaggctgggaagtctaaaactgaggggctgcatctggtgaggggtgtcttgctgtgtcatcccatggtggaagagcaaagagatcttagcaaactaagagactgaatttgcagacccaggctcttttaaaattggcattaatccattcacgaaggtagagccctcatgacctaaacaccttctgttaagctccacctcccaacactgatacatcggggattaagtttccaacwcatgctttttggaggacacattcaaacgacagcacttgtagcagagctggtatttgaacccaggtctttctatattgggtacaaatataaaaagtgatgtgacaccaattcaattactattgaacgttcttggaaagaagtacattttgtctgaaccatgccaggatgccaaatgatcattttcacttgaaaattgagtttttgtttaatctggcgaccttttgataaatattataatttttaataaaacaatatttcaacaaagtttcaagatcattaactaggccacaaaaattcatttgccccaaaacacaaattaaacagatcgtattcaataattatagtaaaattattaataagaaactgacaaaagaaaaaatatatagaaatttaagctctcctgaataatactgtatcaaagaaaaatctaaaataatgttagattttatagaatataaagaaaataataccactatccattaactgtccattttattccttaatgctccttaaacaagtatcaggagaaagacatattaattgagccaaaagttagggaagtttaaaaaaatagaaattagtaaagataatagtatgagtcaataaatcaaaatacagagtagtagaaaaaataataaattaaattccagtagcatgaaagaactgcagacagaattctgaaaactataattcaggagtactagaactcacccagatacacaaaataaggaataatagggtaaaataacaagacaaaatttgtaaaaaagctttgtcactattttaaaatatcagtgaaatgtttattttctttattgaaaagtaaaaattctaattaaaaaaacttgaaagacaatttaaaatttactaagtaaatactcagacactttaatggatagttatttcaaactctcaaggaatagttttcttccatgtattctgttctcaagttaatgggtgtagaataagtaaatgtacactttaaaattaaataaatgttaaaaatcaataaaggataattagctaatttattttatgtagtaaatacaattctgacatgaaagtatgatatgtctgatcaccccccaccccacaaaattatacaccaattcttaatataaatatagaattaatgtca

SEQ ID NO: 677103 - DNA, 1495 bp, Homo sapiens
ttgctgacaagaaaactaagaggtcagaatttagtgacttgttttcttaatttgtttattttgctataacagaatacctgtacctggtttgtaatgaacagaaatttatttggctcacggtctggaggctgggaagtctaaaactgaggggctgcatctggtgaggggtgtcttgctgtgtcatcccatggtggaagagcaaagagatcttagcaaactaagagactgaatttgcagacccaggctcttttaaaattggcattaatccattcacgaaggtagagccctcatgacctaaacaccttctgttaagctccacctcccaacactgatacatcggggattaagtttccaacacatgctttttggaggacacattcaaacgacagcacttgtagcagagctggtatttgaacccaggtctttctatattgggtacaaatataaaaagtgatgtgacaccaattcaattactattgaacgttcttggaaagaagtacattttgtctgaaccatgccaggatgccaaatgatcattttcacttgaaaattgagtttttgtttaatctggcgaccttttgataaatattataatttttaataaaacaatatttcaacaaagtttcaagatcattaactaggccacaaaaattcatttgccccaaaacacaaattaaacagatcgtattcaataattatagtaaaattattaataagaaactgacaaaagaaaaaatatatagaaatttaagctctcctgaataatactgtatcaaagaaaaatctaaaataatgttagattttatagaatataaagaaaataataccactatccattaactgtccattttattccttaatgctccttaaacaagtatcaggagaaagacatattaattgagccaaaagttagggaagtttaaaaaaatagaaattagtaaagataatagtatgagtcaataaatcaaaatacagagtagtagaaaaaataataaattaaattccagtagcatgaaagaactgcagacagaattctgaaaactrtaattcaggagtactagaactcacccagatacacaaaataaggaataatagggtaaaataacaagacaaaatttgtaaaaaagctttgtcactattttaaaatatcagtgaaatgtttattttctttattgaaaagtaaaaattctaattaaaaaaacttgaaagacaatttaaaatttactaagtaaatactcagacactttaatggatagttatttcaaactctcaaggaatagttttcttccatgtattctgttctcaagttaatgggtgtagaataagtaaatgtacactttaaaattaaataaatgttaaaaatcaataaaggataattagctaatttattttatgtagtaaatacaattctgacatgaaagtatgatatgtctgatcaccccccaccccacaaaattatacaccaattcttaatataaatatagaattaatgtca

SEQ ID NO: 677104 - DNA, 1495 bp, Homo sapiens
ttgctgacaagaaaactaagaggtcagaatttagtgacttgttttcttaatttgtttattttgctataacagaatacctgtacctggtttgtaatgaacagaaatttatttggctcacggtctggaggctgggaagtctaaaactgaggggctgcatctggtgaggggtgtcttgctgtgtcatcccatggtggaagagcaaagagatcttagcaaactaagagactgaatttgcagacccaggctcttttaaaattggcattaatccattcacgaaggtagagccctcatgacctaaacaccttctgttaagctccacctcccaacactgatacatcggggattaagtttccaacacatgctttttggaggacacattcaaacgacagcacttgtagcagagctggtatttgaacccaggtctttctatattgggtacaaatataaaaagtgatgtgacaccaattcaattactattgaacgttcttggaaagaagtacattttgtctgaaccatgccaggatgccaaatgatcattttcacttgaaaattgagtttttgtttaatctggcgaccttttgataaatattataatttttaataaaacaatatttcaacaaagtttcaagatcattaactaggccacaaaaattcatttgccccaaaacacaaattaaacagatcgtattcaataattatagtaaaattattaataagaaactgacaaaagaaaaaatatatagaaatttaagctctcctgaataatactgtatcaaagaaaaatctaaaataatgttagattttatagaatataaagaaaataataccactatccattaactgtccattttattccttaatgctccttaaacaagtatcaggagaaagacatattaattgagccaaaagttagggaagtttaaaaaaatagaaattagtaaagataatagtatgagtcaataaatcaaaatacagagtagtagaaaaaataataaattaaattccagtagcatgaaagaactgcagacagaattctgaaaactataattcaggagtactagaactcacccagatacacaaaataaggaataatagggtaaaataacaagacaaaatttgtaaaaaagctttgtcactattttaaaatatcagtgaaatgtttattttctttattgaaaagtaaaaattctaattaaaaaaacttgaaagacaatttaaaatttactaagtaaatactcagacactttaatggatagttatttcaaactctcaaggaatagttttcttccatgtattctgttctcaagttaatggrtgtagaataagtaaatgtacactttaaaattaaataaatgttaaaaatcaataaaggataattagctaatttattttatgtagtaaatacaattctgacatgaaagtatgatatgtctgatcaccccccaccccacaaaattatacaccaattcttaatataaatatagaattaatgtca

SEQ ID NO: 677105 - DNA, 1495 bp, Homo sapiens
ttgctgacaagaaaactaagaggtcagaatttagtgacttgttttcttaatttgtttattttgctataacagaatacctgtacctggtttgtaatgaacagaaatttatttggctcacggtctggaggctgggaagtctaaaactgaggggctgcatctggtgaggggtgtcttgctgtgtcatcccatggtggaagagcaaagagatcttagcaaactaagagactgaatttgcagacccaggctcttttaaaattggcattaatccattcacgaaggtagagccctcatgacctaaacaccttctgttaagctccacctcccaacactgatacatcggggattaagtttccaacacatgctttttggaggacacattcaaacgacagcacttgtagcagagctggtatttgaacccaggtctttctatattgggtacaaatataaaaagtgatgtgacaccaattcaattactattgaacgttcttggaaagaagtacattttgtctgaaccatgccaggatgccaaatgatcattttcacttgaaaattgagtttttgtttaatctggcgaccttttgataaatattataatttttaataaaacaatatttcaacaaagtttcaagatcattaactaggccacaaaaattcatttgccccaaaacacaaattaaacagatcgtattcaataattatagtaaaattattaataagaaactgacaaaagaaaaaatatatagaaatttaagctctcctgaataatactgtatcaaagaaaaatctaaaataatgttagattttatagaatataaagaaaataataccactatccattaactgtccattttattccttaatgctccttaaacaagtatcaggagaaagacatattaattgagccaaaagttagggaagtttaaaaaaatagaaattagtaaagataatagtatgagtcaataaatcaaaatacagagtagtagaaaaaataataaattaaattccagtagcatgaaagaactgcagacagaattctgaaaactataattcaggagtactagaactcacccagatacacaaaataaggaataatagggtaaaataacaagacaaaatttgtaaaaaagctttgtcactattttaaaatatcagtgaaatgtttattttctttattgaaaagtaaaaattctaattaaaaaaacttgaaagacaatttaaaatttactaagtaaatactcagacactttaatggatagttatttcaaactctcaaggaatagttttcttccatgtattctgttctcaagttaatgggtgtagaataagtaaatgtacactttaaaattaaataaatgttaaaaatcaataaaggataattagctaatttattttatgtagtaaatacaattctgacaygaaagtatgatatgtctgatcaccccccaccccacaaaattatacaccaattcttaatataaatatagaattaatgtca

SEQ ID NO: 677106 - DNA, 592 bp, Homo sapiens
gttaactcttctcgtccattttcatctcttctccttttatcactgctcttgttataaaaattttatatctttaaatcttctttattcttttaattttataatagtggaatttcaggatgtagcagagaaaaacaaatatatcttatctaacatattccactgaattccttctatagcatttctaagtccctgagaaactatgatgctgagttaagtatgattcaaggtcattaaagccatttaatactgtagctaatgagcaaaatgtaagatagacattgggctcaataaaggcaaacaatcatagctatcatttattgagccagactctgttttaatctctttatattttaaataatttaatcctcacatccatataaggtatgttctattttaaagatgaagaaattgagacagagaggttcagtaaattagagatytcatagcctctaaatggtagaggtggaattcaaccccaagctgctgtatatctgaaatagaaacatactagtatcttctttggggacagggatttggggttaggatttggcccaagtagaagccagattgttatcttttctttctccactta

SEQ ID NO: 677107 - DNA, 2298 bp, Homo sapiens
aaatttgaccacaccacctccttttctttccctgcttcattgcttcttgagctgggacatctctcaaactgagagatgggacatagcccagactaggatttacacctcagatcccctggctgtcagatctttagattcagactgaatgaagccgccagctttcctggatttctggctggactgtgggacatctcagcctccataatcatgtgagtcaactcataataaatttattggtatatatgtatgtgtgtgtgtatatctattggagtgtgtgtgtgtgtctgtgtgcatatagatacacacatatatcctgtttgctctgtttctttggagaaccctgactagtaaagtctcctataaaaactcatgtagtgcttggcgtaagttgaatgtttgttgaaatgtagtgatttacatctttgtttcattttctttactgtattctcttggaatatttttatatgtattaatgccatggtgatactaaaaactcatcacatgatttttaaaaaattggcataatgcttgactcatagttggtgcttagttatattagattagttgagtaattatgagaacaaagaggttgtatgagaaaacatcagaaatatgtttatttctcgaaagtttatagaaggtaaaaaatatctcattgaagattgtattcctataattatatcagaaaaaatgttggcaaggatttggagaaatcctgcttgaagaactcttcaattgtacttctcttgacagccctcccaacccagtatgaaattatagtacactccaatggagcacaaggtggttaacacatcttgaaagtaagtccatggcaggaaaataaacttttgtttatagcactttgtaggtaactatctgttctatttccctagatcaggggatggcacactacaagaggcaggcctagacactgcctgttttttaaataaagttttatttgaacacagcgatgccaatttttatttttatttacatattgtttatgactacttttgtgctaaaacagaagagttgagtagcccacggagctgaaaatatttgttatttgtctctacagaaaaagtttataaaccccaaattggaatatcttacgtattcctattccatagtagttggttcacaaatgcctccaattaatccactcatgtgtcttgtgttgaaatctgtctgatatggaccacatagtagcttcatgtgtarggaacataagattgaatcttgtagcaaagtacccttttccctttttccaaattttaaatgatagcaatctgaatttgatattgtagaaaccaaactataaatttaaaaatcacaatttctaggctgtccgtgaggactgtgattctgaaggtaaatcttattcccttttattaacaaaacagctattctttgattgacaacatcccgccaagagctgttgtacatatttacctggaactaatagctatttcagaaaagaaagaatgttcgcgtaattggaacttatcaaatcctataggaattagaagtcctgcaaacatatccatcagttctaatgcagaaaacagtgtggaaatagactttgccgtgggcagtataattttgagaaaaagcggcttctcctgatcaatcagtctgctttctttgttagtttccttttgctttggaagtgactttaatgattacatagagtaattatcttagcctagattttcaaacatgtttcttccttcattgcttaactgttatgttttgatccttattctaaggattctgcttttttttttttttattgtatactacttcaattttgtttgggaaattagtttttgagaagtatagataagaaactgaaaatatataattgggttgtcacatcaagcatatgcatgaatctatgtcaaggcatttaattcagttaatttacgtgggatcagttgctaaaaccagacgtaggtgtccctgattagctgtgacatagggggaaatcatgtggctattctagtcatggtagagaagatatttagattcatcctgtaattagagctttcagaaggaccataattatatattacattacatacttctccaggccattgcacacaaagggatctttttgggaatttagaaataactgtaataacatgaattttaatgattgacagttataggctaaaatgtaatcatgaacccaatggctttttttgtaggaaaaattttactgacttgcaaatatattacttggactaaacacttcttatatgctaagtgaaaatataaacatgtctcataagaaaa

SEQ ID NO: 677108 - DNA, 1773 bp, Homo sapiens
tatgccaagtcttcagtttaactgagttacatgtggttctaaacttcaccagcctccaaatagctgctctcacttggagtaagagggaagatttcacattaaatgaaactaacccaattaaatggaacatttcacattatttcttaagataggctacctatgtgtcaagatctcacaaattgacaatttgacctgaaacatttaccacacatttcctaacattttctgttaagatctcaagattttatacatatccaaaaatacatagatgaatttacttgagaggacaaattaaccaacaactaatctatcagcactgttgtctataaagctatcatcgtggaaagaagagaatgaagtcaaggaaactactaggccaggtgaatgttaggagtatattgtgatgccaagtttaaaagaagtgatccatttagtcttttgtataggtgcacaataaaaaatggatataagggaaaagataagggtgtcaaaagttaaatgttattttcctaataggatggcttttacattgtatgtgaatatcagtgactgtgtacatatggaggtatgcttaaccaaaattttaatttaaagaaggtacagaggaatagtttatcacattggaatttatggagtaatgatgtatgatgtcaaattcatgccaagttgtgactttgctgatcttatactcaattatctcgcataaagttttgtcaatttatagctcatatcacttctaccatgagatataagataaaaagcagctgatttgcatgtagacgaggtaagttttctagactgagtatttttgtttggtctggagggtaagggtatggtaagaccactagggggccagtttgaaaatagaagtgatggcagctgaaataccttcctagggagagaggatccactaaatgctgaactttcaatgggcgaagtggaaataaaaactaatgaccaaaaatgaaatctcaggaataataagggatctgagcagctgtgcaggacaaaagatatgacttggcagctgccaagagaagaaactttccaaaaataaaaaaactgaatgtattaagggaattattccagtttggcatgtaatatgtgatgcatcctttcccctgactcacctagtaaaatctttaaacatttattccttattaatgcttgtatgagtagttaatttgaggaaaggtaagtcctataattccatgggaaggagcaatctttcaagatgttttactgtcataataagtggcattttaaaacatttaacgcaactaccttagaggtggatatactgtccttgagtcctaaatttatagataagaaaaacaagcctcagaaaagtgaaatgacttaattgaatgataaagagattaaaaacttgaattcaattcttctaatcccatatttaatattcttttttcctgaccaccaagccatatgttatgcatacatataatatatatatggcatcttatttttggacatatattatggaatgtcctttgttgttctgaaaagaaaacataaatttgaaacttatctaacataaatgttctagtgggagaggaaaaaaaataatttcaagaagaaatcatttttaaaactggatacagggatatatcagctgaaaagcactgaatattttagaaaataatcaggstggctatttgacatttgaaggagacaaaaggactcagccagagataatacctgtatagtgcatgacctatataaaatatccatagcaccaagggacaagctcaa

SEQ ID NO: 677109 - DNA, 915 bp, Homo sapiens
tcttttatattgttgaatataccagtagtttgttctttgtaattgccaaatagtatgtcattttattattataccatgatttattaaaaaaattcttttaggtggctttttctttttggctattatgaattaagctgctgcaaatattttagaagtgatgttatggacatatgctcttatttctcttaggcatgtacttaggagtggaattgctgggttataagatgagaatatgttaaactttatagacattggcaaacagtttatcaaattaatatattattttaaattgccagcaacaatatacgatgattatatttagttatgtttaatatcttcatatgtgtccccttcactggaacaagtatccttcttcagaagtggccgaggatgttgtcaggtcaggctcttccagagaacaaaacaacaaactgtttagaataatggaatggggagctattccagaaaactggcttaattagtcaactctccttctctcatggtaggttgtaacatttgcccagaggaattccagaatttctatgaaccagtgatttatggatctgatattgacaagaggcttgcccaaggttttctttggctaatgggaactctctgygcttttgcgtcatgtcacaccattagcagattcttgttgaatgttgttgtgcagtttggattgtcttttacactccggtaatcctcaagagaagaacataacccagatagccacctctctttcaaccttaatcttaaaataataccatatataaaagaactaaatccaaaacacagcctgtagactggagcaccaaattagtgcctggatttacactacccagctaagactatgataaataaactaaaacacaaccaacctacaaccctgggcaggagaatgaatgttactgaatt

SEQ ID NO: 677110 - DNA, 631 bp, Homo sapiens
tgattcaaatctgactttgactctcatgctgattctagcaccgtgcatggctcctagtgmattgcttaaaaccttgcaggtaggctgggcacggtggctcatgcctgtaatcccagtactttgggaggccgaggcgggcggatcacctgaggtcaggagttcaagaccagcctcaccaacatggagaaaccccgtctctactaaaaatacaaaattagccaggtgtggtggcgcgtgcctgtaatcccagctactcgggtggctaacgcaggagaattgcttgaacccgggaggcgaaggttgcagtgagcagagattgcgccattgcactccagcttgggcgaaactccatctcgaaaaaacaaaacaaaacaaacaaacaaaaaccttgcaggtaaattacaatcctaaaattcactgtagggcaaaacaagaaacttgaagtaagcatcctggtttacctggaggaaaatcagaagcatgagaacttggtagtgcaaatacccgtggctcctgcagatcccttcattcaggcaaagaagcccagcaattaagactttttcgctctctcctcccgtgagaccatgagcgtttctttcaccttctatggctttctcagttgtaagacccc

SEQ ID NO: 677111 - DNA, 1125 bp, Homo sapiens
ggagtttctgaaaaaatccagtttaacctatgggttgagtgttcgtctggttgacatcatgaagaataagaaactgaagaactttaactgatatttggacttccaatttaccgtgtttgaaatttcaacatcaacatctggggactttcagggcaaagaatcttcctttccttgggctacatgtaaccatgaggaatgaaatctactagagtaagaatttgagtctctccactctttgccttactctttactctcagatgaggataatgacttccctgatgggtggttttggaaaaggagttgagcatccttagctcaacctactcatacttagagtaaattagccagatataattagcaagttcatttagctgaaaatctaatccttaaacaccaatattgcttttatgaataataaagcacacatttgctctccatctgcctgactcctaagattatctctcagttggtgtcaagcttgygtagggaatgaggacatcatttattggcttcctcaaacttcacctttgagaatcctgatatttcttgatagtgtggattattttgttaatatttataatagtaaaaattcttattattcaataatctatttctaaaattgctaaggttgattaggcataagacacttcagtaaatataaaatatgttgggtattaagtggaaaaagaaaaatacagaatcaagatttcgaatgacaactggtctttgaagttgtctattcctacctaatatttttatgggggaatgggggatggttaaataagctaaaactgagaaaagataagatattagcttaggtcacacagtcgatttgtgaaagaacagtttctttttttttctataatcttgatgtaagttgagtttatacttgttgaattagaagaaaaataaatgctgaccaaagtctcataagtctcataaatcttttaaaacaaatcacctaatttagctcactcttccgatcaagtacgttctattatttatggtaccctgtttatacttttgggagtaataatttttttcctaccatctttatttcacttgataaatactgatgtctttctgtgtttctactggagcttgaaattaatatagttttatata

SEQ ID NO: 677112 - DNA, 1290 bp, Homo sapiens
cttacataaaaaccaggccatgaatttacacatgtgatgaaaaaacatttctttaattgagttgaattctctccttcattttttcccttagcccttattaattgtgtgtccttaggagaatttacatagcttctttagccatagctttgtcatctattacttagaggtaataatagcccttacctcaaagtgttgttgtaaacaaagtgagaaagtcaagttaaactctataagacggtgcccagcacatggtattataaaagctcaacaaatattaggtaatagtactcctagagtgatagaagttatgtcttctaatttggcaaatagctataaaggcctttatattttaaagcaattatgtttttcttttaatttttcagcctttccattgatagagtttaaagttttatcatcaatttattctttcatattyacatagttgcacttacgacagtacaaaaataatattataataattgaaatggactattctgatgtgatgaggcattcttacctacttcaccaaaaggttacctgagactggaaacggtacttgctaaaagcttcaggctaggaagtagtagaacttgaatacaaatcagttgtgatgtcagattccacggagacatcatgatttttaagagttttgtttcaagtgaacaaagttcaaccatgaatcacaacattgtgtatagtatacattaaaaaggaataatatagccatgaggaaaaatcctgttaaatcgaatataaatttctaatgttgataattgtagtcacatctggccactgtgcatgctgaccaatttgtatctatagacaagcaacagcccagcctgtcaagtcattaccaacccccaatcttctcttttcttctcaaggatttctctgtgagcctttgcaagacagtgcattgataatgcccagttgtggttactgcacttcactgtggtggttattagagagacaatgtcaaacatgatttttcttgtattgaaactgatttttaattattatttgttagaatactctaaggaacccttttgtgcaagtttttgtaaagttctccgtgggactcgatgctgttgaactattgaaacagatagatgaactcggtgagtccaaattcacaaagcttttattcatgagtcatgtcggacatataaacaacattgttccatatgattacattttccccccttttctcctgtacttagtttgtagctagctactcaaagaaaaatgagaccctggatatatcccccctatcttcttcccagttagttg

SEQ ID NO: 677113 - DNA, 610 bp, Homo sapiens
gcactgaatgcttccttcactctgtagatggttaaaaaataagcagattatggttttcaagctcaccttcctatataaaagcttgaggctgaatattactttaaaggaattgaacatgctacgcaacccagttattgcagtttatatacaattcagatggtattggatttttcttttctcttcttttttctttctttcaatgcttctgtctcccttggctacttcaagagttataaatgagatgagrtaatgtaacccagtgcaacagtagcatgaggaagcaggtaaggagtccatcaagtggactgtcaaggttagctggctattgtggaggctgttgtggacgggactgtgctgcccgaactatgtgtgaactgcaatggtttgcacaaattataaagatctatggggtcaatgaagttataattcttatctagttccctgctcatttgttccccttataaattttggtacctaggatggtgggtacctgggtgtgcagtctgtattctttatgggaatatgttcattatgccttacacacatatacactgttgcatataaagtgatttcccattaattatttcatttgtttcacccaacaacctca

SEQ ID NO: 677114 - DNA, 610 bp, Homo sapiens
gcactgaatgcttccttcactctgtagatggttaaaaaataagcagattatggttttcaagctcaccttcctatataaaagcttgaggctgaatattactttaaaggaattgaacatgctacgcaacccagttattgcagtttatatacaattcagatggtattggatttttcttttctcttcttttttctttctttcaatgcttctgtctcccttggctacttcaagagttataaatgagatgaggtaatgtaacccagtgcaacagtagcatgaggaagcaggtaaggagtccatcaagtggactgtcaaggttagctggctattgtggaggctgttgtggacrggactgtgctgcccgaactatgtgtgaactgcaatggtttgcacaaattataaagatctatggggtcaatgaagttataattcttatctagttccctgctcatttgttccccttataaattttggtacctaggatggtgggtacctgggtgtgcagtctgtattctttatgggaatatgttcattatgccttacacacatatacactgttgcatataaagtgatttcccattaattatttcatttgtttcacccaacaacctca

SEQ ID NO: 677115 - DNA, 610 bp, Homo sapiens
gcactgaatgcttccttcactctgtagatggttaaaaaataagcagattatggttttcaagctcaccttcctatataaaagcttgaggctgaatattactttaaaggaattgaacatgctacgcaacccagttattgcagtttatatacaattcagatggtattggatttttcttttctcttcttttttctttctttcaatgcttctgtctcccttggctacttcaagagttataaatgagatgaggtaatgtaacccagtgcaacagtagcatgaggaagcaggtaaggagtccatcaagtggactgtcaaggttagctggctattgtggaggctgttgtggacgggactgtgctgccygaactatgtgtgaactgcaatggtttgcacaaattataaagatctatggggtcaatgaagttataattcttatctagttccctgctcatttgttccccttataaattttggtacctaggatggtgggtacctgggtgtgcagtctgtattctttatgggaatatgttcattatgccttacacacatatacactgttgcatataaagtgatttcccattaattatttcatttgtttcacccaacaacctca

SEQ ID NO: 677116 - DNA, 651 bp, Homo sapiens
ttatgaaatgaattgatggaggtgagcgtggaaggagtgggatgtccctagtgcctcctgctcagcctcgctccactgcccacagttctcatctaaactcctcctttttaaagatgtaaggttcagctcagaaagtgagaagtgasttgctgaagaccttggagctagttaatggtagatctggcagtagaacggaagtattttgacttccaaccaatcctcttccagatcatagctacctttacccttagaatcttactttagtaacacagacttctaaggacatttgcagatgatgatagataatctcttaagttaccagaaactcaaagtcactttttaatactatcttttcatattctgataaagtctaaagctgcccaagtcctacttctttctcattcaaattaaaccaaaaaggtaagtaaaatcaatattctccccttttcgttctgtaattattctcagtcctggcaagaaaaccaagttaattgctatctcaatgaagccacttatctttgactttgttatggtatgattccatgaatccctttcccttgttaaataaattagcacaaatctaataagtttattaaagtaagcccatagtataaaaaaagtacttaaaaaatgcctttcgattgggttttg

SEQ ID NO: 677117 - DNA, 2417 bp, Homo sapiens
ttgggaaatatattgacattgtctcctacttacatacattaccactgggacgaaatatgtttgtataggctacataaaactgtggtaaatatcagcttgggaagtagtaatataggttccataactccccacttaattatattcaaataggcataaaaatctgaaaatacaaatagtaggaaagggaaataaaaaggactaacatatcatattggaacaggtgaatatctctgaaatagtcgccaaacatgacacagtaattttttcaaatggggtagggtacacgcaaagaattgctggaataagatatctgaggtctttttcacaccaaactgtagttttgttttcaatgatagcatgtgtagcaattggggaaactttccatagtgacctttgcttcatgctactttgacccatattttccattcccacggaagcataggttgagtctttactacaaatggtgacagggccttggaggagaaaaacattagggagagaagaaggtgagaaagagggcaaagttaagagggaaagtcacagggtctttctcagtggtgattagtttaaagcccacagcttaggctgttggcagccaggtagctgtttccctggtaacaactggagcagcagagttatcgaaatgtgatgttaccaaagcagaaagtaaaattcactattttgctcgtagagcaaaagatccgatgcatttgctataatttttttttcctggaaaacttaggtttaagggggtggggcattgactatccttgattttgaaaaaagaaaaaattgggttataaagctgttagtggagatttatttatttatttatttatttattttgagacagaatttcactcttgtctctcaggctggacctgcagtgcagtggcatgatctcggctcactgcaacctccacctcctgggttcaggctattctcctgtctcagcctcctgagtagctgagattacaggcaccaccaccatgcccggctaatttttgtatttttagtagagatggggttttgccatgttggcctggctggtgtggaactcctgacctcaggtgatccgcttgcctcagactcccaaacagctgggattacaggtgtgagtcactgtgcccggccagttagtggagatttcctctgttcttttttttttcctaaaaaaaaaaaaaaaaaaaaggggggggatactaggttgataggcttaacattaatcatgaattgtttttttttttttttcattttttttttttctttttgagacagagtcttgctctgtcgcccaggctggagtgcagtggtgtgatctcggctcactgcaagctccgcctcccaggttcacgccattctcctgcctcagcctcctgagtagctggggctacgggggcccgccaccactcctggctaatttttctgtattttaagtagaaacggggtttcattgtgttagccaggatggtctctgtctcctgacctcgtgatctgcccgtcttggcctcccaaagtgctgggattacaggcgtgagccaccgtgatcggccctcattaatcatgaattgttaaaattagaaaccaggatatccaggtttccccaaagtacatgtcacaaaattcaaccaaaccaaggtccaggggactttaaatctttttatttttatttgtattattttattatactttaagttatgggatacatgtgcacagcgtgtaggtttgtcacataggtatacacgtgccatggtggttcgctgcactcatcaacctgtcatctacattaggtatttctcctaatgctatacctccccttccctccatcccccgacaggccctggtgtgtgatgttcccaggggactttaaatctttcagaatccttttgagttaatgcacaaatwgattgtgcttgtttatttttctaccttgtggaacgccttggcctctggggatatcactgaggtatcaaagaatatcaattgagagagaggtatagaggatctcagatacatgagtttattatgaatgtataaatggctttttggaaaacaaggatgacaaatattgacctagactgccagtaagtgttaaggatgggaaggctatagctaaaggcaggaggtctcccttaagttatgtgttttaaattcttaggaatcaggtatactgtttctctcaggaacatcaatactgattgtgttgttcattagtgtttagtaaaaaaaaaaattatggatttttatgagctcagtctctacactgaactaatagttaagccatggttttttaccagtttgaaatgctcatgcctgcataaatgtcaaaatcatgtaaaattctacaggggataccataaatttgataatctattctaaattagtttaatctagagatgtcagctgggtaacaatta

SEQ ID NO: 677118 - DNA, 610 bp, Homo sapiens
ttttttcctgttcctrttgcagcactttgggtgtggtatttaaataggaagcagaccaatgtgaaagagacttcttttagtcacacaatatttgtgttctccttttcccttagtataataatagatctttggattttagctgggcacatggccattagaataaggactacatttcctagtctctcttgctgctagatagggctgtgtgactcagtttcaaccaatgagatataagcagagatagtgtgttcaactttctggaagaataattaaggaaggaaaacatctaattcttcaattcttcacataattctttcctcagttcttctgagcaaatttaacacatctgaatactaccacccaaatgcaatattatcaatacattagcctatggcagaggttgacaaactttctctttttctttttttttcttactttttttttttttgagacagagtttcactcttgttgcccaggctggagtgcaatggcgcgatcttgactcaccgcaacctccacctcccgggttcaagcaattttcctgcctcagtttcctgagtagctgggattacaggcatgcgccactacacctggctaattttgtatgttt

SEQ ID NO: 677119 - DNA, 674 bp, Homo sapiens
tgaggaacttgaagcccaaaagggaaagtcactcagaagttcccagaaaggcagtggcaaagaagcccagaactcaggtcctctctggccaagcccggggcccactgctccataaggaagtgataggaaacatttcatccttctttgggggtgagagaaggataaccacctgttatgtggttaaagatgaaaacaggccgggcacggtggctcatgcctataatcccagmactttgggaggccgaggtgggtggatcatgaggtcaagagatcaagaccatcctggccaacatggtgaaaccccatctctactaaaaatacaaaaaattagccgggtgcggtggcgggcgcctgtagtcccagctactggggaggctgaggcaggagaatggcgtgaacccgggaagcggagcttgcagtgagccgagattgcgccactgcagtccgcagtccggcctgggtgacagagcgagactccgtctcaaaaaaaaaaaaaaaaaaaatagctgggtgcggtggctcgcagctgtagtcccagctactcgggaggctgagacaggagaatctcttggacccaggaggcagaggttgaagtgagctgagatcgcgccactgcactccagcctggacgacagagcgagactccgtctcaaaaaaaaaaaaaaaagaaaaaa

SEQ ID NO: 677120 - DNA, 998 bp, Homo sapiens
tgccacagtagcagatctgatagttctttctcctttctgtctttccagcatattcactattttttttcctttgagacaaagtcttgccccgtcatcacccgggctggagtgcagtggcgtgatctggggtcactgcaacctccgcctctcattttcaagcgattctcctgcctcagcctcccaaacagttgggattacaggcatgtgccaccacacctggctaattttttgtatttttagtagagacagggtttcaccttgttggccagactggtctcgaactcctggcctcaagtgatccaccttcctcagcctcccaaagtgctgggattatgggtgtgagccackgcatcgggccatattcattttttatatcacccatctgcccaaccaataacagctaatgtgcttcagctgcctaacaatgcctttaggcactggaagtacagtggttaagggaaatctaagttggagcttatggtctggtaagggagacaatcatgcgatacagttacaagctgataaatgatatgaacaaaaaagtgcaagctttcttgagagtaagaggaatctgatgtagtttggagatggagtagtgtgcaggaaattatcctaaaaacgagacttggtagtaacgtatactgttctctccttcattacagaggaggtgtgaagcagctgaagggtcggtgagtaattctatgggagggtggtctgcgtgcccttagaaaggctggggctctctgcttccttactgaatcctcaggcatcaggacaccaggggctgggctgtaaggctgtgatgctgcttggggagagaggaccaacaccccactggggcaggagctatttggcctctgagaccctcactggggagcaaacaggaagcctttagttttacctgtgtcttttttttttttgagatggaatttcgctcttgttgcccaagctggagtgcaatggtgcgatctcggctcactgcaacctccacctcctgg

SEQ ID NO: 677121 - DNA, 546 bp, Homo sapiens
atttcaatcttgcatcccagtcttccatcccagaagtacacattagcacccttggagcaatcattgaaaaaagtacttacaactgtcaaattatcttcataataacatggcacagtttatatgactggttgcttatgaactactgaaacctctcttaaaatggccattgtggactatttaaaaattttggttttaccacattcattccttcagttgtttaatagccatcaaataatagtgaagaattcagtgaagacagtgcagaagaagtttacagagatgctcaacatccttggcttttttatggatacaaactctggcaygtgtatataataagtgagcagcttatagcattttgcatatagatagcagtgctattacttgtttatatatttctttctcttgatagtgtgagggctccttaaggagggcatatgttttcttcatttctttagcccaaacagtccatagatatcaaacctgctggcaatttataaatgattattggtgagtgaatgagcatacaatgtatagatttcttaatgg

SEQ ID NO: 677122 - DNA, 946 bp, Homo sapiens
ttttctgcaacatgcaaagcactgagctaggccattgcaggtgggtctctgcgagagggtgagggagagaaacaaccagataactccagtaccagcagggtaagagtgctgcagaggaagcccagagaaagagaaacaggatgtagctttcactgagcatcccttgggggccaaatattctgaacacatcactcacagaacctctgagtctttccaacactcctatgatataaggtgcatttttttcacctcatggataagagagctgaccagagaaatcacatgtctgggccaaggtcatacagctagtgtggcagaggctgtgatgctccggccaggttcccttcaagcggggactggtcccagatgctgcctgtgtcgctagcatgcagtctttagctgtcagcccttatggggactgcctcggcctcacctaaggtcctgcccctgctcggtatgacccacaaccatgactggttattgcaggagtatcaagatctaaatgtcttagcccagtttgagccaatgctgaagggcctctttagtcctgagctccctatggggttggctgargttgtcattgagcctgtagggcagctgaacttcttctccctggtcctccttctgccctgtcccttccaaggtgtcaataccaaagccactccttaaaaaacattctgcttgttgaactcagattctgttttcttagcaaacccagtttgcaatgacagttactcagtgatgaaactaacaattgaaccacatctatttatttctccatttaacctctttctgtggataacttcattactattaatagataaagtcattcattcatttacttattcaaatatttcctgaatcttccaagaagtgtgatccctttcttaatccctgccttcaaggagtttagagtacaataagcttacattagttgtttctgata

SEQ ID NO: 677123 - DNA, 600 bp, Homo sapiens
acgccattctcctgcctcaacctcccaagtagctgggactacaggtgcccaccaccacgcccggctaattttgttctgtatttttagtagagacagggtttcaccatgttagccaggatgatctcgaccccctgactttatgatccacctgccttggcctcccaaagtgctgggattacaggcatgagccaccacgcccagccttcagtttttttaatgttaaaaggaatgagaaacttaagaagattaatgagtaaaaataacagagacctcctttccctattttgtttggtaaaatgtattgaacttgatcaagargggaaaaaattttgctagcatccataacagataccagaaataacacagtttaaagtattgataagaaggtaggacaattgaaactcatatattaaagcaagaaatgtaaaatcatacaactacttaggcaaaattaaacatatacctaccttttgatctagtcatttcactttaatatataaaaatacatgcctgcccaaaaaaattgttttaaaatgtccatagcagctttattcaaaataatcccaaatgagaaacaaacctagtacatcaacagaaaca

SEQ ID NO: 677124 - DNA, 980 bp, Homo sapiens
ggaacaaagaagtgtgagattaacagggtatggtaaagacatggggatgcaaatgagcatttgattttgaggctagaaggggaccaaccatgttggtcaagaatttatgttaggaggagaagggagatgaggctagaaaagaaataaaagaaagattggactgggagataatttttctgctgggattaggggcttgaacttcatctcataggtaattaagagaatatgagagattttaagccacaggagtcagtgaaaggatgccgtctttaaccataggtttggcagggaaggctatggagattttacccactttgttcctttgcccactcttatgggaggaagttctttagtactagaaagtggaaagacatatactatacaggcaaaatgaaaaatatctactaaaaaacaattaatacaagaggtattaacaaggttatagtgttgctacaatgtgaatgggtgggtgttgtagaaaaccgttcataggctggcagaaagacagcatccttaatgcagttgygagtgatgagggaatgttagtaatctattgctaattaattatctattgttatataatggatgattttaacacttagtgcccaagaatccaggcatggcttagttggatcttctgcttcaggtctctcacaagactataattaaggtgtcagccagagctggagtctcatctgaggcttgacaggaacagtctacttacaagggcatattgttgtgtataggatttagtttcttgcaggctgtcagaaggcttcagttccttgatggctgttggccacaagtcacaccctcagttccttgccatgtgagcctctccatagggcagttcacaacatgggggcttgattcatcaaagccagcaagggagataatcgatagaaagtgcctgctagcaaagagaagatgtaatcttatttcctataactatggaagtgatatactaccattctgttggt

SEQ ID NO: 677125 - DNA, 2056 bp, Homo sapiens
taggagaccttgaactgtctgttacggaggtttccaatcctgaggagaaggacggagggtggcgttcacgagggatactgcctattactcagcttaaagtccccttggctctgccctcctcctcctcctcgtgctgcgagctgggaggagtcagcgttttctctccctaactggcattttcactaggcagaatacttgtcttttgtgaacgttttcattttcaagacatataaaagaaaactttgttctttartaagtgattttctcccccgacagggagagggttacaaatccctccctctccagcggagttttcttatctcttatttacagagcagtagccattttggggagggggaaaagttgtcagcaactcacgtcctaataatggcagatatttttcttaagccctcaccatgtcccaagcactctcccaagagttttacatgtattaactcagttaatccttcctagagccttatggtatacgtgctattaggatcccgattttacagaggaagagactgaggaacagaaatgtaaactaacctgccaagatcacacagaggctgggattagctctctgacctctgtcccagaggcagaatttttttctaatctcacgagtataggtgaaagtcagagtctcattacagattgagactgaacagaaagttggaatccattgaaaaagaggtgtgtgacattgatcaaggccagcacttttatttttgcccatttatacttccttaaaaatctatgagccaactctgttgttacaacacaaacatgcagtggttccctagccaggtcaggtcagctagaaaatacaacatacgctcttgaacaactagatttatttcaacccaattttcaatgtttatataattcaattgtaaaatgttaaaacttggaggattttattcaccagctgaaggactcatagttactatctttaaaaacagcagtgaataagcaaactataaactaacaaaaaaaccaagcacaacaaaacaaacagcaaattaggtttaatcataatgcttgggagaatatgtatttggcttaattatattttcttctttttttttttttttttgagatggagtttcgctcttgttgcccaggctggagtgcaatggcacgatctcagctcactgcaatctccgcctcctggattcaagcgattctcctgtctcagcctcataagtagctgggattggccgggtgcagtggctcacacctgtaatcccagcactttgggaggccgaggcaggtggatcacgaggtcaggagttcaaaaccaggctggccaagaaggtgaaaccccgtctctactaaaaatacaaaaaattagccgagtgcagtggcaggcacctgtaatcccagtactcgggaggctgaggcaggagaatcgcttgaactcggagggcggaggttgcagtgagctgagctcgcgccactgcactccagcctggcgacagtgtgagactccatctcaaattaaaaaaaaaaaaagaaaagtagctgggattacaggtgcccgccaccatgcccggctaatttttgcatttttagtagacacagggtttcatcatattggtcaggctggtctcaaactcctgacctcaggtgatccacctgcctccgcctctcaaagtgctgggatttcaggcgtgagccaccgcgcccggccaattatattttctagttactcagctatctacaaataaaggttttgtttcatctttacatattttaaatatgtcttactatatatttatatgtatacataaatatttcttgtactcttttaatatgtaaggaatagttttccatctttaaacatgtttaatatggtaaacatccttttttatgaaacaagattgaatatcaataaactaaaccacaagtagaaaaaactatcatttttcatggagaattcacagttctttaatgctctcattctgaatctgaataatcattcatgatgaaatagaaagcacaaataagttttacccacatggactcttcataacattccctggaggcttcc

SEQ ID NO: 677126 - DNA, 618 bp, Homo sapiens
caattcattaataattaaagtcatcagtcagttggcatgtgtggtcaggaccaacagggacatacattttttaagccccaaagcagaaaaaagaaacgtagacattagaaatgtctagaaatgatggggaaagggcaggagacagggccgtttggcaaccattctcactgctggaaaccactgccaccagcagcactgccactgattacagaaaacctctgggagtttgttttgttttgatttgttggctgaagatgatattgatgaaaagttgtatctcaaaatggcctgtttataacattgatagtacacyggttatagaagctgtactgcggagagcaagccttttacccacattgtcatagtccatctccctccagccgcatgaagtctcactgtcactctcactaagcctcttttcattgatggatgaactgagacctggaatcaaaaacaaagtggaagactccagtaggcaccacgtacctagaataatgtctctcactgttacttattgagcaaatttaaaaattagcatcatgcagagatggctgagccatcccatgcggagatgtgggcgggagaggctgcactgggctggtcagttcagcagcctca

SEQ ID NO: 677127 - DNA, 650 bp, Homo sapiens
ctagaaagcatcttctcttttttcacctgccttatcacatttgagcctcagaacagcccccttagtggtggtcttaccttcacagcatataatttttttgttttgtctaggaagttatgattacttctatttttctgctgcttataattttggttgtgactcaaaacaattttaatgaaaatgaaaaacaatgtaattttttttttttttttttttttttttttttttttgagacagagtcttgctttgtcgcccaggctgccgtccagggttgcgatctcggctcactgcaatctccacctactgggttcagcgaaactgcttctcaaactgtggatccagacaaggtgaaggaccctggtaaactgaggacaatgtttgtagcagaactccccaaaactatcgtcaccgactcatgacatcacacaggtaataatgcaggagcacacatgctcctctggtggagagaacttttggatcttgttcactgctaycatcccaggacttaacagggcgcttgataaatgtttgttaaataaataaacgcacatcacgcatttccacccagagtacccctactggagtctccctcaccacatcagcggggctctgtcccagaaatccctagtcctctcttttttttttttttt

SEQ ID NO: 677128 - DNA, 650 bp, Homo sapiens
ctagaaagcatcttctcttttttcacctgccttatcacatttgagcctcagaacagcccccttagtggtggtcttaccttcacagcatataatttttttgttttgtctaggaagttatgattacttctatttttctgctgcttataattttggttgtgactcaaaacaattttaatgaaaatgaaaaacaatgtaattttttttttttttttttttttttttttttttttgagacagagtcttgctttgtcgcccaggctgccgtccagggttgcgatctcggctcactgcaatctccacctactgggttcagcgaaactgcttctcaaactgtggatccagacaaggtgaaggaccctggtaaactgaggacaatgtttgtagcagaactccccaaaactatcgtcaccgactcatgacatcacacaggtaataatgcaggagcacacatgctcctctggtggagagaacttttggatcttgttcactgctaccatcccaggacttaacagggcgcttgataaatgtttgttaaataaataaaygcacatcacgcatttccacccagagtacccctactggagtctccctcaccacatcagcggggctctgtcccagaaatccctagtcctctcttttttttttttttt

SEQ ID NO: 677129 - DNA, 1627 bp, Homo sapiens
  misc_feature 414, 483, 484, 485, 486, 487, 488, 489, 490, 491, 492, 493,494, 495, 496, 497, 498, 499, 500, 501, 502, 503, 504, 505,506, 507, 508, 509, 510, 511, 512, 513, 514, 515, 516, 517,518, 519, 520, 521, 522, 523, 524, 525, 526, 527, 528: n = A,T,C or G
  misc_feature 529, 530, 531, 532, 533, 534, 535, 536, 537, 538, 539, 540,541, 542, 543, 544, 545, 546, 547, 548, 549, 550, 551, 552,553, 554, 555, 556, 557, 558, 559, 560, 561, 562, 563, 564,565, 566, 567, 568, 569, 570, 571, 572, 573, 574, 575: n = A,T,C or G
  misc_feature 576, 577, 578, 579, 580, 581, 582: n = A,T,C or G
gaatttggttgctgacccggccccagcctcggctttcttgttggcaccagggggcacagcactccgtttgtaggtatctctgttggcttcccctcttgtgagtcttgcaggtcgctcaccctccagactttaggccaaggcctgccagtctctggacagctgcggtgtaaggtggcaggcacaatctccgagggcagatgaaggtaatcacagagatactggataccctcattggtaaggtaccagtagaaatgtctccaggcaaacttccttcacgtagcctcgggacttgagagactgcatggccttcatgacacgaaggttgggcgcattcttgtctgccagctccgggtgcttaggcatgtggacatccttcttggccaccatgacttccttcttaaaaaggagtcatanatgggcatccaagtcttcttaggcatcaacatcctcggtgctgtagggtccgggtggggggctggaaannnnnnnnnnnnnnnnnnnnnnnnnnnnnnnnnnnnnnnnnnnnnnnnnnnnnnnnnnnnnnnnnnnnnnnnnnnnnnnnnnnnnnnnnnnnnnnnnnnncatgactcactcctccatcacagcaacccctcagcagctgggcctcctgagccctgggcaggacagggttagtgggccaggcccrggtgggcagtggtcctttgccttggacactgtatggtctgaaaggatcccggcaggactgatcacttttgaaactgctttctgaaagctccaagcttccttctgagtggagcttaagatataatattaagcaggtcattctaggactgtatgagagcagaatgtggcatctctttctgttttagcttgcagggtacttctaggcggttggtgctctctcctgggcctggtggatggaagggagcaggcagggaggggtggggcaggccctgcctacagagcctgtcagtagggaaccagtgagtcaccagaagtccaatacctcagtccagatcctggatgctgttggatcacgggatctgtctgagcatcagtttccttttctgaaaagtagggatgataacagcctaggacggtgggtgaatcagtgaggtaatgcacaggaacacgcatagtagatagtttttgccagagtgggtggttatgagtatttagagtggcctgagcctcccaattgaaatatcctggccttttgtcaagtcctaagagaggatgtgtgggggaagctacagactaatgaagaggtgaccggatcgtcagagggtgcagacatgcttagcaagctggtggtgcgactcagggctagctgcccctggtcacgctccccctgtgcatccgcggcagcaggaaacatttgtcctcaggaaacagcccctcgaagagcgtccggacgccgggacccagcctggatggcagagggggcgttaactcgtcccacaggtgccactgacccaacacgattttttttctggtgtatctttctgggagatgtatctttctgggagatgttggaactgggcccagagaaaagcatacgagaccacaatccccaagacactgcttggtggggtaccccacatgtctgcttcaagtgccacaggtacagcaaggaaagcctgca

SEQ ID NO: 677130 - DNA, 1435 bp, Homo sapiens
tcctactgaaggttggagccccagagaaaagcctctatggaggcacccacttttcagaactgctgcttttgcgggagaacacctttttccaggtgttgtccttagggtagcagggaagactgggaaaaactgaggggcaagagctgttggaggggggagttacatttattgagtgtctattacatgccgggtgctgctgaaggtctgcgggtcctaccmggatctccttttagcccctcacatccctgtagattacacgccgttcacagatgaccctgaacccagaagggctgtctaggcccagggcccagctagtgagtggatgggcagaatcagacctgccctggaagggtctgtcttaccctggcgcccaaaatgtgtccctcaccctctgccaccaggacaagtaaattcgagacaccctttcgttaggggctcaagtttatcatgggtctgacctctaaggtcatatctccgccttctcacctgacagacaggaaactcctgaaatgcccctcgcacgtgcaagacgttttccgcggtggcggcgacagggcgcacagtgggaccgcagcacgagctcggagcacccccagagtcggcgactcctgcccccgcccctgccggccggccttcccggggcctaggagggcagcaccgccgggcttcgcgccatgacatcagccctggagtggtgcagtgtgcaaagcccactggttggcgtggcccgggacacgccttccgcggagcggaacaaaacggcgcgcaggccgggcgcacccagccgccacttccgagagcgcctgccgcccctgcgccgccgagccagctgccaggtgagtgcgccctgagtcgcgcggctctgcccgccgcggaggggcgcctgggcacgcactcagcgcctcccggtcttgccagccccgccgcagccccggggctgtcgcaggcggggaactgtgagaagtgaccgcagttagcccgggcagtgctgctcttttctggaggcactaggtccgtccccatcccgggccttcctgggcttcctggacacagttgacttccgcgtgtgcgtgacccagggcgacccggctccccgcaaccgcctgcaagtcgggcagaacaatcggcgattctgcgcgccactgacgctcattgtatggcagagagatgagggcatacgtgccaccccctccctcaccctcctgctggggagaaaatgcccgcgggcggggtggggcaaacatcttggcctgaccttggacatctgtgttcctgagcgcaggtgtgagttttccctcttgtgaaataactgcatggaaacctctccactccaaatcttggtgctaggtggtgatggttactgaaacctgaaagagcctgcagtcagtgtttgtgggctcagtcctttgaagctggtaagtgataaaggggctgg

SEQ ID NO: 677131 - DNA, 1435 bp, Homo sapiens
tcctactgaaggttggagccccagagaaaagcctctatggaggcacccacttttcagaactgctgcttttgcgggagaacacctttttccaggtgttgtccttagggtagcagggaagactgggaaaaactgaggggcaagagctgttggaggggggagttacatttattgagtgtctattacatgccgggtgctgctgaaggtctgcgggtcctacccggatctccttttagmccctcacatccctgtagattacacgccgttcacagatgaccctgaacccagaagggctgtctaggcccagggcccagctagtgagtggatgggcagaatcagacctgccctggaagggtctgtcttaccctggcgcccaaaatgtgtccctcaccctctgccaccaggacaagtaaattcgagacaccctttcgttaggggctcaagtttatcatgggtctgacctctaaggtcatatctccgccttctcacctgacagacaggaaactcctgaaatgcccctcgcacgtgcaagacgttttccgcggtggcggcgacagggcgcacagtgggaccgcagcacgagctcggagcacccccagagtcggcgactcctgcccccgcccctgccggccggccttcccggggcctaggagggcagcaccgccgggcttcgcgccatgacatcagccctggagtggtgcagtgtgcaaagcccactggttggcgtggcccgggacacgccttccgcggagcggaacaaaacggcgcgcaggccgggcgcacccagccgccacttccgagagcgcctgccgcccctgcgccgccgagccagctgccaggtgagtgcgccctgagtcgcgcggctctgcccgccgcggaggggcgcctgggcacgcactcagcgcctcccggtcttgccagccccgccgcagccccggggctgtcgcaggcggggaactgtgagaagtgaccgcagttagcccgggcagtgctgctcttttctggaggcactaggtccgtccccatcccgggccttcctgggcttcctggacacagttgacttccgcgtgtgcgtgacccagggcgacccggctccccgcaaccgcctgcaagtcgggcagaacaatcggcgattctgcgcgccactgacgctcattgtatggcagagagatgagggcatacgtgccaccccctccctcaccctcctgctggggagaaaatgcccgcgggcggggtggggcaaacatcttggcctgaccttggacatctgtgttcctgagcgcaggtgtgagttttccctcttgtgaaataactgcatggaaacctctccactccaaatcttggtgctaggtggtgatggttactgaaacctgaaagagcctgcagtcagtgtttgtgggctcagtcctttgaagctggtaagtgataaaggggctgg

SEQ ID NO: 677132 - DNA, 1435 bp, Homo sapiens
tcctactgaaggttggagccccagagaaaagcctctatggaggcacccacttttcagaactgctgcttttgcgggagaacacctttttccaggtgttgtccttagggtagcagggaagactgggaaaaactgaggggcaagagctgttggaggggggagttacatttattgagtgtctattacatgccgggtgctgctgaaggtctgcgggtcctacccggatctccttttagcccctcacatccctgtagattacacgccgttcacagatgaccctgaacccagaagggctgtctaggcccagggcccagctagtgagtggatgggcagaatcagacctgccctggaagggtctgtcttaccctggcgcccaaaatgtgtccctcaccctctgccaccaggacaagtaaattcgagacaccctttcgttaggggctcaagtttatcatgggtctgacctctaaggtcatatctccgccttctcacctgacagacaggaaactcctgaaatgcccctcgcacgtgcaagacgttttccgcggtggcggcgacagggcgcacagtgggaccgcagcacgagctcggagcacccccagagtcggcgactcctgcccccgcccctgccggccggccttcccggggcctaggagggcagcaccgccgggcttcgcgccatgacatcagccctggagtggtgcagtgtgcaaagcccactggttggcgtggcccgggacacgccttccgcggagcggaacaaaacggcgcgcaggccgggcgcacccagccgccacttccgagagcgcctgccgcccctgcgccgccgagccagctgccaggtgagtgcgccctgagtcgcgcggctctgcccgccgcggaggggcgcctgggcacgcactcagcgcctcccggtcttgccagccccgccgcagccccggggctgtcgcaggcggggaactgtgagaagtgaccgcagttagcccgggcagtgctgctcttttctggaggcactaggtccgtccccatcccgggccttcctgggcttcctggacacagttgacttccgcgtgtgcgtgacccagggcgacccggctccccgcaaccgcctgcaagtcgggcagaacaatcggcgattctgcgcgccactgacgctcattgtatggcagagagatgagggcatacgtgccaccccctccctcaccctcctgctggggagaaaatgcccgcgggcggggtggggcaaacatctkggcctgaccttggacatctgtgttcctgagcgcaggtgtgagttttccctcttgtgaaataactgcatggaaacctctccactccaaatcttggtgctaggtggtgatggttactgaaacctgaaagagcctgcagtcagtgtttgtgggctcagtcctttgaagctggtaagtgataaaggggctgg

SEQ ID NO: 677133 - DNA, 1435 bp, Homo sapiens
tcctactgaaggttggagccccagagaaaagcctctatggaggcacccacttttcagaactgctgcttttgcgggagaacacctttttccaggtgttgtccttagggtagcagggaagactgggaaaaactgaggggcaagagctgttggaggggggagttacatttattgagtgtctattacatgccgggtgctgctgaaggtctgcgggtcctacccggatctccttttagcccctcacatccctgtagattacacgccgttcacagatgaccctgaacccagaagggctgtctaggcccagggcccagctagtgagtggatgggcagaatcagacctgccctggaagggtctgtcttaccctggcgcccaaaatgtgtccctcaccctctgccaccaggacaagtaaattcgagacaccctttcgttaggggctcaagtttatcatgggtctgacctctaaggtcatatctccgccttctcacctgacagacaggaaactcctgaaatgcccctcgcacgtgcaagacgttttccgcggtggcggcgacagggcgcacagtgggaccgcagcacgagctcggagcacccccagagtcggcgactcctgcccccgcccctgccggccggccttcccggggcctaggagggcagcaccgccgggcttcgcgccatgacatcagccctggagtggtgcagtgtgcaaagcccactggttggcgtggcccgggacacgccttccgcggagcggaacaaaacggcgcgcaggccgggcgcacccagccgccacttccgagagcgcctgccgcccctgcgccgccgagccagctgccaggtgagtgcgccctgagtcgcgcggctctgcccgccgcggaggggcgcctgggcacgcactcagcgcctcccggtcttgccagccccgccgcagccccggggctgtcgcaggcggggaactgtgagaagtgaccgcagttagcccgggcagtgctgctcttttctggaggcactaggtccgtccccatcccgggccttcctgggcttcctggacacagttgacttccgcgtgtgcgtgacccagggcgacccggctccccgcaaccgcctgcaagtcgggcagaacaatcggcgattctgcgcgccactgacgctcattgtatggcagagagatgagggcatacgtgccaccccctccctcaccctcctgctggggagaaaatgcccgcgggcggggtggggcaaacatcttggcctgaccttggacatctgtgttcctgagcgcaggtgtgagttttccctcttgtgaaakaactgcatggaaacctctccactccaaatcttggtgctaggtggtgatggttactgaaacctgaaagagcctgcagtcagtgtttgtgggctcagtcctttgaagctggtaagtgataaaggggctgg

SEQ ID NO: 677134 - DNA, 1264 bp, Homo sapiens
tttggcttaggaattaccattaaccattgtataggaacatgtctaagagtgagctctttttgcttaacatcagctttaagttgagctttcatatttagacataacttatttatttaaagctattaatatataaaaggtaattatcaattctggaaaagtttggctctatgacagtgaacaaactgtaattcaagaaaaagactactaagtatgtgaagcaccacatccagagaaaaaagattttctagcaaattggatacacatatagaggaaagtgattatgtgtgattacttctgggactaaatttgaagtatgttggaaatagggttgtcaatgtaattttaaaattattgacctctaacatagtcattataattgaaaatgttactttatttgtcttgtcttcccttgcctttacctctatccttctgttttctcctttgttacagatcatacatctgtcggtggcctgggagacagtttttatgaatacttactgaaagcatggttgatgtcagataaaacagaccatgaggcaagaaagatgtatgatgatgctattgaggtgattatttccagaacatttttctacttaatggattgaatgtacagtgtattttgtagtgactagatgaatatcttataaccattttattatagacattcagtaaatacatacaaacattttattatatgcattcactgtagagtttgttactattttaatagaaaagcctcatattaagtcttcttttatttgtgacatttttaaagaaatttttgaagaaagaatttattgtagtccaggtgcagtggctcacgcctgtaatctcagcactttgggaggctgtggtaggcagatcacttgaggtcaggagttcaagaccagcctggccaacatggtgaaaacccatctctactaaaaatacaaaaattagctgggcatggtggtgcatgcctgtagtcccagctacttgggaggctgcggcagtagaatcgcttgaacctggaaggcagaggttgcagtgagctgagatctcatcattgtactccagcctgggtgacagagcgagactccgtgtcaacaataaataaaataarataagaatttattttagtgtattcatgaaaattgattttatttacttttagttaatgtttacagagactggaaaaacttctgactttatatacattttcataaacatttttctttcaaatgaacccttgaatctacacattgagagccttatgggtaaatac

SEQ ID NO: 677135 - DNA, 678 bp, Homo sapiens
catggcaacaatggctctcaagcaggattcctatgagccttttttcctgcaactccttgtaatttgtcagaatctgtgtatccagaagttggaactgctctgtttcctctgcattgttggtacctgtagggaacaagtatgaaagactacaatgggctgtagtgtgtaggggcagagcttataccattggttctgctaccgtgctgttccttagttcccttgatgttcagcttgcagttaaatacaagaaaggatataattttaactctgcagaaaagtagtattacttcttttttaaggtaacattttgtaactttacaatgttaaaataaactcsctgctttcccctttccccaaatgttgtgttgacaagattggaaaatagtttgtgttctttaataaaaaccttatcatttcattaaaaattgaacaaacctcaatagcaaacacaaaaatggtaacactgaaaccaaccacgaaatcaaagtcattacattgtcatttaaggaatgactttataaccttcatacgaattttgggaattggtttctgtccaactcatagtatcacagttaatagactacttctgtaagtcagctctttgcttcaggaagagcttttacaactggatggactttctgtagtttctggaagtggtagagttgtctccaacttgta

SEQ ID NO: 677136 - DNA, 570 bp, Homo sapiens
atgttggaggaatttggaagcaggtgagaacaggttttgtgaagtggtcagaaacaccttatcaaaagagcaaacgctgggtagtaattgggttggtccttaaattacaactacaattcagagggaaaaagaaatggcaatggagaatggaggcagagcaaatggtccagtgaaaaaacaagagagagcaaggcatttaytagttgcctcaattaacttatcaaatatttatcgagtgatctatatgtgccttccattctgccaggtgctggagtgatgaggtcaacaggacagacatcatttcttgtggagatgttaggtaaccatgaggaagtcatgctggctgccaaggagaatgagatgaagttggacaaataaaaggaaagtcaagagaactcatataatatatctcatgttatatttcatcttttcacccacagccaggtaatgaacacctgtgtggtttataaaagcaagtcaatgttaacactgggagcagacctacctcaccaggatacggcaatgagcttacgtggaacatatgacttagggtgggacatatggcactgt

SEQ ID NO: 677137 - DNA, 570 bp, Homo sapiens
atgttggaggaatttggaagcaggtgagaacaggttttgtgaagtggtcagaaacaccttatcaaaagagcaaacgctgggtagtaattgggttggtccttaaattacaactacaattcagagggaaaaagaaatggcaatggagaatggaggcagagcaaatggtccagtgaaaaaacaagagagagcaaggcatttactagttgcctcaattaacttatcaaatatttatcgagtgatctatatgtgccttccattctgccaggtgctgsagtgatgaggtcaacaggacagacatcatttcttgtggagatgttaggtaaccatgaggaagtcatgctggctgccaaggagaatgagatgaagttggacaaataaaaggaaagtcaagagaactcatataatatatctcatgttatatttcatcttttcacccacagccaggtaatgaacacctgtgtggtttataaaagcaagtcaatgttaacactgggagcagacctacctcaccaggatacggcaatgagcttacgtggaacatatgacttagggtgggacatatggcactgt

SEQ ID NO: 677138 - DNA, 603 bp, Homo sapiens
taatacatttttcagaggaagaactaagcaagctcatgcaagacagaccaacatggcgcctggcaagcatattcagcaacagcccccatttcctacctgtgctgaaggcaccacttccgatgaccaaaactgaaacgctgttctctctgaaagccagcattcatgtccactcctrcggcagccaccctccacctaggcgccgctcttcccaccagaggggcgggcttgcttggccaggaccccgcgaggctcctccatgaactaggttgaggctgctgggtttgtgcctcgaatcctgcaggagatgattgagaaacatggtcaaagaactttcttggtcaacttttttagacacagaacaatccctgcctggtccctggaggacacaccccccaactactcccaagcagctttacttggtacagggcctgatccccacatccccctactttgcatccaacacttaacttctctgagcctctatttcttcactagtgtggtaggcagaattctaagatggccctcaagatttccggttcccctggtgcacagaccctgcaaagcccccaggactgtgaataggatggatggttgggttatgtt

SEQ ID NO: 677139 - DNA, 603 bp, Homo sapiens
taatacatttttcagaggaagaactaagcaagctcatgcaagacagaccaacatggcgcctggcaagcatattcagcaacagcccccatttcctacctgtgctgaaggcaccacttccgatgaccaaaactgaaacgctgttctctctgaaagccagcattcatgtccactcctacggcagccaccctccacctaggcgccgctcttcccaccagaggggcgggcttgcttggccaggaccccgcgaggctcctccatgaactaggttgaggctgctgggtttgtgcctcgaatcctgcaggagatgattgagaaacatggtcaaagaactttctyggtcaacttttttagacacagaacaatccctgcctggtccctggaggacacaccccccaactactcccaagcagctttacttggtacagggcctgatccccacatccccctactttgcatccaacacttaacttctctgagcctctatttcttcactagtgtggtaggcagaattctaagatggccctcaagatttccggttcccctggtgcacagaccctgcaaagcccccaggactgtgaataggatggatggttgggttatgtt

SEQ ID NO: 677140 - DNA, 603 bp, Homo sapiens
taatacatttttcagaggaagaactaagcaagctcatgcaagacagaccaacatggcgcctggcaagcatattcagcaacagcccccatttcctacctgtgctgaaggcaccacttccgatgaccaaaactgaaacgctgttctctctgaaagccagcattcatgtccactcctacggcagccaccctccacctaggcgccgctcttcccaccagaggggcgggcttgcttggccaggaccccgcgaggctcctccatgaactaggttgaggctgctgggtttgtgcctcgaatcctgcaggagatgattgagaaacatggtcaaagaactttcttggtcaacttttttagacacagaacaatccctgcctggtccctggaggacacaccccccarctactcccaagcagctttacttggtacagggcctgatccccacatccccctactttgcatccaacacttaacttctctgagcctctatttcttcactagtgtggtaggcagaattctaagatggccctcaagatttccggttcccctggtgcacagaccctgcaaagcccccaggactgtgaataggatggatggttgggttatgtt

SEQ ID NO: 677141 - DNA, 612 bp, Homo sapiens
tgcaggggaccagctctggcctgtgatacaagagacctgggacaggttgtggctctgtttctggttttctgagacccctgaggcaggtcagctcaggacgctggtttccctcttcactcagaagggcagagcctttattgtcctgcgcatctcatgtgctaaagttaatttgtcactgttagcatcggccctgaccatctgcctaaaccatcggccagccacaggtgcccagtgtccccttaccctgctttgttttccttttcggtgcttacacaccctgatgttacattctctacctcttcatttatactactgcctttctctgcyaggagactggaaaccccacagaggcagggcctggccttcgtccagggctgtgtctccagcacctgagcagtgcctggtgcgcacaagcagtgggcgcatctttacggaatgaatggtgcatgcgactagggcggcatgcctccttcatatcaccatggccctgttcctgcttctcctgccacttgtcgcagggcactgtaactgcatgtgtcgaatctgtctctgcttcacgcagtgaaatgctgaggcagagcacggagcacagcctggagcaggtgcttgatg

SEQ ID NO: 677142 - DNA, 1073 bp, Homo sapiens
gtttcatctgattttcatagaaaccctatgaggtagtggggctgaaaatcatccctatccttttatttttcatgattttacattttaagacattttggctggtgggggtgaagtagtaaatacaaaaggagtacactcccagtgcataaaatttggaaataaaaacagaaccaaaccaaacaaagaatcactcctagtcccactrctagatacaacattataaccacttaggtttccaatatttttcagttattctttgtatttaagcctgtttaaagatgagaaaattttcacatgtgtaatgagagtcaaagctaggactaaaactcatgaacactttccctcatactaggaagcctcttccttcttattaatctgtctctctttcaaaatgctcaagcattagaaagaataaatcttcagaaacacagatttggggattgttcatattttgtttccatttacaggtaaacttaccaatggtctttggagagaagcacctgcagcataaaaattgttgtcaagcacaatgatttttaagattctttttaactctgaaacaattgttctccttcttcttcttcctgtttttttttttggtttttttttttttttagacagggccttgctctatcaccctggctggctggagtggtgcagtagcaaactcactctaagcagtaaggcacagtggctcacgcctgtaatcccagcactttgggaagatgaggcaggtggattgtttgagtttaggagtttaagaccagcctgggtaacatggcgaaaccctgtctctacaaaagaaaaaagaatacaaaatattagccaggcatggtggtatgcacctgtagtcccagctactcaggaggctgagatggaaggattgcttgagcccaggaggcagaggttgtagtgagctgtgattgcaccactgcactccagcctggatgagacagtgagatcctgtctcaaaaaataactttttttaaaaaatctcactataaccttgcactcttgggttcaagtgatcctcccacatcagcctcccaagtagctgggagcatgccactggg

SEQ ID NO: 677143 - DNA, 645 bp, Homo sapiens
tgtgatcgtgtgagtcaatactacttaataaatttcccttcatatattcatctatcctgttagttctacccctctagagaaccctaayacaagatgagaacaaattaagtcagtcaaaatcccccaaataagaagttaaccaaactaaaatcaaaatcataaaccaacatcataagttggaacaagtgtcaaccaaggaaagaaaaggaatacaggtccagtaatcaacctgaagttatacatctaaaaagtggtgtggccagattaagcccctaatctaggtggctcaaagcttatgttcttttccatgtcttacctctctaggtgtagtcacagagagtctatgcgccttaaatcgctaagaaactaggcatgtttgcaaatgccttaacattttccccggaaggtgaaacctaaaaaagtggttagcaaacgtatctcagaatttgtttctgcagtacatgtctctttcagtttctacaatgtggtgaggaaattaaacatctctctggctctcctttaccacatgaacacccatgtgtatgtggatgcatgcacacacacacacacgtgtatgcatgtgcaaacacatacaatttaaccatcttcacttcagatggtctgaccttcaagtcaggttaccca

SEQ ID NO: 677144 - DNA, 592 bp, Homo sapiens
ggtattaacatttaatgggctctcattctaagttctaagtgcttcacatgtattaacttatagataaatgcttatacaaaaaagttgtacrgattaaataatgttattagggtgtttagcacagttcttatgttcaataagtagtaataattatttttcccacttctgcttatgaaaccagatattctcaccaataagacttttgggacccaaagatctaaaaagagagaccaaagtaagtaatgccactttgctccctccctcttttcctttcaaccaaggcaggaaacaatcttgagacagatggagaaagggaagccattcagttttgtctctttacctaactaataatggtaagaagaggggattgtggaacagtatgaacacctttcagttccttttgacacagataaccacttcatcctccacttttttccacccctcttatgttcactgtaccattctctgagtttcaaatcccctaggatcttgaatgccacagagtgcctcaaaaaacaagcctactgtcccttgcagacagctgtgtccctatcttaaatttccacctttcacaaaagacatgttaaactta

SEQ ID NO: 677145 - DNA, 1198 bp, Homo sapiens
cagaacgctggcagagcacagctgaacaggtgggcaatgtgagcccaagactcatagggctcctaaaccaggtccctgctctccctgcagctgtgtttcctcttccccagcctaccgccacccctggggtattcctacaagtttaagtcttggtttaaactaagattgctgctgagaaggtgatcctggctccagttggcctagagacagaggagaaagaagatgacccaaagagatcactcagaaggctgtgaggatccgcggtagcaatcagtattttaagaatgtgaacaacagtcttaacattctgcaggaaaagcatcttaggatgatttgctttctttttcataagacaggtactgtatgtgtatgtacacatgtgtgtgcctgtgtgtgtgtgtatacccacagaagcaaacaggtkggaagtggccttattgtatctgattaaacccttcaccatcctcaagccccacagatattgaagtttcaacaacttggcaattgtttggggtccagtctcctccacccactttcagcccttaccactgcaatttccacccaagattcacagatccttcatgaatatactcaccagaatcatctcataacccaaaaggcctgtatcttcccatttcccaagatgaagaaagcatacctggggcaccaaccgcttctttcctttgccttagagaatagaagggaaaaaatcctattctgtctgacctgagagcaattgccaaataaagaaacaaagcataagacattctttttctactagggcaatcttggggcctggttcagcatttgggaagaccctaattgttacccttacatttgattctaaaaagtctgaaacagcagaccatgggaaatttcctaaaattctagaatcccttaaaaaaaaaaaaaaactcatgtaatagtactcataaagtctactcatgattctccaacctccaggctggactggacttagcccagcctaaaagatgaaagtgtgtgtgtgtgttacatatagataacatatgtgttatatataggtattacacataacatctatataaaagtatactttttttggtccacattaaaaggattcaacaatctttttttactaaccccagacatcatacttccaaaagcacatctttaagatcctgctactgaaatttgaatttgttgtctaagctcatta

SEQ ID NO: 677146 - DNA, 694 bp, Homo sapiens
tccgacagagaaactagagttagaagtgcaggatgaatttaccaagagagtaggttaaaagggaaacttctccttcaggcctatggtgggcatttcttgtttactcaagaacctaccatctctcacaaaataatgtccactggaattcgattatgtcatgattttgcctgcccccgcgcccccagtcacagcaggagggaagcgcaaccctagcctttccttactctagagacaggaggcgctatgcwgcgacggcggcagagaaagcgtgggagcgacgctcttgctctggacgccgacgtgcccacgtcgaggccgcgcccagacccggaggcggggccgtcacgtggggcagcgtgggccgctgccttggaaacgcagagcgcgcgctccaggtaaaggctgctacgcccaggacagggttctcacggtggaggaaaggacttctgcgggataccacgctgtgcgccaaaaagccgggcggcttcggagccagagcagcggctctgcggcgcaggcggcgggtcggggcagccttgaagccgggatccggcccgaagggtgagcaccagctcgtctccggtgggcgccgccttcaatgtcaagttccagggcagtcgcttggacccgtttggcgagcgcggagtgagcggcgcaggaggagctcccctaggtcccggaagaaagccggccc

SEQ ID NO: 677147 - DNA, 694 bp, Homo sapiens
tccgacagagaaactagagttagaagtgcaggatgaatttaccaagagagtaggttaaaagggaaacttctccttcaggcctatggtgggcatttcttgtttactcaagaacctaccatctctcacaaaataatgtccactggaattcgattatgtcatgattttgcctgcccccgcgcccccagtcacagcaggagggaagcgcaaccctagcctttccttactctagagacaggaggcgctatgcagcgacggcggcagagaaagcgtgggagcgacgctcttgctctggacgycgacgtgcccacgtcgaggccgcgcccagacccggaggcggggccgtcacgtggggcagcgtgggccgctgccttggaaacgcagagcgcgcgctccaggtaaaggctgctacgcccaggacagggttctcacggtggaggaaaggacttctgcgggataccacgctgtgcgccaaaaagccgggcggcttcggagccagagcagcggctctgcggcgcaggcggcgggtcggggcagccttgaagccgggatccggcccgaagggtgagcaccagctcgtctccggtgggcgccgccttcaatgtcaagttccagggcagtcgcttggacccgtttggcgagcgcggagtgagcggcgcaggaggagctcccctaggtcccggaagaaagccggccc

SEQ ID NO: 677148 - DNA, 656 bp, Homo sapiens
cttgtggccactcttaggttctgtagaagtgacagagctggattttgaacccataccattcagtttttgtttttcggaaaaataattaaaaattgaaaaaaaattggccgggcgtagtggctcaagcctgtaatcccagcactttgggaggctgaggcgggcggatcacctgaggtcaggagttggagaccagcctgaccaacatggtgaaaccccatctctactaaaaatacaaaaattagccaggcgtggtagtgcgctcctataatcccagctactcaggaggctgaggcaggagaatcgcttgaactcgggaggyggaggttgcagtgagctgagatcacgccactgcactccagcctgggtgacagcgtgagactccgtctcaaaaaaaaaattaaaaatgatgttatgaaatcatttttggtgtaatttatgtggggtgatatgaggagtatgatagtggtgttcgtgatcacaggtataacatgatataccaatgaaagtcaagatttgctttgtgacaaaagtaattttagtaaatatttaaaaagcacaattttgaattttggttgtaaattggacgtattccttggttctaagggtctttttggagttcctgagctcagtgccccagaaggcacatacttcatatg

SEQ ID NO: 677149 - DNA, 656 bp, Homo sapiens
cttgtggccactcttaggttctgtagaagtgacagagctggattttgaacccataccattcagtttttgtttttcggaaaaataattaaaaattgaaaaaaaattggccgggcgtagtggctcaagcctgtaatcccagcactttgggaggctgaggcgggcggatcacctgaggtcaggagttggagaccagcctgaccaacatggtgaaaccccatctctactaaaaatacaaaaattagccaggcgtggtagtgcgctcctataatcccagctactcaggaggctgaggcaggagaatcgcttgaactcgggaggcggaggttgcagtgagctgagatcacgccactgcactccagcctgggtgacagcgtgagactccgtctcaaaaaaaaaattaaaaatgatgttatgaaatcatttttggtgtaatttatgtggggtgatatgaggagtatgatagtggtgttcgtgatcacaggtataacatgatayaccaatgaaagtcaagatttgctttgtgacaaaagtaattttagtaaatatttaaaaagcacaattttgaattttggttgtaaattggacgtattccttggttctaagggtctttttggagttcctgagctcagtgccccagaaggcacatacttcatatg

SEQ ID NO: 677150 - DNA, 656 bp, Homo sapiens
cttgtggccactcttaggttctgtagaagtgacagagctggattttgaacccataccattcagtttttgtttttcggaaaaataattaaaaattgaaaaaaaattggccgggcgtagtggctcaagcctgtaatcccagcactttgggaggctgaggcgggcggatcacctgaggtcaggagttggagaccagcctgaccaacatggtgaaaccccatctctactaaaaatacaaaaattagccaggcgtggtagtgcgctcctataatcccagctactcaggaggctgaggcaggagaatcgcttgaactcgggaggcggaggttgcagtgagctgagatcacgccactgcactccagcctgggtgacagcgtgagactccgtctcaaaaaaaaaattaaaaatgatgttatgaaatcatttttggtgtaatttatgtggggtgatatgaggagtatgatagtggtgttcgtgatcacaggtataacatgatataccartgaaagtcaagatttgctttgtgacaaaagtaattttagtaaatatttaaaaagcacaattttgaattttggttgtaaattggacgtattccttggttctaagggtctttttggagttcctgagctcagtgccccagaaggcacatacttcatatg

SEQ ID NO: 677151 - DNA, 623 bp, Homo sapiens
atgttactgcagcatctaaatttggcttaacattcaaaggaatcataaatagaaccaatatgtttgccttgtaaagataattatcaaagaaatgtacccttcttmgggtacaaaaaagagatggcaaaaaaagagatgtaccttgaaggcaagatacattaactacaagaatatgaactgcaatctaatttttccatattcaatattcacaatacttgtgaggatatcttccatttcattggatatattctgagacttctggttaccttagtatatacagagtatatatctcaatttaaaagtatggtgttcagagaagagtcatttgaaggtagctataattttgagtttattaaacataaagtccaacattgaagattgcataaaattttatcaaaatttaaaaataatagaccacattgaaagaaaatacttaaaaagaatggtgatattggttaggaaatcgattaaagtatcagaatatacttaaatataattattctccgctttattctaatgtttagttaacataaatagcttaaaaatttttttccttactacaaaattgttattttgctttaacgtatatatgttattgtttcaccctttaggatataacagaa

SEQ ID NO: 677152 - DNA, 623 bp, Homo sapiens
atgttactgcagcatctaaatttggcttaacattcaaaggaatcataaatagaaccaatatgtttgccttgtaaagataattatcaaagaaatgtacccttcttcgggtacaaaaaagagatggcaaaaaaagagatgtaccttgaaggcaagatacattaactacaagaatatgaactgcaatctaatttttccatattcaatattcacaatacttgtgaggatatcttccatttcattggatatattctgagacttctggttaccttagtatatacagagtatatatctcartttaaaagtatggtgttcagagaagagtcatttgaaggtagctataattttgagtttattaaacataaagtccaacattgaagattgcataaaattttatcaaaatttaaaaataatagaccacattgaaagaaaatacttaaaaagaatggtgatattggttaggaaatcgattaaagtatcagaatatacttaaatataattattctccgctttattctaatgtttagttaacataaatagcttaaaaatttttttccttactacaaaattgttattttgctttaacgtatatatgttattgtttcaccctttaggatataacagaa

SEQ ID NO: 677153 - DNA, 623 bp, Homo sapiens
atgttactgcagcatctaaatttggcttaacattcaaaggaatcataaatagaaccaatatgtttgccttgtaaagataattatcaaagaaatgtacccttcttcgggtacaaaaaagagatggcaaaaaaagagatgtaccttgaaggcaagatacattaactacaagaatatgaactgcaatctaatttttccatattcaatattcacaatacttgtgaggatatcttccatttcattggatatattctgagacttctggttaccttagtatatacagagtatatatctcaatttaaaagtatggtgttcagagaagagtcatttgaaggtagctataattttgagtttattaaacataaagtccaacattgaagattgcataaaattttatcaaaatttaaaaataatagaccacattgaaagaaaatacttaaaaagaatggtgatattggttaggaaatcgattaaagtatcagaatatacttaaatataattattctccgctttattctaatgtttagtyaacataaatagcttaaaaatttttttccttactacaaaattgttattttgctttaacgtatatatgttattgtttcaccctttaggatataacagaa

SEQ ID NO: 677154 - DNA, 633 bp, Homo sapiens
ttttttttttttttttttttttttgagatagggtctcactctgtagcccaggctggagtgcagtagtgccatcacacttcgctgcagcattgaactcccaggctcaagcaatactcccacctcagcttcccaagtagttgggactatagggacatgccaccacgacagttctttctttctttcttttttttttttttccagggagtgcatctcgttatgttgcccaggctgtttgccaactccttgggctcaagcagtccttccactttgttctcccaaagtgctggtataacaggcatgagccaccccaccaggccagcagcaggattcttgaagaatgtgtaggcactctgcgattttccatattgctcctttattgcagtttaatccttcacttcctctcctttcgtcttgaaacaactttcttcaatttcaccataatccatgtgtttgtggtttcagggatcagtgacattcagggatgtggccattgacttctctcaggaggagtgggagtgcctgcagcctgatcagaggaccttgtacagggatgtgatgttggaraactacagccacctgatatcactgggtaaggtcattggtcccagttatttttgtatctgttctctggaa

SEQ ID NO: 677155 - DNA, 596 bp, Homo sapiens
ttccccctctcctcttcctcttgctctggccatgtgaagtcctggttcccccatgccttctgccatgattgtaaatgtcctgaggcctccacagaagctgagcagatgccaacatcatggttcttgtacagcctgtggaactctgagccaattaaacctcttttctttataaataacccaatcaggtaatcccttttttttttctttgagacagagtctcgctctattgcccaggctggagagcagtggtgtgaccttggctcactgcaacctccacctcctgggttcaagtgattctcctgcttcagcctcccgatagctgggactacaggtgcctgctatcacacccagctaatttgtatttttggtagagacaggtttcaccatgttggccaggctggtctcgaactcctgacctcaagtgatccgcctgcctcagcctcccaaagtgctgggattacaggcatgagccaccgtgcctggtcccaatcaggtaatttttcatagcagtgtgagaacactctttctggctgaaaaaaaaaaaaaaawtcattggatttacaatgcagcatcttattcctttgtgggacaggaac

SEQ ID NO: 677156 - DNA, 649 bp, Homo sapiens
catgcacctatatttggtgacgttgtcatttaaaaactattgctccttaagagacagcaggtaataactgtttttaaaaaaagaatagttgttctttctttgttctttttagtctctttcttctaattatcaccatcatcgtctggagaactgaaccaatgagtaaagaggatgctgacacattggagaccagccagaaacgggttaaaggtcatgtgtttaagaagcaacgaaaataatttgacatacacagcctagaggaaaggcagaaaaacaaggatattttgatttataaataactaagagatactaaaaagaaagggaggaattatattggatatggtcaaaaagatggagatgtgagaagaatgaaataagaaaaaaaccacagtktgtagagattattaagcaatcttgacaagaaaaataagaaattaagtgataaatattgaatgttaagtgtcaggcatattttaacagtgttacatgagttactaacccatttaattctcctaacagcccagtgataaaagaattctgttatctcaaaggagagaacagccttgctgaatgatctcacagtgcaccaaggcactctatgaactatttgcagtaagatagtaattagcatttattaaatgtttacatt

SEQ ID NO: 677157 - DNA, 970 bp, Homo sapiens
tcacatttccacaaatattcaaggtcttcagtgttcagggctgttattgagaggtctaataacattttagctctctctcctggtatttttcctctttataagttatgttgttatgttttctcaagtgctttagaatcttcttaatttattttactgagatctcagtaatagtgtgttcattttttattatttttaatctggtaatacatgttcttcaattctgggaagcttctttgaagcattcctttgataattttctcccttccattttctcagtttgcccttgytgcaactctttttatttagaaattgggccttccgggctgatcttttctcttttatctcctattttatattttatattttatctcctgatattaattcctttatattttagttgtctctgggatgttgtttcaaccttagttgtcaatcctccatttcatataaatatacctcttacagatataacatatttaattctccagatatatacaaagacacatacacatgaacaaacacaaaataaatagaagcatatataaatatatgatatacatataaggtatatgcatatatacatatattgtatatattacatatattcatattcaatattattgatttaatgaatacttattttattgctttttctttcctttttgtggctttattctcttaccactccaaggatacaaattatccatgttttgaatttttgtatacttcttgtattttatatattttttgctttttttcctcgagttgtgaccccagtttataacatggatttttaaaaacatactattttatttagtgatgtgatgcttatagttttacctagtattttctaagtttcacccaaagtatagtagctaaaataaacaaaatattgtatttatttatttagtcactgtgtatgtaggtctgcaatccaggagcagcttagccagatgcctctggctcaggg

SEQ ID NO: 677158 - DNA, 970 bp, Homo sapiens
tcacatttccacaaatattcaaggtcttcagtgttcagggctgttattgagaggtctaataacattttagctctctctcctggtatttttcctctttataagttatgttgttatgttttctcaagtgctttagaatcttcttaatttattttactgagatctcagtaatagtgtgttcattttttattatttttaatctggtaatacatgttcttcaattctgggaagcttctttgaagcattcctttgataattttctcccttccattttctcagtttgcccttgttgcaactctttttatttagaaattgggccttccgggctgatcttttctcttttatctcctattttatattttatattttatctcctgatattaattcctttatattttagttgtctctgggatgttgtttcaaccttagttgtcaatcctccatttcatataaatatacctcttacagatataacatatttaattctccagatayatacaaagacacatacacatgaacaaacacaaaataaatagaagcatatataaatatatgatatacatataaggtatatgcatatatacatatattgtatatattacatatattcatattcaatattattgatttaatgaatacttattttattgctttttctttcctttttgtggctttattctcttaccactccaaggatacaaattatccatgttttgaatttttgtatacttcttgtattttatatattttttgctttttttcctcgagttgtgaccccagtttataacatggatttttaaaaacatactattttatttagtgatgtgatgcttatagttttacctagtattttctaagtttcacccaaagtatagtagctaaaataaacaaaatattgtatttatttatttagtcactgtgtatgtaggtctgcaatccaggagcagcttagccagatgcctctggctcaggg

SEQ ID NO: 677159 - DNA, 630 bp, Homo sapiens
cagaagaaaataaggcatttatgttttaggtcaggtgtgagttgaagacattttaagttcttgagaacacaggctaagggagaagaaggaggaatggagggtggaaagttgcctacagtgaaggaggcacgtccagagaaaagagagggtagagacatggagagaaggggtgggggrtgcttgcccctcaggaaagtgaagaggtggggacacggagagaagaggtgggggatgcttgccccccaggaaagtggagaaggggtgagtagagacatggagagaaggggtagggggtgctttccccccaggaaagtggagaaggggtgggaggtgtttgccccccaggaaagtggaaaaggagtgggaggagacatggagagaaggggtgggtgagcagccctgggctgcaatgtgggtgagcagccaaagcaggcatcctcacaattgacttcccacaaagggaatgtgggtcaatgaccaaggtaggtgatcagacaacaatgaaatgtggatgaataatcagtcaggcatccccgcgtgattaaacaccaagggaagactgtcttcctgagtccatgactggcgccagagttttgggtccacagataaaacgcgtctcctttgtctcta

SEQ ID NO: 677160 - DNA, 616 bp, Homo sapiens
tgccaaggctgtgtaatctaagataggcaacttaaaaaaaggagtattaatacttatctgtaagggatgttataattcaatgagttaataaatatctcaaggtgctttctaatttttagagtgcagttcaacttttattaagtgagagttttggatgctctcatgtaaaataataatgtgaattgctttcctggacactatctactttaaaatcaatttctctttctaatgtttgtcagtatgtgaatggccaggacaaattggttttgcttaatccacacaacaygtcatcaacaaagtaaaatcgactaaaagtaaagtcatcaattacattcaccattggtgcagtaaagatagtttatttaaaagttatttgatagactttttacaaggtttctactttttataagagactatggaagtctgaggaatgcttcaagaaaagagagagcttctcccctgaaggggctcaatacactgacaattgactgtctctgtgaaaagcatttgaaatgaatccagggatgtgactgaaaaattttagtacccaaatacttattaatgaaatattgtcttcatattgagtcaggagatactgatgtcacagtacagaatg

SEQ ID NO: 677161 - DNA, 616 bp, Homo sapiens
tgccaaggctgtgtaatctaagataggcaacttaaaaaaaggagtattaatacttatctgtaagggatgttataattcaatgagttaataaatatctcaaggtgctttctaatttttagagtgcagttcaacttttattaagtgagagttttggatgctctcatgtaaaataataatgtgaattgctttcctggacactatctactttaaaatcaatttctctttctaatgtttgtcagtatgtgaatggccaggacaaattggttttgcttaatccacacaacatgtcatcaacaaagtaaaatcgactaaaagtaaagtcatcaattacattcaccattggtgcagtaaagatagtttatttaaaagttatttgatagactttttacaaggtttytactttttataagagactatggaagtctgaggaatgcttcaagaaaagagagagcttctcccctgaaggggctcaatacactgacaattgactgtctctgtgaaaagcatttgaaatgaatccagggatgtgactgaaaaattttagtacccaaatacttattaatgaaatattgtcttcatattgagtcaggagatactgatgtcacagtacagaatg

SEQ ID NO: 677162 - DNA, 639 bp, Homo sapiens
gtttgttataagcaatggacgaacttctaaaaggattatctccaagttgatatctgataaaagcaaaatattaaggctgaatcgaaatgaaaaatgttttgagacttctccctgttcaaatggtcttaattcattatcatggtagagctgaagacatcttctatttaatagcttcatttagttgttatgaaaattttgtaaacgcatttttccagatatctcttatattgaagatgtactgagtgcctaaaatcaggaatttttgaaacaattcaagagatagggttaaaaagttcatttcagtgaaatagtgaaataaagggcgaagaagacagaaagaaagatacagatgaagaagaggagaaaaaaaggaacgggtacmagataaagtatgaagcataagtaaaagtgtacccatgggttttgtgtgcaaggtccttcttatttctccccatgtgattatacccaagtattctgccgaaaaattcagtttagagaagagatggaggatacaagtactcacttaggaggcacaaagacatatatatatacacaaacacccagaaacagaaagcaaagcctgctcattagagaaaatgtagaaaactttgaaaagtagaaagaagacaaataactgga

SEQ ID NO: 677163 - DNA, 650 bp, Homo sapiens
atttatatacaaaagagcttatgatcatctggtcacactatttcacccagtcacatacataaagaataactgtcattggattttctggttgaaatatcactcttgacagtctctaagcctaatctagttgaagaaagttgagtcaccaaaaaacagcgtcagctcttccttcattgcaaagactcgccagaataatacaggacaagctcagtgttattccttttaaagaaatacctatgtctttttatcttcaaattcaggttcatcctacctaatcttttgttggaatataataattgttcaattttttaaaaggacttttgattcctaccttgtttgaaattgaaaccattgaattctaggataattggcatccagcctcatttctctttcctttatgaaacactcagtgtcctgtctcaggcttatccccttgactttgatccttttgatcgacaaaactgagaagtttcaatggacctaagtgtctcctttcaagtcaagtctgtataatacaaggggaaggagtcattgcmctgtattccaagttcgaaagcacttctgccattttgagattaaaaatataaattagtcttaactatactttagcagagtaaatctatttcttacacttttagaagacagttttt

SEQ ID NO: 677164 - DNA, 1469 bp, Homo sapiens
attattattatttagatacaggttctcactctgtcacccaggctggaatacagtggtatgaccacagctccttgtaacctcaaactcctgggctcaatcaatcctcgcacctcagcctcccaaagtactgagattacaggtgtgagccaccgtgccctcccataatatatgatatttttatcagccagaaacttcccggatgttcctttgtagccagccccccatccctgccctatgcagccactgatttgatatctagcactacagattaaccctccttctcctagaacttcatacaaatggaatcaaacaacttttatgtttatgttgacttctttcactcaacgtaatataaatatccaaacttatgccccaggctaacattttcttttcttttttttttcatttttaattaactttgaagttccagagtatatgtgcagatttactatgtaggtaaaccagtgtcatgggggtttgtcatacagattattttgtcaccccagggattaagcctagtatccactggaaaccacaggacactttgaaactccttcaggacagaggtaattcacctgctgtgttgcatatatcagtattttgctcttttacattactctgtagtattctattatatgaatatatccaattttctgttgacagatatttgggttgttctcagttttttagcttttatcaattaggcttctatgaacatttatgtataaatctctttatggacatatgttttaatttcttttgagcaaatgcctgagggtgaaattgcttagctatgtttaactttgtaggcaacggccaattgttttccagagttgttgttcaccgaaaatctatgagggttttagttgttccacctgcttgccaacacacacagaccataagtctttaattttagccacttaagtaagtttatgtgtcatctcattgagagatggttaatttaaaaaaacctcctatcctcttgtgggtttccttgctggtaattctaacaaggggaccaatcagcttagagtataacgtagagatgtataaaatcttccggtatgaaattgacagagatcactaggtcatgtgcacagctgattaactatcgacctgtgatcacactgggaacttgagggcatcgcttgtgccctcttttttggaaatttaatctgactgaatattttctctttgaatatttaaatttctttaaagaagttaacaattaaaggaaggcattgtgttagtttcytatggctgctgtaacaaattaccacgcacatgtggcttaaagcaacagaaattccatttttaatttaatcgtctttttaaaaattatttatttattttttaaacttttatcttaggtttgggggtgcacatgcaggtttgttacataggtaaacttgtgtcatgggggtttgttgtatatattagttcgtcactcaggtactaaacctagtacc

SEQ ID NO: 677165 - DNA, 603 bp, Homo sapiens
gagcagcacaaatgtgctcccaggaaggaccctccctcccatcaccactcctttttcctctcagcttgtctttccaccctagaaatcctggagggaggaccgaaaggtagcatggagtcaataatgagcctctttttatttaactatgattacatgtcaatcaatgtctgattctgttttgctaggccagttcatgcaggaaccaaagatacacatcttcaatgagagaccaggaaaggaccctgagaagccagaggccagcatggaagtgaaggggcagaagctgatcatcaccaggtaggcctcgggcgtaaggacagtgacgaaaaggccttgtgttagaattagacccacacagcaaaatagaggagcaaagaagaagtgtcgtaggcactacctacatcacactaagcagttcattaggaatagacgcacacagcattcgcataaggacacttctgatatcccacgttaaatgcaaataatgactgggtatctagggtcatgcaatgccaagattaactaacctgttgttctcatcttcatactttagaagccctcacaagagcttcacaagttggataaccrgacacgttgatcaaa

SEQ ID NO: 677166 - DNA, 629 bp, Homo sapiens
tgaagtccaattgattgattgttttcttctatagattgtgcttttggtgtcatgtctatggactcactcctgatggagaaggaaggagcccagkttcccctaggtgaccgaggaggtgggatgtgatgtggaaaatcagcaatcctggagaggtcttgcaggtgggagaaggggacttgggtggagagggataatccttataactggtggccagttgtgccactgtgtggagtccagcacagaggcagacagacatggttctaaaccagatgtgatggtgcacagaccagcctggacagattttattggtcagctcagccttctataacaaaacaccacaggccagtggcttaaataatagacatttatgtctcacagttttggaggctggaagtccaagatcaaggccccagctaattttgttcctggtgagggctctcttccaggctggcagatggcaaccttctctcagtggtgggggaatgggggagggaacaaagagagacagagacagagagagtgagaatgacagagaaagtgtgcagacaagagaggagagagagtgagagagagaacgagctctttggttctctcttcttcttcttaataggatgctcatcctatcatga

SEQ ID NO: 677167 - DNA, 936 bp, Homo sapiens
tgaagaacagctttgctgggtaaaatattcttggcatcttttcctttagcacttcaaatatgtcatcccactcatttttggtttgcaacatttctgctgagaaatccactgctagtcttactattcccttgtgggtgataagcttcttttctcttgataattttcggatcctctctttgtctttgatttttgacagttttcttataatatgtcttgatatggtcttatttagaatgaatttgattggaaaccactgaccttcctgtacctggatgtttacattttccctccagatttggaaaggacattcctcttggcactgagtctaacttgtgagcattgatgactgatgagtagtgcttgtaggttagtcagagttgagtcttgaaacacaggcacacatggagggactatggctcaggggtacaggaaagtaatggcattatttattaaagtaaactttctgtccctttgtctctctcttcttcttgaactgctataactcaaatatttctctttcgatgctatctcataaatcccataaactttcttcagttctttttattctctttccctttttctcctgtgactatatattttcacataacctacatttcagtttacagtgttttctttctgcttgatatgtttgggggttgacactgtcagttgcatttctcatttcatttattgtacttctcagtttcagaatttttttttaaattcaatctctgttaaatttctcaatttgttccatgtattattttcctgattttattgaattgtttctctatattttcttaatgttcactgaacttccttaaaacagatattttagtttttttwacacagttcttacatctccattttttggggggttaactagtgggaaattattatgttcctttggtggtaatatgtctctttgatttttca

SEQ ID NO: 677168 - DNA, 601 bp, Homo sapiens
tgagtgaatttacccttttcatgatatgtttagtatgcactatgtttttttttcttttaccctttcgtatatttttcagcttaatcaactttttgttcattcccttttttcttcttaataatttggaagttctrctataatttttattgtgattagttatgactcttctattcctaacataattaatataattattatattaactattatgattgtatttcaatatgagagttagtcttcttactcttccttattttactgcagcccagcaagacagaatattacttttggagtcattttcctatatcccaactcttagattttactaagctaaactttggttccaggctattagttttattttctcccctcatataatgcctcttctgtttcaaaaaccattatctaacaaatacattaccaagttgtttcaacatttcccagccatttatattaacttatgaattacataacctcttgcttgccaatattattagtattcttcatttatgccttgctactatgaatcatttattgattatttaaaatattttcttgaatttttcctcagataaatgtcatcttgtctatgttggtctcc

SEQ ID NO: 677169 - DNA, 601 bp, Homo sapiens
tgagtgaatttacccttttcatgatatgtttagtatgcactatgtttttttttcttttaccctttcgtatatttttcagcttaatcaactttttgttcattcccttttttcttcttaataatttggaagttctactataatttttattgtgattagttatgactcttctattcctaayataattaatataattattatattaactattatgattgtatttcaatatgagagttagtcttcttactcttccttattttactgcagcccagcaagacagaatattacttttggagtcattttcctatatcccaactcttagattttactaagctaaactttggttccaggctattagttttattttctcccctcatataatgcctcttctgtttcaaaaaccattatctaacaaatacattaccaagttgtttcaacatttcccagccatttatattaacttatgaattacataacctcttgcttgccaatattattagtattcttcatttatgccttgctactatgaatcatttattgattatttaaaatattttcttgaatttttcctcagataaatgtcatcttgtctatgttggtctcc

SEQ ID NO: 677170 - DNA, 601 bp, Homo sapiens
tgagtgaatttacccttttcatgatatgtttagtatgcactatgtttttttttcttttaccctttcgtatatttttcagcttaatcaactttttgttcattcccttttttcttcttaataatttggaagttctactataatttttattgtgattagttatgactcttctattcctaacataattaatataattattatattaactattatgattgtatttcaatatgagagttagtcttcttactcttccttattttaytgcagcccagcaagacagaatattacttttggagtcattttcctatatcccaactcttagattttactaagctaaactttggttccaggctattagttttattttctcccctcatataatgcctcttctgtttcaaaaaccattatctaacaaatacattaccaagttgtttcaacatttcccagccatttatattaacttatgaattacataacctcttgcttgccaatattattagtattcttcatttatgccttgctactatgaatcatttattgattatttaaaatattttcttgaatttttcctcagataaatgtcatcttgtctatgttggtctcc

SEQ ID NO: 677171 - DNA, 1099 bp, Homo sapiens
gatgtaatgatacatgagagtaagtagatgttacagagaataatgtgtgaggcaggaagcagaaagtattgtggctgcagaaaagggcagggaccaactaaagaatcttgagggtcacgttttcaagacttgcctttgtcttgtggatgatggtgcaatattgagagcttttaagaaacaaygatatgacttcttaccaactccaataattcatagcatgtctgaagccttagtataattaaatatgggtaagagaaaaaaaaaacaaaaacaatggagagactaatagaaagaaggaataaaggaaagaagaacaagataaagggctctgttattatttgcccctgaaaccaaggtcaccactcaatcctggcaatgcctgttttgctgatgaatgggttataacaaggtgtagttgctaaaagcttactcaatgataatgataataaaaccacagtaatgatctgatgtaccaggcaatgccgttgtactttccaggattaaggtatgatttaaaactgttttcacaacctctctgcattatgctgtgctaatttcaaaagtagcttttttgtttgtttttttcaaatcaaatatctgtattcttaactgagtttctctcagacctcagtactctatcctttaatggctgtgatcactatgttatgttaccatgactactatctgccatggttttaattttcacataatatttgctgttatgattatgaactagcagctggggagactaatttattacttggctattactgttaaaggtcatgtaactccaacgttctgctaaagcatttgatcacatcctgcgtgctctgccagaaagcctttcttctggcaactcctcaggcttctgtggaatttatcactttttcaaccagggaagttgaagccagtaggtacttatttctggtagctgccaataaagtatctgatttctcaaatgccctctgttcttatacccagcttttctttattcagtagttataagaaatgttgttcataaaaattcagctacctacatagtcaaccctcaactatctgtgggagattaacttagttctaaatattacttgaaatctca

SEQ ID NO: 677172 - DNA, 1099 bp, Homo sapiens
gatgtaatgatacatgagagtaagtagatgttacagagaataatgtgtgaggcaggaagcagaaagtattgtggctgcagaaaagggcagggaccaactaaagaatcttgagggtcacgttttcaagacttgcctttgtcttgtggatgatggtgcaatattgagagcttttaagaaacaatgatatgacttcttaccaactccaataattcatagcatgtctgaagccttagtataattaaatatgggtaagagaaaaaaaaaacaaaaacaatggagagactaatagaaagaaggaataaaggaaagaagaacaagataaagggctctgttattatttgcccctgaaaccaaggtcaccactcaatcctggcaatgcctgttttgctgatgaatgggttataacaaggtgtagttgctaaaagcttactcaatgataatgataataaaaccacagtaatgatctgatgtaccaggcaatgccgttgtactttccaggattaaggtatgatttaaaactgttttcacaacctctctgcattatgctgtgctaatttcaaaagtagcttttttgtttgtttttttcaaatcaaatatctgtattcttaactgagtttctctcagacctcagtactctatcctttaatggctgtgatcactatgttatgttaccatgactactatctgccatggttttaattttcacataatatttgctgttatgattatgaactagcagctggggagactaatttattacttggctattactgttaaaggtcatgtaactccaacgttctgctaaagcatttgatcacatcctgcgtgctctgccagaaagcctttcttctggcaactcctcaggcttctgtggaatttatcactttttcaaccagggaagttgaagccagtaggtacttatttctggtagctgccaataaagtatctgatttctcaaatgccctctgttcttatacccagcttttctttattcagtagttataagaaatgttgttcataaaaattcagctacctacatagtcaaccctcaactatctgtgggagaytaacttagttctaaatattacttgaaatctca

SEQ ID NO: 677173 - DNA, 621 bp, Homo sapiens
tgtcctatggcacaatctgaacatcatttacaatacaaagagctatagagaagagctcagtttttcctggataagatgtctgagtagtgatggtgatgccatatttctggaaaacttaacatgtatcattttaaatggaagggtagacaacagaagatatgttaagtttgatgaaatgataggtcggattagaaaggggtaggaatatcctggaggtagttgaaatagtccattcagggargaaatagggtcataatgaaaattctgttataaaagaaatttcatggaaggagagacaaaatttaggatagacctaataacattgagacccatgtggttataatcctggaacagacaagagagcagtgatgctgacagtgcctgacgttaagagcacaggcatataaggaagataaaaatatatacttttgatattttgaatcaataaaatgtaagtatatagaagagaatgaagcaaaacccagaactctagaacatgtgcacttttaggagttaggaaacaaaacaatcaaagaaagcagagaaaattagaaggagggagagaaaataagaatagggagagataaaaaaaagttggaaataatcaatagagaattttaa

SEQ ID NO: 677174 - DNA, 627 bp, Homo sapiens
cagtggatgcctgaaactcagtaccaaccctatacatgatatggttttctctacgcatatgtacttaacgtttaattcataaatttggcatggtaagagattaactaataaaatagaaaaattataacaatataytgtagtaaatttatgtgaatgtggtttctctctccatagcttattgtactgtactcacctattttcagactgcagttgaccatggggaattgaaactgaggaaagcaaaactgcaaataacgagagaactactgtacaaacctcaatgtacccttccttccttccattatttaatgcatatttaatgaacacgaacatctactatgttggcaagcacaggagacacacattgaacaaggcagaaaaggcctctccctcacagtgattctgaggacagcgaataaacagacaaacaaggtaattatattttgtaataaatgctataaataaacaaatcagaatgaaggtaaggtacaagtataataattgaaacagtctactttagattaggtaatcaaagagggtctgtgagttgaaacataaaaaataaaaaggatctagccatgcaaagggttagtgagatagtttcctttaaggagaacaaaatggtct

SEQ ID NO: 677175 - DNA, 1852 bp, Homo sapiens
cccagccacttgggaggctgaggcaggagaatcacttgaacccgggaggcggagattgcagtgagccaagagagtgccactgcactccagccgggcgacagagcgagactccatctcaaacaaacgaataaaaaaaataagacttctgatgccatgtctcttgccaaggtaacaccgtctttttccagactactgtcatagcccttggcaagtttccctaaaaccattattatctcaaatctattctccctagcactgcctgggtgatcttttaaaaatgctaggatggctgggcgtggtggctcacgcctgtaatcccagcactttgggaggccgaggcagacggatcacgaggtcaggagttcgagaccagcctggccaacacagtgaaaccctgtctctactaaaaatacaacaaaattagccgggcatggtggcaggcacctgtaattccagctactctctccctctctctctcacacacacacaaacagacacacacatcattttgggtcaagagcaaattagtggttgtagaaactcaagagtgacaaaatcactcaggaagaatccataaagtgagatggtaagggggcctagataagattcctgaatagtgctaatatttaaacaataacttggttagaaagtgtccctaaaacaattctaaaaagctagagagagagcaggatcaaataataaaattgaaaactaaagaggaattttgattcctaattctcaatagtttcaaattctatagagaggctgtctcaactgaactagcaaatttattccctagggaaagccctttctgagatgtagataaaccaaataataataggttgagaaataagtgaagacgcacctcacaacccaaccaagaaattcagttgtaagtgataggtgagcgaaattcctgagaaggagcaaatgagaaataattgctcatatattttcttatttcttaatataatagatttggacagtttgatacactcaagtaagagatctggctgagagggagaattttaatatgtagagaagtgacagcaattaagcataattcaaaagaaaggcaaaggagatgggatttagagcacagattgtggggttgccattattaatataagagcactattttcctaaatctttctggcttctgattgaagacatccattaactcaaaaagctgatttgtctccctcaatctgcatacatgtttgcactcaccaaggctaacactcacctctaaaatgaaatgtagaaaatagaagtcattctcagaaagatcttttactatttcttcttaaaataacaattaccaccagcactagtaccaatacaacaaaaatcgaaaccaagagtaccgtgtaaaaaatactttcacatagtttatttcatttggacttctcattaatattcccagcactcttctataagacttgtttctaagtgattaatcgcatgttattaaaatgcttcttacatgggattgcctctagaagaaggctgagtggattaaatccccaccttagtcttgccaattctttcttaacaggtatcttaatccattttgtgctgctagaacggaataccacgggctgggtgattataaacaatagaagtttaattagctcatggttttggaggttagaaagtctaagatcaaggagccccatccagtgggagcctccttgctacagcataacatggtggaaggcatcatgtggtgaaagggcactcaagagactgaggaaagggatctcagccttttatgaggaatccgcatctaccataactaaccyactcccaagataaccatgttaatctattcataagggtgaagccctca

SEQ ID NO: 677176 - DNA, 1334 bp, Homo sapiens
tctgtaattagcgctattactacctgtttcatgggactgttgtgagaattcattgaaaaacgtgaaattaaagtaagagcagttattatttgagcactttctaaatgctcccttaatttgtacaactaagggataggtcctattgttattaaawtttaatagatgaagaatctaagcttaaagacatttaccaacatgcccaaagtcacacaactattaatagtaatctctgcaccagtgttcattcccaagtccacctgattcttattctgatgtctatgccacatagtatgtaatactcaatacttttcattgaatggacagcatttgtaataatgattgtttttgtctgtccagtaatacttcctcccttcttctgttaacagtactcatcttattttgggaaactagatttcagccactctaaccaatggaactctcaccccctagccatggtgattagtacaagaagtgggcatgtgactcagtaaagtcagtcagaacacttctttgtgttatatacaaaagagtgagaagtcctttagtttctttaggattgctgtagtaggatgatataatctggaaactgaaaaataactgaattactgataatataagccaatcacttcctccacagaaatggaggatgccatctgaagtaagagataaaagataatgcagagaggaatgaagataagaatggagaaagaatcttgatgatagagataataagttcctgagtcaagatttcatatagtccagtgagccaatatagtccctgcatttgcgtgacctaatttgagttggatttctgatactcacaactaaaagtaatgaagaggttaaagtgttgtcagttgttttaaatgcatattgtaatgactttctactataagggtttaaaataaaataattttgtgcttaaaaataaagacaattgtatgaaaaattttagttataatttctcagggagactaaaaaatgaagtatgattttgtgttaacaatatcttgaatatatgacacaatagtgagtcataattcactatgtattatagttatctaaaatacaagagaaaatgttttgactaatttggtacttttataaaaatatattttaatctctctgcttggaaagctcttcctacaaatactcaagtagctccctctcatagtttattcaagtccctgacccacattacagtgaggctctccctgatgattttatctaaaacgtatccgacttctgttctacattacagtgaggctctctccctgagtatttgatctcaaaagcacctacttctcaacatgttttttgcttcatggaattta

SEQ ID NO: 677177 - DNA, 1022 bp, Homo sapiens
taactaacacatttacaaggtggaaatcattccgaatgtgcttttaaactgtgtgcaaatgcaaattgtcttgaatcagttcttagcacctttggtcagccactttctaatcttctatttgcaggggaaaataattaatgggtgaagtatctgatagcataggttatgggctccagcaagacattttccaatatgtgttgttttacagctgtgcctttgaaagctaggctgtcaaatctataaaaatataaaagtgattamtcccaaccataaaaacttctaatgatgccatgcttcagcctccaattttttcccagcttctaaggtaaagaatttcaaaatgccaacagaataatttggcaggagggcaggctagtataatatgaagtagatgtggaagagtagaaaacagagagagcctaggcttgtttacacggagggggtcagtctcaaaaagaagaaaacaggatgggatgtacccaataattcactcgaaacagtaaacagccaagaagtcagaagcaatactgatgacatcagattttaatgttcatttatgagttatgaataagggaattggttaatacaacttagcttgtgcccccctcccccactcggaaaaaaaaaaaaaaaccttggttgtctggagctcctagttgagatgcagttgcagaaggtatgctcaaactcaagtcaaaagaaatagctttgttgggaggggaagcagagtcacattacatatcaagaagaaatataactctatggatattctcaaacttgagggagaggcattcaggaaagtatgttaaagaaaagatagtatagggatctagcagtgacaaaaatcactgtttttctggatggagatagtaaacaagtaggcaaaacgtagtagtataacagataagtgctatggagaaaaataaaacagggaatgggaaaagggagtactattaaaatgggggtgggggggttgctaacttaaattgggttgctggtggaacctcaccgagaaggcagca

SEQ ID NO: 677178 - DNA, 1022 bp, Homo sapiens
taactaacacatttacaaggtggaaatcattccgaatgtgcttttaaactgtgtgcaaatgcaaattgtcttgaatcagttcttagcacctttggtcagccactttctaatcttctatttgcaggggaaaataattaatgggtgaagtatctgatagcataggttatgggctccagcaagacattttccaatatgtgttgttttacagctgtgcctttgaaagctaggctgtcaaatctataaaaatataaaagtgattactcccaaccataaaaacttctaatgatgccatgcttcagcctccaattttttcccagcttctaaggtaaagaatttcaaaatgccaacagaataatttggcaggagggcaggctagtataatatgaagtagatgtggaagagtagaaaacagagagagcctaggcttgtttacacggagggggtcagtctcaaaaagaagaaaacaggatgggatgtacccaataattcactcgaaacagtaaacagccaagaagtcagaagcaatactgatgacatcagattttaatgttcatttatgagttatgaataagggaattggttaatacaacttagcttgtgcccccctcccccactcggaaaaaaaaaaaaaaaccttggttgtctggagctcctagttgagatgcagttgcagaaggtaygctcaaactcaagtcaaaagaaatagctttgttgggaggggaagcagagtcacattacatatcaagaagaaatataactctatggatattctcaaacttgagggagaggcattcaggaaagtatgttaaagaaaagatagtatagggatctagcagtgacaaaaatcactgtttttctggatggagatagtaaacaagtaggcaaaacgtagtagtataacagataagtgctatggagaaaaataaaacagggaatgggaaaagggagtactattaaaatgggggtgggggggttgctaacttaaattgggttgctggtggaacctcaccgagaaggcagca

SEQ ID NO: 677179 - DNA, 452 bp, Homo sapiens
tgatgacatttcctggctcatagttccaggccacatctgtggtgtgcactgtcttccttctggcttggtgatgtggtttggctgtgtccccacccaaatctcatcttgaattgtagttcccataatccccacgtgtcgtgggagggacgcggtgggaggtaattkaatcatgggggcggttaccctcatgctgctcttgtgatagtgagtgagttctcatgagatctgatggttttataaggggctttcccccttttgctcggcactttgttgttgccatgtgaaaaaggacatatctgcaagtttcctgaggcctccccagccatgctgaactgtgagtcaattaacctctttcctttataaattacccagtctcggtatgtctttattagcagcatgagaccagacaaatacacctggtacttgaccttttcatatttgccaaatgtgat

SEQ ID NO: 677180 - DNA, 2317 bp, Homo sapiens
aacggctctcttggccccttcctaattttacttatcaacgtgcttcaaatcatctactgcgagtctaaaaatctggcttaaacttggatacagagtaagatgcagcttcgtccttgagaagcgcctaatctaataccagagacagtatgttaataaaaataatatgatcatgctatttgactataacacaaaacacacaatacatacaaagatacaatataaatatatataatacagttggcccgttgcatctaagggttccacatctgtgaattcaaccaactacagatggaaaaatagtcaaataaataaataaaaacaatttaaaaatataaatttttaaaatacagaataacaactatttccatagcctttgcattgtgttaggtactgtaagtaatctagagatgatttaaagtawgtgagaggaagtgcataggttacatgaaatgactacagcattttatataaaggacttgagcatcctcagattttggtatgtgcagggggttctggaaccaatcccccaaggataccaagggacagctgtatatatttagagatctaacttgttacaaagaagaattagatgaagactagactaaacgtacaagtcaagttttattagagaaataattccattgtgaagaattggggatgtgaacttcgagacggcagaattttaattatatttcaaaaggctcttgaaaagtagggaagcatgaaagagcatgaaccaagtcaggggatgtgagatttgtggtatcacggggtggttgagtggggaagactggtttgatgtgtctgggtcgtagattaacaagcagggaaggaaatggctggagatggatgggcaaggtaggttgaggccttgagggccacaggctggcttggactttagtctaaagacaatgggacatattgttggtctgggacaaaggaaaataactaaacctcctttagaaagataactcaggtagcagagttgagacttattgcagaggctgcagagaaggcatttattcctgacatccatctcctgccagtaacttccccaggttgaacctcctgaagtacccatggccactgaacttttccagatgtccacatcctggacacagcagttactcatccaaacaactccctcttcctctaccacgctcaatgcatcagcaaatgctgttggctctgccttcagaacaaatcccaaatctgaccactcactctcagctcctccactacaccctagtcaaagctgccaccctccctcagagtgatccttgaagaacctaagtcatttgtatctcttcttttgtttgttatttacttttcaaacatatattttaggttaaaaaataaataaaactagccgggtgcagtggctcacgcctgtaatcccagcactttgggaggccgaggcaggcagatcacgaggtcaggagatcgagaccatcctggctaacacggtgaaaccccgtctctactaaaaatacaaaaaattagccgggcgcggtcgcgggcgcctgtagtcccagctactcaggaggctgaggcaggagaatggcgtgaacccgggaggcggagcttgcggtgagccgagatggcgccactgcagtccggcctgggtgacagagcgagacatcgtctcaaaaaaataaataaataaaataaataaataaataaataaaactgttgggagtggtatggtattttttcaaggattttttaatttattttttatttcaatgggtttttagggagcaggtggtgtttggttacatgaataagttctttagcggtgatttctgagattttgttgtatatctgcttttgaaaaatgtctgtacacaaaaagcccataattcatcactacgcaaatattcatgtaacgaaactgcacttgtaccctttaaatgtacacgcaaaaaaagaaagaatctttcagagctccaagcccccagtagctttccatcacactcagaatgaaatgcaaagtagctgcctgatcttcatccttgcagcctggctgaccctggctggcccaccccaccctccacctcaccctgctccagccacactgaccccccagctgctccttccactccaagcctgctctcatctcaaggcttcagaatgagctgtttgttccctgtccctttggtcggcccacatcagagaggtcctcgctgagcctcctgctaaagagtagcccttcccatgcaccgctgaccgtacagggcccccagaggcttccactctctgagccctcagccctgcctgcatttgcaggcctccaccatgcctggcgcacagcaag

SEQ ID NO: 677181 - DNA, 653 bp, Homo sapiens
cttcaagaagcaggcagggccaagagcctttatttatgaggaatcagatgctgaggatttggaaacagcttttctgactgaggtgccctgtcctctgtctcctacaaagttggcttggaaccaaggcagtagggtctgcctctcccttcatagatcacatcaaggccttaggccataatcctgccctctcttctacagtcagcctctgggctctgatagtgctgtaaaactgccattatagcaccaccaaacacaagggggcacagagcaagagtagatattctcaagggctgtttcagggctgaggaaggatttattggggaaagagtagagttccttgttttcccactgatggactttcaatccctgtctatttcagggacatgaaactcattcacatcattcctgttggacatggcagggagggcacakgggcctgggaattgtgtcctgctgccaggaaagggcaggagcaagtgtgagtgcgttttctcaaggtcctcatttcctatctagcgtctttaaataagcccatgcctgggtgctcgctatggcttagaacagtggctaggcagtgacatttactgccttgctttccatgtccaactattttaagtgtcacttatgctctggtgtctttttatatttatgga

SEQ ID NO: 677182 - DNA, 653 bp, Homo sapiens
cttcaagaagcaggcagggccaagagcctttatttatgaggaatcagatgctgaggatttggaaacagcttttctgactgaggtgccctgtcctctgtctcctacaaagttggcttggaaccaaggcagtagggtctgcctctcccttcatagatcacatcaaggccttaggccataatcctgccctctcttctacagtcagcctctgggctctgatagtgctgtaaaactgccattatagcaccaccaaacacaagggggcacagagcaagagtagatattctcaagggctgtttcagggctgaggaaggatttattggggaaagagtagagttccttgttttcccactgatggactttcaatccctgtctatttcagggacatgaaactcattcacatcattcctgttggacatggcagggagggcacatgggcctgggaattgtgtcctgctgccaggaaagggcaggagcaagtgtgagtgcgttttctcaaggtcctcatttcctatctagcgtctttaaataagcccatgcctgggtgctcgctatggcttagaacagtggctaggcagtgasatttactgccttgctttccatgtccaactattttaagtgtcacttatgctctggtgtctttttatatttatgga

SEQ ID NO: 677183 - DNA, 2685 bp, Homo sapiens
ataggccgggaaggaaaagggagagaggaggtttctttagcctaccagaactctctagtctttccactccagaattcacaattcccaggggtaaaaggacataacactgactttctgatacttggaaaagagagtagtagagaccttatgatggatctcagaaataattaacaatacttgattctgttaattgttaataaataattaacaaaacttggagcattggctccaagctagaatcacagaatttttttttttttaagacaaggtttcactctgtcatccaggctggagggcagtggtgccatcacagctcactgcagcctcgacctcctgggatcaagcaatcctcccacctcagcctcccaagtagctgggaccacagacacgcaaaaccatgcatgggtaatttttgtattttctgtagagatagggtttcaccatgcttcccaagctggtatcgaactcctgagctcaagcaatccacctacctcagccacgcaaagtgctgagatcacaggcatgagccaccacacctagcctagaatcacagaatttttaaattgaaagggggcatgggaaatatctgttctagtatctccattatgttatgtagatgaaaaatctgaagttccgaatgatgtacatgaaccagtcatagacataggataggcgtctatcacttccaaaggactaggtacatttcctgacatacaactagctcaagtcatctatgactctcaggcaatcctagaatggataacagaactttaagaatataacaactgcactggtacactggtacacaggtaagaaaaaaaagttaaaaaaaaaaaacaagaatataataggttcctctagaataacatcatccaatggaaatagaatgcaagccatgtcatacacgtcatttttaattttctattatagtagccacattagaagggtaaaaaaaagccaggcatagtggcacctgcctatcgtcccagctactcagcaggctgaggagaggggatgcttgagtccaggagttcaaggctgtagtgtgctatgatcttgtctgggaatagccactgcactccagcctgggtgatgtagtatctctaaaaaaaactaaaaagttttttaaaaggtaaaaagaaacaagtgaaattaatttattaatgtttcatgtgacccaatatacctaaattatcatttcaacatccatttaaaaattattaatgagatattttactttcttactctttcttactacacttcaaaatccagtgtgtcttgtacatttccttcagttcagaccagacacattccaaatgctcaacagccacatatggtagtggcttccctattggaaagtgcagatctaaaattcgaaggtacagacaaaagaactgcaagcacttgggtactggaagtttactctaaaagtgtaggaaagataaaaacastaaaaaatactttttgttgattaatacaatatccgtctctttcttaggctttctctgacctgtcttcatatggcataatcagaggcactaaaacaaataacaaataaagcagtctttcttacttccataattcatctcaatctatagcaccaagtttcggttttatgcacttggaacactagctgcagctgctcactttcctgccactctcacttttctctgtcttcaaggcccatcttcaatgccaccactcccacccctgcctccccacaaagctgctgaagatcccactacacagttactggctatgactcttctgctcagagtgtgcatgagattatgtccccacctcttcttctactgcacagccttgcatgagcctctacttttaaacttttttttttgtcttttagagacagggaccgactttgtcacctagactggagtacagtggcacaatcatagctcactgcagcctcaaattcctgggctcaagcaatcctcccacctcagcctcctaagtagctgggactacaggcatgcaccactgcacaacctggctaatttttttttttttttttttttgtagaaatggagttttgccatgttgcccaggctggtctcaaactcctgggctcaagctatcctcctgcctcagcctcccgaagtgctgggattacaggtataagcaccatgaccagcatcaactttcatgttaagaattttcatggctgcaaacaaagctgttcatcaaaacaaatccatgaccatttcccctgcaatcaactggcagcttgaatagtagctggtataacgtgactttgggcttttcaaacttatgaactttcaatagttttttagaatctaatctataaaaaggacagcatcttgtaggatacttatgacttgtcttgcctccaccagtcttctggatcccctgctgagcctagcctcatgtgggcagtgaagagggttctccttcactcgaggaggcagggttcatagtggaaaggggctcagaggcaggaagatctggttccaatcctagctctgccactgactacttgtgtaacattgagaaaaccacttaactcctccgaacttcaatcttctcctctttaatctgcagataacaatttctactacttagtatgattatgtgaattaaatcaggtactggaattcaaatgcctagccctgtccaaagcaagcaggctgtaattaaaaggctaat

SEQ ID NO: 677184 - DNA, 2685 bp, Homo sapiens
ataggccgggaaggaaaagggagagaggaggtttctttagcctaccagaactctctagtctttccactccagaattcacaattcccaggggtaaaaggacataacactgactttctgatacttggaaaagagagtagtagagaccttatgatggatctcagaaataattaacaatacttgattctgttaattgttaataaataattaacaaaacttggagcattggctccaagctagaatcacagaatttttttttttttaagacaaggtttcactctgtcatccaggctggagggcagtggtgccatcacagctcactgcagcctcgacctcctgggatcaagcaatcctcccacctcagcctcccaagtagctgggaccacagacacgcaaaaccatgcatgggtaatttttgtattttctgtagagatagggtttcaccatgcttcccaagctggtatcgaactcctgagctcaagcaatccacctacctcagccacgcaaagtgctgagatcacaggcatgagccaccacacctagcctagaatcacagaatttttaaattgaaagggggcatgggaaatatctgttctagtatctccattatgttatgtagatgaaaaatctgaagttccgaatgatgtacatgaaccagtcatagacataggataggcgtctatcacttccaaaggactaggtacatttcctgacatacaactagctcaagtcatctatgactctcaggcaatcctagaatggataacagaactttaagaatataacaactgcactggtacactggtacacaggtaagaaaaaaaagttaaaaaaaaaaaacaagaatataataggttcctctagaataacatcatccaatggaaatagaatgcaagccatgtcatacacgtcatttttaattttctattatagtagccacattagaagggtaaaaaaaagccaggcatagtggcacctgcctatcgtcccagctactcagcaggctgaggagaggggatgcttgagtccaggagttcaaggctgtagtgtgctatgatcttgtctgggaatagccactgcactccagcctgggtgatgtagtatctctaaaaaaaactaaaaagttttttaaaaggtaaaaagaaacaagtgaaattaatttattaatgtttcatgtgacccaatatacctaaattatcatttcaacatccatttaaaaattattaatgagatattttactttcttactctttcttactacacttcaaaatccagtgtgtcttgtacatttccttcagttcagaccagacacattccaaatgctcaacagccacatatggtagtggcttccctattggaaagtgcagatctaaaattcgaaggtacagacaaaagaactgcaagcacttgggtactggaagtttactctaaaagtgtaggaaagataaaaacactaaaaaatactttttgttgattaatacaatatccgtctctttcttaggctttctctgacctgtcttcatatggcataatcagaggcactaaaacaaataamaaataaagcagtctttcttacttccataattcatctcaatctatagcaccaagtttcggttttatgcacttggaacactagctgcagctgctcactttcctgccactctcacttttctctgtcttcaaggcccatcttcaatgccaccactcccacccctgcctccccacaaagctgctgaagatcccactacacagttactggctatgactcttctgctcagagtgtgcatgagattatgtccccacctcttcttctactgcacagccttgcatgagcctctacttttaaacttttttttttgtcttttagagacagggaccgactttgtcacctagactggagtacagtggcacaatcatagctcactgcagcctcaaattcctgggctcaagcaatcctcccacctcagcctcctaagtagctgggactacaggcatgcaccactgcacaacctggctaatttttttttttttttttttttgtagaaatggagttttgccatgttgcccaggctggtctcaaactcctgggctcaagctatcctcctgcctcagcctcccgaagtgctgggattacaggtataagcaccatgaccagcatcaactttcatgttaagaattttcatggctgcaaacaaagctgttcatcaaaacaaatccatgaccatttcccctgcaatcaactggcagcttgaatagtagctggtataacgtgactttgggcttttcaaacttatgaactttcaatagttttttagaatctaatctataaaaaggacagcatcttgtaggatacttatgacttgtcttgcctccaccagtcttctggatcccctgctgagcctagcctcatgtgggcagtgaagagggttctccttcactcgaggaggcagggttcatagtggaaaggggctcagaggcaggaagatctggttccaatcctagctctgccactgactacttgtgtaacattgagaaaaccacttaactcctccgaacttcaatcttctcctctttaatctgcagataacaatttctactacttagtatgattatgtgaattaaatcaggtactggaattcaaatgcctagccctgtccaaagcaagcaggctgtaattaaaaggctaat

SEQ ID NO: 677185 - DNA, 2685 bp, Homo sapiens
ataggccgggaaggaaaagggagagaggaggtttctttagcctaccagaactctctagtctttccactccagaattcacaattcccaggggtaaaaggacataacactgactttctgatacttggaaaagagagtagtagagaccttatgatggatctcagaaataattaacaatacttgattctgttaattgttaataaataattaacaaaacttggagcattggctccaagctagaatcacagaatttttttttttttaagacaaggtttcactctgtcatccaggctggagggcagtggtgccatcacagctcactgcagcctcgacctcctgggatcaagcaatcctcccacctcagcctcccaagtagctgggaccacagacacgcaaaaccatgcatgggtaatttttgtattttctgtagagatagggtttcaccatgcttcccaagctggtatcgaactcctgagctcaagcaatccacctacctcagccacgcaaagtgctgagatcacaggcatgagccaccacacctagcctagaatcacagaatttttaaattgaaagggggcatgggaaatatctgttctagtatctccattatgttatgtagatgaaaaatctgaagttccgaatgatgtacatgaaccagtcatagacataggataggcgtctatcacttccaaaggactaggtacatttcctgacatacaactagctcaagtcatctatgactctcaggcaatcctagaatggataacagaactttaagaatataacaactgcactggtacactggtacacaggtaagaaaaaaaagttaaaaaaaaaaaacaagaatataataggttcctctagaataacatcatccaatggaaatagaatgcaagccatgtcatacacgtcatttttaattttctattatagtagccacattagaagggtaaaaaaaagccaggcatagtggcacctgcctatcgtcccagctactcagcaggctgaggagaggggatgcttgagtccaggagttcaaggctgtagtgtgctatgatcttgtctgggaatagccactgcactccagcctgggtgatgtagtatctctaaaaaaaactaaaaagttttttaaaaggtaaaaagaaacaagtgaaattaatttattaatgtttcatgtgacccaatatacctaaattatcatttcaacatccatttaaaaattattaatgagatattttactttcttactctttcttactacacttcaaaatccagtgtgtcttgtacatttccttcagttcagaccagacacattccaaatgctcaacagccacatatggtagtggcttccctattggaaagtgcagatctaaaattcgaaggtacagacaaaagaactgcaagcacttgggtactggaagtttactctaaaagtgtaggaaagataaaaacactaaaaaatactttttgttgattaatacaatatccgtctctttcttaggctttctctgacctgtcttcatatggcataatcagaggcactaaaacaaataacaaataaagcagtctttcttacttccataattcatctcaatctatagcaccaagtttcggttttatgcacttggaacactagctgcagctgctcactttcctgccactctcacttttctctgtcttcaaggcccatcttcaatgccaccactcccacccstgcctccccacaaagctgctgaagatcccactacacagttactggctatgactcttctgctcagagtgtgcatgagattatgtccccacctcttcttctactgcacagccttgcatgagcctctacttttaaacttttttttttgtcttttagagacagggaccgactttgtcacctagactggagtacagtggcacaatcatagctcactgcagcctcaaattcctgggctcaagcaatcctcccacctcagcctcctaagtagctgggactacaggcatgcaccactgcacaacctggctaatttttttttttttttttttttgtagaaatggagttttgccatgttgcccaggctggtctcaaactcctgggctcaagctatcctcctgcctcagcctcccgaagtgctgggattacaggtataagcaccatgaccagcatcaactttcatgttaagaattttcatggctgcaaacaaagctgttcatcaaaacaaatccatgaccatttcccctgcaatcaactggcagcttgaatagtagctggtataacgtgactttgggcttttcaaacttatgaactttcaatagttttttagaatctaatctataaaaaggacagcatcttgtaggatacttatgacttgtcttgcctccaccagtcttctggatcccctgctgagcctagcctcatgtgggcagtgaagagggttctccttcactcgaggaggcagggttcatagtggaaaggggctcagaggcaggaagatctggttccaatcctagctctgccactgactacttgtgtaacattgagaaaaccacttaactcctccgaacttcaatcttctcctctttaatctgcagataacaatttctactacttagtatgattatgtgaattaaatcaggtactggaattcaaatgcctagccctgtccaaagcaagcaggctgtaattaaaaggctaat

SEQ ID NO: 677186 - DNA, 2685 bp, Homo sapiens
ataggccgggaaggaaaagggagagaggaggtttctttagcctaccagaactctctagtctttccactccagaattcacaattcccaggggtaaaaggacataacactgactttctgatacttggaaaagagagtagtagagaccttatgatggatctcagaaataattaacaatacttgattctgttaattgttaataaataattaacaaaacttggagcattggctccaagctagaatcacagaatttttttttttttaagacaaggtttcactctgtcatccaggctggagggcagtggtgccatcacagctcactgcagcctcgacctcctgggatcaagcaatcctcccacctcagcctcccaagtagctgggaccacagacacgcaaaaccatgcatgggtaatttttgtattttctgtagagatagggtttcaccatgcttcccaagctggtatcgaactcctgagctcaagcaatccacctacctcagccacgcaaagtgctgagatcacaggcatgagccaccacacctagcctagaatcacagaatttttaaattgaaagggggcatgggaaatatctgttctagtatctccattatgttatgtagatgaaaaatctgaagttccgaatgatgtacatgaaccagtcatagacataggataggcgtctatcacttccaaaggactaggtacatttcctgacatacaactagctcaagtcatctatgactctcaggcaatcctagaatggataacagaactttaagaatataacaactgcactggtacactggtacacaggtaagaaaaaaaagttaaaaaaaaaaaacaagaatataataggttcctctagaataacatcatccaatggaaatagaatgcaagccatgtcatacacgtcatttttaattttctattatagtagccacattagaagggtaaaaaaaagccaggcatagtggcacctgcctatcgtcccagctactcagcaggctgaggagaggggatgcttgagtccaggagttcaaggctgtagtgtgctatgatcttgtctgggaatagccactgcactccagcctgggtgatgtagtatctctaaaaaaaactaaaaagttttttaaaaggtaaaaagaaacaagtgaaattaatttattaatgtttcatgtgacccaatatacctaaattatcatttcaacatccatttaaaaattattaatgagatattttactttcttactctttcttactacacttcaaaatccagtgtgtcttgtacatttccttcagttcagaccagacacattccaaatgctcaacagccacatatggtagtggcttccctattggaaagtgcagatctaaaattcgaaggtacagacaaaagaactgcaagcacttgggtactggaagtttactctaaaagtgtaggaaagataaaaacactaaaaaatactttttgttgattaatacaatatccgtctctttcttaggctttctctgacctgtcttcatatggcataatcagaggcactaaaacaaataacaaataaagcagtctttcttacttccataattcatctcaatctatagcaccaagtttcggttttatgcacttggaacactagctgcagctgctcactttcctgccactctcacttttctctgtcttcaaggcccatcttcaatgccaccactcccacccctgcctccccacaaagctgctgaagatcccactacacagttactggctatgactcttcygctcagagtgtgcatgagattatgtccccacctcttcttctactgcacagccttgcatgagcctctacttttaaacttttttttttgtcttttagagacagggaccgactttgtcacctagactggagtacagtggcacaatcatagctcactgcagcctcaaattcctgggctcaagcaatcctcccacctcagcctcctaagtagctgggactacaggcatgcaccactgcacaacctggctaatttttttttttttttttttttgtagaaatggagttttgccatgttgcccaggctggtctcaaactcctgggctcaagctatcctcctgcctcagcctcccgaagtgctgggattacaggtataagcaccatgaccagcatcaactttcatgttaagaattttcatggctgcaaacaaagctgttcatcaaaacaaatccatgaccatttcccctgcaatcaactggcagcttgaatagtagctggtataacgtgactttgggcttttcaaacttatgaactttcaatagttttttagaatctaatctataaaaaggacagcatcttgtaggatacttatgacttgtcttgcctccaccagtcttctggatcccctgctgagcctagcctcatgtgggcagtgaagagggttctccttcactcgaggaggcagggttcatagtggaaaggggctcagaggcaggaagatctggttccaatcctagctctgccactgactacttgtgtaacattgagaaaaccacttaactcctccgaacttcaatcttctcctctttaatctgcagataacaatttctactacttagtatgattatgtgaattaaatcaggtactggaattcaaatgcctagccctgtccaaagcaagcaggctgtaattaaaaggctaat

SEQ ID NO: 677187 - DNA, 2685 bp, Homo sapiens
ataggccgggaaggaaaagggagagaggaggtttctttagcctaccagaactctctagtctttccactccagaattcacaattcccaggggtaaaaggacataacactgactttctgatacttggaaaagagagtagtagagaccttatgatggatctcagaaataattaacaatacttgattctgttaattgttaataaataattaacaaaacttggagcattggctccaagctagaatcacagaatttttttttttttaagacaaggtttcactctgtcatccaggctggagggcagtggtgccatcacagctcactgcagcctcgacctcctgggatcaagcaatcctcccacctcagcctcccaagtagctgggaccacagacacgcaaaaccatgcatgggtaatttttgtattttctgtagagatagggtttcaccatgcttcccaagctggtatcgaactcctgagctcaagcaatccacctacctcagccacgcaaagtgctgagatcacaggcatgagccaccacacctagcctagaatcacagaatttttaaattgaaagggggcatgggaaatatctgttctagtatctccattatgttatgtagatgaaaaatctgaagttccgaatgatgtacatgaaccagtcatagacataggataggcgtctatcacttccaaaggactaggtacatttcctgacatacaactagctcaagtcatctatgactctcaggcaatcctagaatggataacagaactttaagaatataacaactgcactggtacactggtacacaggtaagaaaaaaaagttaaaaaaaaaaaacaagaatataataggttcctctagaataacatcatccaatggaaatagaatgcaagccatgtcatacacgtcatttttaattttctattatagtagccacattagaagggtaaaaaaaagccaggcatagtggcacctgcctatcgtcccagctactcagcaggctgaggagaggggatgcttgagtccaggagttcaaggctgtagtgtgctatgatcttgtctgggaatagccactgcactccagcctgggtgatgtagtatctctaaaaaaaactaaaaagttttttaaaaggtaaaaagaaacaagtgaaattaatttattaatgtttcatgtgacccaatatacctaaattatcatttcaacatccatttaaaaattattaatgagatattttactttcttactctttcttactacacttcaaaatccagtgtgtcttgtacatttccttcagttcagaccagacacattccaaatgctcaacagccacatatggtagtggcttccctattggaaagtgcagatctaaaattcgaaggtacagacaaaagaactgcaagcacttgggtactggaagtttactctaaaagtgtaggaaagataaaaacactaaaaaatactttttgttgattaatacaatatccgtctctttcttaggctttctctgacctgtcttcatatggcataatcagaggcactaaaacaaataacaaataaagcagtctttcttacttccataattcatctcaatctatagcaccaagtttcggttttatgcacttggaacactagctgcagctgctcactttcctgccactctcacttttctctgtcttcaaggcccatcttcaatgccaccactcccacccctgcctccccacaaagctgctgaagatcccactacacagttactggctatgactcttctgctcagagtgtgcatgagattatgtccccacctcttcttctactgcacagccttgcatgagcctctacttttaaacttttttttttgtcttttagagacagggaccgactttgtcacctagactggagtacagtggcacaatcatagctcactgcagcctcaaattcctgggctcaagcaatcctcccacctcagcctcctaagtagctgggactacaggcatgcaccactgcacaacctggctaatttttttttttttttttttttgtagaaatggagttttgccatgttgcccaggctggtctcaaactcctgggctcaagctatcctcctgcctcagcctcccgaagtgctgggattacaggtataagcaccatgaccagcatcaactttcatgttaagaattttcatggctgcaaacaaagctgttcatcaaaacaaatccatgaccatttcccctgcaatcaactggcagcttgaatagtagctggtataacgtgactttgggcttttcaaacttatgaactttcaatagttttttagaatctaatctataaaaaggacagcatcttgtaggatacttatgacttgtcttgcctccaccagtcttctggatcccctgctgagcctagcctcatgtgggcagtgaagagggttctccttcactcgaggaggcagggtkcatagtggaaaggggctcagaggcaggaagatctggttccaatcctagctctgccactgactacttgtgtaacattgagaaaaccacttaactcctccgaacttcaatcttctcctctttaatctgcagataacaatttctactacttagtatgattatgtgaattaaatcaggtactggaattcaaatgcctagccctgtccaaagcaagcaggctgtaattaaaaggctaat

SEQ ID NO: 677188 - DNA, 603 bp, Homo sapiens
ggctgcagtgagctatgattacaccacagcactccagccttggcaacagagggagaccctgtctaaaaaaaaaaaagagtaaaataaaatagctaaaataaagctattgcatgttaatattttatttaaaaaaatacattattccaaacaaaaatggggagaagagtggcactgttttatgtgtttgcaagtctctttaatgtctctggcctaatagaagtagattttcatatctgcttctgccttcattctgtgctgatatatatttatttttggttgaagtrtatgatgacaagacagcctcatccaaatttgtagttggaaaagggggcattttaaaacagcccttttaggtaattatggatattcatctttgacaccacaccaaaatttaataaatactggtttcttaaaggttaactgcactgtggcatctgaatactagtcaatacatttttctcgttacatttaaatccattaacttatttttcacattgaatatatatctttacccacacttaattttgttttctgttttttgttttggtttacaaatgatactattagactactcaaaaggtaataggcaaatcatttttatga

SEQ ID NO: 677189 - DNA, 945 bp, Homo sapiens
agattaggagtaagatagttcgcaaaaacatttttttcctttttctatttccccctccacccccaccggtctgtcaatttatttatatgaaaatccacaatctaaaaagtttggctagggaattcacaaaactgcctctactcaaaatgaatcacatgatatcaaagcagtctggaaaaatttggaaatgatcatcagtgtatgcctagtggtacggaagggaactgacctatgaaactattcataatatggatgtttttgtgataatcttctgagagttgaaggcaggaggaggaagttatttaaaaaaaaatggtgccactgctcttaagagttatttacttattttctttccatttttggcatcagtgaattttaattgttgagtattctgattagatggagctgtacaattatttcaaagttcccggtaatcccagtttgcagatgcagtgtagaggaaaggttttctaaaaggtacactccaaagatatctcttgaccatttttggtcatttcctagccaagtagcttaggaccagacttaaaaaactgagaagtctttggggatccatcactaaagtattctgattttttaaatcatttttccacatccgtttaacaaattattttttggtctggcttgcttmacagaatctaagaagcctccttagcaagaacacagccaaccagcaaagatagggttaaaacatcatttaaaaaatagtttcatttgacaccctgcaggtttatatgaaatgactgaagcttgggtctgtcgtctgcattctgaaattggacagagagttttaccatatcctctgtcacagcaaaaactgctatgtttttttctagcaccactaaaccaaagcccataaccaaccaacaaaaaccaaaattttcagtgtatagccacatccagattaagatatttttggtagtatta

SEQ ID NO: 677190 - DNA, 945 bp, Homo sapiens
agattaggagtaagatagttcgcaaaaacatttttttcctttttctatttccccctccacccccaccggtctgtcaatttatttatatgaaaatccacaatctaaaaagtttggctagggaattcacaaaactgcctctactcaaaatgaatcacatgatatcaaagcagtctggaaaaatttggaaatgatcatcagtgtatgcctagtggtacggaagggaactgacctatgaaactattcataatatggatgtttttgtgataatcttctgagagttgaaggcaggaggaggaagttatttaaaaaaaaatggtgccactgctcttaagagttatttacttattttctttccatttttggcatcagtgaattttaattgttgagtattctgattagatggagctgtacaattatttcaaagttcccggtaatcccagtttgcagatgcagtgtagaggaaaggttttctaaaaggtacactccaaagatatctcttgaccatttttggtcatttcctagccaagtagcttaggaccagacttaaaaaactgagaagtctttggggatccatcactaaagtattctgattttttaaatcatttttccacatccgtttaacaaattattttttggtctggcttgcttaacagaatctaagaagcctccttagcaagaacacagccaaccagcaaagatagggttaaaacatcatttaaaaaatagtttcatttgacaccctgcaggtttatatgaaatgactgaagcttgggtctgtcgtctgcattctgaaattggacagagagttttaccatatcctctgtcacagcaaaaactgctatgtttttttctagcaccactaaaccaaagcccataaccaaccarcaaaaaccaaaattttcagtgtatagccacatccagattaagatatttttggtagtatta

SEQ ID NO: 677191 - DNA, 631 bp, Homo sapiens
ttttttttagacggagtctcactctgttacctaggctggagtgcagaggtgcagtgtcggctcactgtgcaacctccgcctccgggttcaagcgattctcctgcctcagcctcccaagtagctgggattacaggcacgcgccaccacgcctggctaattttttttttttgtattagtagagacggggtgtcaccacgttggccaggctggtctcgaactcctgaccgcaagtgatccgcccgcctcagcctcccaaagtgctaggattacaggcgtsagccaccgcgcccggccattatttgtattgttttttgtttgttttgttttgttttgttttgttttgagagtctcgttctgtcgcccaggctggagtgcagtggcgcgatctcggctcacagcaacctccgcctcccgggttcaagcgattctcctgcctcagccaccgcgcccggcccattatctggattctttagtacctgttcctctagactctacgctccattaaagcaggaactccatctgttgcaacacctagcacagcgtccggcacactgcagttcttcaataaatacttgctgcatgaagccctctcttcaccaccacccccacccctcctcctcgcaaaaaaaaa

SEQ ID NO: 677192 - DNA, 1753 bp, Homo sapiens
gttccaacttttattaatattatccagctaacactaacattagttaggattttagttcatgttaaatttggtggaacaaatagaagaatgttattacttgaacagcagttttaaaagtccagtaatcattagcagttcaaatgtgtgggtcacacacttctctaagcagagttaataagtaaaccttctctggcacgatttaacattagctgcagtttgaactttacttctaagattggagtggatcacacagctctctcttccagacaagcctggggagcacaacaactaaagctggaactttttatataaataaggacttatgtatataacatgtatatatatttatactcatacatacacacacatacacatatacacacatgtataaggacatataaatgttttatatgtatgaggatataaatatataaatatatgtatttkgtggctgagagtgactcccagctaataactagcaaggaaaaatttatgcatatatatttttatacatatttataaatgaatgagcttagaagaggaccttgagctccagacgagatgaactatgagccctgccaagatcttgattttgattttgggaggccttcagcagagaatgcagccgtgccacttctggactacagaaataactatgaattcatttactgttaagtccagaggaaactgaagctttggataagtttcttatccgaggtcaccaggcagatctctttagtcctagcctagccttccttccattcttccatgaacttattttattgcaattaatagaagttaggtgaatatatatatatatatatatatatatatatatatatatatatataaaactggcattcaactagttattaataatataagcattccaaaggatacttcccgctaatggaaatgtctgtatctagagcgaatatcagaaagaagaaaaaaaagttggagcaaactgtagaatgttcacagaaatttggccatttgtattgtatgtcagttatttgaattaggaaatttacagaaattatcttcatattgcttaattgcagagatggtttgtttactcattagtgtcgaccattaagttaccttaatatttttgacaggatgagcgcttaaggattttgttcccctctctttgctatttagagattttagttttaatacacaggaagactctcaggaaatccttttttctggttttggattcatgtaaagaaaaaaacgtaaaatgcagatctttgcatcattcagtagtcgtttatgtgagtaacagctgtttctctcgattcttcgcgatgtgcagttacaagttagaaccaccatttcatagagtccctttgattttaaaattgtgaacaatgaaaagcaagtgttctttaaaaacgaaattaagtgttttaggcagtacatatattaaatgtttggaaaataaaactctcctgaatttttaaactctctagaattggcaaagtactcagttacattatgaaatacagctctgttttggagcttgcaaaatgcttttgtagtggataactactgcaggggacaatactcatctttactgttggtgctgttagcatatttaatgaagtaattccattcctgtgatcacaaatgctcatgcacagaggctcttttaatgaaacagcttatcatctggtttctagcatgttctttcagatttgggcatatcattttgatccttcctaagtactattaatttaaaaaggta

SEQ ID NO: 677193 - DNA, 590 bp, Homo sapiens
tttgtgaatgcaccaatcgacactctgtatctagctactctggtggggacctggagaacctttgtgtctagctcagggattgtaaacacaccaatcagcgccctgtcaaaacagaccatttggctctctgtaaaatggaccaatcagcaggatgtgggtggggccagataagagaataaaagcaggctgcctgcaccagcagtggtaacccgttggggtctcgtttgctttttggtttgcaataaatcttgttgttgttcactgtttgggttcacattrcctttatgagctgtaacactgactgtgaaagtctgcagcttcactcctgagctagtgggaccacgaattccccccagaaggaataaactccaaatacatgtgaacatcagaaggaacaaacgctggacatgtatcctttaagaactctaacattcactgtgagggtccacggcttcattcctgaagtcagtgaaaccaagaacccaccaattccggacacgcagccactatctccagacatccagcagctttttgtcttaatgtttcagatgcttctgtcttctgtgtgtctgctgagtttggagcttggg

SEQ ID NO: 677194 - DNA, 590 bp, Homo sapiens
tttgtgaatgcaccaatcgacactctgtatctagctactctggtggggacctggagaacctttgtgtctagctcagggattgtaaacacaccaatcagcgccctgtcaaaacagaccatttggctctctgtaaaatggaccaatcagcaggatgtgggtggggccagataagagaataaaagcaggctgcctgcaccagcagtggtaacccgttggggtctcgtttgctttttggtttgcaataaatcttgttgttgttcactgtttgggttcacattgcctttatgagctgtaacactgactgtgaaagtctgcagcttcactcctgagctagtgrgaccacgaattccccccagaaggaataaactccaaatacatgtgaacatcagaaggaacaaacgctggacatgtatcctttaagaactctaacattcactgtgagggtccacggcttcattcctgaagtcagtgaaaccaagaacccaccaattccggacacgcagccactatctccagacatccagcagctttttgtcttaatgtttcagatgcttctgtcttctgtgtgtctgctgagtttggagcttggg

SEQ ID NO: 677195 - DNA, 590 bp, Homo sapiens
tttgtgaatgcaccaatcgacactctgtatctagctactctggtggggacctggagaacctttgtgtctagctcagggattgtaaacacaccaatcagcgccctgtcaaaacagaccatttggctctctgtaaaatggaccaatcagcaggatgtgggtggggccagataagagaataaaagcaggctgcctgcaccagcagtggtaacccgttggggtctcgtttgctttttggtttgcaataaatcttgttgttgttcactgtttgggttcacattgcctttatgagctgtaacactgactgtgaaagtctgcagcttcactcctgagctagtgggaccacgaattccccccagaaggaataaactccaaatacatgtgaacatcagaaggaacaaacgctggacatgtatcctttaagaactctaacattcacygtgagggtccacggcttcattcctgaagtcagtgaaaccaagaacccaccaattccggacacgcagccactatctccagacatccagcagctttttgtcttaatgtttcagatgcttctgtcttctgtgtgtctgctgagtttggagcttggg

SEQ ID NO: 677196 - DNA, 590 bp, Homo sapiens
tttgtgaatgcaccaatcgacactctgtatctagctactctggtggggacctggagaacctttgtgtctagctcagggattgtaaacacaccaatcagcgccctgtcaaaacagaccatttggctctctgtaaaatggaccaatcagcaggatgtgggtggggccagataagagaataaaagcaggctgcctgcaccagcagtggtaacccgttggggtctcgtttgctttttggtttgcaataaatcttgttgttgttcactgtttgggttcacattgcctttatgagctgtaacactgactgtgaaagtctgcagcttcactcctgagctagtgggaccacgaattccccccagaaggaataaactccaaatacatgtgaacatcagaaggaacaaacgctggacatgtatcctttaagaactctaacattcactgtgagggtccacggcttcattcytgaagtcagtgaaaccaagaacccaccaattccggacacgcagccactatctccagacatccagcagctttttgtcttaatgtttcagatgcttctgtcttctgtgtgtctgctgagtttggagcttggg

SEQ ID NO: 677197 - DNA, 637 bp, Homo sapiens
aaaaaatgaagactagacctcacatcttatacaaaagctaactgaaaacatcacagactaaacacaaaatataaaactgaatctcatttaaaaaattaaaaaaggggctgggcatggtggctcatgcctgtaatcccagcactttgggaggccgaggtgggcggatcacctgaggttgggagttagagaccagtctgaccagcrtggagaaaccctgtctctgctaaaaatacaaaactagccagacgaggtggcggcgcatgcctgtaatcccagctactcgggaagctgaggcaggaaaatcacttgaatccaggaggtggaggttgtggtgagccaagatggtgccattgcactcaagcctgggcaataagagcaaaactctgtctcaaagaaaaaaaaaataaaagatattgtgaatgctgacttcaattagtaaaatgttaatttgtacctttaagctacaatgataaccacatagcagaaggttgcagtgagctgagactgcgccattgcactccagcctgggcaacaagagcaaaactccatctcaaaaaataaataaataaataaataaataaataaataaataaataaaattttaaaagaagaagaaaatcttcaagacctaaagtat

SEQ ID NO: 677198 - DNA, 604 bp, Homo sapiens
tgactgtggtgatgatagcacatatctgtgaatatactaaaaaacatttaattatatactctaaataggggaattgtgtggtatgcaaattatatctcaataaagctatctaaaatgcaaaaagaattaagattcaacaaacccccagtagaacatctaagagatatacaggaagaagagggaaaattatcccagaaggaagatctgaaagtaagaagaaacagttagtatgagctggaawttaagtcctgtatgtcagatacttcattttgctcactgttgagtcaggcctatagtaactgttcaaaaaatatacgtttgataaacagtttgatgtgcaaacaaattagtaaatagaggcacaaatagaaataaatatctttattgaataataatgttgaattttgtgattagaaaataagatataacgaaaataccagacaatagcattgtaagctggaagagtacggccaaagctagagcaatgaaaggtcttggaatttttgaaacataggctaaagatatggaataattttggacttcataagttaaatgtgcatgaaaaacatttcaaaagtaaccattacgagaataaagagggtat

SEQ ID NO: 677199 - DNA, 615 bp, Homo sapiens
aaaaaaaaaaaaaaagaaaatgtcaaactattttctaaggtggctgtaaacatctgatgttcccaccagcaataaatgacagttagagctgttctgcatcctcaccagcactaggtattatccattttttctttttttttctacacctcattattgatcacagtattgtcagtttttaaaatttttattatttcaycaattaaaatagaaatatttattgcgggttttaaaattttaagcatattttaattaagctaatatatgcaaaaaactactgtttccatctataaacaatattcaaaattattcatgagatttttttattgatacataattgtacacatgttgggggtacatttggtattttgacacatgcatacaatatgtaatgattgaaccagagcaattgagacatccatcactctaaacattcaccccgtttatgctgggaacattctaattccactcctccagccattttgaactatacaacaaattactgctaactatagtcaccatactgcactattcaacaagagatcttattccatttaactgcatttttgtacccattaaccaacctctctttttttctctccatcattacccttccca

SEQ ID NO: 677200 - DNA, 649 bp, Homo sapiens
gcattgcacatttgtccgaccccatagaaaggcaaaaagcttcactgtccaagttgttcccagttaagttctttgctggcctggaaacctttcaaaaatgtgtatgttcccataaaacaagggcatgtcattgaaaactttagatctgcaatccaaatctagcacctaaaactaaagtctgttagatttcacgctgacaatgtcgataacaagtttgtcttcccaggtgcagaacatacaagaagggatcaatcattcctccacctaacctgagatgtctgcatggttgattcttcctttactcccttgttcttggaatgytcaccttatctgatataaaatgtgcatttcatgggcactgattaaaatctcacagaaatgtgtaaccatttgcctcaccacctacctgccttttcctacatgccttcccccctttaaagaaatgtataaacattgaacttcctgaaaaccccttcagagaacacaagcacagatgtttctgtgactcgtgttttatgtatttttttttgggcaccccctcaagcttaacaaatctcgagacattgatgaaactcttgcctcagtctctcattgtggggcgtcctccatccataaagctgggagagttcctttagattctttgtcattt

SEQ ID NO: 677201 - DNA, 649 bp, Homo sapiens
gcattgcacatttgtccgaccccatagaaaggcaaaaagcttcactgtccaagttgttcccagttaagttctttgctggcctggaaacctttcaaaaatgtgtatgttcccataaaacaagggcatgtcattgaaaactttagatctgcaatccaaatctagcacctaaaactaaagtctgttagatttcacgctgacaatgtcgataacaagtttgtcttcccaggtgcagaacatacaagaagggatcaatcattcctccacctaacctgagatgtctgcatggttgattcttcctttactcccttgttcttggaatgttcaccttatctgatataaaatgtgcatttcatgggcactgattaaaatctcacaraaatgtgtaaccatttgcctcaccacctacctgccttttcctacatgccttcccccctttaaagaaatgtataaacattgaacttcctgaaaaccccttcagagaacacaagcacagatgtttctgtgactcgtgttttatgtatttttttttgggcaccccctcaagcttaacaaatctcgagacattgatgaaactcttgcctcagtctctcattgtggggcgtcctccatccataaagctgggagagttcctttagattctttgtcattt

SEQ ID NO: 677202 - DNA, 626 bp, Homo sapiens
ttccaaactcaagtgttaggagcccagtactcctgggaacgtaaggataatgtcttatatcttattctctcagggtactgatgttaagtttatttgtcagactatttttacttttgacaagttaaataaaatggtggagatcgcagcacctctccccagtctgattcactttagtgattattcatactgagagctcatgtttgcttcattataagaacaggtctcaccttctggctttcaaaaaacctggaatatcttcaccagtacagataaacaaatggtaatgccaagactgtcagtattttccaaggaaggaaacaggrtatgtatggtaggcctatgttttccccaatctgccttaaaatccaaatctcaccttaggctggtggggactttaattaaaattagaatgtgaaccttcttatcatgaagctatcacggtatctcagttccacttgaatgttgttatataagtgaaattctaaagtatttcctaaaatacccattctgtatgtaggtatgtgcttctgcttgtctagggatgacttatttttcattaagttctctgaaatgagaaaatgagaaatagaattggggaaatgcaatggtattctcaatctttactc

SEQ ID NO: 677203 - DNA, 1456 bp, Homo sapiens
ttttgcctgatgtatcagtgtgtatgacacaatctcatcctttcatgcaaggattacaatgtcctatgaaggtcacagataacaagaaggacttattttaaagtaacattatttagttgatatatcctgggcaatgaaaaacattgctgaatggtattccaaaacttaatttctctttgaaaataattagactatttcactgcaactaagaacatcaaatgattggctagacaatgtgaccttaagatacttttgtttctttgaaataatgggggttttcaaaacagccacatgcctaatttaggaccccatgattcatgtaagacattattagtttttcagcttggtaaaggggcagttggttgccatgaaacagtaagcttaatttaattatggaaaaggtctttataatttttttgcccttgatatcacaacttttctaccattttctcccttatacaaatgaacaaggattgactttttaaatagtggtgaaattatttttctggaaatgtctttggttaaatggcagagagtttaggacaatacaatggagacagctttccccacatattgcttcattgcaagatattagttgggatatctaccgacctacctacctacctaccyacctacctacctacctacctacctacctacctacctacctacctacctatctacctatctacctacatgtctctgtgaaacatttacctttgaagagcaaaaattactaattctatatactgccattggtggaaaggtcttttctccttttaatccatctgtcccatcacacaaacttgcctacttttgaactagcattctatattattattcagaataattttaggaaaagagccacgttcaatttattgagaattttctagagtaagaatggtatgaaatttgggtatctgcagatgagaaataagctatgcattattaactttaaaagttggagattgctcttccaaaaatatgcagtatcactgtatgagaagataaggtgactgctgcctgtgtaggggtagctgaagttaccaaaagacatttttgtccctagaaacatcttattacaggggcaaagtccctgggaggagtaaagctcactaatttatcatgtctagcaaaatgtctcattcagagaaggtgctcagttattattaagtgaatgtgctagtacaggtggcaggtaagacaggttgtcatcttgggacacatgaacatggcagtggagacatcgcctgccaggcacagtgctgtgagctttatgaattctgcctgccctcacttcccaagataagaaagatgccttccactgggctgttccagcacctagggtctactcatctcatgcctgtgtctcccacaaggtcatgagttctttaggagaactgtgtttaatctcctccgctctgcccccaatccagcacctggtacatactggcta

SEQ ID NO: 677204 - DNA, 1456 bp, Homo sapiens
ttttgcctgatgtatcagtgtgtatgacacaatctcatcctttcatgcaaggattacaatgtcctatgaaggtcacagataacaagaaggacttattttaaagtaacattatttagttgatatatcctgggcaatgaaaaacattgctgaatggtattccaaaacttaatttctctttgaaaataattagactatttcactgcaactaagaacatcaaatgattggctagacaatgtgaccttaagatacttttgtttctttgaaataatgggggttttcaaaacagccacatgcctaatttaggaccccatgattcatgtaagacattattagtttttcagcttggtaaaggggcagttggttgccatgaaacagtaagcttaatttaattatggaaaaggtctttataatttttttgcccttgatatcacaacttttctaccattttctcccttatacaaatgaacaaggattgactttttaaatagtggtgaaattatttttctggaaatgtctttggttaaatggcagagagtttaggacaatacaatggagacagctttccccacatattgcttcattgcaagatattagttgggatatctaccgacctacctacctacctacccaccyacctacctacctacctacctacctacctacctacctacctacctatctacctatctacctacatgtctctgtgaaacatttacctttgaagagcaaaaattactaattctatatactgccattggtggaaaggtcttttctccttttaatccatctgtcccatcacacaaacttgcctacttttgaactagcattctatattattattcagaataattttaggaaaagagccacgttcaatttattgagaattttctagagtaagaatggtatgaaatttgggtatctgcagatgagaaataagctatgcattattaactttaaaagttggagattgctcttccaaaaatatgcagtatcactgtatgagaagataaggtgactgctgcctgtgtaggggtagctgaagttaccaaaagacatttttgtccctagaaacatcttattacaggggcaaagtccctgggaggagtaaagctcactaatttatcatgtctagcaaaatgtctcattcagagaaggtgctcagttattattaagtgaatgtgctagtacaggtggcaggtaagacaggttgtcatcttgggacacatgaacatggcagtggagacatcgcctgccaggcacagtgctgtgagctttatgaattctgcctgccctcacttcccaagataagaaagatgccttccactgggctgttccagcacctagggtctactcatctcatgcctgtgtctcccacaaggtcatgagttctttaggagaactgtgtttaatctcctccgctctgcccccaatccagcacctggtacatactggcta

SEQ ID NO: 677205 - DNA, 606 bp, Homo sapiens
cttctgcatggattgagattttggcaaggaacacatagtacttttgttgaaaggaagaaccagaaagagaagtagatggcagattgaaagcctcttcttgaaagggcctttgatcgtgcctgccacaggacacgtgtcccctccctgatgcaaygtaacctcgtggttcattcctctgatcttggagcctgacactttgccttggggagtccctcctgagccctcccttccctgcacatgagtggagagagccgggatcctcttcccagatgtgtgacatgaggctggctctggctgctacgtgacccctgcctcctggggatcagagcctgggctgagggctgcttctaacaaccaggtcagggactgctggggctgatttgggctcggaacccaagtccttctccaatgcccagcaccacccgagcacccgctagctgctggggtctgctgccaccaccacgttctgacctcccagtgcaccccctgtgtgagcacacagatctcagtggggctcactgggcgcctctgcccgagcccctgctgccttggcttcctgctgtgctggtggcccagtcacagagtggtcaggataaaatggtcatt

SEQ ID NO: 677206 - DNA, 606 bp, Homo sapiens
cttctgcatggattgagattttggcaaggaacacatagtacttttgttgaaaggaagaaccagaaagagaagtagatggcagattgaaagcctcttcttgaaagggcctttgatcgtgcctgccacaggacacgtgtcccctccctgatgcaatgtaacctcgtggttcattcctctgatcttggagcctgacactttgccttggggagtccctcctgagccctcccttccctgcacatgagtggagagagccgggatcctcttcccagatgtgtgacatgaggctggctctggctgctacgtgacccctgcctcctggggatcagagcctgggctgagggctgcttctaacawccaggtcagggactgctggggctgatttgggctcggaacccaagtccttctccaatgcccagcaccacccgagcacccgctagctgctggggtctgctgccaccaccacgttctgacctcccagtgcaccccctgtgtgagcacacagatctcagtggggctcactgggcgcctctgcccgagcccctgctgccttggcttcctgctgtgctggtggcccagtcacagagtggtcaggataaaatggtcatt

SEQ ID NO: 677207 - DNA, 604 bp, Homo sapiens
ttggggtttggggtgcagacattgccagaggatgggcagcagactgaccttcaaccccacaggtatccaccacagtggaaacgttccaggacttatcactgcccattcctggaaaggaggacctggccaagctccattcagccatctaccagaatgtgccggccaagccaggcgcctgtggggacagctatgccgcccagggctggctggccttcattgtggagtacatccgacggtgcgcccaccttgccactactgggcgacatgggctgggcctgtcctggttttcctgggcgggagacagtacacagtgaagtccatgcatttggggaaccagggaggtcctgggaggagctgggggccgaagcctgcagaggagttggcttaatatgcaggggatttcttggctactttgaagtggccaggattggatagtcccttggagctggagggcgatggacagcagggaggtgaccacrtggcaggttgaagggagggcagcagcaggacacaggcctggttggcgggaagggcagcagctttcccagggctgcctctcctgcctgaggccagagacccgcatgaccccagggagggggtagca

SEQ ID NO: 677208 - DNA, 604 bp, Homo sapiens
ttggggtttggggtgcagacattgccagaggatgggcagcagactgaccttcaaccccacaggtatccaccacagtggaaacgttccaggacttatcactgcccattcctggaaaggaggacctggccaagctccattcagccatctaccagaatgtgccggccaagccaggcgcctgtggggacagctatgccgcccagggctggctggccttcattgtggagtacatccgacggtgcgcccaccttgccactactgggcgacatgggctgggcctgtcctggttttcctgggcgggagacagtacacagtgaagtccatgcatttggggaaccagggaggtcctgggaggagctgggggccgaagcctgcagaggagttggcttaatatgcaggggatttcttggctactttgaagtggccaggattggatagtcccttggagctggagggcgatggacagcagggaggtgaccacatggcaggttgaagggagggcagcagcaggacacaggcctggttggcgggaagggcagcagctttcccagggctgcctctcctgcctgaggccagagacccgcaygaccccagggagggggtagca

SEQ ID NO: 677209 - DNA, 1464 bp, Homo sapiens
tttctgagtttattgatactgaattaatattaaaacaggctgggcgtggtagcrgctcatgcctgtaatcctagcactttggaagcctgaggcagaagatcacttgaggtcaggagttcgagactagcctgggctacatggcgaaactccatctgcactaaaaatacaaaacttagccaggcatggtgacacatgcatgtagtcccagctactcgggaggcttaggaaggagaatcgcttgaaccagggagtcagaggttgcagtgagttgagatcgtgccactgcattccagcctgggtgacagagggagactccatctcaaaaaaaaaaaaaaattaaattagaataaacagatgttaataggcagcatgcatgtttgatgtgcctttatttttcttctgctttaggatagtacttcattcttaagcatgtgagtaaaggaagcaaaatagtagtaagctatattgatggtatgtaaaagaaatataggaaaggtttacatttcatttgttagatccctgccgagtattttacgtggtagggtatataaaaataatattttagattattaaaacaccttgatattggctcatttaattacactgtaaatttttctctaaaggcaagtatggtattttatattttctaacaataatcctattcttcccttttccttatatttttctttgatattttcctgatgtattataaaattattttcaagtataagactggtttgtaaaaatacctacatattgtgtgagattatcactatcatttttttctctactaccttctcatcaaataaggaaaggcaagagtgatataacagttgccaaagaaacaaaaggcatcccagttatttctgtgctgggatggcttttggcttgccgttgctgaaaagcaaacaagatatagccaagaaattgtgccgttgttgcctggttggaaggaaagttaggggcgcatattcggttcaagatgaccttcagggaggacccaatgtcagtgtcctgctaagtcacacacaaggagagaaaatctataatgacagttcaagtctttcttcccacagcaaattgtgtcagccctgctataaacagtaaaaacagcacaggaaatatctgacccttttgccattggttaagagctattgctagctcctacttggctaatagcttgagtctctgaaaaacaaggaatatttcagaaacctcattatgaggaagagatacctgcaatttccaggtaaatgaagcaagtcttgtacatgcccagatgggaccaggcctctgttacatgaatcctggcaagttaaacaggctatatcttcttgtttgaagcagctaagaatgtcccgagctcactgcaatgctgggaggccccggcaccgactcttgagaaaacgtttgagactaaacatgaaagttgctccctaacccgcagtgttatcattgcagttg

SEQ ID NO: 677210 - DNA, 1464 bp, Homo sapiens
tttctgagtttattgatactgaattaatattaaaacaggctgggcgtggtagcagctcatgcctgtaatcctagcactttggaagcctgaggcagaagatcacttgaggtcaggagttcgagactagcctgggctacatggcgaaactccatctgcactaaaaatacaaaacttagccaggcatggtgacacatgcatgtagtcccagctactcgggaggcttaggaaggagaatcgcttgaaccagggagtcagaggttgcagtgagttgagatcgtgccactgcattccagcctgggtgacagagggagactccatctcaaaaaaaaaaaaaaattaaattagaataaacagatgttaataggcagcatgcatgtttgatgtgcctttatttttcttctgctttaggatagtacttcattcttaagcatgtgagtaaaggaagcaaaatagtagtaagctatattgatggtatgtaaaagaaatataggaaaggtttacatttcatttgttagatccctgccgagtattttacgtggtagggtatataaaaataatattttagattattaaaacaccttgatattggctcatttaattacactgtaaatttttctctaaaggcaagtatggtattttatattttctaacaataatcctattcttcccttttccttatatttttctttgatattttcctgatgtattataaaattattttcaagtataagactggtttgtaaaaatacctacatattgtgtgagattatcactatcatttttttctctactaccttctcatcaaataaggaaaggcaagagtgatataacagttgccaaagaaacaaaaggcatcccagttatttctgtgctgggatggcttttggcttgccgttgctgaaaagcaaacaagatatagccaagaaattgtgccgttgttgcctggttggaaggaaagttaggggcgcatattcggttcaagatgaccttcagggaggacccaatgtcagtgtcctgctaagtcacacacaaggagagaaaatctataatgacagttcaartctttcttcccacagcaaattgtgtcagccctgctataaacagtaaaaacagcacaggaaatatctgacccttttgccattggttaagagctattgctagctcctacttggctaatagcttgagtctctgaaaaacaaggaatatttcagaaacctcattatgaggaagagatacctgcaatttccaggtaaatgaagcaagtcttgtacatgcccagatgggaccaggcctctgttacatgaatcctggcaagttaaacaggctatatcttcttgtttgaagcagctaagaatgtcccgagctcactgcaatgctgggaggccccggcaccgactcttgagaaaacgtttgagactaaacatgaaagttgctccctaacccgcagtgttatcattgcagttg

SEQ ID NO: 677211 - DNA, 1464 bp, Homo sapiens
tttctgagtttattgatactgaattaatattaaaacaggctgggcgtggtagcagctcatgcctgtaatcctagcactttggaagcctgaggcagaagatcacttgaggtcaggagttcgagactagcctgggctacatggcgaaactccatctgcactaaaaatacaaaacttagccaggcatggtgacacatgcatgtagtcccagctactcgggaggcttaggaaggagaatcgcttgaaccagggagtcagaggttgcagtgagttgagatcgtgccactgcattccagcctgggtgacagagggagactccatctcaaaaaaaaaaaaaaattaaattagaataaacagatgttaataggcagcatgcatgtttgatgtgcctttatttttcttctgctttaggatagtacttcattcttaagcatgtgagtaaaggaagcaaaatagtagtaagctatattgatggtatgtaaaagaaatataggaaaggtttacatttcatttgttagatccctgccgagtattttacgtggtagggtatataaaaataatattttagattattaaaacaccttgatattggctcatttaattacactgtaaatttttctctaaaggcaagtatggtattttatattttctaacaataatcctattcttcccttttccttatatttttctttgatattttcctgatgtattataaaattattttcaagtataagactggtttgtaaaaatacctacatattgtgtgagattatcactatcatttttttctctactaccttctcatcaaataaggaaaggcaagagtgatataacagttgccaaagaaacaaaaggcatcccagttatttctgtgctgggatggcttttggcttgccgttgctgaaaagcaaacaagatatagccaagaaattgtgccgttgttgcctggttggaaggaaagttaggggcgcatattcggttcaagatgaccttcagggaggacccaatgtcagtgtcctgctaagtcacacacaaggagagaaaatctataatgacagttcaagtctttcttcccacagcaaattgtgtcagccctgctataaacagtaaaaacagcacaggaaatatctgacccttttgccattggttaagagctattgctagctcctacttrgctaatagcttgagtctctgaaaaacaaggaatatttcagaaacctcattatgaggaagagatacctgcaatttccaggtaaatgaagcaagtcttgtacatgcccagatgggaccaggcctctgttacatgaatcctggcaagttaaacaggctatatcttcttgtttgaagcagctaagaatgtcccgagctcactgcaatgctgggaggccccggcaccgactcttgagaaaacgtttgagactaaacatgaaagttgctccctaacccgcagtgttatcattgcagttg

SEQ ID NO: 677212 - DNA, 1389 bp, Homo sapiens
tgcccaaagtccaacagttagtaaatcagtgatgctccttttgtaaaatgaaagctatagagtctgaccacagaaaaatgctaagatacacaaactttacatataatatctggaattgtagacttccgaaagcccagttctgtaacttcagtttagaaacccctgtaataaatgaaaaacgtaggattcgcacccccagttctagatgcaggtcttgcatacctgcccccagcccacgatgttccagtatctaagctcatgttcacttggtctgtgtccgtttatatatattttttcttttacaatgtccttgctcacttttttttttttttttttgagacagatctcgctctctcacccaggctggagtgcagtgrcacaatcacggtttactgaagcttggaccttcaggggtcaaatgatccacctgcctcagccgcccgagtagctgagaccacaagtgcgtgccactacacctggctaattaaaaaaaaaaaattggggggggatggagtctcactctgtcaccccggctggagtgcagtggcgcaatctcggctcactgcaagctccgcctcccgggttcacgccattctcctgcctcagcctcccgcgtagctgggactacgggcgcccaccaccacgcccggctaacttttgtatttttagtagagacggggtttcaccgtgttagccaggatgttctcgatctcctgacctcgtgatccacccaccttggcctcccaaagtgctgggattacaggcgtgagccgccacgcccggccttaaaaatttttttgtagagacggggtcttgttgcccgggctggtctcaaattcctggactcaagggatcctcctacctcagcctcccaaagtaatgggactacaggcatgagccactgtgcctggccctttttttaaattcccaagcagcaacacagttttttgcctgcctgatagaaaagttctccagccctgagtcctgttggaacacctctgggggagcctgcagcaacctgcgcaggggcttccgtgaggatttatgtggaaaggagcacagtgctttaaacccaaggtgcctagagattcccctcctaactctagacaataggccattgagtccacatcttctgagcatgaaatcttcccttaatctttggctgtttctcttttctacacattaaccattctgtgtagcgatcaccaattgttgtcactgatctactattgcctgacttgtcttagatataactaataggcttctcatatgcatgtagatactaaaatcctaaataaactatgaacaattaaatattatgtatattaaaataatgaccaagtcaggcttatcctcgtactgcaaatactatgcaacgttaatcaggta

SEQ ID NO: 677213 - DNA, 1389 bp, Homo sapiens
tgcccaaagtccaacagttagtaaatcagtgatgctccttttgtaaaatgaaagctatagagtctgaccacagaaaaatgctaagatacacaaactttacatataatatctggaattgtagacttccgaaagcccagttctgtaacttcagtttagaaacccctgtaataaatgaaaaacgtaggattcgcacccccagttctagatgcaggtcttgcatacctgcccccagcccacgatgttccagtatctaagctcatgttcacttggtctgtgtccgtttatatatattttttcttttacaatgtccttgctcacttttttttttttttttttgagacagatctcgctctctcacccaggctggagtgcagtggcacaatcacggtttactgaagcttggaccttcaggggtcaaatgatccacctgcctcagccgcccgagtagctgagaccacaagtgcgtgccactacacctggctaattaaaaaaaaaaaattggggggggatggagtctcactctgtcaccccggctggagtgcagtggcgcaatctcggctcactgcaagctccgcctcccgggttcacgccattctcctgcctcagcctcccgcgtagctgggactacgggcgcccaccaccacgcccggctaacttttgtatttttagtagagacggggtttcaccgtgttagccaggatgttctcgatctcctgacctcgtgatccacccaccttggcctcccaaagtgctgggattacaggcgtgagccgccacgcccggccttaaaaatttttttgtagagacggggtcttgttgcccgggctggtctcaaattcctggactcaagggatcctcctacctcagcctcccaaagtaatgggactacaggcatgagccactgtgcctggccctttttttaaattcccaagcagcaacayagttttttgcctgcctgatagaaaagttctccagccctgagtcctgttggaacacctctgggggagcctgcagcaacctgcgcaggggcttccgtgaggatttatgtggaaaggagcacagtgctttaaacccaaggtgcctagagattcccctcctaactctagacaataggccattgagtccacatcttctgagcatgaaatcttcccttaatctttggctgtttctcttttctacacattaaccattctgtgtagcgatcaccaattgttgtcactgatctactattgcctgacttgtcttagatataactaataggcttctcatatgcatgtagatactaaaatcctaaataaactatgaacaattaaatattatgtatattaaaataatgaccaagtcaggcttatcctcgtactgcaaatactatgcaacgttaatcaggta

SEQ ID NO: 677214 - DNA, 1389 bp, Homo sapiens
tgcccaaagtccaacagttagtaaatcagtgatgctccttttgtaaaatgaaagctatagagtctgaccacagaaaaatgctaagatacacaaactttacatataatatctggaattgtagacttccgaaagcccagttctgtaacttcagtttagaaacccctgtaataaatgaaaaacgtaggattcgcacccccagttctagatgcaggtcttgcatacctgcccccagcccacgatgttccagtatctaagctcatgttcacttggtctgtgtccgtttatatatattttttcttttacaatgtccttgctcacttttttttttttttttttgagacagatctcgctctctcacccaggctggagtgcagtggcacaatcacggtttactgaagcttggaccttcaggggtcaaatgatccacctgcctcagccgcccgagtagctgagaccacaagtgcgtgccactacacctggctaattaaaaaaaaaaaattggggggggatggagtctcactctgtcaccccggctggagtgcagtggcgcaatctcggctcactgcaagctccgcctcccgggttcacgccattctcctgcctcagcctcccgcgtagctgggactacgggcgcccaccaccacgcccggctaacttttgtatttttagtagagacggggtttcaccgtgttagccaggatgttctcgatctcctgacctcgtgatccacccaccttggcctcccaaagtgctgggattacaggcgtgagccgccacgcccggccttaaaaatttttttgtagagacggggtcttgttgcccgggctggtctcaaattcctggactcaagggatcctcctacctcagcctcccaaagtaatgggactacaggcatgagccactgtgcctggccctttttttaaattcccaagcagcaacacagttttttgcctgcctgatagaaaagttctccagccctgagtcctgttggaacacctctgggggagcctgcagcaacctgcgcaggggcttccgtgaggatttatgtggaaaggagcacagtgctttaaacccaaggtgcctagagattcccctcctaactctagrcaataggccattgagtccacatcttctgagcatgaaatcttcccttaatctttggctgtttctcttttctacacattaaccattctgtgtagcgatcaccaattgttgtcactgatctactattgcctgacttgtcttagatataactaataggcttctcatatgcatgtagatactaaaatcctaaataaactatgaacaattaaatattatgtatattaaaataatgaccaagtcaggcttatcctcgtactgcaaatactatgcaacgttaatcaggta

SEQ ID NO: 677215 - DNA, 1389 bp, Homo sapiens
tgcccaaagtccaacagttagtaaatcagtgatgctccttttgtaaaatgaaagctatagagtctgaccacagaaaaatgctaagatacacaaactttacatataatatctggaattgtagacttccgaaagcccagttctgtaacttcagtttagaaacccctgtaataaatgaaaaacgtaggattcgcacccccagttctagatgcaggtcttgcatacctgcccccagcccacgatgttccagtatctaagctcatgttcacttggtctgtgtccgtttatatatattttttcttttacaatgtccttgctcacttttttttttttttttttgagacagatctcgctctctcacccaggctggagtgcagtggcacaatcacggtttactgaagcttggaccttcaggggtcaaatgatccacctgcctcagccgcccgagtagctgagaccacaagtgcgtgccactacacctggctaattaaaaaaaaaaaattggggggggatggagtctcactctgtcaccccggctggagtgcagtggcgcaatctcggctcactgcaagctccgcctcccgggttcacgccattctcctgcctcagcctcccgcgtagctgggactacgggcgcccaccaccacgcccggctaacttttgtatttttagtagagacggggtttcaccgtgttagccaggatgttctcgatctcctgacctcgtgatccacccaccttggcctcccaaagtgctgggattacaggcgtgagccgccacgcccggccttaaaaatttttttgtagagacggggtcttgttgcccgggctggtctcaaattcctggactcaagggatcctcctacctcagcctcccaaagtaatgggactacaggcatgagccactgtgcctggccctttttttaaattcccaagcagcaacacagttttttgcctgcctgatagaaaagttctccagccctgagtcctgttggaacacctctgggggagcctgcagcaacctgcgcaggggcttccgtgaggatttatgtggaaaggagcacagtgctttaaacccaaggtgcctagagattcccctcctaactctagacaataggccattgagtccacatcttctgagcatgaaatcttcccttaatctttggctgtttctcttttctacacattaaccattctgtgtagcgatcaccaattgttgtcactgatctactattgcctgacttgtcttagatataactaataggcttctcatatgcatgtagatactaaaatcctaaataaactatgaacaattaaatattatgtatattaaaataatgaccaagtcaggcttatcctcstactgcaaatactatgcaacgttaatcaggta

SEQ ID NO: 677216 - DNA, 422 bp, Homo sapiens
gctgtaagttgtactcttgtctttcttttttaatttgagggatatatttaaaagactaaaatggatacttcatgtcattttctgtatatctatattttggagactgagttgtctcaatttattactgtttgcattctgtgtasacaagtcatagattttctgatttggtcttcctgccaattctagcctttctgtacaagaaactagctcggtgggagtaaatggattaaaatgagctagtagaggtgttttagcaaactcctgagtctatatttattgattactcctggactcttctaaactgtgccttttccctaaacagactcagggcaaaagcaatgtgaaatacattagtcaacagctgctgcattcacagaacacagaatctgggaattagagatccttttagggtacgcaaatgg

SEQ ID NO: 677217 - DNA, 1334 bp, Homo sapiens
ggtaccctttgccccaggaattctgcttaatttatccaaaggaaatgattaaacaagggcacaagattggtcaaggatgtttattacagtttaattataataacaaaagatttaaataaccaaaatacataccaataagaaaatggttttaagacaaaggtatatctacataatggatgtagatatacagagccattaagagctgtgacaaagatgcatatattcatttgtttacttgtttatttatttatttgagacagagtctcactgtgttgcccatgctagagtgcaatggtgcattcttgactcactgaagcctcgacctcctgggttcaggtgatccttccacctcagcctcccaagtagctgggactacaggcatgtgccaccacgcccsactaatgttttgtatttttagtagagatggggtttcaccattttgcccagactggtcttgaactccttggctcaagtaatctccccacctcagcctcccaaagtgctgggattacagggttgagctaccgtgactggcgaagatgtatcttttattagcataagaagatgtgtcatagatactttagtaagggggaaaaatcaagctccaaaggttttatatggtaagataattttttttaatgtgggaagaacttgcaatgatgacaatctcttggtgatgagaacacggattatttttattactttccttttgcttaactttattttttaatttttatgcttgaggtcttttttcctagggaggggaaaggagagaggaggagaggggaattggggcataccttctgcacacgtgagtttgggtttcttttttctcttcttcccaagggtgtaaaaggtgtgcaaaaaataagaaattttaaaggggaggttgaaataaaaacaccatcaacaataagaactcagacataaacagcaaagtggaggaaaccgaaggtacaggggagctcatgctgcttccgtttttcattttcctttttttggagatggagtcttgctctgccgcccaggctggagtcagtggcgcaatctcaactcactacaatctctgcctcccaggttcaagcgatttttctgcctcagcctcccaagattacaggcacccaccaccactcctggctaatttttgtatctttagtagagacggggtttcaccatgttgtccagactggtctcaaactcctgacctcaggtgatctacccgcctcagcaccccaaagtgctgggattacaggcgtgagacatcgcacctggcctagtttttcatctttctaagtggattttgagtagttttggaattccaaaaaatgaattcc

SEQ ID NO: 677218 - DNA, 1334 bp, Homo sapiens
ggtaccctttgccccaggaattctgcttaatttatccaaaggaaatgattaaacaagggcacaagattggtcaaggatgtttattacagtttaattataataacaaaagatttaaataaccaaaatacataccaataagaaaatggttttaagacaaaggtatatctacataatggatgtagatatacagagccattaagagctgtgacaaagatgcatatattcatttgtttacttgtttatttatttatttgagacagagtctcactgtgttgcccatgctagagtgcaatggtgcattcttgactcactgaagcctcgacctcctgggttcaggtgatccttccacctcagcctcccaagtagctgggactacaggcatgtgccaccacgcccgactaatgttttgtatttttagtagagatggggtttcaccattttgcccagactggtcttgaactccttggctcaagtaatctccccacctcagcctcscaaagtgctgggattacagggttgagctaccgtgactggcgaagatgtatcttttattagcataagaagatgtgtcatagatactttagtaagggggaaaaatcaagctccaaaggttttatatggtaagataattttttttaatgtgggaagaacttgcaatgatgacaatctcttggtgatgagaacacggattatttttattactttccttttgcttaactttattttttaatttttatgcttgaggtcttttttcctagggaggggaaaggagagaggaggagaggggaattggggcataccttctgcacacgtgagtttgggtttcttttttctcttcttcccaagggtgtaaaaggtgtgcaaaaaataagaaattttaaaggggaggttgaaataaaaacaccatcaacaataagaactcagacataaacagcaaagtggaggaaaccgaaggtacaggggagctcatgctgcttccgtttttcattttcctttttttggagatggagtcttgctctgccgcccaggctggagtcagtggcgcaatctcaactcactacaatctctgcctcccaggttcaagcgatttttctgcctcagcctcccaagattacaggcacccaccaccactcctggctaatttttgtatctttagtagagacggggtttcaccatgttgtccagactggtctcaaactcctgacctcaggtgatctacccgcctcagcaccccaaagtgctgggattacaggcgtgagacatcgcacctggcctagtttttcatctttctaagtggattttgagtagttttggaattccaaaaaatgaattcc

SEQ ID NO: 677219 - DNA, 1334 bp, Homo sapiens
ggtaccctttgccccaggaattctgcttaatttatccaaaggaaatgattaaacaagggcacaagattggtcaaggatgtttattacagtttaattataataacaaaagatttaaataaccaaaatacataccaataagaaaatggttttaagacaaaggtatatctacataatggatgtagatatacagagccattaagagctgtgacaaagatgcatatattcatttgtttacttgtttatttatttatttgagacagagtctcactgtgttgcccatgctagagtgcaatggtgcattcttgactcactgaagcctcgacctcctgggttcaggtgatccttccacctcagcctcccaagtagctgggactacaggcatgtgccaccacgcccgactaatgttttgtatttttagtagagatggggtttcaccattttgcccagactggtcttgaactccttggctcaagtaatctccccacctcagcctcccaaagtgctgggattacagggttgagctaccgtgactrgcgaagatgtatcttttattagcataagaagatgtgtcatagatactttagtaagggggaaaaatcaagctccaaaggttttatatggtaagataattttttttaatgtgggaagaacttgcaatgatgacaatctcttggtgatgagaacacggattatttttattactttccttttgcttaactttattttttaatttttatgcttgaggtcttttttcctagggaggggaaaggagagaggaggagaggggaattggggcataccttctgcacacgtgagtttgggtttcttttttctcttcttcccaagggtgtaaaaggtgtgcaaaaaataagaaattttaaaggggaggttgaaataaaaacaccatcaacaataagaactcagacataaacagcaaagtggaggaaaccgaaggtacaggggagctcatgctgcttccgtttttcattttcctttttttggagatggagtcttgctctgccgcccaggctggagtcagtggcgcaatctcaactcactacaatctctgcctcccaggttcaagcgatttttctgcctcagcctcccaagattacaggcacccaccaccactcctggctaatttttgtatctttagtagagacggggtttcaccatgttgtccagactggtctcaaactcctgacctcaggtgatctacccgcctcagcaccccaaagtgctgggattacaggcgtgagacatcgcacctggcctagtttttcatctttctaagtggattttgagtagttttggaattccaaaaaatgaattcc

SEQ ID NO: 677220 - DNA, 1879 bp, Homo sapiens
cagcattcttttctaatttttgctcactcactccaggtaatctgatttatcattccatttattggttctaaaattaaattaattccaggtactcccctgaccccctaagggacacytatcataactgtactagaaactcctcctcctctatttacttgtgccccaacactgaatgaaatttactaaaggaaaagaagacatgattaaatgtattctatatgaatgtggacaagaaaaacatcaaattttgaaatttgtgtttgttttatgaatatttagtgagaaagctatgtgaaacataagaatcatatgacaagatcgtaatattcacatagtaacaatataaaggaagacaaaatatacaggtatcctaaatgtaaataccactgacctctaacaaacagattagaatgtatacattcaacattgctcttcaaaacagctaccatgggaggctatggttttacaccaggaaggcttccactactgaaaacatgtctgaaacttcttctttagaatggtaatcagagatagcatgtgaattgtataaaaattattggtcttggccgggagtggtggctcacgcctgtaatcccagtgctttgggaggccaaggcgggtggatcacaaggttaggagttcaagaccagcctggtcaagatgctgaaaccccatctgtactaaaaatacaaaaattagccaggtgtgcggcacacacctgtaatcccagctactcaggaggctgaggcaggagaatcgcttaaacccaggtggcaaaggttgcagtgagccgagatcgtgccactgcacttgcactccagcctaggtgacagagcaggactccgtctcaagaacaacaacaaaaaaattattggtttaagaatatatctcattttggtcaaaaaaaagaataccaagactatgtactttattcaaaaccaagtaaacacttgggtctaaagaattttaagatatttccaaatatcaaattcaccttcaaaaaaacaatgatctcatcattgtggttattaaagcatatttctttttttttttttttgagacggagtctcactctgtcttaaactgtttcaaataaagttggaagacggaagactattttgattaatcagcctcatcctcatctttgccccatcgctctgaacagactgttcaaatagaaatttccaagaaagcagcaggcaagagaattcttactgtgttctcattcttttcaaaaatcatgtaaatttctcaagcatttcccttaaaatatgaggtactctcactcgtaagtatgtaagtgtgatgaatctaaatttaaagacaactcaaacgcactttaaatattttgaagtcattccccaatttgacagttttcttagtattcaatattgtcacacagtcattttctaaaataactctagaataactgaaatctacatactataagaataatacagtcatgcgccatctaatgacatttcagccaacaccaggcagtataggaatgtctggccataagattacaaaaccatatttttactgtactttttctaggtttagatatgattaggtacataaatacttatcattgtgttacaactgcctacagtatagtaacacactgtgcagctttgtagactaggagcaacagactgtacaatatagcctaggtgtgtagtaggctatcctgtcggggtttgtggaagtgcactctatggtgtttgcaaaacaaagaacttgcctgacaatgcagttctcagaatgaatccctgatgttaggtgactcgggactgtacagttaactaatcaatatttagtggaaaaagtagaaattaactttcagttagagattatccattcaaaaaacatttgctga

SEQ ID NO: 677221 - DNA, 599 bp, Homo sapiens
atatgttgttttatataaatgaggtatcttttatatcttttatcttttatatctcatttatataaaacaacatatttaaatatatttcccatatataaagagaattataaagagatttaaatatgttgttttacataaatgaggtatcttttatatctcatttatatatcaatgagatatcttttacatgactacctaaaatttctatatcatttaggaaggaaaaaaaggaaaaagggaggaaagaagagaagaaatcagtagtgagggtcctgtctgtyagaaggaaaactaacaaacagaaaggacatccacaccaaaaacccatctgtacatcacggtcaccaaagaccaaaagtagataaaaccacaaagatggggaaaaaacagagcagaaaaactggaaactctaaaaagcagagcgcctctcctcctccaaaggaacgcagttcctcaccagcaacggaacaaagctggacggagaatgactttgacgagctgagagaagaaggcttcagacgatcaaattactccgagctacgggaggaaattcaaaccaaaggcaaagaagctgaaaactttgaaaaaagtttagaaga

SEQ ID NO: 677222 - DNA, 673 bp, Homo sapiens
gaagtcaaagggaacagcatttcaaagagagggaacataaaggaaggcacagagtggtgaagtccaatatgaatggttccatcatcaggtcacagaagtaccttgctggcccattcttaaagcagcaaaagagtcaagccacgcagcaaattgatccattcttttttttttttcaaacttttattatgaggccatattagggaattctagaaaatctagtgttattaaatatgtccagactctactagtgaggaatcttttaatcacagttgacagaaacccaatttaaactagcaaaacaagtgggaattcattaattcataattgaaaasttagtgtgtagactggttcagctaaagctggacctaggtactcaaatgatctggttgtgtttctgtttccacttctctttctctgctctgcttgtatccacttctctttgcatgttagtgttactctttcctaccatagatactctttccatatcccaggaaaggtagcttctggtgggcctaggccaacatccttacaacttgctaacataaatgaagagaatagtcttccctcagtagatccaggagaagaacccccagggggcacctttgtagcccagattggacaaattgcccttccctaaaccagccactgtaaatggaggaatgtaatactacag

SEQ ID NO: 677223 - DNA, 662 bp, Homo sapiens
aaataataataaaaaaaaaagcagccaggcatggtggcacacacctgtagacccaactactcaagaggctgaggaaggaggacggcttgagcccaggagctcaatgttacagtgagctatgaattgcaccactgtacttcagtctgggcaacaaagcgagactgtctcaaaaaacaaaacaaaacaaaaaattaaatcatakagcaagggctatgttcttcatttctttatactctgaacaccaagcacaatgcgaccctaatgtacttctaacaaagtagaccatttgaacaagtagtttcagaaggaactagtagaaatatgattgcaggagattaaacagctaatgaaattaacctagaaggtgcaggaaggaactttttgtggtgatgaaaatgttctatatcttgacagggatatggattacacagatgtatgaacttgttcaaactaagggaatggtatacataagatttgtacattttactatatacaagttttgcctaaaaactgtaatgcccaaccttgttttatccttattcacctggccttgtttctcccttagctaagagaaccagacaaactccatcttggctttcactggcagccccttccctcaaggactttacttgtgcaagctgactcccagcacatccaagaat

SEQ ID NO: 677224 - DNA, 1397 bp, Homo sapiens
tccctttctcaactatttcctccattccttgctactcgggggctgcttttgcatggatgcatgcattttcttttttacatttttcagtactggcaaaactctatagagttctgtcctctgaataatgctaatatgtgtggtaatggctgagtacgggtgcttatgcctgtaatcccagcactttggaaggtctaggagaaaggattgcctgagtctaggagttcaagacgaatctgggcaacataaggagactccgtctctacaaaaaatagaaaaagttagctgggcgtggtggtgtgtgcctgtagtcccagatacttgggaggctgaggttggargattgcttgtacccaggagttcggaattgcagcaagctataattgcaccactgcactccagcttgggtgacagattgagaccctgtttctaaaaaaaacagtgtggtcactagctccatttttaagttcattaaatccttctaaaaaataccctaaatatgtttccacatctgtgttattctgtgtgttggcacatccaattcttttttttttttctttttttgagacagagtctcactctgttgcccaggctatggcgcagtcttggctcaccacaatctccactccccaagttcaagcaattctcctgcctcggcctcctgaacagctgggacaacaggcatgcacaaccatgcctggctaatttttgtatttttagtagagacggggtttctctatgttggccaggctggtctcgaacccctgaccttgtgatctgcccgcctcggcctcccaaagtgttgggattacaggcatgagccactgtggccagccggcacatctaattcttaatttcctgctttaaggaagaagttgagttctgataagtaaaagccctattggaacatcacaggaaaaaaaaaagaaacgtggagtttttcaagctccaaaattattggctgagccatccttctttcaagagcctgtacaaagtataaaatgagtaaagttggtattctttgcctctttcaattccacccttgcgcttctcctgggtggctgtcaagccatccagagaaggcacaagcactgtgatgcacaccaacatgttcctatccacctactgcaatgtcatccccatgacttcttccctcactctctaaacaaattattcccaagatctatgatcgtgttgtatactttgtttccatgtttgctatttcatttaaaacattttaatgtaatttttacatagagctacccctctccctatgtgagctctttaagggcatacactactgatttattgaatcagtgactgcatgaataatcaatgagaacaatttcatttactacatcacactagtcagagacaaaaatacttcttcattaagtgca

SEQ ID NO: 677225 - DNA, 1072 bp, Homo sapiens
tgggctagacactggtataaatatgagtaaaacatcgttgctgcccttgagacagaaaagcaaacagacaattacaacaaatgttatacgtgtcagaaggatagcacagggtgctgtgagagcccatggggagagcaaactaacacaggaacagaaaaccaaacaccgcatgttctcactgtgggagttgaacaatgagaacacatggatacagggaggggaacatcacacactggggatgttggtgggtggtgggggtggaggacaaggggagggagagcattaggacaaatacctaatgcatgcagggcttaaaacctagatgacaggttgatagatgcagcaaaccaccatggcacrtgtatacctgtgtaacaaacctgcaaattctgcacatgtatcccagaacttaaagtaaaaaaaaaaaaaaaaatacacatacacaaaaattaacattgggcttgagtgcctacaagacagagatatccaggaggcgaaatgactcaggtctggtcaagagaaacaggaggaaaggaagaagacagttgtcacagaaacatttcaatgaggagaaagttttctggatagagataacaactctttttccaaaatttttcacaatgaccatgtattactttcataatcaggaaaaaaaaaaagtctgtaaaaggaaggcacagtcagcagcaaggtcaaataaagaattgtgcccacttggtgataaagacccctggtgaccctgctgtgaggaagtacagtggacaagaagtcaaaagttcatgatggaggggtgactagaaggtgagagggtgagcaccaactacagcgactctctcactaagcttggctatgaaggacagtctcaacatacctgtcagcttaaatcctttccaggtctatggggagatagaatagtgaaccaggtataatttgagcaactttattccagtaaaggcccaaatcctgcattcaataattccagtattccttttagactctaagttcagcttaaaaaagtaaagaaaagaaaactctcacctaaagacagtatacactccccaaaatgaagcca

SEQ ID NO: 677226 - DNA, 1295 bp, Homo sapiens
agttacactgtgttcattttgtgataattagctgaatcagacacattatctgtgtactttactcaatataaattatgctttattaacaaaattaacttatttatttcccctgtgaatctccataccctaaccctaactaggaacaagtggccctccaggatgsaggatgaaaggtgagagtctccttggtctcccctttgatatacatccctgagattttattagtcatgttctgaattcagttattttcaaggagctgtttgtgacagctttagatagtcatcctcttacgctgttataaaaatcactcaagagctgcaacatttttacaatatcttgaaagcatcatcttaaggtttattttcctcaattcacagtgagtttctctattttgtgtttccagcaacatatgtctccaattttatttacagcatatttatgtccatgacattccatcctgatgaaaacacgatttgccactgggcatgtgaaaccttcactaagagctgcatgccattaaggagttctggatttccctcttatgactgatgggtttggcagtgaaatctattttgtgtcagggttcctggtgccctgaaataatctgtagcaaggttctgtaaggcagatgtcagccaagcccctctgctgggtccccttggggtttgtgtcttcatgatcacttctattctgtacttgggtaaaactcctgatctctcttaggtctcagctcatagaactgttcccatttctctgtggtaggcagaattgttgttttttttttttaaatatactttgagttctgggatacatttaggtttgttacataggtatacacatgccatcggtgatttgctgcacccaccaacctgtcatctacatttaggtatttctccaaatgctatttcttccctagccccccaccccacgacaggccccagtgtgtgatgttcccctccctgtgtccatgtgttctcattgttcaactcccacttacgagttagaacatgcagtgtttggttttctgtttctgtgttagtttgctgagaatttgtttccagcttcatctatgtccccgcaaaggacataaactcatcctttttttatggctgcatagtactccatggtgtatatgtgtcacattttctttatccagtctatcattgatgggcatttgggttggttccaatttttaaatggcaccttaacctttgtctctgatgttactcctgtggttctcttacattacatggtaaaagggatgttgcagatgtaattaagttagttgactttga

SEQ ID NO: 677227 - DNA, 1295 bp, Homo sapiens
agttacactgtgttcattttgtgataattagctgaatcagacacattatctgtgtactttactcaatataaattatgctttattaacaaaattaacttatttatttcccctgtgaatctccataccctaaccctaactaggaacaagtggccctccaggatgcaggatgaaaggtgagagtctccttggtctcccctttgatatacatccctgagattttattagtcatgttctgaattcagttattttcaaggagctgtttgtgacagctttagatagtcatcctcttacgctgttataaaaatcactcaagagctgcaacatttttacaatatcttgaaagyatcatcttaaggtttattttcctcaattcacagtgagtttctctattttgtgtttccagcaacatatgtctccaattttatttacagcatatttatgtccatgacattccatcctgatgaaaacacgatttgccactgggcatgtgaaaccttcactaagagctgcatgccattaaggagttctggatttccctcttatgactgatgggtttggcagtgaaatctattttgtgtcagggttcctggtgccctgaaataatctgtagcaaggttctgtaaggcagatgtcagccaagcccctctgctgggtccccttggggtttgtgtcttcatgatcacttctattctgtacttgggtaaaactcctgatctctcttaggtctcagctcatagaactgttcccatttctctgtggtaggcagaattgttgttttttttttttaaatatactttgagttctgggatacatttaggtttgttacataggtatacacatgccatcggtgatttgctgcacccaccaacctgtcatctacatttaggtatttctccaaatgctatttcttccctagccccccaccccacgacaggccccagtgtgtgatgttcccctccctgtgtccatgtgttctcattgttcaactcccacttacgagttagaacatgcagtgtttggttttctgtttctgtgttagtttgctgagaatttgtttccagcttcatctatgtccccgcaaaggacataaactcatcctttttttatggctgcatagtactccatggtgtatatgtgtcacattttctttatccagtctatcattgatgggcatttgggttggttccaatttttaaatggcaccttaacctttgtctctgatgttactcctgtggttctcttacattacatggtaaaagggatgttgcagatgtaattaagttagttgactttga

SEQ ID NO: 677228 - DNA, 1295 bp, Homo sapiens
agttacactgtgttcattttgtgataattagctgaatcagacacattatctgtgtactttactcaatataaattatgctttattaacaaaattaacttatttatttcccctgtgaatctccataccctaaccctaactaggaacaagtggccctccaggatgcaggatgaaaggtgagagtctccttggtctcccctttgatatacatccctgagattttattagtcatgttctgaattcagttattttcaaggagctgtttgtgacagctttagatagtcatcctcttacgctgttataaaaatcactcaagagctgcaacatttttacaatatcttgaaagcatcatcttaaggtttattttcctcaattcacagtgagtttctctattttgtgtttccagcaacatatgtctccaattttatttacagcatatttatgtccatgacattccatcctgatgaaaacacgatttgccactgggcatgtgaaaccttcactaagagctgcatgccattaaggagttctggatttccctcttatgactgatgggtttggcagtgaaatctattttgtgtcagggttcctggtgccctgaaataatctgtagcaaggttctgtaaggcagatgtcagccaagcccctctgctgggtccccttggggtttgtgtcttcatgatcacttctattctgtacttgggtaaaactcctgatctctcttaggtctcagctcatagaactgttcccatttctctgtggtaggcagaattgttgttttttttttttaaatatactttgagttctgggatacatttaggtttgttacataggtatacacatgccatcggtgatttgctgcacccaccaacctgtcatctacatttaggtatttctccaaatgctatttcttccctagccccccaccccacgacaggccccagtgtgtgatgttcccctccctgtgtccatgtgttctcattgttcaactcccacttacgagttagaacatgcagtgtttggttttctgtttctgtgttagtttgctgagaatttgtttccagcttcatctatgtccccgcaaaggacataaactcatcctttttttatggctgcatagtactccatggtgtatatgtgycacattttctttatccagtctatcattgatgggcatttgggttggttccaatttttaaatggcaccttaacctttgtctctgatgttactcctgtggttctcttacattacatggtaaaagggatgttgcagatgtaattaagttagttgactttga

SEQ ID NO: 677229 - DNA, 233 bp, Homo sapiens
ctgcctgtacttaagtatttgtttttaaaagttatacagctgggcctattcaatttcatcattaccacttattcagctcatttrcaagtctaattcattcccttaacaaatatttactgaacacacattatgtgccaggtattgttcaacatgccagaaagaaaatagacacaaatttctgccctcactgcttttgaatcaacaaataaatacgtgaaatacacagaatgtca

SEQ ID NO: 677230 - DNA, 1531 bp, Homo sapiens
tgtgaaaaactcccacaaacactctaacaaaatggaagacagaaaagaaagcaagcatcatttgtgtacaatagccaaagaacaatagccaaataaatttgatggtctcaaaagttaagcatyttttgaagagaaaatttgattttagggccaggtggggtagctcatgcctgtaatcgcagcactttgggaggcagaggcgggtggatcacctgaggtcaggagttcgagaccagcctggccaacacggcaaaaccccgtctctactaaaaatacaaaaattagctgggtacggtggcgcatgcctgtgatcccagctacttaagaggctgagacaggagaattgcttcaactcgggaggcggaggttgcagtgagccaagatcatgccgctgtactccagcctgggtgaaggagccagactctgtctccaaaaacaaaaacaaacagaaaaaagaattgattttgattttttcagatacagtgcatgaactttttatcataaaatattaaagctggggaaaatatcttagaattcacctcatgttcatgctttaccctgtgaagaaacagaggcacagagagaaataacttgaggataatggaaacaagcacacatctgtaagtgtgtgtgtgtgtgtgtgtgtgtgtgtgtgtgtgtcagagagagagagagagatgttcctttgtaagtaaacactcttggaaatagccgcattttattataacacaaaaagtaatgctaaagctgatatagttctggttgctaagcttcacacacaaaaggtctttaggtagctgcttcctaatttttatttctgtggcccaaaagtctccttgtaaaccttcgtgtcatgtcatactaaacctttgacatcaataccctttaaaatgtacaagtccttaaaaaaaaaaaaaaggcaaagggcaaatactaatgtgggaaatttgaattttaattaactgtttgtttcaatgttaggataaattaatgttagataaattctttggtaatttttccccctaaaattggatttttcaagaaacatcactggttcagtatattgttatttggggtagcataattttaggcgataacttaatatttgcatatatttgtcactactttgagttggtttttgtcccctgacccccagccaggatgttagatcacacagatttttttttctttgagcccttagggagagtccaaaacagtcacttcatgtactaggaaagtttacccagtcagcacacacagatatgttgttgcctacatttatatttgtgagagtgactgttaagaaactagcaggtttataaaatccgtgtgagaatttctctcaaataactgttaatggacaatccagcaatcctcccatctcaggctcccaagtagctgagactacaggcaggtggcaccatactcggctaattttttgtgttttttgtagagatgcggtttcaccatgtcacccaggctggtctcaaactcctgggctcaagtggtgctcccgccttggcctcccaga

SEQ ID NO: 677231 - DNA, 974 bp, Homo sapiens
agcagtcttcctacctaaacctcccaagtagctaagactgtaggtgcacgccaccatgcctggctaagttttgcttttttttttttttttaagagactgagtctcattgtgttgcccaggctagtcttgaactcccggcctcaagcagtcctcccaccttgtctacccaaggactgggattaaaggcataaaccactgcacctggcccagtctcctttttgttacaacttcctccagctctgttttgctctggtgtgagacatgagcatggttcattaagaggcttggcccccccagccccaggaaagaacaagccaacaaccgataggaatgtagtactgtttttagtcctttcctcaggactggtttgtctgcataagatgagtaactacctgcttccaggtgagaagaagacatttaattttagagtagtccagccaggaagctgagatgtcattcttatcaaatccgcagtttcttcagaagacttgaggcctggctgagattctgtagtcccaaattggagcagtcttgagacatccaagattcttcggttctcattttagacttgccgtctctctcacaaagacccactgttttctctcacaggcaggcccccgccacttaaacgtgctgtgcgacgtgtctgggaaaggccccgtcactgcctgtgactttgacctccgcagcctgcagcctgacaagcggctagaaaacctcctgcagcaagtgagtgccgaggactttgagaagcagaacgaggaggcccggaggaccaayaggcaggccgagctctttgccctttacccatcagtggacgaggtgggtgccactgtttccatactggagaatctcagtgaagactctgagagtcatgtggacaattgtgttgttcattattactatatagcagcccatggtgtcagggctcacttgtatgatttctggggcctcgtttttcactcaggcaagcc

SEQ ID NO: 677232 - DNA, 1037 bp, Homo sapiens
tgggtgcactggctcacgcctgtaatctcagcattttgggaggccaaggcgggacgatcacctgaggtcaggagttcaagaccggcctggccaacatggcgaaaccccgtctctactaaaaaatacaaaaattagccaggtgtagtggtgtgcacctgtaatcccagctacttaggaggctgaggtgggataattgcttgaacctgggaggtggaggctacagtgagctgagatgtgccactgcattccagcctgggcgacagagtgacactctgtttcaaaataaaataaaataaaaaataaaaaaggaacaaagtattaggcataataatcatcaccagagagtgattttatgaaagacaaaaacaaggtggcaagaagagagaataaagttacataaagatagcatttaagaacaaccacaggctgggcatggtggctcacacctgtaaccctagcactttgggaggcctaagctggtagatggctcgagcccaggagttcgagaccagcctgggcaacatagcaaaaccctgtctctacaaaaaatacaaaaattagccagctgtggtggcttgcacctgtagtcccagctacttggaaggctgagatgggaggatcactcgaacccaggaagttgaagctgctgtgagcagtgattgcgmcactgcactgcagcctgagtgacagagcgagactctatttcaaaaaaaaaggaacaaacccaataattttgggcataacgaccagagcacaatgagctacagagagctttctgagaagtatttgctaattttatctgcaaagataatacaagcataaaaatatatgtattcaaatgtatagatgtgtatctgcagtgagagcagagctgttcctcagtagtgggggtggctggcagagtgaggtagtgtgctttcaggaattgctttatttgtctgatgtgttctagaccaaagaccaacagaggggcttgggcaatcagacacagaatttttggcctttcacatttagaatcggttccttccagattcttg

SEQ ID NO: 677233 - DNA, 1037 bp, Homo sapiens
tgggtgcactggctcacgcctgtaatctcagcattttgggaggccaaggcgggacgatcacctgaggtcaggagttcaagaccggcctggccaacatggcgaaaccccgtctctactaaaaaatacaaaaattagccaggtgtagtggtgtgcacctgtaatcccagctacttaggaggctgaggtgggataattgcttgaacctgggaggtggaggctacagtgagctgagatgtgccactgcattccagcctgggcgacagagtgacactctgtttcaaaataaaataaaataaaaaataaaaaaggaacaaagtattaggcataataatcatcaccagagagtgattttatgaaagacaaaaacaaggtggcaagaagagagaataaagttacataaagatagcatttaagaacaaccacaggctgggcatggtggctcacacctgtaaccctagcactttgggaggcctaagctggtagatggctcgagcccaggagttcgagaccagcctgggcaacatagcaaaaccctgtctctacaaaaaatacaaaaattagccagctgtggtggcttgcacctgtagtcccagctacttggaaggctgagatgggaggatcactcgaacccaggaagttgaagctgctgtgagcagtgattgcgccactgcactgcagcctgagwgacagagcgagactctatttcaaaaaaaaaggaacaaacccaataattttgggcataacgaccagagcacaatgagctacagagagctttctgagaagtatttgctaattttatctgcaaagataatacaagcataaaaatatatgtattcaaatgtatagatgtgtatctgcagtgagagcagagctgttcctcagtagtgggggtggctggcagagtgaggtagtgtgctttcaggaattgctttatttgtctgatgtgttctagaccaaagaccaacagaggggcttgggcaatcagacacagaatttttggcctttcacatttagaatcggttccttccagattcttg

SEQ ID NO: 677234 - DNA, 2931 bp, Homo sapiens
ggtcaaggctacaagatgtgatggacctatctattagtacttactggagatcctataaagactagtagaattgtgaattttaaatacgaaagagactggtaggagtcccagatccaaatctcccttctcctagatcccagtctccaaatctttcattatccccaagatgatcctcagaaaggtacagaatctccccaaatggaaagagtaagtggcaaagtagggcctggatgccagggctatggtgctgagtccagtgctcagactgctatctggaaaggcttctatcctgctctagcctttgtaggaggaattaaagggaatttactcctgggctgtactctcatggtgaactgagggtattagcgaaattttccattgcacatctgcaagctttggtgaaggtaattgctatggtctcgcttggccctttcccacagagccagcaggtcagcagaccccagggagatggagttcctgtgtttctgtctgtagcacatggcattcacctgctccccccartgctgccacttcgcatcatttcagatagatgggtttcttgaacaatgagtcacccctataagtgatgctgaatttccacaagcagcttctatcagatttagtttgatatgtgtttatttgaagagatacttccattattcttgaaataaaagcaggctcaggacagccaatataaagttgtccttatgtggctcactcagaaagcaaagcactattgaaaaaagagtttagctggataatatagtattactccttccaggaagaaagcagacccatggttaaaaactttcatctccctctctccccagaaaaggttttggatttgaatctaaatgctgttgtttttttcagatttgaacatcatttttaaacataggcagaaaatttgactctatgtatatttgtggtggatcctctgaccagctggcttttctgcagatagtgagttaagacaattcagggatagctcatagttgccttaggttcttgttgagtattggaaaactgcatttacagtaacattttctatctccaggcacaaaccttgaatgatgttgaggattttcatacttaagcaaaaatcccgaaatgttttgttgttttgactgcttgatggcagagttggcatgatcaggtggatatgagggcttgtggccacatggtgtgcccacctgtgatgaccttagagtgtcttgtgaagctcaggaacaaggtgtacaaagagctatcctgggatgggcagatcctttttgaccttagaatcagaacttttaattaagccttccactctagcttctcagtgggtcagagccatcaggaccttccagtggctttgaagatctcctccttgtttccagttttctcactgacttatcaggcctaatcatctggttatggaagagttggtgcagctgtttagcatgcactgctctttgttctgtttgctccgtgaggtatattctggagaagccagcccagtagatagatccattccacacttgcttaataaaagatttcactacttcctcgtggcctcctgtggacaactgtcaggctgttctgcttccctgtgcaccatcctcccaagccttctctgcaccttggagtatacagatgagcaggggagaatgaatcagattatctgcagattatcagctatagctgtgtctccaggaattcgcccaaagagatttagaaagatgcagagattactgataatatttctcctgccgaaatgggaactagaggctgttccttgattgcacttgaaacttgctctcctggattgtaacttttttgcctcatttgttacagtgtatgggtgtgggaacgattcctccctatcagcttttttcacttctttgctattcctacctaggtgccctctactgttctttagtaacttacctccaaaattactttttgcttggagaatattaatagagggtttcttatttcataaacattctctgaacaattctagtatagccttctactatataaagatagattccatatgtagctgagtaaatagaaaactgctaatttaatcatgtgcctgtgaggtaggggggaatcttccttgtatttttaagtatactgacatcaaagatagctatctgcaaagttaagagttgattttgtttttacttaccctttcatatcaaaaatcttaacttttttcagttgagcctttcaataaatatcatttcaatgaaaataatgcaacttggtttagatctaatgccttaaaatacacagaatacacttttggttcaaaagaaaaagtattatcaaagttcatttgaatgtttcatactatcaatctaaatgaagataaggaacttttctgctgttaaccagtataaacctaaaacctaaaagtaagaagtaagttatagagaattatggatagttagtagatctagggtggactcattctgtctactctggaagaagaaagttttccctacaaaagtaccttcttggttattgtaatcataatacataggcattccttgttttagtgtacttcatttgattgcactttgtagataatgccttttttacaaattgaagttttgtggccaccctgcttcacacaaggctattggcatcatttttccaacaatatgtgctcactttgtgtctctgagtcacattttggtaattctcacaatattttgaagtttttcgttattattatatctgttaaggtgatccacagatcacatgcatgatctttgatgttcctgttgtaactgttgggcaccaactgcacacattcaagatggcaaacttaataaatgtgtgtgttccgactgctctacaaccagccattttccctctatccctctccttagacctccccattccctgaaatgcaacagtattgaagttaggccaatt

SEQ ID NO: 677235 - DNA, 2931 bp, Homo sapiens
ggtcaaggctacaagatgtgatggacctatctattagtacttactggagatcctataaagactagtagaattgtgaattttaaatacgaaagagactggtaggagtcccagatccaaatctcccttctcctagatcccagtctccaaatctttcattatccccaagatgatcctcagaaaggtacagaatctccccaaatggaaagagtaagtggcaaagtagggcctggatgccagggctatggtgctgagtccagtgctcagactgctatctggaaaggcttctatcctgctctagcctttgtaggaggaattaaagggaatttactcctgggctgtactctcatggtgaactgagggtattagcgaaattttccattgcacatctgcaagctttggtgaaggtaattgctatggtctcgcttggccctttcccacagagccagcaggtcagcagaccccagggagatggagttcctgtgtttctgtctgtagcacatggcattcacctgctccccccaatgctgccacttcgcatcatttcagatagatgggtttcttgaacaatgagtcacccctataagtgatgctgaatttccacaagcagcttctatcagatttagtttgatatgtgtttatttgaagagatacttccattattcttgaaataaaagcaggctcaggacagccaatataaagttgtccttatgtggctcactcagaaagcaaagcactattgaaaaaagagtttagctggataatatagtattactccttccaggaagaaagcagacccatggttaaaaactttcatctccctctctccccagaaaaggttttggatttgaatctaaatgctgttgtttttttcagatttgaacatcatttttaaacataggcagaaaatttgactctatgtatatttgtggtggatcctctgaccagctggcttttctgcagatagtgagttaagacaattcagggatagctcatagttgccttaggttcttgttgagtattggaaaactgcatttacagtaacattttctatctccaggcacaaaccttgaatgatgttgaggattttcatacttaagcaaaaatcccraaatgttttgttgttttgactgcttgatggcagagttggcatgatcaggtggatatgagggcttgtggccacatggtgtgcccacctgtgatgaccttagagtgtcttgtgaagctcaggaacaaggtgtacaaagagctatcctgggatgggcagatcctttttgaccttagaatcagaacttttaattaagccttccactctagcttctcagtgggtcagagccatcaggaccttccagtggctttgaagatctcctccttgtttccagttttctcactgacttatcaggcctaatcatctggttatggaagagttggtgcagctgtttagcatgcactgctctttgttctgtttgctccgtgaggtatattctggagaagccagcccagtagatagatccattccacacttgcttaataaaagatttcactacttcctcgtggcctcctgtggacaactgtcaggctgttctgcttccctgtgcaccatcctcccaagccttctctgcaccttggagtatacagatgagcaggggagaatgaatcagattatctgcagattatcagctatagctgtgtctccaggaattcgcccaaagagatttagaaagatgcagagattactgataatatttctcctgccgaaatgggaactagaggctgttccttgattgcacttgaaacttgctctcctggattgtaacttttttgcctcatttgttacagtgtatgggtgtgggaacgattcctccctatcagcttttttcacttctttgctattcctacctaggtgccctctactgttctttagtaacttacctccaaaattactttttgcttggagaatattaatagagggtttcttatttcataaacattctctgaacaattctagtatagccttctactatataaagatagattccatatgtagctgagtaaatagaaaactgctaatttaatcatgtgcctgtgaggtaggggggaatcttccttgtatttttaagtatactgacatcaaagatagctatctgcaaagttaagagttgattttgtttttacttaccctttcatatcaaaaatcttaacttttttcagttgagcctttcaataaatatcatttcaatgaaaataatgcaacttggtttagatctaatgccttaaaatacacagaatacacttttggttcaaaagaaaaagtattatcaaagttcatttgaatgtttcatactatcaatctaaatgaagataaggaacttttctgctgttaaccagtataaacctaaaacctaaaagtaagaagtaagttatagagaattatggatagttagtagatctagggtggactcattctgtctactctggaagaagaaagttttccctacaaaagtaccttcttggttattgtaatcataatacataggcattccttgttttagtgtacttcatttgattgcactttgtagataatgccttttttacaaattgaagttttgtggccaccctgcttcacacaaggctattggcatcatttttccaacaatatgtgctcactttgtgtctctgagtcacattttggtaattctcacaatattttgaagtttttcgttattattatatctgttaaggtgatccacagatcacatgcatgatctttgatgttcctgttgtaactgttgggcaccaactgcacacattcaagatggcaaacttaataaatgtgtgtgttccgactgctctacaaccagccattttccctctatccctctccttagacctccccattccctgaaatgcaacagtattgaagttaggccaatt

SEQ ID NO: 677236 - DNA, 1139 bp, Homo sapiens
atctcttctctgcaaaatccagacccctcaggacactggctggagggagattgcagagtatgacaacagtgctagaggctgaggagaaatagctgttagaatggccacaggtccctccctgaacctcagaaagaatggaaagctcgacttcttccctcggaggagaatgagagggattgaagatgtctctgtctcatcacctggcttgctacacgttctctgctaccctcatgctgaccatgggcccagtcgaaggctcacctaaattcccctgactgacgctctgtttctgccaggtccagggaaatgattggataacatgtctgactactccaaacaggctcttaatgggcaatattcacttgttactgttagctggagttgccttctcccacactttgcattttggctccaccaggacctctgagcctgaaacccagaagtcattgcagactcctctctccatcagcctgcacacccaaggcccgctcttctgtactctaatgactctttatggccacccctacggtctgaggtcattcattcactcgacagatgttcgagtgtttgtgcrccagcctctgggcgtgaatgatgagcaaactcagcccttcttgtccctgccttcatggcgcctgtggcttagggaaagaaagtcttcatctgtttttcctaagctttcgcaccagactgctctgttctcagctttgctaactcagttcatcctccctgtggtctctagcgcattaaaaagaaaacacccccaccctcaacccaagtcttaatctcatctttcttcctgatggtatggagaaagaagcagcactatatgaagtggcaaaggagcaaaggcttaattttaactcttctgctgattatctgtgtgagttctggtaaatctcagttctctcactttaaaaatggagttggaggaggtaataccagtgctaaaatttatactgattctaatcattagctacagctaggaatggagctttgcgtaattttcaaagtactttatgaagatatgattgctatataaatagctatccatgtttaatgtatacatcttgatgagtttgggagtaagtatacacccatgaaaccatcgccaccatcaaggctccaaacacattcat

SEQ ID NO: 677237 - DNA, 1139 bp, Homo sapiens
atctcttctctgcaaaatccagacccctcaggacactggctggagggagattgcagagtatgacaacagtgctagaggctgaggagaaatagctgttagaatggccacaggtccctccctgaacctcagaaagaatggaaagctcgacttcttccctcggaggagaatgagagggattgaagatgtctctgtctcatcacctggcttgctacacgttctctgctaccctcatgctgaccatgggcccagtcgaaggctcacctaaattcccctgactgacgctctgtttctgccaggtccagggaaatgattggataacatgtctgactactccaaacaggctcttaatgggcaatattcacttgttactgttagctggagttgccttctcccacactttgcattttggctccaccaggacctctgagcctgaaacccagaagtcattgcagactcctctctccatcagcctgcacacccaaggcccgctcttctgtactctaatgactctttatggccacccctacggtctgaggtcattcattcactcgacagatgttcgagtgtttgtgcgccagcctctgggcgtgaatgatgagcaaactcagcccttcttgtccctgccttcatggcgcctgtggcttagggaaagaaagtcttcatctgtttttcctaagctttcgcaccagactgctctgttctcagctttgctaactcagttcatcctccctgtggtctctagcgcattaaaaagaaaacacccccaccctcaacccaagtyttaatctcatctttcttcctgatggtatggagaaagaagcagcactatatgaagtggcaaaggagcaaaggcttaattttaactcttctgctgattatctgtgtgagttctggtaaatctcagttctctcactttaaaaatggagttggaggaggtaataccagtgctaaaatttatactgattctaatcattagctacagctaggaatggagctttgcgtaattttcaaagtactttatgaagatatgattgctatataaatagctatccatgtttaatgtatacatcttgatgagtttgggagtaagtatacacccatgaaaccatcgccaccatcaaggctccaaacacattcat

SEQ ID NO: 677238 - DNA, 1139 bp, Homo sapiens
atctcttctctgcaaaatccagacccctcaggacactggctggagggagattgcagagtatgacaacagtgctagaggctgaggagaaatagctgttagaatggccacaggtccctccctgaacctcagaaagaatggaaagctcgacttcttccctcggaggagaatgagagggattgaagatgtctctgtctcatcacctggcttgctacacgttctctgctaccctcatgctgaccatgggcccagtcgaaggctcacctaaattcccctgactgacgctctgtttctgccaggtccagggaaatgattggataacatgtctgactactccaaacaggctcttaatgggcaatattcacttgttactgttagctggagttgccttctcccacactttgcattttggctccaccaggacctctgagcctgaaacccagaagtcattgcagactcctctctccatcagcctgcacacccaaggcccgctcttctgtactctaatgactctttatggccacccctacggtctgaggtcattcattcactcgacagatgttcgagtgtttgtgcgccagcctctgggcgtgaatgatgagcaaactcagcccttcttgtccctgccttcatggcgcctgtggcttagggaaagaaagtcttcatctgtttttcctaagctttcgcaccagactgctctgttctcagctttgctaactcagttcatcctccctgtggtctctagcgcattaaaaagaaaacacccccaccctcaacccaagtcttaatctcatctttcttcctgatggtatggagaaagaagcagcactatatgaagtggcaaaggagcaaaggcttaattttaactcttctgctgattatctgtgtgagttctggtaaatctcagttctctcactttaaaaatggagttggaggaggtaataccartgctaaaatttatactgattctaatcattagctacagctaggaatggagctttgcgtaattttcaaagtactttatgaagatatgattgctatataaatagctatccatgtttaatgtatacatcttgatgagtttgggagtaagtatacacccatgaaaccatcgccaccatcaaggctccaaacacattcat

SEQ ID NO: 677239 - DNA, 1506 bp, Homo sapiens
tgaataacatatgagtctgagcctcttttgtgcatcttttcaccactagccttatttccatttgcttaggcagcacaacaataaaaaatatagcaagaacaaaatggggactgcagagactcaaaaagacttgcttttcctactaggggaagccaaagtcagtatatcctgactgaggaaaggatccctttcaaactcattgatccttgaagctagttttctccccgccagaatagctataggccttaaagccagaatcatctcagcaagaaaagcttcccaataacattagtgagccaccacacaaagaaactggagtgttctatgctagataagtttcaagaggaaattgattttagatttctttgctgtaaaacttgaagtagtaagtagtctacacaagatattccaagggctgaaaatcttaaaacaaaatgcacaggaatacctaatcaatggattgttatcagggtgcctcctttaattcctctatacagagaggacccgggaacagccggagctagctggcactgtatgtgggtggcaagaacctcatgcatgtattgattgggtgcccacagctctaaggcttctagaaggaggatatctctgaagagaaaagtttcacataaatgttcactcactcactcccatctgatcatctatagccccttttctttttcttccatctctcacaaatacatcttccgtctatggccacatagaagattcttgcttggagctcctgctcctgagccatgcatgccctatgcaggaaccaggcaaggcattctctggcctgaagaggaatacatgtgggtgagtctggtgaaagttcacctgtggcaagagggcaaaccaaatctcctgctcgacaaaagaggacataattgtttcctaaaatataatcattcatgtaccaccttcataatttttgctgtggccatgtaccaactgaamcacaggagaaataatatttgtaaaagatcaactcatagcatacaaattgtggaaccagactatctggatttgaattctggctctatcacttactaactggggcaacttgggctgcttattaacctctgtgcctctgttttctcatctattaagtggagataaaaatagcaactacttcataggattattatgagggttaaacagataagtacatgtcaacctaaaataggtctgtcacatagtaagcacagtggaaatgttagttacattactataatttaaatacaaaattttcaaatgaaagtttacgacattccatatatttaaaaacatagtaacacattccataaatagaggtcactctaaaacaaaatgtgaaaacaaaccaatagaattaaatcctagcagacactgtaagctccgagctcaagttctgctctgtgtttaaaaggaaggtgggcagatctgttaaaacctcatcggcctcagaaccaggcttcttctggactcttccgaatgaccacaaaagatttgaaaaaggaataa

SEQ ID NO: 677240 - DNA, 648 bp, Homo sapiens
ttcacagtgaaacttgtaggggaaagcaaaggaaacatgtttgcttgagaatttggagtttggcagggcagttctctagatagaagttgattcacatcaaaaagtgttatttcttctggatgtcacccttgatgtggcaccttgggagccgacatgcttagagcatttgaagcgaatggtcttctctatgacccagcaacagggctaagaaggctactcaggtgcacaaggagaggaacacgctgtgttctgcaacctcctggcattagcctggrtgcccatcaggaggaggatgagtaaataataagtgaaccagaactacatgaataacatgaaaaacaaatctcaaaaatacaaggttagacaaaaaatgccaaattatattgtatagttgaaaactattaggccaggcacagtggctaacgcctgcaatctcagcactttgggaggccgaggcaggcggatcacttgagcccaggagttcaagaccagcctaagcaacatggtgaaaccccatctctacaaaaaaatagaaaaaattggctgggcatggtgacacatgcctgtggtcccagctactcaggacactgaggtgggaggatcgcttgagccaaaaggttgaagctgcagtgagccatgatcatgcca

SEQ ID NO: 677241 - DNA, 1320 bp, Homo sapiens
attctcatgtctcagcctccacctcccaagtatctgggattacaggtgcatgccaccatgcccatctaattttctttttttttttttttagtagagatggagtttcgccatgttgaccaggctggtctcgaactcctgacatcaagtgatttgccagccttggcctcccaagtcctgggattataggcgtgagccactgtacccagcctcaaaatcaccatttcttatgttcaatcttatgaaattatcaaaaacctagcaggcagaagagaacagtagaagtacaaatattaggctaggtaaagtggttcacacctgtaatcctagcactttgggaggctgaggcaggtggatcacttgagcccaggagtttgagaccagtctggaggacatggtgaaaccctgtctctactaaaagtacaaaaaattatccaggtgtggtggtatgcgcccatagtcccagttacttggaaagctgagatgtgggaggatcacctgagccagggaagtcaaggctgcagtgagctgagatcgagccacagcacgtcagcctgggtgacgggagggagatcttgtatcctaacaacaacaaacccaaaacacaaatattgctgacttattcattatggatttttagattcaaaagcctaacaaaaggcacacgaaaaattataatctaattcacatatcgtgcactgtaacgttaacagtaaccttcttcaccccattaaatgtttgttgggctcttaagtgccaggcaatagggacagaaaaataagatagtttctgttctggagaaacaatagttttttccagactaaaactggttatgaatcttgaagtatttgttttaggttgtgactagtgtatgtagcactatacctagtgtatgtagcacaacctaaaacaaatacttgaagatacataaccaattttaaacatatactaaaaatctttccatctgggtgaccttgggcaagttatttagcctccctctaccctggttcttcatctttaaaatggaacaaaaaggtccttctttgatactttcatcttttgaggctaattaccttattcaatgtccaatgtctgtattcagtacagaaaaacagccaccatttatagaactttgtgccaggatggcagcagagccaggatctgagtattaatctatatatgtttatagttccaaccattataccatgttgaaatttgtgcttttacatgtcttttcttcacagtatcccagcatattcttcataggcagagatggttggtktttttggtttttctgtgacagggtctcactctgttgcccaa

SEQ ID NO: 677242 - DNA, 974 bp, Homo sapiens
ctttggagttaacagaactctatagagtaaataacaaatcagctttttctagtatctgagcctgtttctacttttatagcaagcttctttagaaactggaacccactctttcaagtcagtgtacttttatacaccgtggcagaaatttaccaaattatcttaaaaacaacgttcatgtcctttcccaatgcaggagcccgtgccacttcctgcatggtgcaccttgtacaccttgtagctgtaccttccaatcaagagtaacttggacactggaaaatctgacttttctcatttgtagccgcctttaaacatatcctacattagctgggtgcagtggctcacacctgtaatcccaacactttgcaaggccaaggcaagagaatcatttaaggccaggaattcgagatcagcctaggcaacatagtgagaccccatctctacaaaaaataarttagctgggcatggtggcacacacctgtaatcccagctgcttgggaagctagagcaggaggattagttaagcccaggaattcaaggctgcagtgagctatgatcttaccattgcactccagccaggacaacagagaaggaccctgtcagtcaataagtcaataaacaaatcctaggttgaatcgaaaaagcagttgggaggaaagatgtgtagaaaatgaaaggggtctctaggaagattgtgatcagacagggagaacaggagatgggcttacctaatgatgtcagtattctcaggaaggactgaaggtgaattttgtattttataaacatgtttaatttttaatttgcagtgcttagtgacccccaaaccagggccatctatgatatatatgggaagagaggactggaaatggaaggatgggaggtaagagaaactgtgcgtctggtgttccagaaaagtcattaaacagttacagaacatctccccaaaaccctgcaatctgtaatattgtctttgggaa

SEQ ID NO: 677243 - DNA, 616 bp, Homo sapiens
tgatatttagaatgggtcaaaatgtcttttcattcctgatttagaaaagagaatttagtccatctctttctgagaactcttgaaaaacttcctattgcttgttttgcttaggttgtgcaaaacttcagtcagaagctccaaggtcaaatggagaatactaaaaagtgaatctgctggaaactcaaaaccttataaaagaatcagaaactattgagatttttaaaagtattaataattcctttgaccttactattaaagaaaagattagcgggattttttaaaaatctctttgttctgaaaataaacccatcattatttttaatttcttgaagtcttggaaatgaaaattttcagaggtctttttatgacmttatagtccttttggttaaagcaaaagaatagactgttttattttgcaaatagatagctaaatcaacattccagatgtgcttacttcccagtatatatgcactagtcatttccaaaaactattgattgacaaaaaacattcttttcaatttgatctacatagtaatgattttaatatccttagaaccaaataacactatatatagcatcagaaataaatttttgttaaactggttgactcagtgaa

SEQ ID NO: 677244 - DNA, 610 bp, Homo sapiens
gagttttcttcaagcgtatagttggcaagactttctaattgattctgaaaaatcttcaaatccctctactgaagtctgtcaaaccttaaaatccccgtacttccttagctaagttgcaaagtcatgcagtgtgcccartgaggctggccacttccaaagatattatgtagttgtaaaagacaaataataattctgaaaccaaagtaatgctcgcttattgaaaaggtcagaaaaagaaaaacaaaagttttgtttttttctgatagcagaggttatgtgaatctcacaagtaaagtcctatcttagttgaaaatctttcttgcaaatcaaacagagtagaatatcggatcttaagagggtctggaactgctgtgcatgagcccaggaaggatctctttcttttttttttttttttttttttttttcattagagagaaggggaaaaaataacacttggagctacaggatagtggaagactgaaaacaacgtgaagtcttttctcataacatctaaatctccaataaattccaaaactcactggacatttaatgtgagtagatatttttctggaaacccctaaaggggatgagctctaaatccaggtctgtg

SEQ ID NO: 677245 - DNA, 673 bp, Homo sapiens
gtgcagatttcatttcctagggagatatacccagaagacagattgctgcatcatatggtaattatacttttaatttttttaggaacctccatgttgttttccataatggctgccctaatttacattctcaatgacagtgtatgagggtttccttttctccacaaactcaccaacacttgttttctcttggttccttgatactagctattttaactgatrtaggtaatgtctcatagtggtttcgatttgcatttccctgattattattatatttttattcagagagtctctttttatccattgcatcatagtcagaccgcttcctgcgagtatggcttgtcgatgatattcttcaaacagctttgtatgatagattttacttgggggccccaatgtatcacacatcccattattcatgctcataacaatgtgaaaattacaggcttaagactcaagaaacctggcagcttccacctttcagtagcatttagcccccatgtcagaggcctctctatgttaaggccattattctatgaggaatctcaaatgcccatgggaagaggaccaatggaatcaaggccctgggagcaacaattgacagccatgtgatgaggtcattttgtccctctctgtcatctcagcagttcagctgacaccacctgtaaagaagaga

SEQ ID NO: 677246 - DNA, 673 bp, Homo sapiens
gtgcagatttcatttcctagggagatatacccagaagacagattgctgcatcatatggtaattatacttttaatttttttaggaacctccatgttgttttccataatggctgccctaatttacattctcaatgacagtgtatgagggtttccttttctccacaaactcaccaacacttgttttctcttggttccttgatactagctattttaactgatgtaggtaatgtctcatagtggtttcgatttgcatttccctgattattattatatttttattcagagagtctctttttatccattgcatcatagtcagaccrcttcctgcgagtatggcttgtcgatgatattcttcaaacagctttgtatgatagattttacttgggggccccaatgtatcacacatcccattattcatgctcataacaatgtgaaaattacaggcttaagactcaagaaacctggcagcttccacctttcagtagcatttagcccccatgtcagaggcctctctatgttaaggccattattctatgaggaatctcaaatgcccatgggaagaggaccaatggaatcaaggccctgggagcaacaattgacagccatgtgatgaggtcattttgtccctctctgtcatctcagcagttcagctgacaccacctgtaaagaagaga

SEQ ID NO: 677247 - DNA, 804 bp, Homo sapiens
ttatttgcatttacctacatatttaccatttttgatgttctttgttctctcttaaaaatctggattttcagtagggataaaggtcctcaggataaagaatatactttagcattacttatagcatcagtctgctggcaatgaattacattagttttcttctatctgaaacwtttttatactggatataaaaatctaggttggcattttagtttcttttagcatttttttccctctactctttactctcttctagacttcatatagatttagatgagaaatgtattgtattttaattatatgtgtatgtatatttaaattctgaacatttatgtgtctagctatatgtttatataagtaatgtgtaattttttattctttttactttcaaaaatgcctttgtatgtttaatttttcagtcatttaactctgatctgctcaggcatgatttcattcacatttatcctgctttgtctttctattgattttaaaaaataccgttctgttgtcttctgacttgtattgtttctgaggagaattcagccatcattattattgtcattccttagaatttgtctctttcacctctgcctgctttaagaatttctctttaacttgagttttgagaaagttgactgaggtatgtctgtatgcggtttttctctgtattcatccatcatggttttgttcttgatgctgctgccctttctattggtgctgctgttgctgttttaacttctggaattattagttgatgttttaaatcaaattttaaaaaaaattaccatttttttctcaaatactttt

SEQ ID NO: 677248 - DNA, 1705 bp, Homo sapiens
tggaaattgtgtgtatcagaacagtgtcaaagacagaactcaatgaccaaatggaaaaataattttatttcttaatagacattaatcctttaatcaacagtctttggatatgacagatgcagctattaatacacttacctgaatcatacacaatccaaattacttcatcttgacgataacattctccctgaaatattatgaaatggtcttcctgaaaaccagaaatattatgtctgtctttgatctgttctaccagtctagtgacttgatagggtctctcmagaagggaaattcctacgcacgcacacacacacacacacacacacacacacacacacacacacacacgcttctcttctgctctctgcagtccccaatagctggaccaagttgtctccccagcctggaggtcagctcactctgttttccaaatcaatctgaatatggagtgaactgtctttggtgcttactatgttttgagatctgacctgtctaggttcttcagggtcattagtgtgtgaggcctctgaaagatggaaacttatttgtttgttcactgctgtactccaggacccaattggtgtctgccacaccagaggcactcaatatgtatgtgctgattgggtgaaaagtgcattacaggcatagggagggagagggatggggtgatttgaatgggggagaaatggagctagaaatggaaatagaatcaggcgtggagcttggcaggagaggaaggaagagaagccaggtcatgccggccctaatcaccactatgacttctgtggttgaggacgcctggagtagataatgctcagttagtattattttcataaatcaatgaatgtaagaaacagagtagggagtaaagagacaaaaagaatagcaaagcataattattctcaaaagatgaaagaaacaaaacgctgcaccttcagtaagtttccatcttggctcataaaaaaaaaaaaaaaagtctttagggcccgtctacaaggctgagattctgcagggagagtgcactgcagatcacctggccatatggccagtgtttttttcctgataatggcattttccctctattcctgcctccttcctaccctagtaagctaggctgaacagctggaggataatatgtctttcctttctttctcttaaggaccatagctcccaggcttcttggttgttggttctgggtcactgttctgagcctctctctttcccatttcacattcctaagtgctttctaagcaaaggacaccccaagaccaaaagatatgcgaaaataataggaaaaaaatgggcactaaaagtcgaaattctcaaaagtccaaacattcaacaccgcgtctgccctttcacccaatcaccttggccaaagcatccatccctctttgttttgctaatacccagtgttagaatcttttattgccaaaggtctcactttagaatgtctgcacctaggaattaagggacagggatttccctgtcaatatctgcagtggtggagaggaagccagtcctcaaacagactgagagaggtgaggggaacccaaaagagtacagcatcagggaagaagtgtttcaaagggggcaaggagaatccacaaaaccaaatgcaaagaagagtcagaaaagcgaggactggctgggcgtggtggctcaggcctgtaatctcagcactttgggtggctgaggcgggtgg

SEQ ID NO: 677249 - DNA, 1705 bp, Homo sapiens
tggaaattgtgtgtatcagaacagtgtcaaagacagaactcaatgaccaaatggaaaaataattttatttcttaatagacattaatcctttaatcaacagtctttggatatgacagatgcagctattaatacacttacctgaatcatacacaatccaaattacttcatcttgacgataacattctccctgaaatattatgaaatggtcttcctgaaaaccagaaatattatgtctgtctttgatctgttctaccagtctagtgacttgatagggtctctcaagaagggaaattcctacgcacgcrcacacacacacacacacacacacacacacacacacacacacacgcttctcttctgctctctgcagtccccaatagctggaccaagttgtctccccagcctggaggtcagctcactctgttttccaaatcaatctgaatatggagtgaactgtctttggtgcttactatgttttgagatctgacctgtctaggttcttcagggtcattagtgtgtgaggcctctgaaagatggaaacttatttgtttgttcactgctgtactccaggacccaattggtgtctgccacaccagaggcactcaatatgtatgtgctgattgggtgaaaagtgcattacaggcatagggagggagagggatggggtgatttgaatgggggagaaatggagctagaaatggaaatagaatcaggcgtggagcttggcaggagaggaaggaagagaagccaggtcatgccggccctaatcaccactatgacttctgtggttgaggacgcctggagtagataatgctcagttagtattattttcataaatcaatgaatgtaagaaacagagtagggagtaaagagacaaaaagaatagcaaagcataattattctcaaaagatgaaagaaacaaaacgctgcaccttcagtaagtttccatcttggctcataaaaaaaaaaaaaaaagtctttagggcccgtctacaaggctgagattctgcagggagagtgcactgcagatcacctggccatatggccagtgtttttttcctgataatggcattttccctctattcctgcctccttcctaccctagtaagctaggctgaacagctggaggataatatgtctttcctttctttctcttaaggaccatagctcccaggcttcttggttgttggttctgggtcactgttctgagcctctctctttcccatttcacattcctaagtgctttctaagcaaaggacaccccaagaccaaaagatatgcgaaaataataggaaaaaaatgggcactaaaagtcgaaattctcaaaagtccaaacattcaacaccgcgtctgccctttcacccaatcaccttggccaaagcatccatccctctttgttttgctaatacccagtgttagaatcttttattgccaaaggtctcactttagaatgtctgcacctaggaattaagggacagggatttccctgtcaatatctgcagtggtggagaggaagccagtcctcaaacagactgagagaggtgaggggaacccaaaagagtacagcatcagggaagaagtgtttcaaagggggcaaggagaatccacaaaaccaaatgcaaagaagagtcagaaaagcgaggactggctgggcgtggtggctcaggcctgtaatctcagcactttgggtggctgaggcgggtgg

SEQ ID NO: 677250 - DNA, 1705 bp, Homo sapiens
tggaaattgtgtgtatcagaacagtgtcaaagacagaactcaatgaccaaatggaaaaataattttatttcttaatagacattaatcctttaatcaacagtctttggatatgacagatgcagctattaatacacttacctgaatcatacacaatccaaattacttcatcttgacgataacattctccctgaaatattatgaaatggtcttcctgaaaaccagaaatattatgtctgtctttgatctgttctaccagtctagtgacttgatagggtctctcaagaagggaaattcctacgcacgcacacacacacacacacacacacacacacacacacacacacacacgcttctcttctgctctctgcagtccccaatagctggaccaagttgtctccccagcctggaggtcagctcactctgttttccaaatcaatctgaatatggagtgaactgtctttggtgcttactatgttttgagatctgacctgtctaggttcttcagggtcattagtgtgtgaggcctctgaaagatggaaacttatttgtttgttcactgctgtactccaggacccaattggtgtctgccacaccagaggcactcaatatgtatgtgctgattgggtgaaaagtgcattacaggcatagggagggagagggatggggtgatttgaatgggggagaaatggagctagaaatggaaatagaatcaggcgtggagcttggcaggagaggaaggaagagaagccaggtcatgccggccctaatcaccactatgacttctgtggttgaggacgcctggagtagataatgctcagttagtattattttcataaatcaatgaatgtaagaaacagagtagggagtaaagagacaaaaagaatagcaaagcataattattctcaaaagatgaaagaaacaaaacgctgcaccttcagtaagtttccatcttggctcataaaaaaaaaaaaaaaagtctttagggcccgtctacaaggctgagattctgcagggagagtgcactgcagatcacctggccatatggccagtgtttttttcctgataatggcattttccctctattcctgcctccttcctaccctagtaagctaggctgaacagctggaggataatatgtctttcctttctttctcttaaggaccatagctcccaggcttcttggttgttggttctgggtcactgttctgagcctctctctttcccatttcacattcctaagtgctttctaagcaaaggacaccccaagaccaaaagatatgcgaaaataataggaaaaaaatgggcactaaaagtcgaaattctcaaaagtccaaacattcaacaccgcgtctgccctttcacccaatcaccttggccaaagcatccatccctctttgttttgctaatacccagtgttagaatcttttattgccaaaggtctcactttagaatgyctgcacctaggaattaagggacagggatttccctgtcaatatctgcagtggtggagaggaagccagtcctcaaacagactgagagaggtgaggggaacccaaaagagtacagcatcagggaagaagtgtttcaaagggggcaaggagaatccacaaaaccaaatgcaaagaagagtcagaaaagcgaggactggctgggcgtggtggctcaggcctgtaatctcagcactttgggtggctgaggcgggtgg

SEQ ID NO: 677251 - DNA, 621 bp, Homo sapiens
gtgctgagattacaggcgtgagtcaccgcgcccggccaactccaaagttcttatttgtttgtttaccttttggatcctgtttgtatttctgtcagtgactttggggatgatgtagataaataaatgcatcagagagcacttgtccattcataatggcccctggtcttcaccacctgtgagacagtaagacagttggtagtggcaccatttcacaggtgtggaaactgaggccagcaggtggaagaaccagactattggtgcttcagtaactgggcagagctcgggggagaacccagctacctggctggtcccatcctggggtctcctggcaccctrtcccactatggtgtacccagccctttctggagaaatgtcaccttggagcacaagtttacaatctgttgggtccaagagaggaggaggtcactctgttttctcctgtaatgcaggcagggccagaatggaactggcacaaaagtgaatggaaaaggtctggaaacacgccagccccagcagcctcctccccactcccagctcctccacaacactggagggtttatttgttcaattactctccccaactttgaaccttgttgctattctagtttgcacattcctcca

SEQ ID NO: 677252 - DNA, 621 bp, Homo sapiens
gtgctgagattacaggcgtgagtcaccgcgcccggccaactccaaagttcttatttgtttgtttaccttttggatcctgtttgtatttctgtcagtgactttggggatgatgtagataaataaatgcatcagagagcacttgtccattcataatggcccctggtcttcaccacctgtgagacagtaagacagttggtagtggcaccatttcacaggtgtggaaactgaggccagcaggtggaagaaccagactattggtgcttcagtaactgggcagagctcgggggagaacccagctacctggctggtcccatcctggggtctcctggcaccctgtcccactatggtgtacccagccctttctggagaaatgtcaccttggagcacaagtttacaatctgttgggtccaagagaggaggaggtcactctgttttctcctgtaatgcaggcagggccagaatggaactggcacaaaagtgaatggaaaaggyctggaaacacgccagccccagcagcctcctccccactcccagctcctccacaacactggagggtttatttgttcaattactctccccaactttgaaccttgttgctattctagtttgcacattcctcca

SEQ ID NO: 677253 - DNA, 693 bp, Homo sapiens
atgcatgagctaaggctcatctccacatcttcttggtttagtggttctcatagacccttgagatcttatatggtttggctgggtccccacccaaatctcatcttgaattcccatgtgttgtgggagggacccagagggaggtaattgaatcctgggggcagttctttcccatgctgttctcatgatagtgaataagtctcatgagatctgatggtattgtaagggggagtttccccatccaatctctctctttgtctgctgccatccaygtaagacgtgacttgctcctccttgccttctgtcatgattgtgaggcttccccagccatgtgaaactgtaagtccaagtaaacctgtttcttttgtaaattgcccagtcttgggtatgtctttatcagctgtgtgaaaatggactaattcaatatcccaacactcctccacctaggaatctagggttgctccatgtaaattttgtccagcacaacaaaggcttctagaagaatcaggggcagattgggtagcatctagccatgcagcccagaggcaggcttggtgcagaatggcagaggcagaaattcatgataagctttctaaggagggtggggagaaaagccaggagcaaagatatgaccaagcattgggtccagtgcccactcatgggcatctaaggttctcccatcatctcaggacatgt

SEQ ID NO: 677254 - DNA, 635 bp, Homo sapiens
ggtgatggcaccagcatgcacagggcatgatgttctccagcaggacctggagcctggaggagggcatgtggcgggggtgttttaacgctaggcttctttgggccaggtgcaatgggaggatgagagagtccggggagtcggcagatgaaacctgtggtggtgatggactccaggctgaccgagaaggaactgaaaccagaaggcagctgatgacagagagaatggtgggtccagggacacacactgagatgagatggaagaggaagagcttgggcagtaagacagtgaagaggctggaaggacggggtcagtgtgaggatgggacctggaggtaccgtctgggtggaatagtgctgaatgataacatgggaacagagagtggccttgaacttagggtgctaagatgcagttgaatgtctargaggtgggcgtccaaaggatcaaacaactcctctgagggagggcggactgcagggtgaagactggagcagagaacccgagatgagcgtggatggcaagaacagcaacacaagcagcctcagcgtttcctgccctctccccatcctcccaggttggacaagctgtctgccttgggaaatgatcagcaactttgagctcagcagtgcgtttcttcc

SEQ ID NO: 677255 - DNA, 635 bp, Homo sapiens
ggtgatggcaccagcatgcacagggcatgatgttctccagcaggacctggagcctggaggagggcatgtggcgggggtgttttaacgctaggcttctttgggccaggtgcaatgggaggatgagagagtccggggagtcggcagatgaaacctgtggtggtgatggactccaggctgaccgagaaggaactgaaaccagaaggcagctgatgacagagagaatggtgggtccagggacacacactgagatgagatggaagaggaagagcttgggcagtaagacagtgaagaggctggaaggacggggtcagtgtgaggatgggacctggaggtaccgtctgggtggaatagtgctgaatgataacatgggaacagagagtggccttgaacttagggtgctaagatgcagttgaatgtctaggaggtgggcgtccaaaggatcaaacaactcctctgagggaggrcggactgcagggtgaagactggagcagagaacccgagatgagcgtggatggcaagaacagcaacacaagcagcctcagcgtttcctgccctctccccatcctcccaggttggacaagctgtctgccttgggaaatgatcagcaactttgagctcagcagtgcgtttcttcc

SEQ ID NO: 677256 - DNA, 635 bp, Homo sapiens
ggtgatggcaccagcatgcacagggcatgatgttctccagcaggacctggagcctggaggagggcatgtggcgggggtgttttaacgctaggcttctttgggccaggtgcaatgggaggatgagagagtccggggagtcggcagatgaaacctgtggtggtgatggactccaggctgaccgagaaggaactgaaaccagaaggcagctgatgacagagagaatggtgggtccagggacacacactgagatgagatggaagaggaagagcttgggcagtaagacagtgaagaggctggaaggacggggtcagtgtgaggatgggacctggaggtaccgtctgggtggaatagtgctgaatgataacatgggaacagagagtggccttgaacttagggtgctaagatgcagttgaatgtctaggaggtgggcgtccaaaggatcaaacaactcctctgagggagggcggactgcagggtgaagactggagcagagaacccgagatgagcgtggatggcaagaacagcaacacaagcagcctcagcrtttcctgccctctccccatcctcccaggttggacaagctgtctgccttgggaaatgatcagcaactttgagctcagcagtgcgtttcttcc

SEQ ID NO: 677257 - DNA, 649 bp, Homo sapiens
tataaacaggtttaggaataaacccatgaccctcaatgagcatctcattcagtgggtggtagcaggtgtgaataggtgtgagcaggtaccctctcttacatgctaacagctaygaaaatgcagctagcatcagtcagcatcatcagggataggaatggccacctttggtcaatttggctcagcaagattagttggaggtcaattaagatgcgtctactgtacctgagtgctgtccctggagtagaacaacaaagtgctggggagccaggaaagagtggtgacatttcatctaggccctgaagaatgacttcaagttcctcaagcaaacaaggagtgtagagggaaattcaggcagaagaaaaagaattcgcaaaggcatcgaggtgttaaaagaactaggacaaggaagaaactaaaaggagcagatcctgcagtattagtaatcaacaaggatgactggctgagtctgtgattagttgaagtcccaggttatcattaatagtggggagggaagtctctaaaacatactgaaagacgtcacagcaaggttcaaatcattctctcctatctcatctatggctatttttattaggcctttgctcctggtccccgcaacccatcatccactctactccaacccacccaaaga

SEQ ID NO: 677258 - DNA, 649 bp, Homo sapiens
tataaacaggtttaggaataaacccatgaccctcaatgagcatctcattcagtgggtggtagcaggtgtgaataggtgtgagcaggtaccctctcttacatgctaacagctatgaaaatgcagctagcatcagtcagcatcatcagggataggaatggccacctttggtcaatttggctcagcaagattagttggaggtcaattaagatgcgtctactgtacctgagtgctgtccctggagtagaacaacaaagtgctggggagccaggaaagagtggtgacatttcatctaggccctgaagaatgacttcaagttcctcaagcaaacaaggagtgtagagggaaattcaggcagaagaaaaagaattcgcaaaggcatcgaggtgttaaaagaactaggacaaggaagaaactaaaaggagcagatcctgcagtattagtaatcaacaaggatgactggctgagtctgtgattagttgaagtcccaggttatyattaatagtggggagggaagtctctaaaacatactgaaagacgtcacagcaaggttcaaatcattctctcctatctcatctatggctatttttattaggcctttgctcctggtccccgcaacccatcatccactctactccaacccacccaaaga

SEQ ID NO: 677259 - DNA, 1429 bp, Homo sapiens
cgcatgcgtgagctttttataaaccagtaacaaacawcttaagagatgtggtaacatagaatggaccgtgcattcttgagtgagagacaaatcattcttctcaggtggaatcttttatttatgctttgggattccatttttccgagaaagctttggttttcctttttggctttgtctaagctgtgctttagcaagtaattcaaatcaagctgacatttattagtgaggacatggtccactccaaccttatactcacagtccagctgctgccatacaaattttgctgtggactttcctatttgtgactaagtgtgtgtaatggcaatggtgtatggttgcagatttactgtctctaagtcaatggaatgaaatcactgtgcactcccatgccataagaattaggtatcaggggtttttattttgtcattaaaagaatgacaacttaaaatctgagcaattagatagggttatcataggaatacaaggtttttagtaatgggtcctatgttgagaatgttcctattttctaagacatttccacactcttaacactttatcctcgcgataatcctggaagtcagtaaagcatacactgttatccctgccttatagttgaaccacacaactcagggaagcaaagtagtttttcccaaggtcactcagtgaaaaagtggccagtcttgggacttacactcgtagcttctgggttctactctctttctaccacagagagaaccaaagttggaaacagtactctgagatcacatccagaatatttcctcttgaaattgtcaagaattgttccttacattgacatttaaatatattccattgagattttcaataactaccattgttggaaagtgatatatttatttgggtaccttggctggtgtgatggttaaatcatttctgtgttgttaagggctttttaggacgagggtggagatggttctagaaagacctagccacacattcctatctttcttaaaggcccagaaattcatattccctggggatggaacctcttaggttcaggtgttgaaaggcccttccagtggtgttagctcccctaatggaagagttgaaaagtttcaacgatctttctgcatctaagagatattattttgtcctgatagtcatatctcctggaattccctcttgtgatttcaagaactcgctgagttaaccattttttgagtgtctattacaggctgcagggctcagtcctccctttggtgatctcaccatgttttcttgtttgcaggaactgtatttgggagcaaacagtcgattttgctaagataagtggtagactaaagacactgaaacatggtttttctacttgagttactctgctcttacagaatatcccattgagtgaatgctggatgcaggtggttccttttaaacctgaatcaatatgttc

SEQ ID NO: 677260 - DNA, 1484 bp, Homo sapiens
ttcaattcgagctcctcatttctcaaggttcttcatgggaatcgaaatttctcttccttttctctctttacttctgacttggagttagaacgatgcccgtgtttccaagtgcaggcaattgagtagtggggtcttggacctctggcagtgaaaggaggaggctgatggcctggtcttctggaggttgatgtgcaccctggcttccagttcctgggaaccccacatctcagacaaccatgctgattggtttgggacagtagaagccccaaatccaatttgaagcctgctggggattcctgagtaaatgaacttctgggcagggtctcagagaggctatgatctgagcaggaaagtgtttgtggcatgtaatatgaaagaacaaagaaaccacaagcgtgctgtgtatcgccccaaatgccaggcgtgcccattcatgccagtgagatgagggcgctccagatgagaagcgctgaaaagtgctgacccagggggcaaaagatgattggccagactgtttcactagcgcacttctgactcatcagagatactctcaaaacattcgaaattcactacttatttagtgtgcgattctgcccaagtgtatgtgttttcaaacagggtctctgggactaaagccaaggaaggtgtgcggtgcgttggctgagggtggtcttcagtattaaacaatcctcaatctgagtcctggctctaccacctacttgctgtgttatttttggcaacttgtcagccctcattagtctcagttctctagcctgaaaatggggattatagtagtgcctacttcacgtggttgctgtgagaattaagagaggtaaagtatgtgcactggctacttttatgcatcagcctggctaggttatggcacccagttgtttggacaaacaccagcctagatgttgctgtgaaggtctgtttgagattgacggattttttaagcagtggactttcagaaaagcagagtgtgggtgggcctcatccaatcagttgaaggccttaagagaaaacactgaggtcccctgaagaggaaggaattctgcctccagactcaagactccaacatcgactcttccctgtgtctccagccccctggcctgccctgcagattttgcacttgccagctgccacaattgtatgagccaattccctaaaataaatgtctctttctctccctacctctctatcatttattatatatatatatatgtatacatacccctattgcttctgtttctctggagaactaatacgrtatatacaaaatactgatcacgattcctgacacagtatgtgcacaataaaagtatgaataattccctaaataataaagccttccatacctggatgaaattgcagatgcctgcaggaacattattaggagactggggattagggaggacaggagacctgctcctcaccctgcagcatgcaatttcggtagtaccagctctgggagtggagcctgc

SEQ ID NO: 677261 - DNA, 626 bp, Homo sapiens
gtcctccgtggtgttacctaaaaataaagttatttgtgattagaaggtaatcgcctcctggtcatgcttccgctggtcamcagtgtctgcggggcgaccccatccttgtggccagagagggcctgtggctgcgctcaaggcgggagcggtccttagcggggccctgcgggacgcccaggccgcgctcctttcccttgctcgcctggccttgaagtgaagggggaggtttaacaatgcagtgggaaccccaaagtttgtctcggccgtgctgctcacattccaaacaatgcaaaaggttgaggaaaacctcagcagttgaaaccgtgatgcatttcagcaaagaagtagctcctgtcctcgtaaaatcagtgaagttctcacggacgacctcattgagtgagttgtgaagcttgttgccttaatcagaatgatcagccagcatgcatgctctaatatgctcgtttgtcaatgatatgagcagctgcaaagtggaagaagaggcctttactcatagtctgttcacttggtagcacaagttggttgtggaagcaagagtgtggccaaagtcaagaaaagcttctatgagaatcgcttacttatgtggaatttaaataaaaagtagtgta

SEQ ID NO: 677262 - DNA, 626 bp, Homo sapiens
gtcctccgtggtgttacctaaaaataaagttatttgtgattagaaggtaatcgcctcctggtcatgcttccgctggtcaacagtgtctgcggggcgaccccatccttgtggccagagagggcctgtggctgcgctcaaggcgggagcggtccttagcggggccctgcgggacgcccaggccgcgctcctttcccttgctcrcctggccttgaagtgaagggggaggtttaacaatgcagtgggaaccccaaagtttgtctcggccgtgctgctcacattccaaacaatgcaaaaggttgaggaaaacctcagcagttgaaaccgtgatgcatttcagcaaagaagtagctcctgtcctcgtaaaatcagtgaagttctcacggacgacctcattgagtgagttgtgaagcttgttgccttaatcagaatgatcagccagcatgcatgctctaatatgctcgtttgtcaatgatatgagcagctgcaaagtggaagaagaggcctttactcatagtctgttcacttggtagcacaagttggttgtggaagcaagagtgtggccaaagtcaagaaaagcttctatgagaatcgcttacttatgtggaatttaaataaaaagtagtgta

SEQ ID NO: 677263 - DNA, 626 bp, Homo sapiens
gtcctccgtggtgttacctaaaaataaagttatttgtgattagaaggtaatcgcctcctggtcatgcttccgctggtcaacagtgtctgcggggcgaccccatccttgtggccagagagggcctgtggctgcgctcaaggcgggagcggtccttagcggggccctgcgggacgcccaggccgcgctcctttcccttgctcgcctggccttgaagtgaagggggaggtttaacaatgcagtgggaaccccaaagtttgtctcggccgtgctgctcacattccaaacaatgcaaaaggttgmggaaaacctcagcagttgaaaccgtgatgcatttcagcaaagaagtagctcctgtcctcgtaaaatcagtgaagttctcacggacgacctcattgagtgagttgtgaagcttgttgccttaatcagaatgatcagccagcatgcatgctctaatatgctcgtttgtcaatgatatgagcagctgcaaagtggaagaagaggcctttactcatagtctgttcacttggtagcacaagttggttgtggaagcaagagtgtggccaaagtcaagaaaagcttctatgagaatcgcttacttatgtggaatttaaataaaaagtagtgta

SEQ ID NO: 677264 - DNA, 625 bp, Homo sapiens
tgtggttcagaaaccacaatggaaaaaaaaaaaaacaatgaaacaagctgttttaaatcactatcaagagctactcccaaacacgtatctagacatacayagtgatacgtgcctaagaacttatctctttctcttacaaaacacaaacccagttcagcaatacttacagtcaacattggagttgtcaacaggccccacgcaaagaattcaaggaagatgacaatagcagcatggtacacacttggtcggccaaagccttgtagctaaaaaagaaagttattatgaaaattagcaaagaaatataagaaatctattatcttaaaatggtatagaaaaaaatgtgtaaaaatgtgtaaaaaaatttagggcctacctctgtcatttaaaataaaacttcattctgtgttatccttgatgccttcactttccctaataagggaaggtgctaagattacagactttcggttgggcgtggtggctcaagcttgtaatctcagcactttgggaggccaaggcgggcagatcacaaggtcaggagttcaagaccagcatggttaacatagtgaaaccccacctctactaaaaaatataaaaattagccaggcatggtggcaggctacttggt

SEQ ID NO: 677265 - DNA, 1259 bp, Homo sapiens
  misc_feature 924, 925, 926, 927, 928, 929, 930, 931, 932, 933, 934, 935,936, 937, 938, 939, 940, 941, 942, 943, 944, 945, 946, 947,948, 949, 950, 951, 952, 953, 954, 955, 956, 957, 958, 959,960, 961, 962, 963, 964, 965, 966, 967, 968, 969, 970: n = A,T,C or G
  misc_feature 971, 972, 973, 974, 975, 976, 977, 978, 979, 980, 981, 982,983, 984, 985, 986, 987, 988, 989, 990, 991, 992, 993, 994,995, 996, 997, 998, 999, 1000, 1001, 1002, 1003, 1004, 1005,1006, 1007, 1008, 1009, 1010, 1011, 1012, 1013, 1014: n = A,T,C or G
  misc_feature 1015, 1016, 1017, 1018, 1019, 1020, 1021, 1022, 1023: n = A,T,C or G
cattcactgttctcccaacgtccacacactcagaaaaacactgctacctgctcatgctagccttctcactatctacagcaaacaccaagaaaactcagtattcatcacaattaacatcaactccatgcgttctcagagaggaggaaagaccaggcaggaatctacctgtgcccaaaattaggttaccawcaggatccaacggagaaagaactggggaataaactgagtctaggtttctttgagtaaacatccctcgcaagtttctgctcttaagcacacaaatttagcaactttaatttctaggttggggtctagttcctgtcaacactaggaaatgggagacaactacttttatcacggtcagatcacctatagattgtgatcattcaatcatacatgcaaagaatattacaaaatactaacaacattagtatgtattaaggggcttactagatgccaagttgcagcaaccctcacaaccctctgaggtaaatgccattattaatcaggagttacgttaacttatcgaactgtggaaactgggatttcaagcatgctcgtctaatcactatactaataatgcttcaacctgccaatttatttttttattctgtaagccataaggagccaatgaaaaaaattaaggacagcagtaatgatcatctttacatgctagaacacactactcagccacgtgcaaggtggactgacgctggggtgagcaagggtcttgaaagagatagtcaaagtctgggtcaaaaatgctgaggaaattctgagcataagaatgcataggagaggataaaaacctaaaatctgtatctaataaacttagctagacttctgattgttttaagtctgggaagggatgaaggaagctacctcgcaggttactagctgggccactggattagtaattactgnnnnnnnnnnnnnnnnnnnnnnnnnnnnnnnnnnnnnnnnnnnnnnnnnnnnnnnnnnnnnnnnnnnnnnnnnnnnnnnnnnnnnnnnnnnnnnnnnnnntcaaaatgagagcaagcaattatacagaatttctctccctcgacaaaataagcttctcatattacagagatcttaactttgaaatgcttttcaaaatagggagtcacttgggctgggaggggacttcaactaagtcctcattttacagaggaggcactgaggggcaaggctgtttcaataccctgtccagagtgcgcactgttcaggcaaaaccaggactaaaaaccagctctgcc

SEQ ID NO: 677266 - DNA, 1259 bp, Homo sapiens
  misc_feature 924, 925, 926, 927, 928, 929, 930, 931, 932, 933, 934, 935,936, 937, 938, 939, 940, 941, 942, 943, 944, 945, 946, 947,948, 949, 950, 951, 952, 953, 954, 955, 956, 957, 958, 959,960, 961, 962, 963, 964, 965, 966, 967, 968, 969, 970: n = A,T,C or G
  misc_feature 971, 972, 973, 974, 975, 976, 977, 978, 979, 980, 981, 982,983, 984, 985, 986, 987, 988, 989, 990, 991, 992, 993, 994,995, 996, 997, 998, 999, 1000, 1001, 1002, 1003, 1004, 1005,1006, 1007, 1008, 1009, 1010, 1011, 1012, 1013, 1014: n = A,T,C or G
  misc_feature 1015, 1016, 1017, 1018, 1019, 1020, 1021, 1022, 1023: n = A,T,C or G
cattcactgttctcccaacgtccacacactcagaaaaacactgctacctgctcatgctagccttctcactatctacagcaaacaccaagaaaactcagtattcatcacaattaacatcaactccatgcgttctcagagaggaggaaagaccaggcaggaatctacctgtgcccaaaattaggttaccatmaggatccaacggagaaagaactggggaataaactgagtctaggtttctttgagtaaacatccctcgcaagtttctgctcttaagcacacaaatttagcaactttaatttctaggttggggtctagttcctgtcaacactaggaaatgggagacaactacttttatcacggtcagatcacctatagattgtgatcattcaatcatacatgcaaagaatattacaaaatactaacaacattagtatgtattaaggggcttactagatgccaagttgcagcaaccctcacaaccctctgaggtaaatgccattattaatcaggagttacgttaacttatcgaactgtggaaactgggatttcaagcatgctcgtctaatcactatactaataatgcttcaacctgccaatttatttttttattctgtaagccataaggagccaatgaaaaaaattaaggacagcagtaatgatcatctttacatgctagaacacactactcagccacgtgcaaggtggactgacgctggggtgagcaagggtcttgaaagagatagtcaaagtctgggtcaaaaatgctgaggaaattctgagcataagaatgcataggagaggataaaaacctaaaatctgtatctaataaacttagctagacttctgattgttttaagtctgggaagggatgaaggaagctacctcgcaggttactagctgggccactggattagtaattactgnnnnnnnnnnnnnnnnnnnnnnnnnnnnnnnnnnnnnnnnnnnnnnnnnnnnnnnnnnnnnnnnnnnnnnnnnnnnnnnnnnnnnnnnnnnnnnnnnnnntcaaaatgagagcaagcaattatacagaatttctctccctcgacaaaataagcttctcatattacagagatcttaactttgaaatgcttttcaaaatagggagtcacttgggctgggaggggacttcaactaagtcctcattttacagaggaggcactgaggggcaaggctgtttcaataccctgtccagagtgcgcactgttcaggcaaaaccaggactaaaaaccagctctgcc

SEQ ID NO: 677267 - DNA, 813 bp, Homo sapiens
tgtgcccatgtccttaatcttcttggtgcaagatgatgaactgcaggtatttccccagacaatgaagctgcttcactttgagtccctcctcttatcagtttacctatgtctgctgtcctgggttaatcagttggtggctgataggggattggaatctgttcctttttctttccaattatgtgaacktggagacttctgtaagttgattttctctgaaaagttctattcaattcaccaaacgtatttgaaaaccagtgtttaccaggccctgtgataggcaccacgggtacagagataagaagaaatgtcatccttctgaccttaatctcaattttgaatccagtagagaagatagacaaataacaagtgatttaatggagtgctgaaattataatagaagagctaagagactagatagaggaggaggtgcttctctcccagggttgggaagaatcactagcagtttccaggctccaagtgtgggatggatgtgcgtgcaaaggcctgttggcacgcaggaacattgtatgtccagaaaactggaagtatcgcatgcagccacagcagaggatgtgtgtcaggagccgggttttggagtgtcctatttatgtgatgtgctgaggaatttttaagatgtatcatgaaaattcagatacacaaaagaatagtgtgatgaatacctgtgtactcatcacctatttcattattcatcagcatttttctactcttgtccatccctgctctccccaccctgctgcttatctgtagcattgaaatgaaggtggccagccaacagagtgactggcaaatagt

SEQ ID NO: 677268 - DNA, 813 bp, Homo sapiens
tgtgcccatgtccttaatcttcttggtgcaagatgatgaactgcaggtatttccccagacaatgaagctgcttcactttgagtccctcctcttatcagtttacctatgtctgctgtcctgggttaatcagttggtggctgataggggattggaatctgttcctttttctttccaattatgtgaacgtggagacttctgtaagttgattttctctgaaaagttctattcaattcaccaaacgtatttgaaaaccagtgtttaccaggccctgtgataggcaccacgggtacagagataagaagaaatgtcatccttctgaccttaatctcaatttygaatccagtagagaagatagacaaataacaagtgatttaatggagtgctgaaattataatagaagagctaagagactagatagaggaggaggtgcttctctcccagggttgggaagaatcactagcagtttccaggctccaagtgtgggatggatgtgcgtgcaaaggcctgttggcacgcaggaacattgtatgtccagaaaactggaagtatcgcatgcagccacagcagaggatgtgtgtcaggagccgggttttggagtgtcctatttatgtgatgtgctgaggaatttttaagatgtatcatgaaaattcagatacacaaaagaatagtgtgatgaatacctgtgtactcatcacctatttcattattcatcagcatttttctactcttgtccatccctgctctccccaccctgctgcttatctgtagcattgaaatgaaggtggccagccaacagagtgactggcaaatagt

SEQ ID NO: 677269 - DNA, 813 bp, Homo sapiens
tgtgcccatgtccttaatcttcttggtgcaagatgatgaactgcaggtatttccccagacaatgaagctgcttcactttgagtccctcctcttatcagtttacctatgtctgctgtcctgggttaatcagttggtggctgataggggattggaatctgttcctttttctttccaattatgtgaacgtggagacttctgtaagttgattttctctgaaaagttctattcaattcaccaaacgtatttgaaaaccagtgtttaccaggccctgtgataggcaccacgggtacagagataagaagaaatgtcatccttctgaccttaatctcaattttgaatccagyagagaagatagacaaataacaagtgatttaatggagtgctgaaattataatagaagagctaagagactagatagaggaggaggtgcttctctcccagggttgggaagaatcactagcagtttccaggctccaagtgtgggatggatgtgcgtgcaaaggcctgttggcacgcaggaacattgtatgtccagaaaactggaagtatcgcatgcagccacagcagaggatgtgtgtcaggagccgggttttggagtgtcctatttatgtgatgtgctgaggaatttttaagatgtatcatgaaaattcagatacacaaaagaatagtgtgatgaatacctgtgtactcatcacctatttcattattcatcagcatttttctactcttgtccatccctgctctccccaccctgctgcttatctgtagcattgaaatgaaggtggccagccaacagagtgactggcaaatagt

SEQ ID NO: 677270 - DNA, 813 bp, Homo sapiens
tgtgcccatgtccttaatcttcttggtgcaagatgatgaactgcaggtatttccccagacaatgaagctgcttcactttgagtccctcctcttatcagtttacctatgtctgctgtcctgggttaatcagttggtggctgataggggattggaatctgttcctttttctttccaattatgtgaacgtggagacttctgtaagttgattttctctgaaaagttctattcaattcaccaaacgtatttgaaaaccagtgtttaccaggccctgtgataggcaccacgggtacagagataagaagaaatgtcatccttctgaccttaatctcaattttgaatccagtagagaagrtagacaaataacaagtgatttaatggagtgctgaaattataatagaagagctaagagactagatagaggaggaggtgcttctctcccagggttgggaagaatcactagcagtttccaggctccaagtgtgggatggatgtgcgtgcaaaggcctgttggcacgcaggaacattgtatgtccagaaaactggaagtatcgcatgcagccacagcagaggatgtgtgtcaggagccgggttttggagtgtcctatttatgtgatgtgctgaggaatttttaagatgtatcatgaaaattcagatacacaaaagaatagtgtgatgaatacctgtgtactcatcacctatttcattattcatcagcatttttctactcttgtccatccctgctctccccaccctgctgcttatctgtagcattgaaatgaaggtggccagccaacagagtgactggcaaatagt

SEQ ID NO: 677271 - DNA, 1067 bp, Homo sapiens
aatggcatgcctatctcattggacagaccaagcagcattcattaaatatttacaaaataactgcttttcacaacttttcaaacaatttattaaccacaacccaaattaatgcaaactaagaggccaagaactgtttttgtaaatattcttatctctaccaagattttttttttatttttttgtgggtacatagtaggtgtatatgtccaacattctataagagtgaaaatactcaactccaaacgattcattcactcaacaaacatttgttaaccttgactataccagctaggtgttggggacaatggtgatacagtccttgctctcatttcacggaatgtaaaattataaatggaaatatacgctctgaaggaaaaggacagaggttattgagtatatyacaaagacccctgagcaatatctgggcaaaaagtataattatcctataacagcagcaacaatagcagcaacagatattatgcggggccctaatcaaagcacattatatatacataccttcattttatcctcactacaacctttgagataggaactattattatcccgatttcatagatgacaaactcagatgcagagaatttaagcaactttcccaactcacatagtaagtgcatgaactggtattccaccaagatagtcacacacctccagagtatgtgctactaaccactgtaatacattacttttcttatacagcccaaatgtttccacaaatagaatcagtacatacatatggcagccagcctgcattgcagcaacctgagtaagtgacaggagtcaaatgtagctagttcctcaggcaaagcaaagcgtagaccttcacttgaccactaaccctgttccccacactaaggagttctaacctgctactgtgtacttgagcaaaagggcagtctctaccaaccccttcgcctactttctcaatatgacccaaaaagttcagatgaactaggcacctggcttttctcaatcaatcaggtcatctgctgtccatcaaaaaaagataaggttggaagctgttcccacacatgatggccaactcaaag

SEQ ID NO: 677272 - DNA, 650 bp, Homo sapiens
aagtgggtttgtgctttgcttatctgattacaatgtcaagaacttctgtagaacatttcattcaagtatttgggtgatattttcttcgggatttatctatatcactaattcttttttttttttttttttgagacggagtcttgctctgtcgcccaggctgagtgcagtggcgtgatctcggctcactgcaagctctgcctcctgggttcacgccattctcctgcctcagcctcccgagtaccwgggactacaggcgcctgccaccacgccaggctaatttttttgtatttttagtagagatggggtttcaccatgttagccaggatggtctcgatctcctgacctcgtgatctgcccgccttggcctcccaaagtgctgggattacaggcgtgagccaccgcgcgtggcctactaattcttaattacacatgacaatgggtatatcattcagggtataatcagagaaacagaacacctgtatggtgcctggtatatggtgggctcccagtaaataatcatttataatgaatgaaaggtcttctgatacttagcaaacaatatggatactctgtgtctacaataggaaagtcatcatgaattcattttttagtgtaattaccatctgatgtacccatgtcaaacatatcaa

SEQ ID NO: 677273 - DNA, 655 bp, Homo sapiens
acaagttactggaagctgaatgcagactaacatgagactgaaaaactcgtgggatctgtattcctggtgatttcctacatacttgcagattttttttttcatgtatctgaccaggttttcaaggggatcagagaaagctccccaggtagaatcaccaagaaaaagaaaaaagcagccattatgaaacctacccagactcttcaccctaacaaaagcctgacttccaggagaaagtacttcaccacagtggaatctgaaaactttaacctagtagagtaacaaacttccacaccaaaccagttatctctagccttcctgtctcacctaagacaaatataaataaatacaagccatagtcaacagggaagagggctttgaagaaagagtctgcaaacagtattacccaagaagagactagggggcaggaagggggaaaaaagggacgagatacttctgaagggcacagccccrgaagacaggcccactaaataaaataaaatttatatagatagttctataatgtctccctaagccaccaaaacaattcaaacttctggtgcctacaatgacaataaactttaaacacctttcaacttctagaaagaatcatataaaatcttgctctttagaggtttcagcctatttatctcaataa

SEQ ID NO: 677274 - DNA, 1092 bp, Homo sapiens
tttcttccctgctatataaacccctaattttagtcagtcagagagatggatttgagactgatctcccatctcctcacctgcagcacctgaataaagccttcttccctggcagtactgattatctcagtgattggctttctgtgtggtgaacagcagcaggatcaagaccgaaccactggtgttttggtaacattacctctcagtgtcacctaaacacatacacactcattcattcttctgtttttaagtggaaaaaaaagagtgtgtgtgtgtgtgtgcgcacacgcacaatataaactctttgagagcaaagactaacttaataaacacaaatactaggtaaatgctaaccagcttacccccaatgcagagagcttacaaagcagtytttgagcatgatgataaagtaaaacatgtttctggaactgcacacagaggtttgcagagatttcctcttgtcaaaggtaagtacaaaaaaatccacaagggtttggctggctccaatggagcaagagaggtcactctgggccctgagttatcaccttaaggggccggagcagctggcagttggaacactgagctggacattggtttggagaaattagagctagctttttctgcttttgacaacagccttgaccacacaaagggctacatttaggttggcatttgcctaggatgtaacgcccatttggccgtttggagtcgattttccacccctcttttcctactggcacacagctgtgacccttgggtcttggaaacacctgtggagatttagccttggtaacaacagagttcttcccaggtcatcagaacccatctgcctcctagactagagatcacttacttacggacatttctaaataaaggatgacaaagtaactggatcaactacatgtttaatcattgctatttaaatgtgatcatttctcaatttcaaatttaaaaagtgtaaacttaaggaaagagaaataatgccagggactaaatagtattaaatctccctccatgtgagtgccccagatgtcctattctataaaattctcccccttccctttttgccttcagctcagcagacaccctttgctg

SEQ ID NO: 677275 - DNA, 430 bp, Homo sapiens
tggggagggggtccaatggcccccagttgagcaccactgttgcagccaaaggtgtcrtaaagaatgtgaagacctttttattctgacctccgacgttgctggagagccccaggagggcaaaagtcactgcctatgtccacaccccagagatgttgcaaggatcaaagtgagctcaggtgtgtgagaaaagcaaacacacacaaggtgttactaagcattacccgtctttgatgctgctgatgcattgatagcaatgttgtagtttccatttattcttagatttcataggcagagatgtttaacttaacagatggccagcatggatagtgaatggaattttccctcagcaaaggcagagcggctcatgagactttcaggcttttccttgctcagaaattctggattctcacccaattcatcaatcccaatt

SEQ ID NO: 677276 - DNA, 604 bp, Homo sapiens
aatacaagcacacagagactctttgaagctgaatgtctaagggaagaacagcaaagataaagggatcttacaagagtagatcacatggtgtggtgtatgtgtgttattcttattaggttggggaaacagaaagggttgaaacatttaaactctgatccaaagcatttattagcacttgaattaaagaggtattcagatggaaagaacagatcttatgcttagtaagtatgcacaattaggaaagtttatgacatagtcaggaattaaaaaaaaaaaagtttagtaaatttggagtgtgcagtgggaagaatgagatgttcctggagagaaaaacagaacctgaattatgaaggacttttctagtcatctcaaagaarctgggtttaaagccaagagtttttaagtggagataaacatgatcagacacaagctttcagaagagtgcattgcaatgagggttaggactgggaagatgatgtgtcaatgcaaaaatcttaaggccagttgcaaagctgtggattattcagaataggaattttcatcttaatgtgaacatctgtggtggatttggatgaatagagtgaagggattctaaagatatttt

SEQ ID NO: 677277 - DNA, 2351 bp, Homo sapiens
gcctctcttcttccaaaattattaaaataaaattataaaagagcataaaaggaaataaacacatcatgaaataaaaaaggaggcaatttctagtggcaagagaccttgtaaaatttctggaacagaaagtgtctggaagtatttgaaagatgaagtgttttgttagtttttttttgagacagggtctcatcctctcccaggctggagttcagtggtattatcatggctgactgtagcctctaccatttaggcttaaatgatcttcctgcctcagcctcccaagtaactgggactacaggagtgtgccaccacacccagctaattttttatttcattttaatcttttttgtagtgatgggccctcactttgttgcccaggctggtttcaaactcctggactcaagcaaccctcctgcctcagcctcccgaagtgctgggattacacatgtcagccgccggaccaggtgagggatgaaattgactgtagtgatgagcagttatggtctgaattttccaggaagtagaccgaccaagattaggcatgctggaagtttattagagaatgtgcttagcattgatacctgagaggggaagaaaagaaagcaagtttgggcacacagagaaactcgagttgcaatacaaatgcagtagaggcttcagctggccccagacaaaagtctgaagctgtcatggaccttcagatttgtctcgttttagggctagaggatgggcttttataaatatcaaccagtcattggcgtgggctgcctgggaaggaccctgatcttagacaagacagcttagagtagctgagtgcaggataaagtttaagggaattgctgaggtgcttccctttgagagatcaggatctctaacacttcagagtacagagttgtgggaaaaagaaacatattctccaggaaggttactaggagtgatggtagatgaagaattccctattttgactcctgagttcctagacctatgtagtctatctactgggtacaactccatatgataattgcagatatgggaattgtactgtttcctggcagaaagtgaatctcttcaaagggaattatctccaaggtggcaccccagctgtgccatcaatggctccatcattcccacaggccagcagcttctgatgggtgtggtttaggataggaccagtgaatgccttggtcatggggcaatttatgcttctgttcttgtcatgattcgatattatatgtgatgcattggctatgaatcaatctataagccctttaatagtgacacttattgagggtttgtaggtgagaaaagcaaaatgtaaaaatgatagaaatgtttataatcaaaagtaactcttggtcaaaagaagtccactgtgttgatttgccaccatgtggcccactgacttattcaaaggatgatgctgtaataagggctcagtgcctgtccctcctcctggcaggttggatgtttagtagaagcagtagacagatcaaactcgatgagtgggagccaccttgatgcttccattcacaactgggtcgcccagagacagagactgtctgataacagtgggccaagtcaatgtgtctacttgttattcagtgcctctttcagaataattgccatctggtaggcattagcatgaagtacagtgatcttcacattacgttctacctcccataggtccatccagactcttctacccaagcctacatctccaatcttctaatcttccagggccctgacaaagcctttggtttctcyctattagtttgtgtaaattctcaccttaggtagcttcaatttccacacaaaatgagagatcaggtaaaaaagttctgctgaaaagttctgcccattgggaagattttccatttgtgctatttttcaaggctgtccctgagtgggcctgtatgacagctacattttgttccagtttactctgatatatggagccaaatcatatttgtttcaatttgcatttgaaccaagatgggccattttcctccatcttctccacaaaaggaaccctcccctttaaggaaaatattgcattagctattgtttaggggcatatgaagaagaaagacttccgttactatcttcttgcttagtcattatccaggggtcattctgaagagtatgacctcagaccaaatactgaggcatatctagagagaactaaaatagaaaatatcagccaatcaatttttgcagctggaaagcaaggccgttcttgaagggttatctgacctgcatatcttcattcaacatcaatacataaaatttaattttgtttttatatatcaccaataagctactaaaaataaaatgtatatctttttctttct

SEQ ID NO: 677278 - DNA, 1657 bp, Homo sapiens
tgcatgatgacaatagcccaaaaattaccttataaaagttccccaccttttttttcagaaagttctaagtaatctgcctcttaattaaaagtgggtataaaaacagctgccaacagcccatacactgctactctgggcatactgactaagggttagtcctgctccaccaaaagtagtacctctgctgctgctgtacacttcaataaaagttgctaataccttcagctcacccttgaattctttcgtgggcaaagccaagcaccctgtcaggctaagccccaatttggatgcttgcctgcccctatcaaatttactaacatgaatagccaatgtgatgttatttggttgggtgtggtgagaaaactggcacaaaagcctatctctctagcctcggcaggactaattctgtggtgcacattatatttccttctgtgtcaactaagactagacttcagctaaaactatattgttgtttgggtttacctgttatggacttaagtgtgcatctaccaaatctccaggttgaaatcctaacccccaaggtatttggagatgtggtctttagggaggtaactaaattaaatgtggtcataagggtgaatgctaatctaacaagacttgtatccttataagaagaagaagagatgccagagatctgtccctctgcaagcatatggaggaaaagatgggataataaaccaagaagtgagctgtctgcaagtcaagaagaaagccctcaccaggaatggaattgttcagtactttggtcgtggatgtttagcttccatatctgtgagaaggcaaatatctgttgtttaagccactcagtctgtggtattttgttatgacagtttgagcagactaataaatccccttctttatctattattctctttcttataagcttctcttgctagaatacccttaatgcatcacttacataagaatacccatcttaggttctgggtctagaagtactgaatttaaagagtgatttattggaatattagattaaagaaaaaagtgtggggatatctccagaattggggctgtgatactgaaagcagataatagagaaaacatgggatttgattctttctgtcactaactaagggtggtaatttatttgtcagatcatctactttaatgagactgaatttctccatttttaaattggattactatgactttaaaccagtacacgttctgcttcctccacaaaattatacacatcttaagtttatacatggcattcaacctatttttttgttgaaattcttcttcttttgaaggtwgtgactgatcagttgtgtttttcacttattaatctcataaaaaacagtacttagagcccaaaggaatatctcataccttatgtatggctcaatgtcccttttacaaatggagtaaaaaaaacctagaatatttattacattacctatatagatatatctctgtagctattctaattctttcaattaacgacagtcatttggagaaaaagtagctgtcttaatcaactatgacatgcaagatatacagtagtcctcccttacctgaagctttttttctgccattttagttacctatggtagagtaaaataaaatattagagagagaccacattcacataacttctatttcactacgttgttat

SEQ ID NO: 677279 - DNA, 1657 bp, Homo sapiens
tgcatgatgacaatagcccaaaaattaccttataaaagttccccaccttttttttcagaaagttctaagtaatctgcctcttaattaaaagtgggtataaaaacagctgccaacagcccatacactgctactctgggcatactgactaagggttagtcctgctccaccaaaagtagtacctctgctgctgctgtacacttcaataaaagttgctaataccttcagctcacccttgaattctttcgtgggcaaagccaagcaccctgtcaggctaagccccaatttggatgcttgcctgcccctatcaaatttactaacatgaatagccaatgtgatgttatttggttgggtgtggtgagaaaactggcacaaaagcctatctctctagcctcggcaggactaattctgtggtgcacattatatttccttctgtgtcaactaagactagacttcagctaaaactatattgttgtttgggtttacctgttatggacttaagtgtgcatctaccaaatctccaggttgaaatcctaacccccaaggtatttggagatgtggtctttagggaggtaactaaattaaatgtggtcataagggtgaatgctaatctaacaagacttgtatccttataagaagaagaagagatgccagagatctgtccctctgcaagcatatggaggaaaagatgggataataaaccaagaagtgagctgtctgcaagtcaagaagaaagccctcaccaggaatggaattgttcagtactttggtcgtggatgtttagcttccatatctgtgagaaggcaaatatctgttgtttaagccactcagtctgtggtattttgttatgacagtttgagcagactaataaatccccttctttatctattattctctttcttataagcttctcttgctagaatacccttaatgcatcacttacataagaatacccatcttaggttctgggtctagaagtactgaatttaaagagtgatttattggaatattagattaaagaaaaaagtgtggggatatctccagaattggggctgtgatactgaaagcagataatagagaaaacatgggatttgattctttctgtcactaactaagggtggtaatttatttgtcagatcatctactttaatgagactgaatttctccatttttaaattggattactatgactttaaaccagtacacgttctgcttcctccacaaaattatacacatcttaagtttatacatggcattcaacctatttttttgttgaaattcttcttcttttgaaggttgtgactgatcagttgtgtttttcacttattaatctcataaaaaacagtacttagagcccaaaggaatatctcataccttatgtatggctcaatgtcccttttacaaatggagtaaaaaaaacctagaatatttattacattacctatatagatatatctctgtagctattctaattctttcaattaacgacagtcatttggagaaaaagtagctgtcttaatcaactatgacatgcaagatatacagtagtcctcccttayctgaagctttttttctgccattttagttacctatggtagagtaaaataaaatattagagagagaccacattcacataacttctatttcactacgttgttat

SEQ ID NO: 677280 - DNA, 623 bp, Homo sapiens
tgtttattctagttagccatttgtctaatcttttttcaaggtttttagcttctttgcgatgggttcgaacatcctcctttagctcagagaagtttgttttaccagtcgtctgaaaccttcttctctcaactcgtcaaagtcattctccatccagctttgttctgttgctggtgaggagctgcgttcctttggaggagaagaggcgctctgatttttaraattttcagcttttctgctctgggttctccccatctttgtggttttatctacctttggtctttgatgatggtgacatacagatggggataggtgtgtgttggggtgcctgtctcttgcgagtactcaccacggtggtggagacaatgcaattgagggtggtggggggcccctgctggtgactgtgtgtgccattgcactggaggtggtgttggctcatgggtggggtgctggcaggcacaggtctgggtgccttctctgtttcctggaagcaggagtgggccgtaaatttcttacctgcatcaagtgaaggctaaatgatgtcatgttaggtatacaaatgaagttgttctctagctcacctgcagcatatttagtccatcaccaaagggcacatttagatgttt

SEQ ID NO: 677281 - DNA, 1818 bp, Homo sapiens
catatttacaaacacatattgacaagaataataaatgaaaaactggtatccttccaaaattctgggttaatatatatacgtttccttttcctaaccactatgtattttaaaagataacattcagagaatctaaaataaatatggtggctgggcacggtggctcacgcctgtaatcccagcactttgggaggccgaggtgggtggatcacttgaggtcaggagttcaagacttgcctggctaacatggtgaaacaccatctctactaaaaatacaaaaaaaaaaaaaaaaaattagcatgcacctgaaatcccagctacttgggaggctgagtcaggagaattgcttgaacccaggagatgtaagtcacagtgaactgagatcgtgccactgcactccaccctgggtgacagagcaaaactctgtctcaaaataaataaataaataaataataaaataaacatgccaattaaaaagagtayttaaaaaagcatacagagtattcttcattgccccactgtagattaaactgtgctcacaggtaaaaatctgagcagatggtttataaggcattacaataaatgtagaatatgggtattatttccatatggctgctacattagaaatctgcattgaattaaagagtatctgtcatgacagaaacaaaactacagtagacatatcatatcaatacatttaacctgctttaagctattggctatgaaaactaaattactcctatctatgcaatgattgcattgccaattatctgtgagagaaaaattcaatatgttatctatactgattctctttaatatccatacattcatttgcatatgtaggccacttctaaccacacttctcaacaatcaaatgatgatggaaatatttagtttttttctttttcaatatggagcctacaaagtgtatgttcaattcacttatctgtaagatataagtcagacaactggggagagaagaagaggaatgattttaatgttgttaaattcaacaaatgattaaatgtaaacactgttaaatgtttttagttttaagagcattcaatagagaataaatgcttatatatactaaaatcagagtcacttccactttgtttaaataatttaaagttattttatccctgtgtctcagaagatagcttagcctaagttaaatgcaccctaggttgttttgacagctttgaaatctggatctttaatatggcttaactactgatgtgctgttctgctcttacatatggctgtttctttcatgcattttcaaaaacaagaaagagttgaaccaagcttatgaaaagctcatttggacatgtatattcttggaaagttaaaaatgtttatttctacttaaggtttgacatttagatactgattatggaataaactgctatacaaagaaaaaagacttaaaaaatttcacacaaaggtactatctttagaatgttaagatgttttagaagaattagaaggaaataaatttaaattcttatctttatattattttataatatcaaaataagttaaatttaccatctgatatttttatataataaaaatgagctaattaaaaaataaggaatatatcccacatgtgaagaaaaatatttgtagtagtgtttttatgagaatttatctatgctgaataaaccagacaaaatagaattcagtcaacccagttcttactagatctcctcaatgtagtaccagaagctctgtttttttattaatggaataaagtttcaaaattaagatgactagtctcaaacagattttacagattagaaccagactgattcttca

SEQ ID NO: 677282 - DNA, 1818 bp, Homo sapiens
catatttacaaacacatattgacaagaataataaatgaaaaactggtatccttccaaaattctgggttaatatatatacgtttccttttcctaaccactatgtattttaaaagataacattcagagaatctaaaataaatatggtggctgggcacggtggctcacgcctgtaatcccagcactttgggaggccgaggtgggtggatcacttgaggtcaggagttcaagacttgcctggctaacatggtgaaacaccatctctactaaaaatacaaaaaaaaaaaaaaaaaattagcatgcacctgaaatcccagctacttgggaggctgagtcaggagaattgcttgaacccaggagatgtaagtcacagtgaactgagatcgtgccactgcactccaccctgggtgacagagcaaaactctgtctcaaaataaataaataaataaataataaaataaacatgccaattaaaaagagtatttaaaaaagcatacagagtattcttcattgccccactgtagattaaactgtgctcacaggtaaaaatctgagcagatggtttataaggcattacaataaatgtagaatatgggtattatttccatatggctgctacattagaaatctgcattgaattaaagagtatctgtcatgacagaaacaaaactacagtagacatatcatatcaatacatttaacctgctttaagctattggctatgaaaactaaattactcctatctatgcaatgattgcattgccaattatctgtgagagaaaaattcaatatgttatctatactgattctctttaatatccatacattcatttgcatatgtaggccacttctaaccacacttctcaacaatcaaatgatratggaaatatttagtttttttctttttcaatatggagcctacaaagtgtatgttcaattcacttatctgtaagatataagtcagacaactggggagagaagaagaggaatgattttaatgttgttaaattcaacaaatgattaaatgtaaacactgttaaatgtttttagttttaagagcattcaatagagaataaatgcttatatatactaaaatcagagtcacttccactttgtttaaataatttaaagttattttatccctgtgtctcagaagatagcttagcctaagttaaatgcaccctaggttgttttgacagctttgaaatctggatctttaatatggcttaactactgatgtgctgttctgctcttacatatggctgtttctttcatgcattttcaaaaacaagaaagagttgaaccaagcttatgaaaagctcatttggacatgtatattcttggaaagttaaaaatgtttatttctacttaaggtttgacatttagatactgattatggaataaactgctatacaaagaaaaaagacttaaaaaatttcacacaaaggtactatctttagaatgttaagatgttttagaagaattagaaggaaataaatttaaattcttatctttatattattttataatatcaaaataagttaaatttaccatctgatatttttatataataaaaatgagctaattaaaaaataaggaatatatcccacatgtgaagaaaaatatttgtagtagtgtttttatgagaatttatctatgctgaataaaccagacaaaatagaattcagtcaacccagttcttactagatctcctcaatgtagtaccagaagctctgtttttttattaatggaataaagtttcaaaattaagatgactagtctcaaacagattttacagattagaaccagactgattcttca

SEQ ID NO: 677283 - DNA, 1521 bp, Homo sapiens
ttttacaattcaaatagtcaaacttattttttgctttctttttataactctcaacatcctctcatttagttccataaatgcaaaayaaactggattttgcatcctccaagtacatttttatgtagtagagctggaaaatatttctgtttacactccccaatttctccccaaatttggctagtattagtcatcctgttaataatctcttaaattcagagttttgaccccaattagacagcaggataacgattgttcatagcatagcatgctttgaattttcttttacatccagctgtaaaacatcgctgaattcctggaacaaggactatcctgttgggcctccctgggaaatgctcactgtgctcatgctcccaggcaccagaacctgcaacacctgagctcagcatctggggggtggcagctggttctggtagctgctttatttggcaccgggctgtgaaaagcaggcagggaaaagacatgcgcaaggcctgggcggaaccttaatgaacgagagagggcgctcttcagcatgagctaattggctccagcatgagccaattggctccaggtgggaaccggatgccgagggcatcaccaggtcttctgatttttcaagggaggtccaaaatttactaactcaggaaatttactaactcaggaaaaggtccatggattgtctcagggaaatacaacctgggcagttctagcatgaccatttgtgatttgagatctggcactcatttcaactgcgttatgtgctgcgaacagatcctcgattttttttttttttttttttttttgagactggatcttgctttgttgcccaggctggccttgagctcctggactcaagtgatcctcccacctcagcttcctgagtagctgggattacaggtgtgtgcccccatgcgaggctcagagccttgatttttaacatagatactatgtgaaaactcattagaggtttccaaaaaatcaattgtcaaatgaacttctggaacacgccccagtagtggtcatcatagacatctgtatggtaatcaacacagtgctttccccatctccctgaatctctgtgataattcaatacaattcggaatctgtcaggttctcgggggggcggggactgtcccatgagcacatgaagagtgctaggcagagccgcctcctgtaacgggtccctgactccaaatctcacacttcctaccacgtctaaaatgttgagagagcatcttagaggtcccttttaaaaaagatttggaaatttttacgtctgacttccgtggagcacttaagtaatggaaacttggaatgctagaagtttttaaaagtcaagaattacaaatccagcttcatttatctaaagccacatgttgtaacaaatgactcaaaaaagaaaaacagttgaattatctaaatagctataatttagaaataatttgattttaacaccccaacttaaaatttcagtgtatgtctttagatttttccattgttctcggaagcaaatgacttaaa

SEQ ID NO: 677284 - DNA, 1521 bp, Homo sapiens
ttttacaattcaaatagtcaaacttattttttgctttctttttataactctcaacatcctctcatttagttccataaatgcaaaataaactggattttgcatcctccaagtacatttttatgtagtagagctggaaaatatttctgtttacactccccaatttctccccaaatttggctagtattagtcatcctgttaataatctcttaaattcagagttttgaccccaattagacagcaggataacgattgttcatagcatagcatgctttgaattttcttttacatccagctgtaaaacatcgctgaattcctggaacaaggactatcctgttgggcctccctgggaaatgctcactgtgctcatgctcccaggcaccagaacctgcaacacctgagctcagcatctggggggtggcagctggttctggtagctgctttatttggcaccgggctgtgaaaagcaggcagggaaaagacatgcgcaaggcctgggcggaaccttaatgaacgagagagggcgctcttcagcatgagctaattggctccagcatgagccaattggctccaggtgggaaccggatgccgagggcatcaccaggtcttctgatttttcaagggaggtccaaaatttactaactcaggaaatttactaactcaggaaaaggtccatggattgtctcagggaaatacaacctgggcagttctagcatgaccatttgtgatttgagatctggcactcatttcaactgcgttatgtgctgcgaacagatcctcgattttttttttttttttttttttttgagactggatcttgctttgttgcccaggctggccttgagctcctggactcaagtgatcctcccacctcagcttcctgagtagctgggattacaggtgtgtgcccccatgcgaggctcagagccttgatttttaacatagatactatgtgaaaactcattagaggtttccaaaaaatcaattgtcaaatgaacttctggaacacgccccagtagtggtcatcatagacatctgtatggtaatcaacacagtgctttccccatctccctgaatctctgtgataattcaatacaattcggaatctgtcaggttctcgggggggcggggactgtcccatgagcacatgaagagtgctaggcagagccgcctcctgtaacgggtccctgactccaaatctcacrcttcctaccacgtctaaaatgttgagagagcatcttagaggtcccttttaaaaaagatttggaaatttttacgtctgacttccgtggagcacttaagtaatggaaacttggaatgctagaagtttttaaaagtcaagaattacaaatccagcttcatttatctaaagccacatgttgtaacaaatgactcaaaaaagaaaaacagttgaattatctaaatagctataatttagaaataatttgattttaacaccccaacttaaaatttcagtgtatgtctttagatttttccattgttctcggaagcaaatgacttaaa

SEQ ID NO: 677285 - DNA, 654 bp, Homo sapiens
tttaccagtgtgatatctggcattggtattcattccctctcacttttatctttgcttttttcaataaagatcttatttttgaaatgtaactattcaaggcaaatggccagggataattttcagggaaacagacttaaaacaagacctttgacagccctgtactctgtggtaatgactagacagcgggcagcaccaagtctcttgatagattcctcccatcatgaaaacaacccagcygagcacagtgactcatgtctgtaatcccagcactttgggaggccgaggcgggcgatcacttgaggtcaggagtttgagaccagcctggccaacacagttaaaccccgtctctactaaaaatacaaaattagccaggcatggtggtacgcacctgtaatcccagctacttaggaggctgaagcagaagaatcacttgaacctgggaggcagaggttgcagtgagccaagattgcactattgcactccagcctgggcaacagagtgagactctgtctcaaaaaaaaaaaaaacaaaacaaattaagggacacttatcacactcaaaatggatatctaatatttagaaaacatctttagctatactacagatttaacagccagccaaattggaggtgaatagcagaagaaacatttcctt

SEQ ID NO: 677286 - DNA, 944 bp, Homo sapiens
ccagtttaatacatttagtaaaggaatgtcctaagtccaatcctagctgcagtatcctaggaaagcaagtgtgtgtgtgtacttgctatttcatagggttactgtgggactgaagccatggtgcacagaattttgggcagaggagaggaaaaaaaattggagctgtgtactttcaaaatctgaatacccacaaaaaccacgatgagcaaatgacagaatattatccctggtcacaaaaacctattaacttttctgacctaaactatagcctggcaaaccaaccagcaaaattatttttgcatttctattaaaaactatttatcccttaacaaaaatagactttaaaagaaatctttaggaataagtctgtcagttgagtacccatgaataagtctgaatatgaataaggaaaatctatatttatttgtatcaaattgagaattgtgcatattttgattacactcttctgaatttgaaactaatgttttataatttgttgatatttattcctgattatatgctktccatcaaaaatgtattaaatataaaatatattctatgctcactgcattactctttgtgctgaaaacacagtagaaaacatataaaacactacctcaaggtttagcagtaatttaacttgctgtcaagcaaacaagcgtgaaaaatgtatagaaaatatatcttagccctatactgtaatttagaaagcctaaagttagtagtcattggtctaggctactgaaagaaaaatattcaggaataaaaaattttagaagttgtttatttttaaaatcagcatcttaaattctgagtgagtatatgagcaaaagatttatatttgcccatagacttcattatggacgctgtcagaatttctgtaatggcttcatgtaagcttattcatggttgacaagaaattattttaattgtgacatgacatg

SEQ ID NO: 677287 - DNA, 944 bp, Homo sapiens
ccagtttaatacatttagtaaaggaatgtcctaagtccaatcctagctgcagtatcctaggaaagcaagtgtgtgtgtgtacttgctatttcatagggttactgtgggactgaagccatggtgcacagaattttgggcagaggagaggaaaaaaaattggagctgtgtactttcaaaatctgaatacccacaaaaaccacgatgagcaaatgacagaatattatccctggtcacaaaaacctattaacttttctgacctaaactatagcctggcaaaccaaccagcaaaattatttttgcatttctattaaaaactatttatcccttaacaaaaatagactttaaaagaaatctttaggaataagtctgtcagttgagtacccatgaataagtctgaatatgaataaggaaaatctatatttatttgtatcaaattgagaattgtgcatattttgattacactcttctgaatttgaaactaatgttttataatttgttgatatttattcctgattatatgctttccatcaaaaatgtattaaatataaaatatattctatgctcactgcattactctttgtgctgaaaacacagtagaaaacatataaaacactacctcaargtttagcagtaatttaacttgctgtcaagcaaacaagcgtgaaaaatgtatagaaaatatatcttagccctatactgtaatttagaaagcctaaagttagtagtcattggtctaggctactgaaagaaaaatattcaggaataaaaaattttagaagttgtttatttttaaaatcagcatcttaaattctgagtgagtatatgagcaaaagatttatatttgcccatagacttcattatggacgctgtcagaatttctgtaatggcttcatgtaagcttattcatggttgacaagaaattattttaattgtgacatgacatg

SEQ ID NO: 677288 - DNA, 944 bp, Homo sapiens
ccagtttaatacatttagtaaaggaatgtcctaagtccaatcctagctgcagtatcctaggaaagcaagtgtgtgtgtgtacttgctatttcatagggttactgtgggactgaagccatggtgcacagaattttgggcagaggagaggaaaaaaaattggagctgtgtactttcaaaatctgaatacccacaaaaaccacgatgagcaaatgacagaatattatccctggtcacaaaaacctattaacttttctgacctaaactatagcctggcaaaccaaccagcaaaattatttttgcatttctattaaaaactatttatcccttaacaaaaatagactttaaaagaaatctttaggaataagtctgtcagttgagtacccatgaataagtctgaatatgaataaggaaaatctatatttatttgtatcaaattgagaattgtgcatattttgattacactcttctgaatttgaaactaatgttttataatttgttgatatttattcctgattatatgctttccatcaaaaatgtattaaatataaaatatattctatgctcactgcattactctttgtgctgaaaacacagtagaaaacatataaaacactacctcaaggtttagcagtaatttaacttgctgtcaagcaaacaagcgtgaaaaatgtatagaaaatatatcttagccctatactgtaatttagaaagcctaaagttagtagtcattggtctaggctaytgaaagaaaaatattcaggaataaaaaattttagaagttgtttatttttaaaatcagcatcttaaattctgagtgagtatatgagcaaaagatttatatttgcccatagacttcattatggacgctgtcagaatttctgtaatggcttcatgtaagcttattcatggttgacaagaaattattttaattgtgacatgacatg

SEQ ID NO: 677289 - DNA, 617 bp, Homo sapiens
tcagtatcttaattatggtaggatgcctcccagaggtatatacattttaaaaggctactcttgatgacagaaaatgtttattcctaaggccaccctgagcacatcatctggttttattgaaggaaatacttgttcatttatggagggaaggaaatttatttaattgcttgcatcagcatatcctactaagtaatgagtcctgaagcttttctttataggccacagtgagtggcttcttaacaatcacatatctattttcctttgaataagtaccattgcttcaatctattcccttttctccaaaggtgactgtatgtctcttttatctgggacagttcaggtctatgcttgttgttctctacatttatttacagtacccctttccatcttgaaagtatctcagtgtgggcaataaattttatggtcactatagactgttacctcaaactctctctytttttttaaatcatgacaattcaaatcccatttgtgcatatatttttgagataccttgtttaaataaacagtatctttctttgacctggccagcttccttttttaaagcttttgttaatttgggtaaacaaatcctcatgaactggaaatgttgctcagtt

SEQ ID NO: 677290 - DNA, 1112 bp, Homo sapiens
acactgtacttcatgtcatagtactgggtaagcagcacctatactgagatggctaacaacattagccaaacacagaaatggctatgagccatgtaactgtatttcaccaagcccaagctagatgtataccagtcaacttctttggagccaaagatcaaaaatgactatggccagtccaatgccactccacaaaagggagtgtgatggaacagatgtcagtatggaaaaagagagtggtcctaaacaattgccaattttataaaaccatgaccttgcatgaccttgaacacatacaaagctacaaaagctacagttcctcccaggtttggttttcttttcgttttctttctgttttttttttttkttttttttttttgagacgcagtcttgctctgttgcccaggctggagtgcagtggcatgatctcagcttactgcaacctactcctccagggttcaagcgattctcctgcctcagcctcctgagtatccgggattacaagagcatgccaccacacctggctaatttttgtatttgtaatacagactggattttaccatgttggtcagggtggtctcaaactcctgacctcatgatctgcccacctcagcctcccaaagtgctgagattacaggtgtgagccacctcccaggttcttaaaaggactcacacaagtggtaggtcctgaagcttaagcttcattagtttcatggcaaatctgcctctatcctctattttaaacaaacaagtaacaatgacaagaaactttcactcttctctgacttcccactgctcttaggataaaattcaaccactttgccctgaccgacaccttctccaacctcatccattaccatgttcccctgagcaaactaccatctaacccctctgaatgcttccatttctcaaaggacacagagttctttctgcctcctgaattcccttccttctgcctgaaatgcttgtcttctctcttgggtcatagcaaaatcattttcttctgaaggcgatatgacctcatcccagacctcaggtagcatatttcatctctgcactatgtttattgctgccatagcagctatcacattgtgtaaccatcttgctcatctctg

SEQ ID NO: 677291 - DNA, 1112 bp, Homo sapiens
acactgtacttcatgtcatagtactgggtaagcagcacctatactgagatggctaacaacattagccaaacacagaaatggctatgagccatgtaactgtatttcaccaagcccaagctagatgtataccagtcaacttctttggagccaaagatcaaaaatgactatggccagtccaatgccactccacaaaagggagtgtgatggaacagatgtcagtatggaaaaagagagtggtcctaaacaattgccaattttataaaaccatgaccttgcatgaccttgaacacatacaaagctacaaaagctacagttcctcccaggtttggttttcttttcgttttctttctgttttttttttttgttttttttttttgagacgcrgtcttgctctgttgcccaggctggagtgcagtggcatgatctcagcttactgcaacctactcctccagggttcaagcgattctcctgcctcagcctcctgagtatccgggattacaagagcatgccaccacacctggctaatttttgtatttgtaatacagactggattttaccatgttggtcagggtggtctcaaactcctgacctcatgatctgcccacctcagcctcccaaagtgctgagattacaggtgtgagccacctcccaggttcttaaaaggactcacacaagtggtaggtcctgaagcttaagcttcattagtttcatggcaaatctgcctctatcctctattttaaacaaacaagtaacaatgacaagaaactttcactcttctctgacttcccactgctcttaggataaaattcaaccactttgccctgaccgacaccttctccaacctcatccattaccatgttcccctgagcaaactaccatctaacccctctgaatgcttccatttctcaaaggacacagagttctttctgcctcctgaattcccttccttctgcctgaaatgcttgtcttctctcttgggtcatagcaaaatcattttcttctgaaggcgatatgacctcatcccagacctcaggtagcatatttcatctctgcactatgtttattgctgccatagcagctatcacattgtgtaaccatcttgctcatctctg

SEQ ID NO: 677292 - DNA, 2429 bp, Homo sapiens
tattcctcccagtttttccttgcaccacagaggacaaagttctagtgccaatggagaataaaccttttctgtatacccgtgttatattttctactcagatataagacatattgttttgtcttgtttctatttttgtccaagacaatgactttgtccatgggagcaccttgaagggcataagacagtcgctgaaggtcatgacacagatattaccctacacacagtacttcaacatgaaaaagcatgttttagtttattttctgttgcaaataacagtgtacctaaaatggttaatttaaaagaaaaactatttcttacagttatggaggctgggaagcccaaggtcaagkggggacacacctggtaagagtcttcttggtggcggggactctctgtctttgggtttagggaccaccctaatccattatggcctcaccttaaattgattccaaatgtaaaaaccctatttccaaatgaggttaccctaggtaccagggcttaggactttcacagatgtatcttttggagggacacaattcaacacactgctggggtgaaaaggttaagggcttcagaatatttctttttggaaggaaggcaaacagcttctgaatcttagttgacatagatttaaagtaaaaaaattcatacacagtgcacactacacatgaaatatgctgtcaatccaaataaaataaaactctatccttataggactatgaaagggaggctacttatctctttaacccactctgggttctaaaatcctgagtgtaagaagcagataggagccaccctgctcaaagcctgtatataacacactgagagattttataactcaatacttcataaatatatcagagtaattttagaacagttgaaatgagaattactttatatttaacaaggcaatgcatacacacatatgttgatatattgatacagtttggatatttgtcttggcccaaatctcatgttgaaatgtaatcctcagtgttggaggtggggcctggtgggaggtgtttaggtcatggaggcagatccctcatggcttggtgctgtccttgtgatagtgagtgagctcttgcgagatctggttaagttagtggcacctcccccttccgctctctctctggcttctgctctggcaatgtgatgtgcctgctccccctttaccttccaccatgattgtaagcttcctgaggcctccccagaacccaagcagatgtcagcaccatgcttcctgtaaagcctgcagaactgtgagccaattaaacctcttttctttataaattacccagcctcaggtatttctttatagcaatgcaagaatgacctgacacacatatgtacattcgtgtgtgtgtgtgtgtgtgtgtgtgtgtgtgtatatattcatatattcatgtatatgggtatacactcacacatacatttaaaaacatacatcttcaaggccgggtgcggtggctcacacctgtaatcccagcactttgggaggccaaggcaggtggatcacgaggtcaggagatcaagaccatcctggcgaacatggtgaaaccctgtctctactaaagatacaaagaaattagccaggcgtggtggcaggtgcctgtagtcccagctcctcaggaggctgaggcaggagaatggtgcaaacgcgggaggtggagcttgcggtgggtggagatcgcgccactgcactccagcctgggcaacagagtgagactccatgtcaaaaaacaaacaaacaaaaaagcatacatctttgaaagttatatgtagtgggattcttatataaaatttcagttcttgcaaagaatctaggcagaccccttaatcagtgtgttttgagaaacagtctttattctggtatagcttggatctcttttcctgttgcatcattcaagttccactgattctcttccatgagtcccatgacatcttgtctcatgccattctgcacgaggatgggacttttaaaacactgtgactatctctagatgatcttcagtcatagcctatgcaaaacacagtccacactgaatatagtcattatggagtctttgcttcctttctctacactctgcaaagtgctgatgcttttttacatattagtcaaagggataatatttgattctttccttgattttgcaagtttctctttaatgtgagctgaggtcttgcctatgttctctctgccagctgcactatctctgggatcagcatcctgcactgagttcatgggaggaggatataaaatttcttttaatgacaaaagccactacctgcttagaatatgggcaaagacatatccatcgctcactctgatcagtttgtcagagtgagctacacatagcctcgataccttcaaggctacaagtgtgatgttaaagcactcccaagttgacaaggactgtcttccctca

SEQ ID NO: 677293 - DNA, 628 bp, Homo sapiens
gcctgttgatgttcgagggcctatgggtcattttcagttcccaaaactcaaaaaagtttcttttagtgcaggttgataattcttttgctgtatgactctcaaacactgagattcttatctgttcaattacagtcagtttcatatgtcaataaccatactagcagtcctcaagactcaagagtcttaattttcatattagctataattttttactttcttgctgtcaygaactaccactccctcctatccttgaattaatttttgctgcctgagcctatcagacgtgggtggaaaaatcacctttaggttcttttccctgagctatcttaaccaacttaaaagacttactggatactacaacttaatttgatatttaccctgggtaccctaatttatccatggatttttaaaatgggtctcatgacaaatccttaatttgttcctagatgaaacattcagttttaatgggccatctttgcccaaagtcctactcattttcttctgtttgagtttgagaagcagttgcctatttgatgccaaattctctgaatttctgggccctctccatgttttttacattatacttacaaacgagccactacttttttgagctcatttctttctcaga

SEQ ID NO: 677294 - DNA, 1387 bp, Homo sapiens
ttaaatctgaattttaaatattactgttaaccaataattttctcccttttaaaaaaatatatatttcctatctctaactgaaccagactagaagaaatgataaacctgcagcaataaacatcctagcatctggattgtggtttttccacttagtctgtgtayggtatgctgctataacaaaatctgtagttaggtaatttataaagaacagaaatttattttttcacaattctggaactgggaagtctaagatcaaggcaccaggaggtttggttgtctggtaagggctgctttctgcttttaagatggtacctcattgctgtcctccaaagggcaggaacactgtgtcctcacacacatctattcatttgcttatttgtttatttaatgagtgccctagtaaacttcagtgttgacaaatcagtttattttcttttctcctactttttcttttctttttttaagacaaggtctcactctgtcaaccaggctggagagcaatggtacaatcatggcccagtgcagccttgaccttctgggctcaagaaatcctcccaactcagcctccaaagtaggtgggattacaggcatgtgacatcatgcccaggtaattttttttttttttttgtagagacaaggtctggcgatgttgcccaggcttgtctcaaacttgtaggctcaaccagtcctcccacctcagcattccgaagtgttgggattacaggtgtgagccactgcacctggcatctcttactatgttctaagaacaaaggcattatttactcacatggctgcacattggcttattttgtataactttattgagatatgattcacatcccatgcaatttacccatttaaaatacatcattccatattgtttagtaaattacagaaatgtgtaactgtcactacaatctcttattttttaacgtactttttctagtattatttcagtgccatctcttattatatattaaatacattgtgatatattgaaagtattattgattttgatgctcaaattgttcaatttagccattgtccctttcccccaggcctggcaaccactgatctacttttttttgttgttgagatggagtcacgctctgtcacccaggctggagtgcagtggcatgatctcggctcattgcaagctccacctcctgggttaatgccattctcctgcctcagcctcccaactagctgggactacaggcgcccaccaccacacctggctaattttttgcgtttttagtagagatgggatttcatcgtgttagccaggatgttcttgatctcctgaccttggcctccaaagtgctgggattataggcttgagccacctcgcctggcctaatctactttctatctctatggatttgcc

SEQ ID NO: 677295 - DNA, 626 bp, Homo sapiens
tgcctgtcatctcaacactttcggaggccgaagcaagaggactgcttgaggccaggagttcaagaccagcctaggcaacacagtgagattcgtctctactaaaaaaaaaaaaaaatgtttaaatcagctaggcatggtggtgcctrtagtcccagctactcgggaggctgagcaagaggatcatttgagtttgaggtgagctattattgcaccactgcactctagtctgggcaacagagtgagaaccctcgagagagaggggaggggaggtgagaaggaaaagaaaaggcaagaaagaaagagagaaagaaaagaaaggaagaaaaaaaaaaacatttattctttcacattgcttttaaagtactcactaattactacttgaaagcttatgagcaagacatcaattctacaggttaactagagaggaaaaaaataaattcatacctgagatatcttctggcatgttcatttttatgaccgaccatgagatagtaacatcccactgcaaaccaagacacctaaaaagttcaaaatttaccataaacaaagattggaattggaatatctaattggaatctgcaacaaattagggtagacagagggtatactacatgttccttatcaca

SEQ ID NO: 677296 - DNA, 626 bp, Homo sapiens
tgcctgtcatctcaacactttcggaggccgaagcaagaggactgcttgaggccaggagttcaagaccagcctaggcaacacagtgagattcgtctctactaaaaaaaaaaaaaaatgtttaaatcagctaggcatggtggtgcctgtagtcccagctactcgggaggctgagcaagaggatcatttgagtttgaggtgagctattattgcaccactgcactctagtctgggmaacagagtgagaaccctcgagagagaggggaggggaggtgagaaggaaaagaaaaggcaagaaagaaagagagaaagaaaagaaaggaagaaaaaaaaaaacatttattctttcacattgcttttaaagtactcactaattactacttgaaagcttatgagcaagacatcaattctacaggttaactagagaggaaaaaaataaattcatacctgagatatcttctggcatgttcatttttatgaccgaccatgagatagtaacatcccactgcaaaccaagacacctaaaaagttcaaaatttaccataaacaaagattggaattggaatatctaattggaatctgcaacaaattagggtagacagagggtatactacatgttccttatcaca

SEQ ID NO: 677297 - DNA, 651 bp, Homo sapiens
tttgttttatgtctaagaattactttaatttaaaaaaaagtcttaccattggctttattcagctctacaagcgtccctatatgtacaggtaaacaacttgcatggaaaggatctttctccattactctgaaagttaaagcgacacattactacccccaaamcagcaggtgacagcactcacgacgatcggctatgtgtagacagtcattatggtatcacatatgatgctgtgggttgtaacacttcactttcttcactccattatcttcaggttgattcagttaaggccataattaagttacaaatgaaagaaaaaattctggtttatttgaaaggaataaaaataaacattatcacatacatttactttaagtcaacagaattgtaatacataaaataagtaggccgcttatttaaaagaatcaaaaccaacaggaaatcctattaggttggtgcaaaaataactgcagttttaccactacgttcaacagcaaaaactgcaattacttttgcaccaaactaataaataggttatgtgtatttgccaattaaaatttttgtaatttcaaggattttaaaccgaaccaagatctacaaaaaatagcatatgtcatttagctaaagtttaaattaggtacactggaaaactga

SEQ ID NO: 677298 - DNA, 591 bp, Homo sapiens
gaaattctgatttgttagttcaaatgcctgacagcataatcatacagatcttctcttgtcttggtttggatgacastgagcagctgtcagaaacgtgcaaaaaattccaaaaggtaaggccttaaaatattttactggtaaatattacacagactttcaaaaggacagagaatgacttggaaaatcttttttttttttcttggagatggagtctcgctctgtcacccacgctggagtgcagtggcgtgatctcagctcaccgaaactcacgcctcctgggttcaagcaattctcctacctcagcttccagagtagctgggattgcaggtgtgcgccaccacacctggctaatttttcttaaacaaacactgtctacatctgccctatcagagcaagagagaaagacaaaacactaggttatgacaagcaaactcacccacccactctttaaaaaaaaaaaaaattcagggccaggcatggtggttcacgcctgtaataccagcactttgggaggtcgaggagggcagatcacgaggtcaggagatcgagactatcctggctaacacggtgaaaccccgtctctactaaaaa

SEQ ID NO: 677299 - DNA, 1335 bp, Homo sapiens
cactgatattgagttatacattggttatatacccttactacatttaagaatataggagttggctttctatgaaacttattttcatattttgctttagagtcaaggaaggaatggagatgaatgagtgcttattgaaccaagtgccaagtgttattatgctttacatacatatgttaaataatcctggcaatgactctgcaagagargtaaaatagaatctatgacacagacggccttcaggtcaaaagatgcgcctgagtttatctcatgctctagtgccaggatctcaatgcctacatctgttactccttctctccctgttacatcaccctttcctttactatatattttaagttttattatgtcttgattttaaaatgttcaactgcctaataactcctgtttattttgttatggacattttagatatattttaccttttattatattgctgtataacatagtacagtgcacatagtgttaagtgtacagctcgatttttctccagtgaacatacccatgttattagcacccaggtggagaaatagaagaataccagcatcccagaaatgctctttattctccattttattctctttccccaaactccctactccaagagtaactgctatcctgacttctagcagcaaaaattcgttttgttctcgaattttatgttaatggaatcttacagtatgtactcttttatatctggatactttttctcaacatttcgtttatgagattgatccttactgttgcttgtagctgtagattgctttataacattctattgtgtgaagattctcatttatccattcttctgtctctaggcttttgactagtttctagtttggggatattatgaatagtgctgttatcagactagtatatgtcttttgataaacataagtatatgtatgttgggtatatacctaggagtggaattgctgtcttttttttttttttttaaagaacaatttcagtaggcatactaaatcattggtttattcaacaattatctttggagatttttaaacattcctatgcctaattccaccttataaatttaaattcaggtcatccatctggagtaatgatgaaggacagaggagtcctaaagtggggcttagtctgggagggttcttggctttgcctaggaaagaattgctctgaagtgctatggctctgtgactgattccacagagcagggctaccccacaggcaatgtggtgggcatagaagctcagaagcagttctgtagtcatatttcttcccatttctaattacatgcagattaaggggtagtctatgcagaaatttctagaaaagggg

SEQ ID NO: 677300 - DNA, 1647 bp, Homo sapiens
ggttcttctgttgctagtttttttttcccccagccaaagaaaattgactgacaaaataaatagtcaggtttgaatatgatatgttaagacatcattctagtacccaggacatccttcaaacattacatcaacagttctgttcaacaattttctgacctgtgaggcatcttaatctctctagagttttgaagatgaagattctattgcacaataaatgagctcgtgacagaatgtaagatctggcatgtgctcagagggcaagaataaattctatcagwacattgacaccatcagtcatgcgttatccaaaggccacacaacaaaaaccacattgcattttacttaatgctcatcattatgaatcagaacacaaaataagtccctctttaacatatcttggaactatgctaattccactgaatattattattctgttgatttcagttggattgcttgttttcaacgcctaccacaaccttctcccttaattctagattttagtatctagaatgactcttctagtttgcttcttcatgtttttactctttttctgtaataactaagatgatctagcccaatgagaagtgcttctccaaggaatcaaaaatggtctttgtagtagagagattagtctcaagcagcttgctgtatgcaacatggagtttgcctgtggcttttacccacagccgtacaaaaaactatgtacatgatgttaaaaaaaaaaaagttgtaagattgtgagaatcctaagcacactgattagatgcctgtaagaatgacagatacgttagcttgagatttgccattttcagtgaagtctgagtgtcaagaaagaggaaatttactttccacatatgttcattcaataaatgtatattgagcatcttctatgtgccaggtgctatgttaggaaaccaatgagtaagtcaatgagaagtctctgccttcataagctggtgggagagacaggtaataacaagtaaatataaatgataatgtcacgtagtgattcatgattcacaaagaaaataaaacaggttcaaggcatacaaagtgacagcatagagtgagtcctattatatatgtaatgatcgaggagtcctcctcaaggacatgacatctgagtaaaaactgaaataatgtgaaaaagagttttagtgagaacagtgttacgggcagaggggagatcaagtagaatggctcgaagatgcaaatgagcttggcatgttcaagaaacaatagaaacactgctgtgtggctgaaacccagtgaagagcatggtaaagaaaggggacaggaataaagagataggcaggggccaggtaacgtacacactgttgagaaatgcaaaagcacagatgcaaagatattgagtagtactgaacctgaggcctgctttgaaaagattctctggctgtgttgtggagaatcgacctgagaagggcaagagtaggaatagggacctgttgggtggctgtagtggggctgcagatgagagttggtatgacttggacaagagcgggatggcagaattaattgttcttttctcagcatgttcaatttgaaatgtctattatgaaactaagtgaaaacaattggatctaccagtcagggccatgagcatgaccctgaatcagctcaggagag

SEQ ID NO: 677301 - DNA, 1647 bp, Homo sapiens
ggttcttctgttgctagtttttttttcccccagccaaagaaaattgactgacaaaataaatagtcaggtttgaatatgatatgttaagacatcattctagtacccaggacatccttcaaacattacatcaacagttctgttcaacaattttctgacctgtgaggcatcttaatctctctagagttttgaagatgaagattctattgcacaataaatgagctcgtgacagaatgtaagatctggcatgtgctcagagggcaagaataaattctatcagtacattgacaccatcagtcatgcgttatccaaaggccacacaacaaaaaccacattgcattttacttaatgctcatcattatgaatcagaacacaaaataagtccctctttaacatatcttggaactatgctaattccactgaatattattattctgttgatttcagttggattgcttgttttcaacgcctaccacaaccttctcccttaattctagattttagtatctagaatgactcttctagtttgcttcttcatgtttttactctttttctgtaataactaagatgatctagcccaatgagaagtgcttctccaaggaatcaaaaatggtctttgtagtagagagattagtctcaagcagcttgctgtatgcaacatggagtttgcctgtggcttttacccacagccgtacaaaaaactatgtacatgatgttaaaaaaaaaaaagttgtaagattgtgagaatcctaagcacactgattagatgcctrtaagaatgacagatacgttagcttgagatttgccattttcagtgaagtctgagtgtcaagaaagaggaaatttactttccacatatgttcattcaataaatgtatattgagcatcttctatgtgccaggtgctatgttaggaaaccaatgagtaagtcaatgagaagtctctgccttcataagctggtgggagagacaggtaataacaagtaaatataaatgataatgtcacgtagtgattcatgattcacaaagaaaataaaacaggttcaaggcatacaaagtgacagcatagagtgagtcctattatatatgtaatgatcgaggagtcctcctcaaggacatgacatctgagtaaaaactgaaataatgtgaaaaagagttttagtgagaacagtgttacgggcagaggggagatcaagtagaatggctcgaagatgcaaatgagcttggcatgttcaagaaacaatagaaacactgctgtgtggctgaaacccagtgaagagcatggtaaagaaaggggacaggaataaagagataggcaggggccaggtaacgtacacactgttgagaaatgcaaaagcacagatgcaaagatattgagtagtactgaacctgaggcctgctttgaaaagattctctggctgtgttgtggagaatcgacctgagaagggcaagagtaggaatagggacctgttgggtggctgtagtggggctgcagatgagagttggtatgacttggacaagagcgggatggcagaattaattgttcttttctcagcatgttcaatttgaaatgtctattatgaaactaagtgaaaacaattggatctaccagtcagggccatgagcatgaccctgaatcagctcaggagag

SEQ ID NO: 677302 - DNA, 2839 bp, Homo sapiens
ccgacatgcactgtgctaatatttctggctacacagatgaatgtgagaacaagttctttaacgtcaccgcctttctaaattttcatggacaaagcacgctgccacactgacaccagtgaaaaacccagggctttgagtccaaatgactgatttccccagatcaccggcttccctctcctctatgttctgaaccttcttcccctaatcccttgtttgaattgtccataaccacaagcagcaacactgaaagctttctgacctttaaagaagcatttgaacagatgttcacctcactaataaacaaggaaatgcaaatggaataaaacaatgagatgcgatgtttaacccttcagatatacatacttggaaggtgcaggttatatttaaattatttgaagaagtattctcagaatatatcaatgcgatacgaggattacttgagatattataaatgatacacaaagaatgaacaactttattttgcaaactgggttcaacaaagaaaacaaatattttactgcactacgcctcaggctctttaatcacaaatgtgcctcaagaatctctcatgcagcagttatcagtgtttgctacacattaaaatcacctggggatttttttttaatttttaaaaattctgatgccttggtctgacccccagaagttccgacttaattggtatgatgtatagcatgaacatccagattttttaagcttttctacatgactttaatgtgcagccaaatctgggaacctctgtattctataaataaaagagaaagagaatgttgagttttcccaaattagtgaaccatacaggttttggagtttttgctgttggcttctttaccaatcacctaccagcatctctagaggccatcactctatcaggccagcagcttctacatggtgcagtatgtcatagaaacagtggatcccatggtcctgcagtggtcctataggtcctgtggttttatgcaatgttaggcagtttcctatatttttgaattgaacacyctgtaagcttgaatagtagtggtgtttgagtcctaaaggcaggaaagccaaacagattgctgatatattcattaattttagtcacgatgaattgctgtctgtaggagagtagaaggggttcaataacatcaactttctactaagtggctggctggtgttctcaaaggatggtgccatatcaggagcttgggatggtcagtgttgcttggcaaactgaacacttgacagtagcagcaattgttgtcagcttaagtgtatgagagtttgtcttagtctattttttctgctataacaaaataccttagactggataatttgtaaaaaaccaaaatttatttcttacagttctggaggctgagaagtccaaggtcaaaataccagcaaattcagtaccgggttagggctgctcactgattgcaagatggcaccttgttgctgtgtcctcacatggcagacagcagaagggcaagaaaatactccctttaacattgagcccttttataaggatgccaatcccattaatgataataggttccattcaggatggaggtgacttaagcaccttccaaaggccatacctcttaatacttttgcattgagaattaagtttcaacatgaattttggaggacacactatcatttatacaataacagagtagtacaattggatagcctttatccctgcaccacaatactctctttatgctcccatggggctaacactggggtagctgtaacagagattgtatgacaactagctgactcattacacacttttggagataatgtgtctctggcgtttgttaatatataatgcaaagatcttcacactctgtgcctcttgccttgtttgtgcccaatagtagatataatacttctgtgctataaaagattgctacaagacccatgcaaccctgtagaatctagctcataatgaacagttaaggacatatggttacttattccatggccagggactctgtttctatcaggatgcaatagcatgctgggagctgatttttgaatagttttaaattttctgctgcagatgacatggttttgctccaaaactcttgagttctatcttgtgattctaatatctgagcttgccatgaactccattgtggcatcttttcccatcatggttacctctaatggatgagatctgctaggtcacaaggtctatgtgacaggaacatctggactacaaccattaactcctagatccgttttctcttatgagccttcctcaaagctagccctctatgtcactcagtaaatgggtctaagcactactcctatgtgagtaatatgccccctccagaacttgagaatccaaggaagcttctagggcattatgctaccttcttagctgtgagaagtgagagatgtagtatgatcctatatttgtattaatctgttctagcaaatttgtatttggtatatctaatttgtttcatctgttctagcaaagctatcatatctagcacagcaggtataaatgatactatttgtttggctaagtttgtagtattccactgctaccctctagtatccatgtcatatacacagggaacaggtggtgaattagtgaagatatgatggcaaatcccttccttgtacattaaggtccttatgggaggcactaatccctgatgtctcctcaggatgcaatgttgtttttgatttactatcttgatttggggagtggggatggggcagcactttgggaggctgaggcgggaagatcacctgaggacaggagttcgagactagtctggccaacatggtgaaaccctgtctctacttaaaatacaaaaat

SEQ ID NO: 677303 - DNA, 674 bp, Homo sapiens
tgctgggattataggcgtgagccacgcacccggccatggatgtgattaggtttctaacagctgaaagaggagctacagcaagtcttcaccaatttttctatcaaattcttccagagttgaacaaatagaaggtccccatgtaccctgctgagtttggagtgataggatgaaagcattcaatttcgatcacttttttttctccttgagctttaaagttaattaaaatttgatgtttttctccctatttatgcatgtcttttggggtatgaaataatggtcttttttattttctaagttttcaaggtagaagatgtgccaggggctttatattatcccagtccacagccaggagccaagggtaattgggcccccgctctggaaagcacaggctcagagcccagtgtgaggtccacccgcctttggcagggaccagggatgacaggacccggggaggagagaaggtgatttgtactctcacctcctcccaagctgcctgggttcctcacccttgagttcattcctgttgtctcactttctcacttaccctgtcttttgagtttatgtccgaggcaagcctctgagtccgtctctgaatggagggagagaatgtaacaamcacatcacaacagcaatttgatgaaacaggagctcctgtgtataagggaccatcatcg

SEQ ID NO: 677304 - DNA, 3411 bp, Homo sapiens
ttagtctgtaagaaagtgtgcctctgacctaatgtggccagatgtccctctcaggtttgttttctctaaaataatcctgtcttgaccatcaggctacctttcatgtttctttcctctttctttaattcttacagttccctgtccataggagcacgtgcagggcaggacagcatcgtgggaaggggagggtgatcagcacccagaatcaacccatagtggggagcttgggcacaatatctaccactgggattttgcttgtgtttttccaaaaaaactttttgttttgaaaatagttatagagtcacaggatattgcaaaaaaaaaaaaagaaaaaagagtatgcagggaagttccatgtatccttccctcaatttctcctaatgggcacttcttatgtgttattatacaatatcaaagccaggaaactgacattggcacaatccagagtttgtttagactttcaccaattttccctgcacacatttgtgtgtgtgtgtgtggtgtctatcacatgtgaaaccaccacaatcaggatgcaaaacagccaatcaccacacggatcccttaagctacccatttatagtcacatccaccctcttccctcaccccacccagatgactgtaagaatttaacccctttgggaactggcagaagtcttggaaaggacattggaatattccacaaggctcgtatggaaggttcatgcctatcttatctggatatgaagggccatctaggttgctgtactgtaatgctggaactatgttgatgatactgaaaagaacattcattgattttaatcctgaatagctcacactccaaagtcctctcatttcacaaaaacagtggtgcccaacccctttctgcattggtagacggtctctggtgaggggcaggatggtgcacaggagccatcctgaggctgggtccttgagcatgaggggtatccatggatagggagaagaaggcatcagggaggtggtgaagcatgggaggggttcatctttttcagcagccccaaatcctactcagtgcagtggcactgattgtgtaaatgagacatcacaggttcctacattatgaataaatgatatattttaaaacctaggacaaaggttacagagtgatttgcctgcaggaaccaggcaagttaatgactttggcagctggagagggacaggtgtcctctgtcccaggtaagttctcctgattttcaaacagtgacaattaattaaaagaaatttcaaattctcccgtcaaccagacaaaatatatgcatgaactagttttggtcactgccagctggtgacctttatcctggatatttcttcacaggttctcttccttccttccttccttccttccttccttccttccttccttccttccttcctttctytctctctctttttctttctttctctctctttctttttccttcttcctatctctctctctctctcgctttcatttttttaagtcacagaacaagaagacacagaaggaagaaatcatcctgaaagtacttgtaagcactttactaacccattaagtcattgcttttctgaaaggagagctctggaaatgataataatgaatatttgcataatgctctaaggcttaccaaagtcatgttggaatacaccgccttgattttcctcctagggaggaatggatagtttgtctaaggcatggatagtttgtctaaggtctcaaggcagggagctggatgatgtaaccaggactggcacccaaaactgacttcacatcccatgctctatttcaatcccatacccaatcctcttttcttttggctccctctccccaaaccagtgtgcctacagcagagctcagttttctttgccaggcatttctgacccttctcaattggccccaagctggagaattcagctgccaccaccccaccaactatgcccactctcccaagtgagtgtggagttgaagacatgaaccagcaactcaccctcggtcagtttcagatacatgttcttcttagggtgagtcaatctgaggggttcagcactgtcctcaagtcttagccccgtatcagtttgagctcccctggaagcagcaccgagagtccagggcttgggtgcaggtagtttatttggagaggattccagaaggaagtgagggagcagggaaatgacacggggaagaaggaaatccagcataagggcaaattattgaggcctctgctgtagtccatggatgcttgaatgccagaaaagcttccagaatgcttcccagattgcctgccagaaggactgtgggcaaggagtgttcgcccaccccctctcgtgcttgcagtcaagggatgctcttggggtatccccccactttctatgtttgcacatggattaaaggggacacccactctgaggaaggcccttaggcagagaaggataccctgggctccacattggagcctggggagcctgaacacacacggagctgtcaccacaggtacgtacaaaatcagggtgtgagggcaccttaggggtcttgccagagctcccagcgacatgacaattacttccatggtgccagccagagaaatagggtctgtttccaatacagaggagcagctggctgtgctggacctgttgtgttgaaactgagaggttattgcagctttttgaggaattttcatgtagaatttagaccatatgtaattttgactgtgttcagaacctaattcccataggaaattttatctcacctctttcaaacacaccttattatagacatccgccctaacacacacacattcacagatggagaaacacacacactgagacacacacacacacacacacacacacacacacactgacacacgtttcctccccatgctgttttttcacttgcccctctctttatctgaatctaatccaagcatcctgcatgatcccttcaaatctcccttcccctgtatctccctgggtcccactggccacttctgagccccttctcctctctcctccctgtgttcagagccttgatgagattggggaagagacagaggccagctcccatagagctgtgtagacagaccctggtaaggagtttgactctatttatgttccccaggaagccattggagggtttaagccagggaatgacaagaagccataaaccatttatatattttttatttatttattttttgagacagagtcttaaactgtcacccaggctggagtgcagtggcacaagctcagctcactgcagcctccacctccctggttcaagcgattctcctggctcagcccccgagtagctgggattacaggtgcacaccaccacgcctggctaatttttgtatttttagtagagacagggtttcaccatgttggccaggctggtctcgcactcctgacctcaag

SEQ ID NO: 677305 - DNA, 3411 bp, Homo sapiens
ttagtctgtaagaaagtgtgcctctgacctaatgtggccagatgtccctctcaggtttgttttctctaaaataatcctgtcttgaccatcaggctacctttcatgtttctttcctctttctttaattcttacagttccctgtccataggagcacgtgcagggcaggacagcatcgtgggaaggggagggtgatcagcacccagaatcaacccatagtggggagcttgggcacaatatctaccactgggattttgcttgtgtttttccaaaaaaactttttgttttgaaaatagttatagagtcacaggatattgcaaaaaaaaaaaaagaaaaaagagtatgcagggaagttccatgtatccttccctcaatttctcctaatgggcacttcttatgtgttattatacaatatcaaagccaggaaactgacattggcacaatccagagtttgtttagactttcaccaattttccctgcacacatttgtgtgtgtgtgtgtggtgtctatcacatgtgaaaccaccacaatcaggatgcaaaacagccaatcaccacacggatcccttaagctacccatttatagtcacatccaccctcttccctcaccccacccagatgactgtaagaatttaacccctttgggaactggcagaagtcttggaaaggacattggaatattccacaaggctcgtatggaaggttcatgcctatcttatctggatatgaagggccatctaggttgctgtactgtaatgctggaactatgttgatgatactgaaaagaacattcattgattttaatcctgaatagctcacactccaaagtcctctcatttcacaaaaacagtggtgcccaacccctttctgcattggtagacggtctctggtgaggggcaggatggtgcacaggagccatcctgaggctgggtccttgagcatgaggggtatccatggatagggagaagaaggcatcagggaggtggtgaagcatgggaggggttcatctttttcagcagccccaaatcctactcagtgcagtggcactgattgtgtaaatgagacatcacaggttcctacattatgaataaatgatatattttaaaacctaggacaaaggttacagagtgatttgcctgcaggaaccaggcaagttaatgactttggcagctggagagggacaggtgtcctctgtcccaggtaagttctcctgattttcaaacagtgacaattaattaaaagaaatttcaaattctcccgtcaaccagacaaaatatatgcatgaactagttttggtcactgccagctggtgacctttatcctggatatttcttcacaggttctcttccttccttccttccttccttccttccttccttccttccttccttccttcctttctttctctctctttttctttctttytctctctttctttttccttcttcctatctctctctctctctcgctttcatttttttaagtcacagaacaagaagacacagaaggaagaaatcatcctgaaagtacttgtaagcactttactaacccattaagtcattgcttttctgaaaggagagctctggaaatgataataatgaatatttgcataatgctctaaggcttaccaaagtcatgttggaatacaccgccttgattttcctcctagggaggaatggatagtttgtctaaggcatggatagtttgtctaaggtctcaaggcagggagctggatgatgtaaccaggactggcacccaaaactgacttcacatcccatgctctatttcaatcccatacccaatcctcttttcttttggctccctctccccaaaccagtgtgcctacagcagagctcagttttctttgccaggcatttctgacccttctcaattggccccaagctggagaattcagctgccaccaccccaccaactatgcccactctcccaagtgagtgtggagttgaagacatgaaccagcaactcaccctcggtcagtttcagatacatgttcttcttagggtgagtcaatctgaggggttcagcactgtcctcaagtcttagccccgtatcagtttgagctcccctggaagcagcaccgagagtccagggcttgggtgcaggtagtttatttggagaggattccagaaggaagtgagggagcagggaaatgacacggggaagaaggaaatccagcataagggcaaattattgaggcctctgctgtagtccatggatgcttgaatgccagaaaagcttccagaatgcttcccagattgcctgccagaaggactgtgggcaaggagtgttcgcccaccccctctcgtgcttgcagtcaagggatgctcttggggtatccccccactttctatgtttgcacatggattaaaggggacacccactctgaggaaggcccttaggcagagaaggataccctgggctccacattggagcctggggagcctgaacacacacggagctgtcaccacaggtacgtacaaaatcagggtgtgagggcaccttaggggtcttgccagagctcccagcgacatgacaattacttccatggtgccagccagagaaatagggtctgtttccaatacagaggagcagctggctgtgctggacctgttgtgttgaaactgagaggttattgcagctttttgaggaattttcatgtagaatttagaccatatgtaattttgactgtgttcagaacctaattcccataggaaattttatctcacctctttcaaacacaccttattatagacatccgccctaacacacacacattcacagatggagaaacacacacactgagacacacacacacacacacacacacacacacacactgacacacgtttcctccccatgctgttttttcacttgcccctctctttatctgaatctaatccaagcatcctgcatgatcccttcaaatctcccttcccctgtatctccctgggtcccactggccacttctgagccccttctcctctctcctccctgtgttcagagccttgatgagattggggaagagacagaggccagctcccatagagctgtgtagacagaccctggtaaggagtttgactctatttatgttccccaggaagccattggagggtttaagccagggaatgacaagaagccataaaccatttatatattttttatttatttattttttgagacagagtcttaaactgtcacccaggctggagtgcagtggcacaagctcagctcactgcagcctccacctccctggttcaagcgattctcctggctcagcccccgagtagctgggattacaggtgcacaccaccacgcctggctaatttttgtatttttagtagagacagggtttcaccatgttggccaggctggtctcgcactcctgacctcaag

SEQ ID NO: 677306 - DNA, 639 bp, Homo sapiens
gttaaaacttgtactacatggctatttattagggtaaggaagtatgatctctttaacgtacatggtattttaaaaatatcttattctggtgtgtcttcttgattgtaaaaccccacttaacattttgggcttctatttrtatctttttactttaaagtaacactattctgtggttattcttgtggcatattaaagtgatattttaaggaatacttaaccaaattctatataaaatgtatctactctaagttagaaatcttggtgcccttactggtcttatgatcttggaagtcacttaagatcctgagctctgtgttaagccagtgctggttcaagttctggatctaccattgaataattgaccatgacttctttatacttcagtttccccaattgttgaataggaataatgattgttgtgatgagtccataaaaaatacagtcttactgactttatggtggccgaaatttcaagagtaacacagtaacagttaagtcatactgggactcaggctaatcttttcttccgttgccctaggcattgatgtccccctggcaaatgagggtgagaagcggtgagggattgcatgggaggtttggggacaaggcctgagagtagtaaagaggctctttcacttt

SEQ ID NO: 677307 - DNA, 1384 bp, Homo sapiens
ttttctaagccaaataattatatacatatatatataattattactctctatatataatgaatacatttacaatcatgcctgtatagggtgcacactatctatattcttaatgccctttgccctccatctttagaaatcaatttttggtattgtgggttctctcattttatttttacacccaattcagtgacaggcatataaaatgaatcacatttgcagagttgaattgaataaaatgtatgctaaagtggaaagactcactaaagcaaacaattaaaaatatatccaattgagtctttctcatgatctatcactttgatacggttaattcttcactcttccatggtttttgatgcttatgattctactgggcccaccatgataattcataatagtcttcctatttttcatcagcatatcagcaattttgatcccatttgcaaccttatattctctttgccatgaattgtaatatattatttccagtatctaagaacttggatgtaaatatcttttttagggagtggggaacattattctgtttatccaaaccctaattaactgtatgtctcagaaatggtcctggtgctttcccagtttagttcacatcccagagacttatcatgtgaactctcttcatctcagaacaaaatttttaacatttgcctctcagttatcgacaagataaacactgcttttagtcattttatttcaaccaagaggttgcattaaaatagtcacatgtggttctttttcctgagactttacttgatacaggaatgtcagtctccaatgagaaagataatgcctctcaagttttcttcggatatcctcaataccataatactttgtaaaattttgcagaacaattttgcagttgccatttcatgttatttggccaggattcaggtatcattgcatcattttgctgtaatccatgggtaaaaacaatttagcttcatgcatgaaatataaaaaacagtaaattagcacagatttggtggggggatgaaggtgtrtctggttatatattcaaagtcatttatcattacactgtcccctaaataaaaatatgaaaggcaatgcaaacatcttgacacttagtattcttgtctaataaacacaagtgactgaggtaaaaaatattgctctaaaaccaccagatatgtttgattttataaaggaaatatcatctaggtgattaaatggttattactctctctacaaaactttagtaagtgaatccatttatcataaatgtcagaatcaaacaatgaaaagttcccaccaacatgcatctgcaccatcagcatggttgagttctgctgtcaagttgaaatcagaaaaaaaaaaaaaaaagaaattaaaacaaggggaggcacca

SEQ ID NO: 677308 - DNA, 1384 bp, Homo sapiens
ttttctaagccaaataattatatacatatatatataattattactctctatatataatgaatacatttacaatcatgcctgtatagggtgcacactatctatattcttaatgccctttgccctccatctttagaaatcaatttttggtattgtgggttctctcattttatttttacacccaattcagtgacaggcatataaaatgaatcacatttgcagagttgaattgaataaaatgtatgctaaagtggaaagactcactaaagcaaacaattaaaaatatatccaattgagtctttctcatgatctatcactttgatacggttaattcttcactcttccatggtttttgatgcttatgattctactgggcccaccatgataattcataatagtcttcctatttttcatcagcatatcagcaattttgatcccatttgcaaccttatattctctttgccatgaattgtaatatattatttccagtatctaagaacttggatgtaaatatcttttttagggagtggggaacattattctgtttatccaaaccctaattaactgtatgtctcagaaatggtcctggtgctttcccagtttagttcacatcccagagacttatcatgtgaactctcttcatctcagaacaaaatttttaacatttgcctctcagttatcgacaagataaacactgcttttagtcattttatttcaaccaagaggttgcattaaaatagtcacatgtggttctttttcctgagactttacttgatacaggaatgtcagtctccaatgagaaagataatgcctctcaagttttcttcggatatcctcaataccataatactttgtaaaattttgcagaacaattttgcagttgccatttcatgttatttggccaggattcaggtatcattgcatcattttgctgtaatccatgggtaaaaacaatttagcttcatgcatgaaatataaaaaacagtaaattagcacagatttggtggggggatgaaggtgtgtctggttatatattcaaagtcatttatcattacactgtcccctaaataaaaatatgaaaggcaatgcaaacatcttgacacttagtattcttgtctaataaacacaagtgactgaggtaaaaaatattgctctaaaaccaccagatatgtttgattttataaaggaaatatcatctaggtgattaaatggttattactctctctacaaaactttagtaagtgaatccatttatcataaatgtcagaatcaaacaatgaaaagttcccaccaacatgcatctgcaccatcagcatggttgagttctgctgtcaagttgaaatcagaaaaaaaaaaaaaraagaaattaaaacaaggggaggcacca

SEQ ID NO: 677309 - DNA, 602 bp, Homo sapiens
tctaatgctcacaaaagtcttgtaggaaggtattaatattattcctttacatatggcaacaataagctcccagcaagagtacaatacttccccaaggtaccacagctaataaatggtggtagccagtatggtgaatagaggtctgaattactccaaagcaattttgattaaccaaaagcctctggaaggttcactttcatcatttgtaaaatagactgaataatatctaataggagtgaaatgtttcaagacaaagaaagtagttttcytaacagtagaaggacatgcatggggtaacaacactaacagcaataatagttatctaatgcttcacccttttcacagtatgtctgcatatatcttctgtaagcaagatgacgctttgcattctgaaaaagatatcctaatggttacagccattggaatccttacatgcatttatatggggaaagaaaatcccctcctggactttcctggagggcaatgtaatgcgaaggtgaagggcacaatccccagagtcagactctgcccttactgactgaatgaccctgggcaagctatctaacctctctgtgccttagcggtagataaatacacagcct

SEQ ID NO: 677310 - DNA, 602 bp, Homo sapiens
tctaatgctcacaaaagtcttgtaggaaggtattaatattattcctttacatatggcaacaataagctcccagcaagagtacaatacttccccaaggtaccacagctaataaatggtggtagccagtatggtgaatagaggtctgaattactccaaagcaattttgattaaccaaaagcctctggaaggttcactttcatcatttgtaaaatagactgaataatatctaataggagtgaaatgtttcaagacaaagaaagtagttttcctaacagtagaaggacatgcatggggtaacaacactaacagcaataatagttatctaatgcttcacccttttcacagtatgtctgcatatatcttctgtaagcaagatgacgctttgcattctgaaaaagatatcctaatggttacagccattggratccttacatgcatttatatggggaaagaaaatcccctcctggactttcctggagggcaatgtaatgcgaaggtgaagggcacaatccccagagtcagactctgcccttactgactgaatgaccctgggcaagctatctaacctctctgtgccttagcggtagataaatacacagcct

SEQ ID NO: 677311 - DNA, 1470 bp, Homo sapiens
actctaagaagacgtgtatttatttatttgtttgtttcagagacagggtcttgcgctgttgcccaggctggaatgcagtggtgccattagctcactgcagcctcaaactcctgggctcaaggaatctcctccctcagtcccctgagtagctccctgatggcactacaggcatgtgccaccacacctggctgattttcctttttttttttagagataggatctcactatgttgcccaggctggcctctaactccgggcctcaaacaagcttcatgcctcaggcttcccaaagcactgggattatagacaggagccaccatacccagccaaagaagatattttttaagacaattgagaaaactggaaaatgagtattataattgattatagtaaggaattgttattaattttctaggtgggataatggtactgtggttatttttttaacttcttatctgttagcaatacacagcgaactatttataagtgaaattatatatgtctgagatgttctttaaattactccagaaaaaaataggaggtagaaattaggggagaaaaacataaaaataatttttaatatgacaaactgtgaagatgatggcatttctcacagcaataatgtatttgagaaaaggcacggaaattctaagagagtcagagtgcatggctccttacctgattctgtagacatttggctacatttttagcacatgcctaaatggtctgtttgcatttgagaatggatgcatttgagtcatgcaatgtttaacaaagttaatagctgatcctaaactttagattttagtgaggaaaacagggaggaaaagaacagatattcattaaacccttaatttatttcaggcaccatactcagggccttccttcacatgcattatctaagtttttccaacaacctggttggagaaatatcccctttctcctctccatttttctctcctcccctctttcctgagtgatgggtgggaactggacctgggtaaatgcctggctccttctctgacctgttggaagctgttatagttggccctgacgtcaatgatattaacagtgaacattgacttttctcatctgtgagccagaaaagctttgtgggccagccagaatgatgtcacacaagacaaatcctacttcagagtgagagtctctgtcaccagctatgttttcagagccatgtgagccacagggtgagtcccagaaagaaaaccaccaggggggtgaaggatctggactatggagccaaatgacgacgttggtgtgaatcttagttcttccacaccctgtgcggtaacttatcatttctgcctgtatgtcagtttctttgtctgtataacggagataactgcagtactcattccataggctgccatraatgttaaacatgttcatacacacagtgtttgatgcaatgagaggtgccaagaagctctcagtaagtgttggccgttgt

SEQ ID NO: 677312 - DNA, 604 bp, Homo sapiens
tttctcaaatgttccttcactgtctttatcatcctagaattttattttagtcttgggatttattgaacttcttctccartatttcattagcatctcatccatggtttctcagaattccttcacatggttcagccattttgatacttcttaaaacttttaaacctttgattaaataaatacttgctccaaaacacataaaaattctttgactgggattaaaacaacttttcagaaaggaatacaattcttataaacacgtttatgtgtcatattaagttcaaaatagatgtgttcctacacattatagaaagtctaagtttaattttttaaaggttgagtaaatacacacttgaaaatgcctacaattttttttgcctacaattcttataaacagttcctaactacctgtcaacagtcagtgtcaacatttataagttaacaaaacaacatgctttgacagagtcactaaatccttgtctgtttatttctggaatgatcatgtgaaagtcatgtccagctgaaccttagaaaaacatacaaattttacatagaatagaacacatagaaaatagaggtttcaacagtggatctgtctagagggcgt

SEQ ID NO: 677313 - DNA, 624 bp, Homo sapiens
aagcttatttggtagcagaagaaaagctggaaatcaaatattacactttttgtgcagtgctgagtcacttgaagatgctatgttgaaaatcaatcttgaaggataggtaacaccacaaagaggcagaggagttggaaatctcatggcaggattataggcagtgaggagaatggtttggcccaggtgaagtgagagtttatgtcaaaagtaaaattggaaagagataactatatcatggatcttatactttatctagtgagcaatggtataattcatgtataaaaagagtttgtggctgggcacggtggctcacacctgtaatcccagcactttgggaggccgaggcaggcagatcacaaggtcaggagttcgagaccagcctggccaacgtggtgaaaccctgtctctactaaaaatacaaaaattagccaagcgtggtggtgtgtgcctgtaatcccagctactcaggaggctgaggcaggagagttccttgaacccaggaggcggaggttgcagtgagccgagatcacgccactgcactccagcctgggtgacagagcgagattctgtctcaaaaaaaaaaaaaaaaaaaaaaagrgaagaaaaagaaaaaagaaaagaaaa

SEQ ID NO: 677314 - DNA, 591 bp, Homo sapiens
ggaccgggctcttatgaaagggttagaacaaaccattttgcttttggttgatgtaaattatcaggtggcttagaacatatttgtgtcttgtatattatgtttaatgttggcaagaaggaaagattaaagtatgattttaaatggcatgagttagaaatgttggtgttgatattttcttagacttgtggacttcacttaattcttagcmagcattagaattaatagaaactgcagatacttgagggtagagggtgggaggagggagaggagcaggaaagatagctattggctactgtgcttaatacctaggtgatgaaatagtctgtacatgagtacatgggtttacctatgtaataaaccttcacatgtacccctgaacctaaaataattgttaataagaaactgcagatattcgttgatataatgttccatatttacagatgaagacaatcagactcaaataggttaagctgcccaaagtcacagagataattcaacataaatgaagaagaaagctaagcaaatagagtttttattctttttgtttatttgagggaaatggggtagcaaaggaaaaaatcaaagtagctg

SEQ ID NO: 677315 - DNA, 591 bp, Homo sapiens
ggaccgggctcttatgaaagggttagaacaaaccattttgcttttggttgatgtaaattatcaggtggcttagaacatatttgtgtcttgtatattatgtttaatgttggcaagaaggaaagattaaagtatgattttaaatggcatgagttagaaatgttggtgttgatattttcttagacttgtggacttcacttaattcttagccwgcattagaattaatagaaactgcagatacttgagggtagagggtgggaggagggagaggagcaggaaagatagctattggctactgtgcttaatacctaggtgatgaaatagtctgtacatgagtacatgggtttacctatgtaataaaccttcacatgtacccctgaacctaaaataattgttaataagaaactgcagatattcgttgatataatgttccatatttacagatgaagacaatcagactcaaataggttaagctgcccaaagtcacagagataattcaacataaatgaagaagaaagctaagcaaatagagtttttattctttttgtttatttgagggaaatggggtagcaaaggaaaaaatcaaagtagctg

SEQ ID NO: 677316 - DNA, 608 bp, Homo sapiens
tgaaagatgacttagtgtacatgattgggaattatatcttgataagccccttggttggttctgggagtgattccttcaaggggaacgcttgggaaataatatataatagttaaatattctggtaacttcatgggctttattcagctgagtgggcatatgagtgtggggatatcaagggtttaggacaataaggtgatcaaagcactgactcggtggtcttttaattcctccattctgttcttccctgttcagtgcttagcttctcttaatatacatttcacaaatatatttattctgaggaactaaattattagcctgactaggtgttcaaatgtttccatataggcctttctgttcctttatctgggattacaggcatgagccacaacacacagcttaacccctgtgtgactatctagtccatagaacttcagaaagtacaaccaaatagggtgaaagttcaagtcttgygtcctctataatcctatcttgcaccctgtccctcaccaaatattttgaagcaaatcccagacatcatatcatttcctccataaatatttcaatatacatctctgaaagtttagacctctttcaaaaggttaatttcc

SEQ ID NO: 677317 - DNA, 591 bp, Homo sapiens
cctttagctctttaagaaatctccatactgcaaaaataaattcttaatactataaaagatcaaattaaacaagtaactcttagcatgacaaaaatgcaaggaagtatgtgaatccagagaattaatactaaaataaaggagtcactgatgaaacatatggaaaagtaacagttaaaacagaaacattaaataaaatataattaaaaatgcatacctaagtgtatataaattatttttctgaacaccaataaaaaacccacaaggcaaataatattttatatttcaagtgcaggtaaataccaatgaaaacataatcagactgggattatatttctttcttcagtgtgaacaagcaaacagaagactatttttaggaaactgtagcaaagtttttttacctaataatacgctrtctgaagtagaaaaaagtctaatataccagccatcacacatgagttagcaaaaccaaaacttgctagaccccaaaaacttcagatataaaacatatttaaggaaatcatttaagtaatagataagctctgtgaaaactatagcagaagtatacagtaattatataataactattgtcta

SEQ ID NO: 677318 - DNA, 1778 bp, Homo sapiens
ctgggtgacagagtgagaccatcacaaaaacaaacaaacaaacaaacaaacaaataaataaataaataaataaaaaatctgggcctcccaccaagggtgggaaacatcagaaagctcagaggaccacacctgcccgttcacctgtcctgggctcctgctgaagccagggctaccagatgggggcaaaagacctcccttacgcaagtcccaaaccaccattacctcccacgagtacaggtaggcggggtgttcgtgcatcaggtacggccaccagaggttggcacccagcaccttcagctggccctgggtcccagcctggttgtccacgactttgttttctgcattcaaaagacacacttccaacttgaactggttactgcacttgacggagatctggtaattcaccagccctgcaggaggcaagagagaccagggcttagggagggacatgacctgggtcacacaaacgggaaggccccacaatgaccactcccaggcactctcatttgcttctgttgctttttttttttttctttgagatagaatctcgctctgtcacccaggctggagtgcagtggcatgatctggactcactgaaacctctgcctcccaggttcaagtgattctcctgcctcagcctctggaatagctgggattacaggcacctgccaccacatccagctaatttttgtattgttagtagagacggggtttcaccacattagccaggatggtcttgatctcctgacctcgtgatccgcctgcctcggcctcccaaagtgctgggattacaggcttgagccaccgtgcccggccctgaaccaatgcgcccagcccgcttttaatttaattttttaatttttttttttttttttttttttgagatggagtctcactgtcacccaggctagagtgtagtgctgcgatcctgactcgctgcaacctccacctctggagttcaggtgattctcctgcctcagccttccgagtacctgggaatacaggaatgcaccaccatgcccggcgaatttttctattttcagtagagacggagttttgccatgttggccaggctggtctcgaactcctgaactcaggtgatccacccgcctcagtctcccaatagattacatatattattaatgaattgyttcctttaacaccctattcattgaattttccagtaaaccacaattactaattactcctgaaatcagaaaagaggttaaaaagattttataacagtatcctatgaaatctactactttcaagtaatagtagttgaattaccaaaacccgtcactcaagccaatgactacaattaagatatgagtaacatttcctagataaataaagtcaattaattatatttgcatctgggaaatagagaaagtacatataagccatgattttgaagtcaaaagagagagaatatttgccaaggaggggtgagttatagtatgtaattataacatacagaagttttttgtatgctggtaactaattttaatttcctacatttttatgtagatttctgctattcttgtcctattttcctaatcatctttctatatgaatgactacataattctgagaataccaaaagagacagacacagaaccaatcggattcctttcttcttgaagcttctgcacagcaaaagaaactatcaacagagtgaacagacaacctacagaatgggagaaaatttttgcaacaatgcatgtgacaaagatctaatgtccaacactgataaggaacttaaacaaatttacaag

SEQ ID NO: 677319 - DNA, 763 bp, Homo sapiens
atttgcacatcacctttgcacatcctcccatatacttcatatcaactctagatcactcataatatccgatgtaaatgtcatgcaaatagttattgtactatattgtgtaaggaataaggacaagaaaaaagtctgtacatgttcagtacagacgcaatttttttttccaatatttccaatccttggttgccttaacggatgtagaacccaggaataagttctggtgtcctattgcatagtaggatgagtatagttaacaataacatattatatatttgaaaatagccagaagagtagattttgaattttctccctacagaaaaatcattatgcaaattaccctgatttgatcattacacattgagtacatgtattaaaacatcacattctaccccatatatatgtacagttattatgtgtccataaaaatttaatgtcaatgtctgaaataaaatgaaaaaataaaaatttttaaagctgtaattatctccatctggtaggaatatatacaatctgaaataaaaaatatatttgtaattgttaggacaaaatagattatacrttaagtctgcaaattataaattataaaattctcacagaacctgaaaaattattgatactgttaaatatttaaaaagctgtccttggagagaaagaaacctatcagatttacatcaacaagtgtaatatgtcagcctattaccatctgctacagactgcatgtttgtgttccctcaaaattcatatgataggccgggcgcgg

SEQ ID NO: 677320 - DNA, 652 bp, Homo sapiens
aaaactcaggttccaaccctggagttactaaatcaggatctcagaacgcagagatctggcatttcaataaaacttcccctggagattctgatcagccaggtttgggccagatgaactctaagctcacttaaacctttgacattttatgagtctattaaatcgagtacaaaaaatgctgagtccaaacygggcaaacaaatcccatctccctatgcccagcctccttggattcagaaagccacactgcctggagagtaagcagagagagaattgtcattaacccaaagaccatctttgaaaacagactggctgcggctgagtgcggtggcacacgcctgtaaccccagccctttggaaggccgaggcaggaggatcacttgagcccaggagttcgagaccagcctgggcaacatggcaagaccctgtctctatctttctaagtaaaacaaaataaaaagctcagactggcagcacatggttctttccagctgttcccatgagcaggcttcaggacaagcccaggcaaaggcagggagaaatggggtggggacccccaggctcacccccttgtctgctgcgtaggtggagttggtcacaaaggtcacaggctgggaggggtccaaggctttggtgtgagcaatcaccatcctgt

SEQ ID NO: 677321 - DNA, 1103 bp, Homo sapiens
aaggtatttgaaatagttttctttccgtttttctttttgcatttcatttgactaagcagttgtctaaaatgtgatataaccagaatgtacctatttatattggttacttcaaaatgcatgtctatgagtcactgtttttatacactttagctagtcagccagttcaaagaaaagaaaataggggaaattattagaataacaattactagttgaatgacctaatacagattaaattataagaaacaagacaggaaaaggaaacttagtttatatctcacataagtgcattttaattattccatcaaaccaataactatataaacataatttcagaaaaatggaaggttgagtttaacattataaaacagtcattagctgtgtaaataatgagtaaaaatatgtaatggtcagaaaaaacatagcacttgcaatgagagactgtttgtattaaatatatttggatgtgtcagttgctgcaatatttattcaaggaaccaagcttctgggatttcatttctatttgccaccaggtgaataaaatgtgttaagttcatgttgtctgtgaccttttactaaaaatgttattccttagtcatattctgcattggtggtcagggttggatgccaagaatttgcttgtcatctgactgaktttccttttcacgtgtaatgcttcatctgaattacaccatcctaaatgattgtacaagctgaagaattttctatgtccagtagttttattctttaaagaagcattcaagaaccattacaaaacaaataaagcaaagatagattctgtatattctggtcatttgtgtgccaagattgatggtggttagtagagtatgtaaatcaatgaatttaggaagtctcactgagttgtacaaactctttactgggtccgtagctccattttcagagtcctgtgtgttttcacagaaactgcaccattagttatcttcactggaggatttgaccaaatttatctaaggtaatgtgcctatacacgagtttcctaactaaggttcttaaaccccttggtttatgaacttgtggaaatttatgtaatcatgcatatgtgcacatacacgtgcatgtctgtt

SEQ ID NO: 677322 - DNA, 624 bp, Homo sapiens
taaaagttgataaataaataaataagaatttaaaaagaaaagtgtctgttcatatcccttgctcattttaaaaaacaaaacaaaatgtttaatgggcaaaggatatgtgtgtttgttttttactygcaaaatgtttgtttttcacttgtaaatttgggaggcctttttaacacgctctttatctagtagggccaagctaaccctcttccctaggacaaatagcaatagccatgtataataacaaggggaattaagcctctactgccttacatcccccttcccttccccaagctgtgtttgggtaataaacgaagtagctctgaatcaggaccatcagcgtggaggttaagaaaactgagagaaaagattgtagatattcaaaaattgtgagagtaatgaggcgtagagaattgttcataaaaataaaggagaacccttcattttctccagtcacctctctgtctcaaaagtgtctcagataaataggaaatgcctgaagaagcacacacagtacacttcaacctctcagtgcacgtacatgacccaggcagaaaatggtcaattattggccaacaattttagataccaaaattcttttctccttcataattcattcatgaaacc

SEQ ID NO: 677323 - DNA, 614 bp, Homo sapiens
ttgacttcatgattgttttataatagttaatgcacactgaccaggttccacctaaagcccaagaatgtatcggaatatcagcaataatgtttagctcttagaaaaaccacacatagtaatgtgaaatccagctaaatgcattttgtattgaactacagcatttagttcctcggtctcgtctatcaattagggtgataagcaggcactcagaagctagcttttcaattacgttttctaccttcaactgaaatgttcctgtcattgcatatcgtgtagtaattttgaaaaggcttcatcttagcaaccaagtgataactttaaaatcaagratctgaaccaattaattcctaacattaattacttcttttaaaacaaaagactctttaaagtaagtgactgcaaatatactttttatcccactaacggtccttatctctttttccctcagctcacaattctgttgacaactcatgctcagtctcaaatcatcattcaaatcataattaaagcataattctgagctctctttgtacatgctaattccaaaaccaccagatgtaaaagccacacagaaattcctatagagtattattagcttgcaaggagcagaatta

SEQ ID NO: 677324 - DNA, 1816 bp, Homo sapiens
  misc_feature 647, 648, 649, 650, 651, 652, 653, 654, 655, 656, 657, 658,659, 660, 661, 662, 663, 664, 665, 666, 667, 668, 669, 670,671, 672, 673, 674, 675, 676, 677, 678, 679, 680, 681, 682,683, 684, 685, 686, 687, 688, 689, 690, 691, 692, 693: n = A,T,C or G
  misc_feature 694, 695, 696, 697, 698, 699, 700, 701, 702, 703, 704, 705,706, 707, 708, 709, 710, 711, 712, 713, 714, 715, 716, 717,718, 719, 720, 721, 722, 723, 724, 725, 726, 727, 728, 729,730, 731, 732, 733, 734, 735, 736, 737, 738, 739, 740: n = A,T,C or G
  misc_feature 741, 742, 743, 744, 745, 746, 874: n = A,T,C or G
aatagataaatctgcagttataattgtaggcttcaagactctattctcagtaagagayagaactagttgacagaagaccaacaaggatagccaagcactgaatgtcatgttaaccaattgaatctagttgaacattccacccaacaccaccagcaaaatacatattcttttccagagtaaatggaacatacaccaagagaaatcataggttgagtcatttgagaaaaaaaaataaacacctcaactaattttaaaagattgtgatcatacaatgcatgttctcaggttataattcaattaaattagaagtcaataataggaaagtctccaaatatttagaaattgaaaatcaataggtaaacttctaaagtagtttcatttatatgtattatatttgaaactgtgaaaattatatgtaattaagtccattgtgtattaaaaatcaggagagaattaagtctatggaactactgaagtcatttggaaatcagaagctaggctgagtttgtgcccgctgtggtgctgccaatattggtgtggagcattaaggaaccctttgagccatattctacaactgtaatctcatactaaataaatgactattcttaactagttgcttataagtcacttaaaactacaatttttannnnnnnnnnnnnnnnnnnnnnnnnnnnnnnnnnnnnnnnnnnnnnnnnnnnnnnnnnnnnnnnnnnnnnnnnnnnnnnnnnnnnnnnnnnnnnnnnnnntgtgtgctgcaaatgtgtgagcataagaacctttgagcatatctacactgtatctcatctaataatgctatccttactagtgctataagtcactaaaactacatttttaaagggtcctttccctgttnttctgttatcatctgcaattggttataacaatgatatgtttggctctgtgtccccaccaaaatctcatctcaaactgtaatcccacccacccaatgtcgagggaggggcgtggggggaggtgattggatcacggggggtaggggaacagtttcccccacgctgttctcgtgatagtgagttctcacaaaagctgatggctttaaagtgtggcacttcctcatacactcacacactctctctcactctctctatgtatatatatgtatacgtgtgtatacgtgtacatgtatatgtatacatatataggtgtgttatagatatatctctctcctgctaccatgtaacttgtatcttgcttccccttctccttccgccatgactgcatttcctgaggcctccccagccatgcagaactgtgagtcaattaaatgtcttctctttataaattacccagtctcaggtagtatctttacagcagtgtaaaaatgaactaatacaaacagcaatattcatttaagaattcaacgctataaaacctaattaactcaatgctgagatttgaaaagccttgatctaatctagtttgtctagcttcctcctacccttagataagtttagacattctatgattaaaaggctctccatttctgagatatgaacaacttttagacacttgagacatacaggtgactttctaatctcaagaaatataagagttgacttaataagggcataggtcagggtagagatatccttttaaatgtgtccaatgaaagaggggttggttatggtttattttaatgttttaagtgtgtattgtatcagtgtttccaaattttctaatttaaaattccactctcatctccaacaggtagcaatgtagttattttaaaggtaaaaggaaaatatgctaaaaactaaattgtgggagcattattgat

SEQ ID NO: 677325 - DNA, 1351 bp, Homo sapiens
aaattgtatacattctttttaacataagataaaaaataaacattaaaaaatcatatttgaactcctagactcccaagtaactatgaaccacaatttgagaaacagcggtgtcagatctcttttttaaggagaattatcagcagtttcatagaacctatggaatgaccaataacctatactatgggtctgragttggtcatttgccacaatgtagctgcaaagtgcacaatttggtcacaatgtccacagttcaattgctaggggaaaagaagaaaagggccattggataggcaactagaatactttgacattgggacatgaatgattgatgttaatagattcaagttttcccagaattttgttagtaaatattcattcttactcagaaccagaaatatccgaatgtgctagactggttaatactctgtgttaatggcatacatattatgaatattgtttaaaaggaaatatgagtttatatttcaaaattaatatagttcctacatgtccttatttgactttcagcaaaggtaatgctggctcaggttttagcaatttacctgctgttaaatgtggcagcatgatgtttcaatattagaaaataggggaaaaaattaaaaaggcttttgtggatttgcattaagtaagctaagaatatatttttccatttgttattagccattgttaaagcaattgaattattatactcttatccatcattgtaacatttggatttatggagaacataatcagacaatagataaatatgaatttttaaagagaaaaatcaagtctacaaataagaaaaagaacaatcacctgattgttatgaaccatctgaatatagttttctaggaattctttgctctaaacagacaaaaaacaaaatgactcccactgggtaaggaaaaaagcaataagatctaaatcttaatcaaatgttgttcagatctctatagctgggggctggctttacaggaacattcagaaagttgtatgtgtgtgtgtttcaggtctccatgttacattaagaccttgtgcagggtacagttaccctcaataatttcatattgtttaactagaaattcaaagccagaaacaaatatttttgtcctctctccaagtaaagaataatatcttcattgactaacaaaagagattcttctgagcatggattatgcctttaggctctaggatgatgcctttttagtgtctatatgcaaactttagttgaaattacgaccctaattgacaggatttttaaattgagcacccacaggccacgttgctacatagtacatcgtcattttcttctacattgaattaattttcaatcaacattgttaaaaaa

SEQ ID NO: 677326 - DNA, 685 bp, Homo sapiens
gcaaatgcttactctttgtccaccgaatcagagaaaaaagtggcaaagtgacggtgcagaccttcttagggttacacagacagggaggaaggcacagcccagagaagtaggctagggagaagtaggggccaggaggccaagcctttagcaaggtttgaatctgtggtcaatctcaaaggattaaaaggccggtaagcaggattataaacagggattaaggtcctggtaatggacaaggcaggttgaggcttcagcagggatcagagcctagctaaagaaaagcctaggccaagaatgggaaggccataagaacatatcataagaaagtctatctctatctgatccagcaaaaagaaaamttagattgtatattaagttattcaggtctttccttataatgatgatgattcttctaagtataaaaggcaagggtcaatcaaggtaggtaggtaggttctcatctcctacacagctgtatcttcagttttagaagattcatctcttccacttcctgctgcagccactgtgtaccccgaatggcttaagggcttggcgcctctgtgtatgaagcctgagttctgactcataagtcttaaaaagatatctaaggctgactcctccatcctgggctacagctgcaaagaagacagacacaccctgttttgcagagcttacatctagtgca

SEQ ID NO: 677327 - DNA, 672 bp, Homo sapiens
ccacactgactgcttcatgtgtctcagtccaccttcacgtgtctcagtccgcttaggctgctataaaaaataacaaagactgggtggcttaaacaacacttactggatcacagttctggaggttgaaatgtccacgatcagagttcctgcatggtctggttctcgtgacgactcttcctggcttgcagattggggccttgctgtatcctcacgtggcataaagagagctcttgtctcttcattcccttgtaaaggctccaattccatcatgagttccacccccatgacctcatccaagcccagttacctcccaaaggccccacctccaaataccatcacactggagattagggtttcaacatattgattttgtggactgcaaacattcagtgtatagcaaccagctcccacttgtagtggacctgcttttctgacccaagytctaaatgctgcacactgaaattgccttcttcatgactgttcttatgtgctgtttacttcactctttcccatacctctatctctcagaatctgatctaaacttacatgaaaaactcaaagcctatcttttgcatgaagtcttccctgatatttatggtaaaaattaaccactttctcctgcatgtccctaagcactttagttatatctctctttgtgcacttaatgcatcc

SEQ ID NO: 677328 - DNA, 636 bp, Homo sapiens
cagtgcagaagagttcgtggtttgcatgacaccaataagagttaatgtttcctgtgagcttactatgtgyaaggcactgttaaactgtgtttaacagacacagtttcattgaaggctcacagctgcctatggggaataccatggttatttcatattagggataagaggtctgcagcagagggaatttatgccacttgctcagggacacccatacaatgagtgagccttagagacagaattgaaatctcagcagtctggctccagagttcatgttaatttctgggccaccatgcttgtcacctaggggtagttaataatcttaacgaattcagtggaaataggaactcagagccagaggtgatgtgaaaaatataagccaccaccacttattttggaatctccagaccagcagttcccaggcttcagtgtgcaccaggatcaccacgtgagcttgataagacacaaatcgctgggctgcacccctagagcttgatccagaagccttgggcagagcccagggatgtgcatttctaagaagttcacaggtgattctgatactgctggtctaaggtcccacaatttgagaaccactgccctctgtttgtggcagtgagattcagctaatttattctgaat

SEQ ID NO: 677329 - DNA, 636 bp, Homo sapiens
cagtgcagaagagttcgtggtttgcatgacaccaataagagttaatgtttcctgtgagcttactatgtgtaaggcactgttaaactgtgtttaacagacacagtttcattgaaggctcacagctgcctatggggaataccatkgttatttcatattagggataagaggtctgcagcagagggaatttatgccacttgctcagggacacccatacaatgagtgagccttagagacagaattgaaatctcagcagtctggctccagagttcatgttaatttctgggccaccatgcttgtcacctaggggtagttaataatcttaacgaattcagtggaaataggaactcagagccagaggtgatgtgaaaaatataagccaccaccacttattttggaatctccagaccagcagttcccaggcttcagtgtgcaccaggatcaccacgtgagcttgataagacacaaatcgctgggctgcacccctagagcttgatccagaagccttgggcagagcccagggatgtgcatttctaagaagttcacaggtgattctgatactgctggtctaaggtcccacaatttgagaaccactgccctctgtttgtggcagtgagattcagctaatttattctgaat

SEQ ID NO: 677330 - DNA, 597 bp, Homo sapiens
gaactgcacagaaagtggcctgtaggtgaggagaactgtgtacacatacatacacacacacacgcacacacacacacacacacaatctgcctcttctttccttctctctccagaggaaaatgtcatccggttagtgccctcagatgaactgggaaggcaagctccccggttgtggtttgtgaggggtgggtggctggggaggggaggtgtcagggagagccaatccacttccatctggcactgaaatctacacttattttcctggactggactacgatcccctttcccaatgtgaggaatcgygctttcttggtgacacacactttcccccaagaatgcttggcttttcaatgaggaattcttatatatttgggattcttggaaacaggacaaagactaatgaattgctggctctatcctaggtttggaaaccctctagaactcacaggagctggaggaggacagaggcaggcaggaaaagggagttgagggtgtgtttgcaacagaggggagggtggcaggattgagatgtcagattaaattgtttgagttacaggcactccaaaagctacctgctgactccacagtcagaggtca

SEQ ID NO: 677331 - DNA, 617 bp, Homo sapiens
tattttataattaacatatgtacattttttagaaataatactttatacttaaatagactatagtgtagcrtaaacctaacttttatatgcactgggaaaccagataatttgtgtgactttagtacaatattcattttattgtggtggtctgtaaccaagcccataacatctctgaggtatgcctatacttgcagactaaagaaagagatgaaagctattgtattacagctatagatttttacaaaaaatagcaaattgatgagaataaacattcaacactcagagcagtcctccaatagttttacaggcagaaaatctatctctagtatctgcaggagcatgaattttaaactcttttttacagcaagacaagcattatagctcattcataatgtggccttgagtttaaaatgttcaggcagttgttttttatttataatatgaagagaataaaacacgcaaggtatgaaaatctaggcttgcacaatcaaaatctccaagtttatacctatgataaacttgtcctaaaatctttttttttcctacctagatgctatggtcaatctcaggttatattacaagatatcaacatccacagttttgcagcagtggatgct

SEQ ID NO: 677332 - DNA, 617 bp, Homo sapiens
tattttataattaacatatgtacattttttagaaataatactttatacttaaatagactatagtgtagcataaacctaacttttatatgcactgggaaaccagataatttgtgtgactttagtacaatattcattttattgtggtggtctgtaaccaagcccataacatctctgaggtatgyctatacttgcagactaaagaaagagatgaaagctattgtattacagctatagatttttacaaaaaatagcaaattgatgagaataaacattcaacactcagagcagtcctccaatagttttacaggcagaaaatctatctctagtatctgcaggagcatgaattttaaactcttttttacagcaagacaagcattatagctcattcataatgtggccttgagtttaaaatgttcaggcagttgttttttatttataatatgaagagaataaaacacgcaaggtatgaaaatctaggcttgcacaatcaaaatctccaagtttatacctatgataaacttgtcctaaaatctttttttttcctacctagatgctatggtcaatctcaggttatattacaagatatcaacatccacagttttgcagcagtggatgct

SEQ ID NO: 677333 - DNA, 617 bp, Homo sapiens
tattttataattaacatatgtacattttttagaaataatactttatacttaaatagactatagtgtagcataaacctaacttttatatgcactgggaaaccagataatttgtgtgactttagtacaatattcattttattgtggtggtctgtaaccaagcccataacatctctgaggtatgcctatacttgcagactaaagaaagagatgaaagctattgtattacagctatagatttttacaaaaaatagcaaattgatgagaataaacattcaacactcagagcagtcctccaatagttttacaggcagaaaatctatctctagtatctgcargagcatgaattttaaactcttttttacagcaagacaagcattatagctcattcataatgtggccttgagtttaaaatgttcaggcagttgttttttatttataatatgaagagaataaaacacgcaaggtatgaaaatctaggcttgcacaatcaaaatctccaagtttatacctatgataaacttgtcctaaaatctttttttttcctacctagatgctatggtcaatctcaggttatattacaagatatcaacatccacagttttgcagcagtggatgct

SEQ ID NO: 677334 - DNA, 650 bp, Homo sapiens
tgttgaacaactttctgatagtgtgacagagtcagccgatctccaggtcagtcagctgatgtgcagtggtcatttgtcataatcatggacaccctacrtcttttgggctcccagcttatattttggtgatttttctctttgagatttgcacctttgtacccaggttccaagccagcctgaacactaaggccagacatgtgatccagtttccaccagtgagatgggccccatgacgaagaaggtcacattcagcatccacctttccagagagaatggcaggaagtaactgggctttcaggagcaacagaagcaaaatacctagcagtagaatcctgcagccaccacacagtgtgtcatgcattgtatccactgggcaagctgtgttgctgcatccacaatgacagtgagactgacctgtgagtgatccagcatctgggtttacttcttggctgtggggtctctgagcctgattcactggctctgaattcctggaaattctgtgagtttagcattatctttaatgattttcttttatggcctaaactagatagcgtaggttctattgtttgcaactgaaaatcctggcttatgtgagtgggcatttctgtttcttactgtgaattgagaagtggcattctattatacctata

SEQ ID NO: 677335 - DNA, 650 bp, Homo sapiens
tgttgaacaactttctgatagtgtgacagagtcagccgatctccaggtcagtcagctgatgtgcagtggtcatttgtcataatcatggacaccctacgtcttttgggctcccagcttatattttggtgatttttctctttgagatttgcacctttgtacccaggttccaagccagcctgaacactaaggccagacatgtgatccagtttccaccagtgaratgggccccatgacgaagaaggtcacattcagcatccacctttccagagagaatggcaggaagtaactgggctttcaggagcaacagaagcaaaatacctagcagtagaatcctgcagccaccacacagtgtgtcatgcattgtatccactgggcaagctgtgttgctgcatccacaatgacagtgagactgacctgtgagtgatccagcatctgggtttacttcttggctgtggggtctctgagcctgattcactggctctgaattcctggaaattctgtgagtttagcattatctttaatgattttcttttatggcctaaactagatagcgtaggttctattgtttgcaactgaaaatcctggcttatgtgagtgggcatttctgtttcttactgtgaattgagaagtggcattctattatacctata

SEQ ID NO: 677336 - DNA, 1379 bp, Homo sapiens
cctgcaggcccttttgggtgtggtcaaccccgcagtgtcaaccctgtttctagttattggcgtttgttatgcttcctcacttcaaaggaaccagaaaaataatttccaaaaacagctgcctttgtactttctaggccttttaaggtttttgcatgccagaatctcacctatttctaatatcataaagatgtggctgctttggaaaatatacctctgaggcttaatgctataataacttccagaataataaaacaacctccgtctctgggacctcagtaccttaaccaagcatcgtgtccactttgggctcatcaytggagggaaagtacgtactaacaaagcagcggaccaggcactgtggctcacacctgtaatcccagcactttgggaggctgaagcaggaggaccttttgagggcaggagttcaagaccagccttgccaacatagtgagaccttgtctctataaaaagcaacaaccacaaaaaactagatggccttcaggaattcaccaaataagttttagtgcttttatttttgtgaaaataacagacctatcttttagaaaataggtatagctgtgtatgaggacattggccaagtgtgactggtggaaaaaaaaaaattggctgtttgagtaagcaagatgggcttcatttcagcttaagggacaaccacagcatcttggagttcagaaagggtgtgtatgtgtcctttagaaacaaacaaggccaggcgtgctggctcacacctgtaatcccagcacttcgggaggcggaagtggttgtgcccagctatgttgctgggcaacatagcaagacctcatctctacttttaaaaaaaaattagccaagcatggtggcacgcacctgtattctcagctatttgggaggctgaggtgggagaatcacctgagcccgggaagccaaggctgcagtgagctgtgatagtgccactgcagtcactccggcctgggggacaggagtgagaccctgtgtcaaaactattaaaaagggaaagtggacagtagacttggatagacttggagtttcccagaatgattagtgtcagtatagaagcagcttggcttgaatcgattaacccagagcctgaaattacaggggtctagaaccagcacagaacacgcttagatacagatacctcagtgtggaagcattccacattttcttctaagcatgttagaaagctctcactctgaaaaagacgcagtcagaagaaggggcacagaattggttctttcgttatacacagaatgtatagtttaggctgcgagataacctcctagaacagcagttcccaccctgctgagcatgagattgcctggaaaggcatttggcttggaccagctgaatcagaaatt

SEQ ID NO: 677337 - DNA, 613 bp, Homo sapiens
cattaaattaccagagagatgctgaaactgctttttggttcttctttagtgaatggaaaacaaatcaatgtcagaatactttttgttgctatgacagactgagaagatgtgagaaatccttctcaatttcaacatataaatttagaaagaaaatatatcaaaaaaagcaaaaaaccctgaaatatatacttgaactccccmaaaaaggagaatcattggacaaataaatggagaggaaattaaaactcagggcaatgaataacatgggatgtaagggcctgacaaggcaataaggattagtagtgggcactatgtctgcaggtaaacaacttgaaggaacacatgacttgaacgagtcaggtaaagcaataaatggaagagtttgcacaaatgttgcaggcacaaaaatatctggcagaccataggggtaacaactaggcaacatataaaagaataggtaagtctgaaaacaaactaaagaggaaactttaagaatagtaaaatttacagaaactgaagttttaacaatgcgactaaaagattgatcagaagaaatcaatgaagaataattactgaattggaaaattaaagagaaaaacaccaagaaataaat

SEQ ID NO: 677338 - DNA, 1374 bp, Homo sapiens
ggtaaaactctgcctctactaaaaatacaaaaattcactgggcttggtgatgcatgcctgtaatcccagctacttgggaggctgagacaggagaatcacctgaacccaggaggcggaggttgcagtgagccaagatcacgccactgaactccagcctaggtgacggagggagactccgtctcaaaaaaaaaaaaaaagaaaaaaagaaaaaaaaatagaacccaaagcataacaagtgctcaggtccatggtcttccaacctcatcttgctccacttaactttgattgcttcagtcacactaacctcctttcagtccctgggaaatattttgctttttcttacaacaggactgtgcacataaaattccttctacctggaatctctacttgctgccctagtcccctggccaattcactgatacttgtagttagaagctccacttcccaccctccaaaccagcatcattaagattcctgtaacacactctcaaacaaccatggtggtttgctttattattaacacccctctcacataataacattcttttctgtgattacttcctgtctcccatattatatgattgtttgcataaaggtacatgttgaagcttagtgggtgcccacatttatttacggaatgggtgaattcataagkctctgcaggggtttgtgagaacctgattacttggaaggggtagcaaaaaagggtacaggcggctagagcagatggttaggtccctagcaatcttgagagtctgtccattttgtgtaattgattcaggccttattcatcactgttattcttttttcttattcagggtctacaaaactacctattaatgatacttgcattttgcatcatcttgactggagccttatgcactgctttttctaaaatctaacaatgacaaaaccagcaggtggcagcagtagttaagagaacgcgtctatcggacagcggagagatcatgctgagaaaagagtgcattttcatatagcaaatggatctcagccactgttggagtgggtaaatgatttttttccccaaaaatgtgagaatgaaggaagattgagtttcattcaagtataaaaatgaaaatttcttctgatgaactgtttatgaaggtagtactttactgggtgactaaaatgtctacattattatagcattacatacgaggatgctctttttaccacagtatgtacctagtgttgcataatctagaacacagtatagagtccatatacaaagaagttacagtccatatttctcacctattaccccagtgaagtgaggcagaaataccttgggcgaggagggagagccttaccttctaatggaattagattccaaagatatttggatcctttgtt

SEQ ID NO: 677339 - DNA, 1187 bp, Homo sapiens
ctactgccgcccagcatcacgggagattatcatctcatatctatagccttggaaaagatcaaagtgtggttactattgaatgcatgtagcttttgcatcactgtaaagttgaaaaattcgtaagttgagccataacttggggaccatctgtacaaatctctgcatcaataaaaaatctttgaaatgaaagtgattaaaactcaatttgagcttattaggcaaaagggtaaatttattggcacattaattatggtaaggacagggatgatggaacatcgaactagaggctctaatctgtattattctcttccttctcctcctgtgaatctttctaaacagtgacttcattttctcaagctggctgaaatgatgtgcaccatccctcttcctgggatcataaactcattgcttcatgactagagattaaatgttctcaatgtaaaagtcctggaagaaggctaatattcccaccttgagtaaagttctcaactgtgggccaattgctgtcctaacaaggagatatactgtttttgccatagcttagccatgtattcattcttacatccaggacagtgatggggtctattactagaagaaatgagraaataatgttaggtagacaaaaggtataagtttgctatcaaatcatagttgctttctccattctctcctgtactcctccactcccctttcacataatacagagaattggattagaaattgtatggattggtcgggtgcggtggctcacgtctgtaatgccagcactttgggaggccgaggcgagcagatcacctgaggtcaggagttccagaccagcctgcttaacatgacgaaactctgtctctactaaaaatacaaaaaattagtggggtgaggtggcaggcacctgtaatcccagctactcaggaggctgaggcaggagaattggttgaacccaggaggtggaggttgcagtgagccaagatcatgccactgcactccagcctggatgacaagagcaaaactctgtctcaaaacaaaacaaaacaaacaaacaaacaaaattgtatggatcacccaacaaataatagctaaagctaaaaatgaaggtgaaagaacagtagtttttgctttcagttgcagtgctcaaatgccatctaaaaaaaaaaaatacatgtggaaaacactccgcacttgaaagctca

SEQ ID NO: 677340 - DNA, 433 bp, Homo sapiens
ttgaagcacattgtgatcaataaaaacaacaccatcacgcccagtggtataagcatggctcacacagctaatcctggcattttgggaggctgaggcaggaggagttcaagaccagctctaaaaaaaaagggaccaggagttcaagaccagctctacaaaaaatgagacccagaccctacaaaaaaatttaaaaattagccaggcatggtagcatgtkcctgtagtcccagctactcaggaagctagggcaggataattgtgtgagtacaggaattcaaggctgcagtaagttgtgatcagactactgcactccagcctaagtgacagaacaagaccctatcttaaaaaacagaagaagggagagaggcaaagatggctgattcagagccgctgccgtcaatggctctcatggaaaagaatgaaaatggtgagt

SEQ ID NO: 677341 - DNA, 433 bp, Homo sapiens
ttgaagcacattgtgatcaataaaaacaacaccatcacgcccagtggtataagcatggctcacacagctaatcctggcattttgggaggctgaggcaggaggagttcaagaccagctctaaaaaaaaagggaccaggagttcaagaccagctctacaaaaaatgagacccagaccctacaaaaaaatttaaaaattagccaggcatggtagcatgttcctgtagtcccagctactcaggaagctagggcaggataattgtgtgagtacaggaattcaaggctgcagtaagttgtgatcagactactgcactccagcctaagtgacagaacaagaccctatcttaaaaaacagaagaagggagagaggcaaagatggctgattcagagcygctgccgtcaatggctctcatggaaaagaatgaaaatggtgagt

SEQ ID NO: 677342 - DNA, 1200 bp, Homo sapiens
tatgcatggttccatactctaaaagaaaacttatgtcctgcatatcatggacatttgatgaatgcttattcagttgactggtgtagacttcaataataacctgttcaatgcattatgccagatgaatcttgcatctcaaaagtagaacaaatattgttctttcagttttgtctacccataaatgcaatatttactaataaaaagaaaatgagtttattgttctagagagtatgagaattttgacaacatgaattctcctgtcctaggacataattaatacttagaggcatactatttcatgtggaagctaccattaaatcaatgttaagtgttaattacctcacataatcttctaatctgacttgactgaagacgtacctgacaaagttgatttatcaagttgtaaatcttcacctgttgaattcataagttcatgtctgaaaggtgagaataaatacttaatattcaytaggcaatattcagcaaagtaatatccactagtacatatttaatatttcatcatgaactgcgggtgtgaagagaaaagacaggctgggcacagtggctcacacctgtaatcccagcagtttgggaggccgaggcaggcagatcatgaggtcaggagttcgagaccagcctggccaacatggtaaaaccccgtctgtactaaaagtacaataattagctgggcatggtggcaggcacctgtaatcccagctactcgggaggctgaggcaggagaattgcctgaacccaggaggtggaggttgcagaaaccattatcacgccactgcattccagcctgggcaagagagcaagattctgtctccatcaatcaatcaataaaaatataaggaggaagcatttactgtgtatttatatgtctggtattatgtgaagcactttactatcttatcaaatcttcgggacagatcttcagttctcatgaccacaaaagaggatactaaagctcagacaggagaagagacgtggccagcctgtgtccccagggcctatggtcttaccactaggttacagtgtttccagatatcacatgttgtgagatttttgctttaaaatgaaccaaaaaaaaccaaaggtgaaaaaggcataagctattaaaaagtgggagaaacactaagagaaccttaagcatgtaactaaaaatattatggaaatgttattgaattcattagcaaa

SEQ ID NO: 677343 - DNA, 1200 bp, Homo sapiens
tatgcatggttccatactctaaaagaaaacttatgtcctgcatatcatggacatttgatgaatgcttattcagttgactggtgtagacttcaataataacctgttcaatgcattatgccagatgaatcttgcatctcaaaagtagaacaaatattgttctttcagttttgtctacccataaatgcaatatttactaataaaaagaaaatgagtttattgttctagagagtatgagaattttgacaacatgaattctcctgtcctaggacataattaatacttagaggcatactatttcatgtggaagctaccattaaatcaatgttaagtgttaattacctcacataatcttctaatctgacttgactgaagacgtacctgacaaagttgatttatcaagttgtaaatcttcacctgttgaattcataagttcatgtctgaaaggtgagaataaatacttaatattcattaggcaatattcagcaaagtaatatccactagtacatatttaayatttcatcatgaactgcgggtgtgaagagaaaagacaggctgggcacagtggctcacacctgtaatcccagcagtttgggaggccgaggcaggcagatcatgaggtcaggagttcgagaccagcctggccaacatggtaaaaccccgtctgtactaaaagtacaataattagctgggcatggtggcaggcacctgtaatcccagctactcgggaggctgaggcaggagaattgcctgaacccaggaggtggaggttgcagaaaccattatcacgccactgcattccagcctgggcaagagagcaagattctgtctccatcaatcaatcaataaaaatataaggaggaagcatttactgtgtatttatatgtctggtattatgtgaagcactttactatcttatcaaatcttcgggacagatcttcagttctcatgaccacaaaagaggatactaaagctcagacaggagaagagacgtggccagcctgtgtccccagggcctatggtcttaccactaggttacagtgtttccagatatcacatgttgtgagatttttgctttaaaatgaaccaaaaaaaaccaaaggtgaaaaaggcataagctattaaaaagtgggagaaacactaagagaaccttaagcatgtaactaaaaatattatggaaatgttattgaattcattagcaaa

SEQ ID NO: 677344 - DNA, 546 bp, Homo sapiens
atcacccatatattgagtcctttctgatcttctgtcacaattcaattacacacattcccatcctggaaaaccttactccagggtcttcgtaaccctttaaacacctagtcagatgaactcccaaatccattatgaataacattagatttatagaaatttgatatgtatctttcctcagattcagcaagagaatttctgagaaaatcaatgactggaattcctctgttcctctttcgatggaaaatgtaaatatgagggcaatcctaagtgaaattgttaaacaggcaaagtgtctccaagacttctttctttccaggcattcaatgttgtcacattgtcaagtcttgccctgtcataaacagaaggagctgaaaaacttatccacaaccaaggtgttacaaattggcatttatgtgatctcaaacctaaaatatgtasccaagatcatccagcccaaccttctacttaattagcagacttctcttcactaccttgagaagcaatcatttctgtcacccccagtcatcaacttcctcctcattccat

SEQ ID NO: 677345 - DNA, 814 bp, Homo sapiens
gggaccggtccaattaccaggataaatccctatcaagaaacatctctttgaagaaagcaaagaagcctcccctgccaccctcccggacagactccctccgcaggattcccaagaagagcagccagtgcaacgggcaggtgctcaacgagagcctgatcgccacactccagcactcgctgcagctgagcctcccaggcaaragtggcagctcgccctcccagagcccctgcagtgacttggaagagccctggctgccccgctcccggagccagagcacagttagtgctggcagcagcatgacttccgccaccacccccaatgtctactccctgtgcggggccacgccatcgcagagtgacacaagcagcgtcaagtcagagtacacggacccctggggttattacattgactacacgggcatgcaggaagatccggggaacccggcagggggctgttcaaccagcagtggggtgcccactgggaacgggccagtccgccatgtccaagaagggtccagagccacaatgccccaagtgcccggtggttcagtcaaaccaaagatcatgtcaccagagaagtcacacagagtcatttctccatccagtgggtattccagccagtcgaatacacccacagcactcacccctgtgcctgtgtttttaaaatcagtgtcaccagcaaacgggaaggggaagcccaagcccaaggtaccagaaaggaagtcctctctgatatcttcagtatccatttcctcatcgtccacttctctttcttctagtacttctactgaaggaagtggcactatgaagaagct

SEQ ID NO: 677346 - DNA, 847 bp, Homo sapiens
aaaaaaaaaatctgccacgtcacataaaagacagggcaagaccttcggggtgaaaaatcttagcaagcacttcctttgggctcctcatagagctctgattcacgtgagatggatgctgactaaatgcttttgactgcttcgttaaagtgaatgaagaatacttgttttaaaccaatgtttgtgtcccttttgataagagtaagtaggcaaaaggcttagtcaacacatattacttgaacacccagtgtatgccagactctggtagctactgagctgtaattttgaggaatttcayagctcttaagatactaccacttttttactagcaaaaggagaaagcagctgagtaaacaaaggtattatactatatctgcaatttccccttttttcacttccctgaattggacctgtcaatgaccatccataatatatcaattggtagctttctgagtgagtggaaatcttcatagatcactcttgcccttgtgggcatagcaatactacataggaaccttttctgtgaatggatacaagctgtgcttgggctgttctccaaggaatccattagacaaagacatagctgaaaggcacaaaatcaactagtttatgaaaacctggaaaaaggacttaaatgtggcacttagatattggagttaggtgttacaaacttaatttacttagtagtgctttaacaaagatgtgatagctggggtcttactgcaattgctctgaaattgcattgccgatagcttttgctaactgacctgtataattcctccctttcttttatttgagactacaatgtacatacttgaaaatattatttcccagcctagttttcaactag

SEQ ID NO: 677347 - DNA, 648 bp, Homo sapiens
atttcctaggatatcagggttttgagattcagagattatattttcagtaataataatgtttttcatttggcatttgaaatggaataattaaggcttatgaggctcagagacttgacagctcttcctggaggaaagctgataatgtttaggacrtcatgttagcgctttctctcaaattgaaagtagacaggaaaagtgacttttaagaaagcatgattaggaccccagtataatcagctaattacatgaacttcctggttttaacttgttctaatggtattcagatatgcataaaggctttttccaccaccgcatcaccctacctcaggccgatagtgggaattgaaaatagccccagatccaggtgtgttggctgcatacaatttcatttgcgtaccacatagaggaggagagaaaacctggattgcatttttggcatttttacagtatgcttccaaggaaggaaagagccacacattcattttctttgacaaaactttaattagaaaaccagactcctctgattataaaaattacacaagctaataaatcttggtaagttatagagagaataattttatgaacattttatacctaataaaaaagttaaaataattaacagcattcatcagattaattttgttttca

SEQ ID NO: 677348 - DNA, 2161 bp, Homo sapiens
  misc_feature 4, 5, 6, 7, 8, 9, 10, 11, 12, 13, 14, 15, 16, 17, 18, 19,20, 21, 22, 23, 24, 25, 26, 27, 28, 29, 30, 31, 32, 33,34, 35, 36, 37, 38, 39, 40, 41, 42, 43, 44, 45, 46, 47,48, 49, 50, 51, 52, 53, 54, 55, 56, 57, 58, 59, 60, 61,62, 63: n = A,T,C or G
  misc_feature 64, 65, 66, 67, 68, 69, 70, 71, 72, 73, 74, 75, 76, 77, 78,79, 80, 81, 82, 83, 84, 85, 86, 87, 88, 89, 90, 91, 92,93, 94, 95, 96, 97, 98, 99, 100, 101, 102, 103: n = A,T,C or G
tttnnnnnnnnnnnnnnnnnnnnnnnnnnnnnnnnnnnnnnnnnnnnnnnnnnnnnnnnnnnnnnnnnnnnnnnnnnnnnnnnnnnnnnnnnnnnnnnnnnnntgacatagagagataatatcttgtcaagtgaaaaaagcagaccactggaagcatggacagtatgatctcatttgtacaaaatgttctctgtgtgtgtgtgtgcatgtgtgtgtatgtgtgtgtgtatgcatgtatgtgtttaggtgcagtgaaagaaatggaggagtacaagagtacccataagaaataatagatttcagaggattttcaacatagtattagcaattgacatttacgtgattgacagaatttcttctctgtacttttctaaactgtttgaattatttttctaaaacttaaaaaaattaaatacatcataatacaaagtatatatataatctataagtataattttgaaataataaagagaaattgtcataggtacatgcraacccatcacatagtttaagatatattgtttaaattatttacagtgggttaatatgattttataatcagaaaacgtgcatacacttttggaataaatgagaatgaaaggtcatatgaaacatccatgctcctcatggctaatgcatcccatcctctcccacatttggttttgtcttgtttacctacatgaagctattagtgtatattacaccgcctcattttcattaaagccagatcttaggaggccgaagcgggtggatcacctgatgttagaagtttgagaacagcctggccaacatggtgaaaccccacctctactaaaaatccaaaaattagctgggcgtgttgggtcacgcttgtagtcccagctactcgggaggctgaggcatgagaataacttgaacttgggaggaggaggttgctgtaagccaagatcatgccactgcactccagcctgggcaacagaatgagactcagtctcacacacaaaaaaatccagaccaagccttaattactgttttctttccacaaatcccataaacctacccctagcagccagtacagtgcctagtacatggtagatatttggcaaatacgagttgatacaaaagataaaaattatagacagattgataaaatgtttgtataaaaaagttatctctttaattcacaaagccttccctgttttcacgcctaaatcagtagtgaccatagacattctatttcctgcctcgtaagctgctgcacacttatgaaaaccctctctgtataatctagcaataatttcttatcaatatttactaagcatctgctatgtgccaagcactgtattaaattttggatataatttgggggattttgtgcaaagggcctcatgactgcccctaagagaataattaaaagacaatatactggaaaatgaggtggaaaaatcaggcttcaaagagaaaattcattctataaataaaagccccattgtattacatgcatttgaaatctaaaccaccctattctttcttaaactttatttcaagtgctataattaattccccaaatatttttctcttaataagggtaagtaagttttctcttgggtctttgctaccatttccaagtcctcttttgacatgaagatcctttcttcatggatcattagggtctgtatgaagaatattctttttttttttttttacagtttgaatagacaaaaaaggaaaatgccctatattgttcattatctacgcttcaatccctgtgatagatgctccacatacatgatctcctttaattctcaaaattacactaggagctctgcataattatgatgtaactaacaccctactcaccatcctccccttccaaaggtcgaagttgctctagaaagcaaagtggataaaagtagcactaacatttctctccctgtcattcttactttactcctctaaaatacagtgggtatttttttaaggccattagaaccaatttaaaagaattactttaggaccctctttaatgggtattgtaactggctctcatttagcacgtttgcagtaggtaaataaaggtataaattgggtgaaaacagttctgggaggcgatgccattttaattcacttcaggtgttctttattttactttgatggtttaaaggtcaacttttccatattc

SEQ ID NO: 677349 - DNA, 2161 bp, Homo sapiens
  misc_feature 4, 5, 6, 7, 8, 9, 10, 11, 12, 13, 14, 15, 16, 17, 18, 19,20, 21, 22, 23, 24, 25, 26, 27, 28, 29, 30, 31, 32, 33,34, 35, 36, 37, 38, 39, 40, 41, 42, 43, 44, 45, 46, 47,48, 49, 50, 51, 52, 53, 54, 55, 56, 57, 58, 59, 60, 61,62, 63: n = A,T,C or G
  misc_feature 64, 65, 66, 67, 68, 69, 70, 71, 72, 73, 74, 75, 76, 77, 78,79, 80, 81, 82, 83, 84, 85, 86, 87, 88, 89, 90, 91, 92,93, 94, 95, 96, 97, 98, 99, 100, 101, 102, 103: n = A,T,C or G
tttnnnnnnnnnnnnnnnnnnnnnnnnnnnnnnnnnnnnnnnnnnnnnnnnnnnnnnnnnnnnnnnnnnnnnnnnnnnnnnnnnnnnnnnnnnnnnnnnnnnntgacatagagagataatatcttgtcaagtgaaaaaagcagaccactggaagcatggacagtatgatctcatttgtacaaaatgttctctgtgtgtgtgtgtgcatgtgtgtgtatgtgtgtgtgtatgcatgtatgtgtttaggtgcagtgaaagaaatggaggagtacaagagtacccataagaaataatagatttcagaggattttcaacatagtattagcaattgacatttacgtgattgacagaatttcttctctgtacttttctaaactgtttgaattatttttctaaaacttaaaaaaattaaatacatcataatacaaagtatatatataatctataagtataattttgaaataataaagagaaattgtcataggtacatgcgaacccatcacatagtttaagatatattgtttaaattatttacagtgggttaatatgattttataatcagaaaacgtgcatacacttttggaataaatgagartgaaaggtcatatgaaacatccatgctcctcatggctaatgcatcccatcctctcccacatttggttttgtcttgtttacctacatgaagctattagtgtatattacaccgcctcattttcattaaagccagatcttaggaggccgaagcgggtggatcacctgatgttagaagtttgagaacagcctggccaacatggtgaaaccccacctctactaaaaatccaaaaattagctgggcgtgttgggtcacgcttgtagtcccagctactcgggaggctgaggcatgagaataacttgaacttgggaggaggaggttgctgtaagccaagatcatgccactgcactccagcctgggcaacagaatgagactcagtctcacacacaaaaaaatccagaccaagccttaattactgttttctttccacaaatcccataaacctacccctagcagccagtacagtgcctagtacatggtagatatttggcaaatacgagttgatacaaaagataaaaattatagacagattgataaaatgtttgtataaaaaagttatctctttaattcacaaagccttccctgttttcacgcctaaatcagtagtgaccatagacattctatttcctgcctcgtaagctgctgcacacttatgaaaaccctctctgtataatctagcaataatttcttatcaatatttactaagcatctgctatgtgccaagcactgtattaaattttggatataatttgggggattttgtgcaaagggcctcatgactgcccctaagagaataattaaaagacaatatactggaaaatgaggtggaaaaatcaggcttcaaagagaaaattcattctataaataaaagccccattgtattacatgcatttgaaatctaaaccaccctattctttcttaaactttatttcaagtgctataattaattccccaaatatttttctcttaataagggtaagtaagttttctcttgggtctttgctaccatttccaagtcctcttttgacatgaagatcctttcttcatggatcattagggtctgtatgaagaatattctttttttttttttttacagtttgaatagacaaaaaaggaaaatgccctatattgttcattatctacgcttcaatccctgtgatagatgctccacatacatgatctcctttaattctcaaaattacactaggagctctgcataattatgatgtaactaacaccctactcaccatcctccccttccaaaggtcgaagttgctctagaaagcaaagtggataaaagtagcactaacatttctctccctgtcattcttactttactcctctaaaatacagtgggtatttttttaaggccattagaaccaatttaaaagaattactttaggaccctctttaatgggtattgtaactggctctcatttagcacgtttgcagtaggtaaataaaggtataaattgggtgaaaacagttctgggaggcgatgccattttaattcacttcaggtgttctttattttactttgatggtttaaaggtcaacttttccatattc

SEQ ID NO: 677350 - DNA, 2697 bp, Homo sapiens
agcaatcaggtaacacagcatctcatttactacatggtgagcacccagaggactaggtatgcatcctttttacctttgtgttcttgcatctattcaacatttggaattaaagaaaactaactgttgtcttttattgaaagccaagcaatgtgctagtacccatattaggaatgtttcttataatcaatataaaaaccttttatccccattttatagctgtgaaaactgaaaagctgagaagagaggaaacttctccaaagagacacagcagattaatagcagagccaggtctcaggtcttgatctgcctggttccaaagccaatattcctgcctttttgttgccctgtctcattaattaaaagcttgccttggctttatgtgtcccctcaaccttaaccagttgacttccccactttgcaatggaaaagttgaacaagaagaaagaagggtttctctctcactgccctcccttctcctcctctttctcctccccaccatcctcttgatttaggaatttctgtctcttgcacaaagggatactttacccctctctgaagcacagggtagcagcttagcaactgcctgcaggcatctgtgaaattggactgttcttacaaggccagaatgtttgggctgaatgtcaatgaatctaaaacatgatcgattaatgtacctttcgccaccacatgtgagttaaatgattaggagcaaaattgctcggagcaaaactgtagtatttgatcaaagccagagtgttagaaaaatggctgcagctggtttttctaacaccaagtccggtttgttttctgcattcccagctgaatgttgagcacttctgtcagtttagtaatctcatagggaaggagggattgcataagcactaagcattatttgtcatctttgtgtctcaactggaactgtacataaacatgatcaggtctgcatggtgaatgatctcccagagggaaagagagatgagggctgaaccacatcaatcatttctgaaggatgaaaaggtctatgcatctgggcatcactcagtatatcaagcatcatgctgcttcaatgatgagatatcagtccattgtggtcaagtcttttatttagtagtggccatggctttttaacattgataataaagattattatactgacagtcatgaacatgagatgactatgatcatggtggaatatgagcatataacagagggtcctctggccagggaatcatatgcgcatgagcactaagcaagtgaggacccacttatggttttgtcaataaaagctggactggagactttagcttagctggaagtcttgaatggggatttctatcaccttctcattgaagctttattcaaggtcaggatcttgcctttgaaatgtcagtgaagtcaaaattatatccatcaatgtcaaaagaaaagaaagccaatcacacaagaaaacattatattttcctgtggtcttcagtgttaaagtagcctaaactgtccagcctgtgttcaatgttctgaaatgagccacaaataacaaagcagagatttctgactctcccactcaaaaagaatgtcctgatcctttcaaattgatgagcaacaattggtggaaatagatgatacacaggtacaagaagagaagaaatggagttcagtggccacttcttttctttaaagtttgaagaccctgcccactaaaatgtgaccatggtttttaacctacctcaatgaactagaaaaagtagtaagcaatgagattgaagcatattctactatatgagaaaaggaggtcagaaayacacctcttcgctcccgcctgagacaaaagcgtttttctccttgacactaatgatgaaacattgcataataggtagcagccacaacctcaacttccagaaatattacttagccaagaaaaatatggacaggagaaatctgttttcaacagggacttctcaacagctaacttccaaaaagaagaattttaataaaggtgtggtggctaatttcaaattctccacaatcactggtaccagaagcccaaatgaagtccgttatttgtgagggtggatggcacaggtgacaactatcctaggcatagtttttcttttcttctcacattttccattcaaagataaggctgggaaagtatgcagcctgccctaattgcttacagggggagatgttgagttggaaaatgaatatatgttaatgaccaggcacccaatatgttaaaaaaaaacaccaccaaagtgtgacttcagtgcttctggatttgtcttccttccacttttcctattgtatggcagaactttaagaagcaaatccatcagagccttgtaagttaaactgagctgatgccatcatcccttggctaggtgttttggggcaagttcttaaagtccctgagctacagtttgctcatgggtaagatgaggctaacagaatatactccccagagtgggtatcagcataaaatgagataattcatataaggcatctgcttccagctctgtgaccttagcttagtcctcctctgggcttcaatctttcctctgtaaaatggaagcaactgtatctaaaaataaaaagacctaccatttattaagttcttgttatatgttagagatcacattaaatcttacttctcaggacacgtatctgtcaatatacgtcaaacttggttgattataaaat

SEQ ID NO: 677351 - DNA, 2697 bp, Homo sapiens
agcaatcaggtaacacagcatctcatttactacatggtgagcacccagaggactaggtatgcatcctttttacctttgtgttcttgcatctattcaacatttggaattaaagaaaactaactgttgtcttttattgaaagccaagcaatgtgctagtacccatattaggaatgtttcttataatcaatataaaaaccttttatccccattttatagctgtgaaaactgaaaagctgagaagagaggaaacttctccaaagagacacagcagattaatagcagagccaggtctcaggtcttgatctgcctggttccaaagccaatattcctgcctttttgttgccctgtctcattaattaaaagcttgccttggctttatgtgtcccctcaaccttaaccagttgacttccccactttgcaatggaaaagttgaacaagaagaaagaagggtttctctctcactgccctcccttctcctcctctttctcctccccaccatcctcttgatttaggaatttctgtctcttgcacaaagggatactttacccctctctgaagcacagggtagcagcttagcaactgcctgcaggcatctgtgaaattggactgttcttacaaggccagaatgtttgggctgaatgtcaatgaatctaaaacatgatcgattaatgtacctttcgccaccacatgtgagttaaatgattaggagcaaaattgctcggagcaaaactgtagtatttgatcaaagccagagtgttagaaaaatggctgcagctggtttttctaacaccaagtccggtttgttttctgcattcccagctgaatgttgagcacttctgtcagtttagtaatctcatagggaaggagggattgcataagcactaagcattatttgtcatctttgtgtctcaactggaactgtacataaacatgatcaggtctgcatggtgaatgatctcccagagggaaagagagatgagggctgaaccacatcaatcatttctgaaggatgaaaaggtctatgcatctgggcatcactcagtatatcaagcatcatgctgcttcaatgatgagatatcagtccattgtggtcaagtcttttatttagtagtggccatggctttttaacattgataataaagattattatactgacagtcatgaacatgagatgactatgatcatggtggaatatgagcatataacagagggtcctctggccagggaatcatatgcgcatgagcactaagcaagtgaggacccacttatggttttgtcaataaaagctggactggagactttagcttagctggaagtcttgaatggggatttctatcaccttctcattgaagctttattcaaggtcaggatcttgcctttgaaatgtcagtgaagtcaaaattatatccatcaatgtcaaaagaaaagaaagccaatcacacaagaaaacattatattttcctgtggtcttcagtgttaaagtagcctaaactgtccagcctgtgttcaatgttctgaaatgagccacaaataacaaagcagagatttctgactctcccactcaaaaagaatgtcctgatcctttcaaattgatgagcaacaattggtggaaatagatgatacacaggtacaagaagagaagaaatggagttcagtggccacttcttttctttaaagtttgaagaccctgcccactaaaatgtgaccatggtttttaacctacctcaatgaactagaaaaagtagtaagcaatgagattgaagcatattctactatatgagaaaaggaggtcagaaacacacctcttcgytcccgcctgagacaaaagcgtttttctccttgacactaatgatgaaacattgcataataggtagcagccacaacctcaacttccagaaatattacttagccaagaaaaatatggacaggagaaatctgttttcaacagggacttctcaacagctaacttccaaaaagaagaattttaataaaggtgtggtggctaatttcaaattctccacaatcactggtaccagaagcccaaatgaagtccgttatttgtgagggtggatggcacaggtgacaactatcctaggcatagtttttcttttcttctcacattttccattcaaagataaggctgggaaagtatgcagcctgccctaattgcttacagggggagatgttgagttggaaaatgaatatatgttaatgaccaggcacccaatatgttaaaaaaaaacaccaccaaagtgtgacttcagtgcttctggatttgtcttccttccacttttcctattgtatggcagaactttaagaagcaaatccatcagagccttgtaagttaaactgagctgatgccatcatcccttggctaggtgttttggggcaagttcttaaagtccctgagctacagtttgctcatgggtaagatgaggctaacagaatatactccccagagtgggtatcagcataaaatgagataattcatataaggcatctgcttccagctctgtgaccttagcttagtcctcctctgggcttcaatctttcctctgtaaaatggaagcaactgtatctaaaaataaaaagacctaccatttattaagttcttgttatatgttagagatcacattaaatcttacttctcaggacacgtatctgtcaatatacgtcaaacttggttgattataaaat

SEQ ID NO: 677352 - DNA, 2697 bp, Homo sapiens
agcaatcaggtaacacagcatctcatttactacatggtgagcacccagaggactaggtatgcatcctttttacctttgtgttcttgcatctattcaacatttggaattaaagaaaactaactgttgtcttttattgaaagccaagcaatgtgctagtacccatattaggaatgtttcttataatcaatataaaaaccttttatccccattttatagctgtgaaaactgaaaagctgagaagagaggaaacttctccaaagagacacagcagattaatagcagagccaggtctcaggtcttgatctgcctggttccaaagccaatattcctgcctttttgttgccctgtctcattaattaaaagcttgccttggctttatgtgtcccctcaaccttaaccagttgacttccccactttgcaatggaaaagttgaacaagaagaaagaagggtttctctctcactgccctcccttctcctcctctttctcctccccaccatcctcttgatttaggaatttctgtctcttgcacaaagggatactttacccctctctgaagcacagggtagcagcttagcaactgcctgcaggcatctgtgaaattggactgttcttacaaggccagaatgtttgggctgaatgtcaatgaatctaaaacatgatcgattaatgtacctttcgccaccacatgtgagttaaatgattaggagcaaaattgctcggagcaaaactgtagtatttgatcaaagccagagtgttagaaaaatggctgcagctggtttttctaacaccaagtccggtttgttttctgcattcccagctgaatgttgagcacttctgtcagtttagtaatctcatagggaaggagggattgcataagcactaagcattatttgtcatctttgtgtctcaactggaactgtacataaacatgatcaggtctgcatggtgaatgatctcccagagggaaagagagatgagggctgaaccacatcaatcatttctgaaggatgaaaaggtctatgcatctgggcatcactcagtatatcaagcatcatgctgcttcaatgatgagatatcagtccattgtggtcaagtcttttatttagtagtggccatggctttttaacattgataataaagattattatactgacagtcatgaacatgagatgactatgatcatggtggaatatgagcatataacagagggtcctctggccagggaatcatatgcgcatgagcactaagcaagtgaggacccacttatggttttgtcaataaaagctggactggagactttagcttagctggaagtcttgaatggggatttctatcaccttctcattgaagctttattcaaggtcaggatcttgcctttgaaatgtcagtgaagtcaaaattatatccatcaatgtcaaaagaaaagaaagccaatcacacaagaaaacattatattttcctgtggtcttcagtgttaaagtagcctaaactgtccagcctgtgttcaatgttctgaaatgagccacaaataacaaagcagagatttctgactctcccactcaaaaagaatgtcctgatcctttcaaattgatgagcaacaattggtggaaatagatgatacacaggtacaagaagagaagaaatggagttcagtggccacttcttttctttaaagtttgaagaccctgcccactaaaatgtgaccatggtttttaacctacctcaatgaactagaaaaagtagtaagcaatgagattgaagcatattctactatatgagaaaaggaggtcagaaacacacctcttcgctcccgcctgagacaaaagcgtttttctccttgacactaatgatgaaacattgcataataggtagcagccacaacctcaacttccagaaatattacttagccaagaaaaatatggacaggagaaatctgttttcaacagggacttctcaacagctaacttccaaaaagaagaattttaataaaggtgtggtggctaatttcaaattctccmcaatcactggtaccagaagcccaaatgaagtccgttatttgtgagggtggatggcacaggtgacaactatcctaggcatagtttttcttttcttctcacattttccattcaaagataaggctgggaaagtatgcagcctgccctaattgcttacagggggagatgttgagttggaaaatgaatatatgttaatgaccaggcacccaatatgttaaaaaaaaacaccaccaaagtgtgacttcagtgcttctggatttgtcttccttccacttttcctattgtatggcagaactttaagaagcaaatccatcagagccttgtaagttaaactgagctgatgccatcatcccttggctaggtgttttggggcaagttcttaaagtccctgagctacagtttgctcatgggtaagatgaggctaacagaatatactccccagagtgggtatcagcataaaatgagataattcatataaggcatctgcttccagctctgtgaccttagcttagtcctcctctgggcttcaatctttcctctgtaaaatggaagcaactgtatctaaaaataaaaagacctaccatttattaagttcttgttatatgttagagatcacattaaatcttacttctcaggacacgtatctgtcaatatacgtcaaacttggttgattataaaat

SEQ ID NO: 677353 - DNA, 1015 bp, Homo sapiens
gactctgtctccaaaacaaaacaaaaccagacagaagtttgtacttgagacacattataacagagataccaaagaggaaaggcatcaaaagaggagaaattggaaggacagggaagattcttaattcaaatgatccacccacctcggccttccaaagtgctaggattatacaggcatgagccactgcacccagcttcaagtacaaatttctaaccatcttatctaaaggtgtttaccttttagctacatccattgctacctttccttttattccaattaggccacaaaccatctcttcattcactagcccttacrcatgacttgtttctgactgtttatggattacattcttctagtatctagcgttttctgctcccagagatgtggatctccaatcacaactttggactgtccagtaatctctggacacttccatgtgtttttccatgcttggagttgtttattggggccacatgtaaatcaccaacctttatgccagccttctctgctgtttgaagtaattggtttatttattttccttatagcaacagagaagagacttggataaatatgtttcctgaaagattgagagagatactccaaagctacccctactaataggtgctcctgattgcagctagtttataaaatcaaagctatgaagttactgtttcttttatgcttgacttgttaagtgagttgacctgatggcaaggaacatagccagttgacttgatgttttgaagatgaaataacaccaggcttccaacagttttaaggctctgtctctggagttccgtctgtccccctgcaaagggctgatctgggatttttgtgtgtgtcatgtgtctcatccatgtggctggaaacaattttgtctctcttggcttcatcagctcttgggagatacctgaatgggaataggcaagatctatgggggcttctggataaaaaaataaaaatcaaaatgacatctagcttcctctttcgtaggaagaggattgtattttatggg

SEQ ID NO: 677354 - DNA, 583 bp, Homo sapiens
ttattgtgtataatatgatgttkaaaatttgtatacattatgaactggctaaatcaagctaattaacacatgaactaccttaaatacttatcatttgtttgtggtgagaacacttaaatctactctcttagctattttcaagtatataatacattgctattaactgcagtccccatgatgtgcaatagctctttttaactgattcttcctgtctgaaatttggtatcctttgactaacatctcctcagtcccctcagcccctggtatccaccattttcctttctgcttctgtgagttacagcaacatgaatgaaactggaggacattatgttaactgaaataagccaggcacagaaagacaaacactatatgataggtctggactttctcaccatggtgagaaaggggaataagtattaaggcaagagaaacagcatgagcagaggtaacagatgaaaaagtatttggcatgttgaaagtgctgtgagtagtgtggttggttagaacactattatataagtgaatgagaaggtggggaaatgaaattggacatagaccagtttatgaaggatttagcaaaatg

SEQ ID NO: 677355 - DNA, 679 bp, Homo sapiens
ggccttgcaagagcaattgttattcagattttattttgagcaggagaaagcagaaaaccctgttcctgtaaaaccaggagtgggtgggcaggggtgggcatgtgacccagtctcagcaaatcagataattacaaccccttggatacaatgattggtctggagtgtctggagtaggcatgtgaaccacacagggctagcaagttttttcctggaattgatgaacagtaggagaaaaagtccctctttatgctgagatagctcaatggggaagagaggcaagaagcctgatgtctgcttgactgccacgtggcagagagcgtgcctgagagaaaggcccagcagggcagagatagacgggaagcgggaaggggagggggcggrgggggggtgggagagagagagagagagagagagagagagagagagagagagagagagagagagagagagagagagagagagagagagagagagagagagagagagagaacgagaacagttggcattgtttgagcccttggatccatccatccttaagattcccagttatgttagccaactaaacttcactttcgcttaatctagtttaagttggtttatgccaaatataaccaagagttctggctcaaccacttccctagctccttgggaatagggccctgtctagcctggtctctga

SEQ ID NO: 677356 - DNA, 679 bp, Homo sapiens
ggccttgcaagagcaattgttattcagattttattttgagcaggagaaagcagaaaaccctgttcctgtaaaaccaggagtgggtgggcaggggtgggcatgtgacccagtctcagcaaatcagataattacaaccccttggatacaatgattggtctggagtgtctggagtaggcatgtgaaccacacagggctagcaagttttttcctggaattgatgaacagtaggagaaaaagtccctctttatgctgagatagctcaatggggaagagaggcaagaagcctgatgtctgcttgactgccacgtggcagagagcgtgcctgagagaaaggcccagcagggcagagatagacgggaagcgggaaggggagggggcggggggggggtgggagagagagagagagagagagagagagagagagagagagagagagasagagagagagagagagagagagagagagagagagagagagagagagagagaacgagaacagttggcattgtttgagcccttggatccatccatccttaagattcccagttatgttagccaactaaacttcactttcgcttaatctagtttaagttggtttatgccaaatataaccaagagttctggctcaaccacttccctagctccttgggaatagggccctgtctagcctggtctctga

SEQ ID NO: 677357 - DNA, 1132 bp, Homo sapiens
tgatatctatctatctatccatctatataatgtataaagtacctttatttttcctctgggtagatacatcctgagtacagagatttggctgtcaaaagttgcctacctttcttttaaaacctatatttcaaaatatcagaaaatcctgtcagctttttcttcaaaatatatcctaattttgagctatcaatgatatatttttagttcaaggcagtttcacttcttactaggtctacagcaatcagtttttattgtgtttttcagtttcttctcttgctttcctcaccctagggccaccaatggcttatagtttcattcagaatgaaaccgaagtgcttaccatgacatttaatgtcctstatgaaatgaacttgacttatttctctttctgcatctcttagcaatcttcacctcccccatagtacttcagccacatttgcttctttgtgatatcattagtcatgctaagtcttctggggctgtgacatatagggcttcttttgcctgaagcactttaacctgataacttgttagcacactcttacttcatccaggtgttttctcagtgtcacctaatcacagagtccttccctgcccctcaatcaaaaacatgggaccttccagccttttcactactcatcctcttactcacctttattttctttaaagcagcagtccccaacctttttggggaccagtttcttggaagacaatttttcagtggatcagagaaaggggtggggtgatggtttcaggatgattcaagtgcattacattgatttgtactttatttctagtgttattacattgtaacatataatgaaataattatacgactcaccataatgtagaatcaatgagagccctgagcttgttttcctgcaactagaccatcccatctgggggtgaggggaggcagtgacagatcatcaggcattagagtctcataaggagcctgcaacccagatcccttgcatgcacaggttacaatagggttcatgctcctatgagaatctaatgccaccactgatctgacaggaggcagagctcaagcagtaatgtgagtggccccaaacagctgtaaatacagatgaagctttgctcgcttgcccacttctcacctcctgctgtg

SEQ ID NO: 677358 - DNA, 1466 bp, Homo sapiens
gctgttgatgcccacacagcagcagggagagcgggggcttggttggtgtccaggtggaagatgatggcagagctggagagacgtgggcacagatggggaaggaaagcagggactcctgaggaccagccagcttctggcttgagcaaggtgggtaccaacagaggaggccagtggggaggaaatatgatgagttcaaatatagtgtgttggatttgaggttcccataagccaatcaagtggagatgctgagtggggctttgcatacaggggtctggcacccagagggactccctggccaatcgcggttgtgatcctcccacctggagcactgtgtggactcccagtcttgagcttgccaaatgccagcctttgggggcacctcatgagcrccaggagttgtgcttatggtagacacagcacgggttgcccacccatgactccttcgctgacgggattcagttttgttggttgtgcatctactcaggagctcagggacggtggctattcctcgccccggcttcagagtgagttataggtccaagccaactgcagtcattctcattcctccatcagtgactggtttggaattatagatgtaacgccatcttggccaataagaagtctgcagatctgcaggggggaaatttgggaacaattttctccatcatgaaaggagacacaggggaaaaaatgccctcctcctctttgcttgattttatcatgtcccagtgtgatgcctggagccacagcagctgtcttgaaaccatgaggagacatgtccataaattgctgagaatggcatagcaggaagaagaaaagaatgtgaatcactggttacatctttatgcctccaaatgaaacaaccctgttaaataaaattataagtcctctagcttttttttccctcctttagtcaagtgttctgctccttgcggctgaaaacattctgactgagaaagtgttcttatgcactatctcacttaatcctctcgtaaacctctgaggttgatattactattatagccattttacaataaagaaacggaggcttttggcagtaaacgacttttccaaggtcacaaggacagtgagttacagagctgggattggagtcaaggctcaagggttgatctgagagtgcaactgagctataccacaatttccttttaaaagtctttcccctaacacgtttttagtagggaaccataaccctgttcttatttttctctggaaaactgtgattatggttggtgggaaatttagagtgggctgcgtttctttgtacacagttaatggctttgattatatgtttctggcttctttattctgagaaaggctgccattggctgtgcaatataatcaaatcatttcttatgtaaacagccatctggcacagagccagggcagttccatcagcaggaaggtgaaaatgaaactgtgttgccagccccggaaagcaatctgct

SEQ ID NO: 677359 - DNA, 1470 bp, Homo sapiens
ccagaaccaggctctgactgccccctgtccctggaagcccaccccttccctcttcctcactcttgtggctcctgggtcttgatgccacccccgtctcccccaccccatacgtgcacacacacacatgcacacacacgcagatgcacacacatgcacacacgcacatacacacgcctgagctctccgtccagctatgaacgcacagcctggtccccagtgagccccgatgttttccttcttccagggttcaggggacagatactaaggccagagctcccttcctccttttactccctccctgaggcaacatggtgcccatctcacaggtgggcacactgagactccgagatgcagatgcccacactctgagcggctgagaggcagggagggtcacatcctccgggaggggcaggggagtcccagcggcagcctgagcaaagggcaggggcggggagcctggccctccgtggggttcctgggaatgaggctttctactgtgagcaggcagctccggggccttgggaccccggatgggaagaagctgggcccttgtcaggtggctgcccctacaggtagaagtcaggcaccaggtggccactttcaggaagagcctggcattaggagagctgctccagggtgggggccccactaagctcacctcccacccctctgcccctcactcactccctctgctccagccacactgcccttgctgagccttcaacaagaggatcccacagcctggccttagcacctgcggttccctctgcctggagcaccgtttcccaccccctgcctttgcacgtgggcttctcctctttgttggggcttctgttcaaatgtcaccccatcagaggggacctcccaggctctctccatcgcaccttctgctttatttcctttggagccctgctcacttactgaaatgacctcaaatgtctgattctcctcagctagaatacaggctccacgagaacagagggcttttaaatgtctttctgttttgtccactgctgtatctccaggacctggtagcaggcacggaacacagtggtgctcaataaatgtttgctgatgtactgaagaagttttgaaaagataagatgtaatttgtatcacmgcgggaggggtgggtgtttcaggggagacgtcctccaaagaactggatgatttctccagggtcttaaagcgtgtcatgaccagctcgacgtcacaacaataataataatatttattgggcgcttcctgcggtaagcactgtacacagatcttctcagagtccttccagccacctgtgaggtcagggctgtgattatccccactttccagataaggaaaccgtaacttagagttacagttagggactgctccaggtcaccagtgatttggtggcaggccgtggttgaatacaaggccacttcgacccctctcccaccaccctggcctgcccctatccctccagagcctgaa

SEQ ID NO: 677360 - DNA, 1470 bp, Homo sapiens
ccagaaccaggctctgactgccccctgtccctggaagcccaccccttccctcttcctcactcttgtggctcctgggtcttgatgccacccccgtctcccccaccccatacgtgcacacacacacatgcacacacacgcagatgcacacacatgcacacacgcacatacacacgcctgagctctccgtccagctatgaacgcacagcctggtccccagtgagccccgatgttttccttcttccagggttcaggggacagatactaaggccagagctcccttcctccttttactccctccctgaggcaacatggtgcccatctcacaggtgggcacactgagactccgagatgcagatgcccacactctgagcggctgagaggcagggagggtcacatcctccgggaggggcaggggagtcccagcggcagcctgagcaaagggcaggggcggggagcctggccctccgtggggttcctgggaatgaggctttctactgtgagcaggcagctccggggccttgggaccccggatgggaagaagctgggcccttgtcaggtggctgcccctacaggtagaagtcaggcaccaggtggccactttcaggaagagcctggcattaggagagctgctccagggtgggggccccactaagctcacctcccacccctctgcccctcactcactccctctgctccagccacactgcccttgctgagccttcaacaagaggatcccacagcctggccttagcacctgcggttccctctgcctggagcaccgtttcccaccccctgcctttgcacgtgggcttctcctctttgttggggcttctgttcaaatgtcaccccatcagaggggacctcccaggctctctccatcgcaccttctgctttatttcctttggagccctgctcacttactgaaatgacctcaaatgtctgattctcctcagctagaatacaggctccacgagaacagagggcttttaaatgtctttctgttttgtccactgctgtatctccaggacctggtagcaggcacggaacacagtggtgctcaataaatgtttgctgatgtactgaagaagttttgaaaagataagatgtaatttgtatcacagcgggaggggtgggtgtttcaggggagacgtcctccaaagaactggatgatttctccagggtcttaaagcgtgtcatgaccagctcgacgtcacaacaataataataatatttattgggcgcttcctgcggtaagcactgtacacagatcttctcagagtccttccagccacctgtgaggtcagggctgtgattatccccactttccagataaggaraccgtaacttagagttacagttagggactgctccaggtcaccagtgatttggtggcaggccgtggttgaatacaaggccacttcgacccctctcccaccaccctggcctgcccctatccctccagagcctgaa

SEQ ID NO: 677361 - DNA, 847 bp, Homo sapiens
tagcctgatgacttaaaagttaccggcagagtatcataaaaataaacctaacactcaaaatgggttttaaatatcataaaggctaaacattatgattctaccaagagaaaacactaagaatatgagcagaaataacatttcacaatttctgtttgaagctttcaaaataatacactagtaattgattcccttctattttggctacattttgagtaayagaacagaagcattgaacaaaatgggtgcttttaaaaaacaacaaaaaaaggcaagtcaataccaagaaccaagcatactcctatcagaggcaacagcgggggcacagggagtgtagcccacccagtggttagtcagataacatgggagccaccatccgcttctccacttgccctctggtgcgtgccagccttggtgccagggcggcagggccctgacgcatgtggagagtcagacagtttcactggctcccactggctcttcaggccgaagtccaggcagaagttggccttgtggggttcctgtcttcctgccaaaccatggcactcccgggacactgctagaacgctggccaaatcttgcatgagaagtcacctccattacagtctcctcaatgtcgggggtcagactacaggaaaccccttttatcagattttatggagtctgtacactagccaaggaaagtaagagaaagaaaaagaaagcaacttgtttaacctcacctaatagaaaggaaaggattctccaaagtagttcatctgggaatgaagcccaacatccctaaatctcagctcagtttactagtttttcatttaccagtggtttttagaaacttaaatcattatgatcc

SEQ ID NO: 677362 - DNA, 847 bp, Homo sapiens
tagcctgatgacttaaaagttaccggcagagtatcataaaaataaacctaacactcaaaatgggttttaaatatcataaaggctaaacattatgattctaccaagagaaaacactaagaatatgagcagaaataacatttcacaatttctgtttgaagctttcaaaataatacactagtaattgattcccttctattttggctacattttgagtaacagaacagaagcattgaacaaaatgggtgcttttaaaaaacaacaaaaaaaggcaagtcaataccaagaaccaagcatactcctatcagaggcaacagcgggggcacagggagtgtagcccacccagtggttagtcagataacatgggagccaccatccgcttctccacttgccctctggtgcgtgccagccttggtgccagggcggcagggccctgacgcatgtggagagtcagacagtttcactggctcccactggctcytcaggccgaagtccaggcagaagttggccttgtggggttcctgtcttcctgccaaaccatggcactcccgggacactgctagaacgctggccaaatcttgcatgagaagtcacctccattacagtctcctcaatgtcgggggtcagactacaggaaaccccttttatcagattttatggagtctgtacactagccaaggaaagtaagagaaagaaaaagaaagcaacttgtttaacctcacctaatagaaaggaaaggattctccaaagtagttcatctgggaatgaagcccaacatccctaaatctcagctcagtttactagtttttcatttaccagtggtttttagaaacttaaatcattatgatcc

SEQ ID NO: 677363 - DNA, 635 bp, Homo sapiens
ggatgtcacagatacaatagatttcatcattgaagacacatgcttcctgaaagtcactacgtttaagagaagcacagttcagccacatattgtggctaggatcatagcaaagcatgcgcttactgttgacagcataaagatagttctgaaccactatgagttcaaaggaatagaaggaatgagggacaggagccaccaatgcccactggtttctctgaacactgtagcattccacttccttcaacttaactccagtaatagggtctcgtccccccaaaatgtagatgtagccattgagatatgccacatccatgccctcacgacacagcaagcgatctgcaagttgctgccaactattctgagctggtttatacacccagaggtctttcctgggctgagcagctagatagatgtcatggtctggggacacacagacagctgaggaggtgacagtcttagtgtgagcaaagctggtcaaaggggatggcattgtgtaaatgtcccccgagtaagggtcatagcagagaaagggatctctrggatgtccaaagaagatcaccatctccttggcacacatacccagtctctggggtggattttctgctgcagatacaagagagttgctgctgctactg

SEQ ID NO: 677364 - DNA, 635 bp, Homo sapiens
ggatgtcacagatacaatagatttcatcattgaagacacatgcttcctgaaagtcactacgtttaagagaagcacagttcagccacatattgtggctaggatcatagcaaagcatgcgcttactgttgacagcataaagatagttctgaaccactatgagttcaaaggaatagaaggaatgagggacaggagccaccaatgcccactggtttctctgaacactgtagcattccacttccttcaacttaactccagtaatagggtctcgtccccccaaaatgtagatgtagccattgagatatgccacatccatgccctcacgacacagcaagcgatctgcaagttgctgccaactattctgagctggtttatacacccagaggtctttcctgggctgagcagctagatagatgtcatggtctggggacacacagacagctgaggaggtgacagtcttagtgtgagcaaagctggtcaaaggggatggcattgtgtaaatgtcccccgagtaagggtcatagcagagaaagggatctctaggrtgtccaaagaagatcaccatctccttggcacacatacccagtctctggggtggattttctgctgcagatacaagagagttgctgctgctactg

SEQ ID NO: 677365 - DNA, 2196 bp, Homo sapiens
  misc_feature 735, 736, 737, 738, 739, 740, 741, 742, 743, 744, 745, 746,747, 748, 749, 750, 751, 752, 753, 754, 755, 756, 757, 758,759, 760, 761, 762, 763, 764, 765, 766, 767, 768, 769, 770,771, 772, 773, 774, 775, 776, 777, 778, 779, 780, 781: n = A,T,C or G
  misc_feature 782, 783, 784, 785, 786, 787, 788, 789, 790, 791, 792, 793,794, 795, 796, 797, 798, 799, 800, 801, 802, 803, 804, 805,806, 807, 808, 809, 810, 811, 812, 813, 814, 815, 816, 817,818, 819, 820, 821, 822, 823, 824, 825, 826, 827, 828: n = A,T,C or G
  misc_feature 829, 830, 831, 832, 833, 834: n = A,T,C or G
taatcagttaatcaactaaatgtatctaggatcaaatttattttgatatctctttttttgtttttgaaatggagtcttgctctgcctccaggctggagtgcagtggcgcaatctcagctcactgcaacctccacctctcgggttcaagcrattttcctgcctcagcctcccgaggagctgtgactataggcacgtgccaccacacccagctaatttttgtatttttagtagagatggggtttcaccatattggccaggatggtcttgatctcttgacctcgtgatctgcccacctcggcctcccaaagtgctgggattacaggcgtaagccaccgcgccgggccttgatatctctttttaatactttcaatctcttgaccaaaagaaaggagagatgtgtgctcaatctagaggaacagaattgaatgcatacaacacatccagttaaagttaaaatctcttttatatccttccaggtagcaactattttcttctacctcccctgcaatcccatggaagcacatggatgtctgcattttctaaaattttaacagtggttttacaaggggattgcagctggcttctctgtcacttagcctaggtaatcacctagaagtccttgcaactatggtcacactcgaaagtgaatgaaaggaaataaataattgctttgctttatacaaagcacattctgagtgagtctaggtaaaagaatcagaaaatgagcaaatcacnnnnnnnnnnnnnnnnnnnnnnnnnnnnnnnnnnnnnnnnnnnnnnnnnnnnnnnnnnnnnnnnnnnnnnnnnnnnnnnnnnnnnnnnnnnnnnnnnnnnccatccattgtcggggggccgagttccaatagacaaggacaatatcgcggtttctggtcattagggtgaactcctctgcctctttctgatcccagtgtatcgtctccacccccctttgcatcaaaaccactttttaggactctttgcttctccatctaccttacccatgtagattgtgctttcactcctttagtctgatacatggtaggtacttaatcatttttgaatgaaactacatttgttttaaacaggactcaactggtgcatctcgcctttctgtagcagcaccatctatacctctgcatattctagactttcgagctccagagaccattgagagtgtagctcaaggaatccgtaagaactgcccctttgattatgcctgcatcactgacatggtgaaatcatcagaaacaacatctggaaatattgcatttatagtggagttattaaaaaatatttctacagacttgtctgataatgttactcgagagaaaatgaaggtattctttgttaatcatttaaaaatgatgtttttcttaaaattttcatttgaatagtttcaaatatactttccagggcaaaaactacagtgacagcaaccatcaaagcaacagcaggcatttcacttcggtttgggatattgattcattatagtttatggaggttttcaagtagttaaaacatttttaatacctatctttgtacacacttcatattttgaagaaaatatcacatagtgtagtgatggctatgagcaagacggaatgtacactaatgtttctaaattatattagaacaggggtccccaacacccaggcagtggattggtaccgggctgtggcctcttaggatctgggctacacagcaggaggtgagcggagggtgagcgaacattatcacctgggctctgcctcctgttggatcagctgcagcattagattctcgtagaagcacggaccttattgtgagctgcctatgagagggatgtaggttgtgtgctccttaggaaaatctaatgcctgatgatctaaggtggaacagtttcatcctgaaaccatccctacctctgccacccagagtccatggaaaaattgtctttcatgaagctagtacccggtgccaaaaaggttgaggaccactgctgtagaacataaccattctgagaaagttaatggagattccatttttaaaagggagatctgtagcccatcagttgtgggaggttctgagttaaacaaagttaggcaagtttccatatggcaggacttttcagagcctttaatatcctaatgaactttggaattctttgtaaggcagagggagatagggacagggtgtgcagtctttctcaagcttgga

SEQ ID NO: 677366 - DNA, 2196 bp, Homo sapiens
  misc_feature 735, 736, 737, 738, 739, 740, 741, 742, 743, 744, 745, 746,747, 748, 749, 750, 751, 752, 753, 754, 755, 756, 757, 758,759, 760, 761, 762, 763, 764, 765, 766, 767, 768, 769, 770,771, 772, 773, 774, 775, 776, 777, 778, 779, 780, 781: n = A,T,C or G
  misc_feature 782, 783, 784, 785, 786, 787, 788, 789, 790, 791, 792, 793,794, 795, 796, 797, 798, 799, 800, 801, 802, 803, 804, 805,806, 807, 808, 809, 810, 811, 812, 813, 814, 815, 816, 817,818, 819, 820, 821, 822, 823, 824, 825, 826, 827, 828: n = A,T,C or G
  misc_feature 829, 830, 831, 832, 833, 834: n = A,T,C or G
taatcagttaatcaactaaatgtatctaggatcaaatttattttgatatctctttttttgtttttgaaatggagtcttgctctgcctccaggctggagtgcagtggcgcaatctcagctcactgcaacctccacctctcgggttcaagcaattttcctgcctcagcctcccgaggagctgtgactataggcacgtgccaccacacccagctaatttttgtatttttagtagagatggggtttcaccatattggccaggatggtcttgatctcttgacctcgtgatctgcccacctcggcctcccaaagtgctgggattacaggcgtaagccaccgcgccgggccttgatatctctttttaatactttcaatctcttgaccaaaagaaaggagagatgtgtgctcratctagaggaacagaattgaatgcatacaacacatccagttaaagttaaaatctcttttatatccttccaggtagcaactattttcttctacctcccctgcaatcccatggaagcacatggatgtctgcattttctaaaattttaacagtggttttacaaggggattgcagctggcttctctgtcacttagcctaggtaatcacctagaagtccttgcaactatggtcacactcgaaagtgaatgaaaggaaataaataattgctttgctttatacaaagcacattctgagtgagtctaggtaaaagaatcagaaaatgagcaaatcacnnnnnnnnnnnnnnnnnnnnnnnnnnnnnnnnnnnnnnnnnnnnnnnnnnnnnnnnnnnnnnnnnnnnnnnnnnnnnnnnnnnnnnnnnnnnnnnnnnnnccatccattgtcggggggccgagttccaatagacaaggacaatatcgcggtttctggtcattagggtgaactcctctgcctctttctgatcccagtgtatcgtctccacccccctttgcatcaaaaccactttttaggactctttgcttctccatctaccttacccatgtagattgtgctttcactcctttagtctgatacatggtaggtacttaatcatttttgaatgaaactacatttgttttaaacaggactcaactggtgcatctcgcctttctgtagcagcaccatctatacctctgcatattctagactttcgagctccagagaccattgagagtgtagctcaaggaatccgtaagaactgcccctttgattatgcctgcatcactgacatggtgaaatcatcagaaacaacatctggaaatattgcatttatagtggagttattaaaaaatatttctacagacttgtctgataatgttactcgagagaaaatgaaggtattctttgttaatcatttaaaaatgatgtttttcttaaaattttcatttgaatagtttcaaatatactttccagggcaaaaactacagtgacagcaaccatcaaagcaacagcaggcatttcacttcggtttgggatattgattcattatagtttatggaggttttcaagtagttaaaacatttttaatacctatctttgtacacacttcatattttgaagaaaatatcacatagtgtagtgatggctatgagcaagacggaatgtacactaatgtttctaaattatattagaacaggggtccccaacacccaggcagtggattggtaccgggctgtggcctcttaggatctgggctacacagcaggaggtgagcggagggtgagcgaacattatcacctgggctctgcctcctgttggatcagctgcagcattagattctcgtagaagcacggaccttattgtgagctgcctatgagagggatgtaggttgtgtgctccttaggaaaatctaatgcctgatgatctaaggtggaacagtttcatcctgaaaccatccctacctctgccacccagagtccatggaaaaattgtctttcatgaagctagtacccggtgccaaaaaggttgaggaccactgctgtagaacataaccattctgagaaagttaatggagattccatttttaaaagggagatctgtagcccatcagttgtgggaggttctgagttaaacaaagttaggcaagtttccatatggcaggacttttcagagcctttaatatcctaatgaactttggaattctttgtaaggcagagggagatagggacagggtgtgcagtctttctcaagcttgga

SEQ ID NO: 677367 - DNA, 672 bp, Homo sapiens
tgccaacttacagcttacagaggaaggctagtgaccctttcagtggccagttggctgaaactacagtctcctacacacagtttgaggacagtcatgtgctaatgttcattccaaatccttctccctgagatggttagaaagctgtaggagaaatctttggctgccagatgcaccacatcccaagacctaccccaggtgaaagtttatctttacctttcaaactcctgattcccctttgactgcctcttgttctggtaaactctctcctccccaaagattgcccccrcccaactggctgtccagtcctgtcctccaccttagcttcagaatcataagatgaaggttggagtccagctgtgatacccaccctctgatcttgagcaaatcatttaaactttctgaactgcaaccacttcatctgtaaaatgggcagtctccttcttacctgtcactcatgcttgttgtaggagcaataggatatcggactcgaaagcatattatgaatggggggtcctgtatatttattatatgctgagatgcttacttttcccaaacttgcctatccatcaagatatagctattgtataagagatttcctcagggtcccatgctgaatcaatggatgcttgtgtgttaactcaagtattcactgaacatctactacaaacccag

SEQ ID NO: 677368 - DNA, 1854 bp, Homo sapiens
ttgccattttttgcctgaagcatcatcaccacgaaatttctttctagggatatactatctgagaacatgaaatttgaatctaccggaatccatgaaaacttcaacataaagtagtttctgaaattagttacttgaaacctagtagaagccagcagacctcaaaataggtgtaagatggtgcagagtaagttggaaacaaacatcgaaggccaggaaatgtycaggaagttaacaaagaaacacccacgaactagagagatgtccaagaaaggtaagcagataatattcaatatctcgaggtaaaatgtgctcagtgttaagcctgataaaatgtaagtaaggaaacatagtttattaaaaattcagaaatcctttagctggtttacacaggtctttaacaagtgggtgattgcccatttccactactgttcaaaaggattacccacaataagcctacaggaaaaaggatttgtggtcagattcatttttataccaacttcagaaatttgtgccagcctctaggctggtgtcttatgataagggaccaacaattcaggactaagcttctttcactcaaccccagcgagccagctggcatgggccatgattgtgtgcagggacgaccacaatgaagaccagcaagttttcccagtcgtccagggacaaccacactggagaccagtcagttttcttccgttactccttctgcatgctagcctctctcctgtctctatcgaccttcggatttgacctccccatttgagcaccacagtggtttcaagcacctcccctttcctttcctatcaaaatcttctctaaaaaaatggaattgataaatcttgttgacatggtatgacatttataatacattttatggaaaaacactaattatcaaagagttatgaagcatttttaagcgagagaaaactatagagaaagatacctagaaatatatatgccaaagtgttaaaatatatttttattatgtatagtgttagcatggttatgatgtataatgatgttaggagtaattctttctttactttttatttggagagtgaggatacttggtaatatagccacttttttaattgtttaaaaatggcatactaattttgcaatattgtctatatttttaataaagaatttgttacaaattataacattagtgaaattgctacacccatccatttattcattcatatatttatttaccacggattatgtgcaggcgcctactcagtctataaattacttcccttggaaatttgccattaatgagatgccttacagaagctgaaattgaaggtttttctgcgaaagacctactcacagccctgaagtctccccacataggtaagcagctcacatctgtgctctaagcatgtgccagcactgccttggatgtgtgtcagccagaggtcacaccttaaggattttcttcctagtaattgtgtctcttcttgctcatgaagtattctataaattcaaaaaatttaagctgtgctcttcataattattttttttctgtgtcagcatctatatgtgcttaacatgcaataagccataatgataccaatagtgatatgtcatagatcaattctgtattccagtgaaaagatttggattatttttacatctattatataagaatatagtgtttttcttttatacatgaaaagaaaaacctgaaagcaccttgacatgcaaagtagcaatcaagaaataaaatcaatagattggggtctcaaataccccaatccaggtctccagaggggtaacctttacctattagctagtgctaatgagatccttgccttctctacaggggaaatgttcacagccacaaagaaa

SEQ ID NO: 677369 - DNA, 1854 bp, Homo sapiens
ttgccattttttgcctgaagcatcatcaccacgaaatttctttctagggatatactatctgagaacatgaaatttgaatctaccggaatccatgaaaacttcaacataaagtagtttctgaaattagttacttgaaacctagtagaagccagcagacctcaaaataggtgtaagatggtgcagagtaagttggaaacaaacatcgaaggccaggaaatgttcaggaagttaacaaagaaacacccacgaactagagagatgtccaagaaaggtaagcagataatattcaatatctcgaggtaaaatgtgctcagtgttaagcctgataaaatgtaagtaaggaaacatagtttattaaaaattcagaaatcctttagctggtttacacaggtctttaacaagtgggtgattgcccatttccactactgttcaaaaggattacccacaataagcctacaggaaaaaggatttgtggtcagattcatttttataccaacttcagaaatttgtgccagccyctaggctggtgtcttatgataagggaccaacaattcaggactaagcttctttcactcaaccccagcgagccagctggcatgggccatgattgtgtgcagggacgaccacaatgaagaccagcaagttttcccagtcgtccagggacaaccacactggagaccagtcagttttcttccgttactccttctgcatgctagcctctctcctgtctctatcgaccttcggatttgacctccccatttgagcaccacagtggtttcaagcacctcccctttcctttcctatcaaaatcttctctaaaaaaatggaattgataaatcttgttgacatggtatgacatttataatacattttatggaaaaacactaattatcaaagagttatgaagcatttttaagcgagagaaaactatagagaaagatacctagaaatatatatgccaaagtgttaaaatatatttttattatgtatagtgttagcatggttatgatgtataatgatgttaggagtaattctttctttactttttatttggagagtgaggatacttggtaatatagccacttttttaattgtttaaaaatggcatactaattttgcaatattgtctatatttttaataaagaatttgttacaaattataacattagtgaaattgctacacccatccatttattcattcatatatttatttaccacggattatgtgcaggcgcctactcagtctataaattacttcccttggaaatttgccattaatgagatgccttacagaagctgaaattgaaggtttttctgcgaaagacctactcacagccctgaagtctccccacataggtaagcagctcacatctgtgctctaagcatgtgccagcactgccttggatgtgtgtcagccagaggtcacaccttaaggattttcttcctagtaattgtgtctcttcttgctcatgaagtattctataaattcaaaaaatttaagctgtgctcttcataattattttttttctgtgtcagcatctatatgtgcttaacatgcaataagccataatgataccaatagtgatatgtcatagatcaattctgtattccagtgaaaagatttggattatttttacatctattatataagaatatagtgtttttcttttatacatgaaaagaaaaacctgaaagcaccttgacatgcaaagtagcaatcaagaaataaaatcaatagattggggtctcaaataccccaatccaggtctccagaggggtaacctttacctattagctagtgctaatgagatccttgccttctctacaggggaaatgttcacagccacaaagaaa

SEQ ID NO: 677370 - DNA, 1854 bp, Homo sapiens
ttgccattttttgcctgaagcatcatcaccacgaaatttctttctagggatatactatctgagaacatgaaatttgaatctaccggaatccatgaaaacttcaacataaagtagtttctgaaattagttacttgaaacctagtagaagccagcagacctcaaaataggtgtaagatggtgcagagtaagttggaaacaaacatcgaaggccaggaaatgttcaggaagttaacaaagaaacacccacgaactagagagatgtccaagaaaggtaagcagataatattcaatatctcgaggtaaaatgtgctcagtgttaagcctgataaaatgtaagtaaggaaacatagtttattaaaaattcagaaatcctttagctggtttacacaggtctttaacaagtgggtgattgcccatttccactactgttcaaaaggattacccacaataagcctacaggaaaaaggatttgtggtcagattcatttttataccaacttcagaaatttgtgccagcctctaggctggtgtcttatgataagggaccaacaattcaggactaagcttctttcactcaaccccagcgagccagctggcatgggccatgattgtgtgcagggacgaccacaatgaagaccagcaagttttcccagtcgtccagggacaaccacactggagaccagtcagttttcttccgttactccttctgcatgctagcctctctcctgtctctatcgaccttcggatttgacctccccatttgagcaccacagtggtttcaagcayctcccctttcctttcctatcaaaatcttctctaaaaaaatggaattgataaatcttgttgacatggtatgacatttataatacattttatggaaaaacactaattatcaaagagttatgaagcatttttaagcgagagaaaactatagagaaagatacctagaaatatatatgccaaagtgttaaaatatatttttattatgtatagtgttagcatggttatgatgtataatgatgttaggagtaattctttctttactttttatttggagagtgaggatacttggtaatatagccacttttttaattgtttaaaaatggcatactaattttgcaatattgtctatatttttaataaagaatttgttacaaattataacattagtgaaattgctacacccatccatttattcattcatatatttatttaccacggattatgtgcaggcgcctactcagtctataaattacttcccttggaaatttgccattaatgagatgccttacagaagctgaaattgaaggtttttctgcgaaagacctactcacagccctgaagtctccccacataggtaagcagctcacatctgtgctctaagcatgtgccagcactgccttggatgtgtgtcagccagaggtcacaccttaaggattttcttcctagtaattgtgtctcttcttgctcatgaagtattctataaattcaaaaaatttaagctgtgctcttcataattattttttttctgtgtcagcatctatatgtgcttaacatgcaataagccataatgataccaatagtgatatgtcatagatcaattctgtattccagtgaaaagatttggattatttttacatctattatataagaatatagtgtttttcttttatacatgaaaagaaaaacctgaaagcaccttgacatgcaaagtagcaatcaagaaataaaatcaatagattggggtctcaaataccccaatccaggtctccagaggggtaacctttacctattagctagtgctaatgagatccttgccttctctacaggggaaatgttcacagccacaaagaaa

SEQ ID NO: 677371 - DNA, 1854 bp, Homo sapiens
ttgccattttttgcctgaagcatcatcaccacgaaatttctttctagggatatactatctgagaacatgaaatttgaatctaccggaatccatgaaaacttcaacataaagtagtttctgaaattagttacttgaaacctagtagaagccagcagacctcaaaataggtgtaagatggtgcagagtaagttggaaacaaacatcgaaggccaggaaatgttcaggaagttaacaaagaaacacccacgaactagagagatgtccaagaaaggtaagcagataatattcaatatctcgaggtaaaatgtgctcagtgttaagcctgataaaatgtaagtaaggaaacatagtttattaaaaattcagaaatcctttagctggtttacacaggtctttaacaagtgggtgattgcccatttccactactgttcaaaaggattacccacaataagcctacaggaaaaaggatttgtggtcagattcatttttataccaacttcagaaatttgtgccagcctctaggctggtgtcttatgataagggaccaacaattcaggactaagcttctttcactcaaccccagcgagccagctggcatgggccatgattgtgtgcagggacgaccacaatgaagaccagcaagttttcccagtcgtccagggacaaccacactggagaccagtcagttttcttccgttactccttctgcatgctagcctctctcctgtctctatcgaccttcggatttgacctccccatttgagcaccacagtggtttcaagcacctcccctttcctttcctatcaaaatcttctctaaaaaaatggaattgataaatcttgttgacatggtatgacatttataatacattttatggaaaaacactaattatcaaagagttatgaagcatttttaagcgagagaaaactatagagaaagatacctagaaatatatatgccaaagtgttaaaatatatttttattatgtatagtgttagcatggttatgatgtataatgatgttaggagtaattctttctttactttttatttggagagtgaggatacttggtaatatagscacttttttaattgtttaaaaatggcatactaattttgcaatattgtctatatttttaataaagaatttgttacaaattataacattagtgaaattgctacacccatccatttattcattcatatatttatttaccacggattatgtgcaggcgcctactcagtctataaattacttcccttggaaatttgccattaatgagatgccttacagaagctgaaattgaaggtttttctgcgaaagacctactcacagccctgaagtctccccacataggtaagcagctcacatctgtgctctaagcatgtgccagcactgccttggatgtgtgtcagccagaggtcacaccttaaggattttcttcctagtaattgtgtctcttcttgctcatgaagtattctataaattcaaaaaatttaagctgtgctcttcataattattttttttctgtgtcagcatctatatgtgcttaacatgcaataagccataatgataccaatagtgatatgtcatagatcaattctgtattccagtgaaaagatttggattatttttacatctattatataagaatatagtgtttttcttttatacatgaaaagaaaaacctgaaagcaccttgacatgcaaagtagcaatcaagaaataaaatcaatagattggggtctcaaataccccaatccaggtctccagaggggtaacctttacctattagctagtgctaatgagatccttgccttctctacaggggaaatgttcacagccacaaagaaa

SEQ ID NO: 677372 - DNA, 972 bp, Homo sapiens
tgtcactgtatcttagttaatcccttatgccctcattcaaytgtatactttttaaatggtgagatactaatctttgtacatgtcaccccttcacctttccttctaataagcattctttaaaaagcaccttgagtaaataataattataattaaatttttcatattatgcaacacaccagtgtctttgtttccactcaatttctgaggctttatcattgacatctacatattttatgtatattagaaattcatggccataataagaactttgaggacctgatgagttagatttcaataaaagttttaccttaacttcatttatctaattcattaataaaagttttaaataaaagttttactccaactgcatttttctgattcattagatgtgaaaaatggaaggtaacatttgttgtaaagcaacttctttaatttaaaaatgcttagaactctgagctagctattagcatgatgtcatggaggaggcattcctggaaagtaatattactcattctcatcaccaatgtacatttaaaggtcgaaatctgaagctcatcatcttatatgtgggcaatcaccttgggaagtattgacttttccctgttacttcttcattctcaaataattgttctttcctaaagtaacttatcaaagtttagcaggactcttacttttattgtggcactatcttttacattcaaaacctaagatagcattagctgtttgattacaactatcatttcaatgaggatctaatttaattaagtacctgggttcttttcatgtcaggtctgcttgtctcttactggtacgttttattctttcaaaactaaaatataaataaatttattaaaagatatatatatataggccgggcgcggtggctcacgcctgtaatcccagcactttgggaggccgaggcgggcggatcacgaggtcagaagatcgagaccatcccggctaaaacggtga

SEQ ID NO: 677373 - DNA, 972 bp, Homo sapiens
tgtcactgtatcttagttaatcccttatgccctcattcaattgtatactttttaaatggtgagatactaatctttgtacatgtcaccccttcacctttccttctaataagcattctttaaaaagcaccttgagtaaataataattataattaaatttttcatrttatgcaacacaccagtgtctttgtttccactcaatttctgaggctttatcattgacatctacatattttatgtatattagaaattcatggccataataagaactttgaggacctgatgagttagatttcaataaaagttttaccttaacttcatttatctaattcattaataaaagttttaaataaaagttttactccaactgcatttttctgattcattagatgtgaaaaatggaaggtaacatttgttgtaaagcaacttctttaatttaaaaatgcttagaactctgagctagctattagcatgatgtcatggaggaggcattcctggaaagtaatattactcattctcatcaccaatgtacatttaaaggtcgaaatctgaagctcatcatcttatatgtgggcaatcaccttgggaagtattgacttttccctgttacttcttcattctcaaataattgttctttcctaaagtaacttatcaaagtttagcaggactcttacttttattgtggcactatcttttacattcaaaacctaagatagcattagctgtttgattacaactatcatttcaatgaggatctaatttaattaagtacctgggttcttttcatgtcaggtctgcttgtctcttactggtacgttttattctttcaaaactaaaatataaataaatttattaaaagatatatatatataggccgggcgcggtggctcacgcctgtaatcccagcactttgggaggccgaggcgggcggatcacgaggtcagaagatcgagaccatcccggctaaaacggtga

SEQ ID NO: 677374 - DNA, 931 bp, Homo sapiens
  misc_feature 288, 289, 290, 291, 292, 293, 294, 295, 296, 297, 298, 299,300, 301, 302, 303, 304, 305, 306, 307, 308, 309, 310, 311,312, 313, 314, 315, 316, 317, 318, 319, 320, 321, 322, 323,324, 325, 326, 327, 328, 329, 330, 331, 332, 333, 334: n = A,T,C or G
  misc_feature 335, 336, 337, 338, 339, 340, 341, 342, 343, 344, 345, 346,347, 348, 349, 350, 351, 352, 353, 354, 355, 356, 357, 358,359, 360, 361, 362, 363, 364, 365, 366, 367, 368, 369, 370,371, 372, 373, 374, 375, 376, 377, 378, 379, 380, 381: n = A,T,C or G
  misc_feature 382, 383, 384, 385, 386, 387: n = A,T,C or G
tataaaagtaaagatgttagtataaagatgatagtatatagtgtatatatcctatatatatgcacacacatatagttatgtatataaacactacatattatatatttatatatgtgctgatatatattagaatgtaagatatgattatatattaatatgtaatatattataaygtatattctttattaaatattgtattatatgtttacatataataattttgtataatttatatataataggtaccgagctcgaattcgtaatcatgtcataggcttgtcccaattnnnnnnnnnnnnnnnnnnnnnnnnnnnnnnnnnnnnnnnnnnnnnnnnnnnnnnnnnnnnnnnnnnnnnnnnnnnnnnnnnnnnnnnnnnnnnnnnnnnnttccgtttaatatatctgggtcttttatgtttactacaacaaatatacattgtctttatgtaataaaggggaataagtacacaataaatgcccatttctgtggcttagaaaggcttctgctttcagttataataagaaccaattctcccattgagagtaactttaaaagtttgtaaaatacagaaaaacaatttgaatggcaccatcaaaatggtaccaaagcgacaggtttgagaggctaagatcatggaaagaaaactcggaagtgagtctgacacttttcaaggttttcccattcaatgcatttgctaattcataagtaaagtgggcaggaatgtttagaagctgatcaaaaactggagagttggagaaaatttgagtagaattttctgcagtcttagcagctataaagacatacctggagtttagggctaccaacacagttaggacttgaaagttcaagatcttgtccagaaaggaagtttgcaaaagtgaacttggtacccagggtcaacgataagtacctgctaagaggctaaaaatc

SEQ ID NO: 677375 - DNA, 604 bp, Homo sapiens
tatggggttaaagctaaataaattttgtcttataaaacaataataaaaatgcctagtggacttaaaaatatatagagtctctctatgttgtctcagttgctgacatgccatccggaatgagaaagacccagaaactttggggccacatgagccacggccactgcctcatcagcaagcaccagaagcactcaggaggcagtagaatgctggtggcatgcaacaccacaggataaactttgataaatatcacyctggctactttgggaaagttggtatgaggattaccacttagagaggaaccagagctcctgctcaactgccaatcacaataaattgtggactttggtcagtgagcagacacaggagaatgctgctaaaaacaagactggggctctccaccattgatgtggtagattactacaaagttctgggaaagggaaagctcccaaagcatcctatcattgtgaaggccaaattcttcagaagaagagcacaggagaggattaaagggtgttggagtggggctggtggtgtgaagccacagggagggaggtttgttaaatgctaacaactgctgcaaaaaaataaaaataacaaaacaaaa

SEQ ID NO: 677376 - DNA, 1956 bp, Homo sapiens
ttttttgtgagctggagttttgctcttgttgcccaggttggagtgcagtagtgtgatcctagctcactgcaacctccacctcctaggttcaagtgattctcctgcctcagcctcctgagtagctgggattacaggtgcctgccaccacgcccggctaatttttttgtatttttagtagagatggggtttcaccatgttggccaggcttagtcttggactccggacctcaggtgatccaccctccttggcctcccaaagtgctgggattataggtgtgagccactgcgcccagccagaaggtttatcttttttctttttttgagacagaatcttgttgtgtcgcccaggctggagtgcagtggcgcgatctcggctcactgcaagctccacctcccgggttcgcgcctttctcctgcctcagcctcccgagtaggacggactacaggcacccgccaccatgcccggctaattttttctattttttagtaggggcagggtttcgccgtgttagccgggatggtcttgatctcctgacctcatgatccgcctgcctcggcctcccaaagtgctgggattacaggcatgagccactgcacccggccagaaagtttatcttctaatggctgacaagatcatgtaattttaggggtaacaggagccacagaggcaagatttcaacctgttgtttttttagaggcccagagagaggacagggcatgtctgaggtcacccagcaagtgaacagggaagagcggggatccaggcctctgcactccacctggcctctgcagcacaagtgtttctgtgaaccccttattcacacagacactccgtgtgagactccctctgtgtttcacatgaccgtcatggagactcagaatctgcaccataactcctttagctcagagtgcccaggaagaccacgcagcctgcaagacctcatccctgagtggtctggaagccgcccatggattcactcactcacctgctcacatgccactcctctaacttcttccctgaacgtgggctgggagccaggcacagtgccaagtgctcatcagctctgtccagtctcgcaggggcagcgtgctgtggactcagagcccgcaggacaagagagactgttcagagggtcctgatgaggtgtcagccagagagggggatgttacctgggttgggagcatcaaggacaatggcactgagggggcagtgttggatggggggcttgaaggacaggtcccatgggctcatggagagatggggtctgatggggaggagacctgattacaaactctgtgaggactcagcatctccagtgtccttcagaatgagcaggcacgtctgcaggcctgtctctgactgtgcgctctgagacrgcgactgcaggcgaactgtgtggcaggataatgactgacccagtgttttctggttaatctgcttcacctccctgtaatgtgttttaatgaggagagatggaaggtgaggagacggggctgccctgcacccacacacaggcactggactatgaatgacataccctcgtgcccgattcccaatcactttggacaaatgatgcctgagcaaggggccgcaggctgggaagggatgtcagtcaagggtacaggttccttgagcccctcatgctagctctccaagaggtgaatgttccacaggcctcgcctgtgagccccagcgtggcatggcggtggtgacaggaagggggcctgaggtgctggccgcggaggctggctgcctcttccattttcgagcagattgagctgtctcagtgtgtgtctctgtggcctagtgccctggatgggggccttgctgtcactttcgctgagcagcttggtggggaacaaagagcacttactggccttggggtcgggaagcttgatttgagtcctagctctgccctgccgagcaagtcactatttttctgggcctcagtttcca

SEQ ID NO: 677377 - DNA, 1328 bp, Homo sapiens
aatttgggccatttggtctgatgaagagaaggcttgaggttgtgggcaaggaagaagacaggctaaaagaactcactaatagcccaagctttctgacagtggaatgggcctccttgttaagtagtgagcttcccattgctggaggcatgcaagtagaatctatccattttcatacatgtggttttagaagtttaagaatccagagagcttaattatctaaatgccaatgcctttccaacctgaaagaatgattctaagataagaagaatgagaagggtctggtgggaagaggggaaggagtagagaagatcttttacactgaagcaccggaaggggcactgaagggcagttcccctgaggaatcctcactagggtggacaaagagggtcagtctgcatcacaggagccatggccctgagcagcaaaggggtggggactgcagggtcttgggaggccattggatgactccagctcctctagtgcagggagcagggctggggttctggtgaagatgccagggccaggatactggtggctgctgtcagccttgctgcctccagacagtatctggcttcctctgcccaggagttcagggccaggtcccatgggggaggagtaggctggtcagcacattagcagaaagtggtatgtggtaagttggtgaggtgcgaggggacttgtgtgctggggtcagggccttggattgtattaccttgagagcaaagagaggcctctgtgagattttaaatcagggaatatcaggatccaatccaacacagagtggaagattactcttgcagctgtgaggagactcggagagctaggggaccaggaggcgattgctagggtataagcgacgttgctgtacccctgaagatggctgcctgggtctagcttctctccagtccgtagtattgcccaaaaagtgtggccccatcatgcacggcttctctcctttcccttctgctcccccacctcctcacacttccccccaccaaccctccaagtctccagccaggcccccgtagttcctagagttagcttgaatttgattctgagcttcctgatggtcaaagcaaaatgggaaatgcaatcagttgtgttcttctcattgtccaccagtggaggagagtccagttcctyaatggaagccatttttttttcctgacatttagagtggaaggaaattttcacatgggttttcagtgggtagaccagtgaggcaatggtcacggtcctcaacagcacatttagaggccctgcagtaggttgtatagagcttgtcttatggatgagtatgacgcccacatgctaatcagtgcatttct

SEQ ID NO: 677378 - DNA, 987 bp, Homo sapiens
caaccatacatcatgtattccatatatcaactctacttgctattccttcaacatgccctgaacttttacaaatatcttcttctgyttttactgttccttcagtaaagaagggacaatttccttccatttccctaccttgttaattgaagttcaaattgtgattccaggctcaattccagtctctcctcttccataacacctagatccctgctgtcctcacctatttttactatctcttttccttctaaagacctctgcatacattcatggagtgactgtctccacagactgtgaagctctgatgggcagggaccataattttttgatttttcaagacttcatagcacttaacacaatgtgttgtttgttagaaaatgtgagcagatatttgttttattgtatatttgaggtttttctttaaggactagccaaacaagttatagagatgctcttcaaaatcgttttttaaagggaaggttatgactcaaacacacagatttgcatattttgatttgctagttttctggctggaggatattttctccattctctggttataccatctctcagggagggttagcctgatgggaaagttctcccaggtctttcccaatccatttgcccccaatagtgtttcacatctgctttgtcatttgtgagcctcagatatggtgccaaggggcccttgtcctccaacagatacttctgttcagctctgtctgcagtgaattattcctctcagtttcttatccagtatttaattccccattactgagctgtattgaaggtgagggaggcctatctgatctcccaaggggctcagtgccagcagagtaattagctaggcttcatgccaattcagagctttgatctggaaacctataaccttcagtttcaatatggtggtggaagaaggtatggggctaaagaagaatgctctaggctcctctttcaaaactgtacaaacattaccctggagaggctgag

SEQ ID NO: 677379 - DNA, 888 bp, Homo sapiens
tcgcaatttagctggatgtgtcctcatcggacttccccagccttctactcactctcaccttgcccctactctccctacctcccaaggggactggagcatgatttttcagggattgtggtgcacctctgccatatggtggacattcaaagaaaatttaattactaatgtgaatggaaaggatttaggaagtgggtgggaaaacagtctcctctcatattggaaatacagttacttcccctttcaaaataaatataagtatttatatttcaaagttaaatataactagaygatagttgtaccctatagtgcagtatgacagggaaggtgtaggctttggtgtcaaaccaacctaaggactgagtctcagctgttgcgcattgcacacctgcaaagacgggtaatattctttacttgtaaggtggttggaagagctgaactgaataacgtggaaagagtcgatcacagggctttgtgcagaataggagggcagtataaagtagcaggggggctattagtactggctattgtttactcatcctataagctgcttattcagaaaactacagtaactttccaaataatttgggcaggaaaacctcaccacctttcatctagaaagatctaatcacttctttgaacgccattcacccaagagggcacaactcctaccaacatgaaaagcagatcttgtgaaagcccacttgctgccatctcccagccatttctccgacttcagaccggtgaacatcgtgcattagaaagtgttgttacatgtccaaggaaatctacatatagaacttttgccacggaaatgctgaagtcctattctgacagcgtgactccgatgtccacttggcaggctttgcgcaaagaattaaggcgagggtg

SEQ ID NO: 677380 - DNA, 622 bp, Homo sapiens
tatttacgtacaattaagtgtgatctgcacacaccaggagatgggagygcatgtctgaggacaggaattttttcacaggtacaactacatctagaatgtgtgcaaaaatgtttgcctgctgaagggaatataaattggcacaaccattttggaaaaccatttggccatagccactaaagccgaatatacctatttccttatgacccagcaatcctccttctaggaaaatacctgacagaagtacgttcgtatgtccaccaaaagacttgtgcaagaatgttcagagtagcactgtctgtaatagccccaaaccagaagccacctcaagtgcccatcaacaacataaaggatacataaatcatggtacacccacacaactgaatcttccacagcaaggaaaatgaacaacctacaactaaatgcaacaatacggatgcatctcagaaatgtaatgttgagcaaaaggtcagagataaaagaacaaggttccgtgtctataaagttcagaaacaggcaaaactcatctatgctgttgagaaagttcaggatgatggttgcccttggggtgagggcaccgaaaggggcaaaaggggccttctaggggctggtgaggttctgcttc

SEQ ID NO: 677381 - DNA, 589 bp, Homo sapiens
tataggacatcagaatctaattaattgggtgggcacagtggctcaggcctgtaatcccagcactttgggaggccaaggtgggcagatcacctgaggttgggagttcgagacaagcctgaccaacatggagaaacctaaaaatacaaaggtctgtactaaaatacaaaaytagccgggcatggtggagcatgcctgtaatcctggctactcgggaggctgaggcaggagaatcactgcaacctgggaggcagaggttgtggtgagccgagatcatgacattgcactccagcctgggcagctagagcaaaaaatccgtctcaaaaaaaaaaaaaaaaaaaaaaaaaagaatctaattaattcattccatatttgtctcaaacttatggaaagaccctactcctcttcaaacctgtttctgaggggtaacacagtggaactcggaacaccaaaacttccatctctggtataagagactgcaaaggaatcacacattgtggcacatgggatggaaactactctgctgtgtctgtatcttagagctgctgggacctgcaaagaaagctgagacctctgaggtcttaatgcaaaa

SEQ ID NO: 677382 - DNA, 589 bp, Homo sapiens
tataggacatcagaatctaattaattgggtgggcacagtggctcaggcctgtaatcccagcactttgggaggccaaggtgggcagatcacctgaggttgggagttcgagacaagcctgaccaacatggagaaacctaaaaatacaaaggtctgtactaaaatacaaaactagccgggcatggtggwgcatgcctgtaatcctggctactcgggaggctgaggcaggagaatcactgcaacctgggaggcagaggttgtggtgagccgagatcatgacattgcactccagcctgggcagctagagcaaaaaatccgtctcaaaaaaaaaaaaaaaaaaaaaaaaaagaatctaattaattcattccatatttgtctcaaacttatggaaagaccctactcctcttcaaacctgtttctgaggggtaacacagtggaactcggaacaccaaaacttccatctctggtataagagactgcaaaggaatcacacattgtggcacatgggatggaaactactctgctgtgtctgtatcttagagctgctgggacctgcaaagaaagctgagacctctgaggtcttaatgcaaaa

SEQ ID NO: 677383 - DNA, 662 bp, Homo sapiens
ttttttttttttgagacggagtctcactctgtcacccaggctggagtgacagtggtgtgatttctgctcactgcaagctccacctcccaggttcatgccattctcctgcctcagcctccyggctagctaggactacaggtgcccaccaccacacccggctaattttttctatttttttttttttagtagagatgtggtttcaccacgttagccaggatggtcttgatctcctgacctcgtgatttgcccacctcagcctcccgaagtgctgggattacaggcgtgagccaccgtgccccacccaagttgtccttgtaattttcatggctaggtcaatcctggaacttcaaagtttttaaatagatgtgtgctagaaaaaataatcaaatggttaaaaaaaaaaagttttttagagtgaaacaatattacgtccggaattagtgggttcttagtctcactgacttcaagaatgaagccgcggaccctcgcagtgagtgttacagttcttaaaggcggaatgtttggagtttgttctttcctcccatctggagctgttcattcctcccagtgggttcgctgtctcactggctcaggagtgaaactgcagatcttcacagtgagtgttacagctcataaaggccgtgtggacccaaagagtgagc

SEQ ID NO: 677384 - DNA, 662 bp, Homo sapiens
ttttttttttttgagacggagtctcactctgtcacccaggctggagtgacagtggtgtgatttctgctcactgcaagctccacctcccaggttcatgccattctcctgcctcagcctcccggctagctaggactacaggtgcccaccaccacacccggctaattttttctatttttttttttttagtagagatgkggtttcaccacgttagccaggatggtcttgatctcctgacctcgtgatttgcccacctcagcctcccgaagtgctgggattacaggcgtgagccaccgtgccccacccaagttgtccttgtaattttcatggctaggtcaatcctggaacttcaaagtttttaaatagatgtgtgctagaaaaaataatcaaatggttaaaaaaaaaaagttttttagagtgaaacaatattacgtccggaattagtgggttcttagtctcactgacttcaagaatgaagccgcggaccctcgcagtgagtgttacagttcttaaaggcggaatgtttggagtttgttctttcctcccatctggagctgttcattcctcccagtgggttcgctgtctcactggctcaggagtgaaactgcagatcttcacagtgagtgttacagctcataaaggccgtgtggacccaaagagtgagc

SEQ ID NO: 677385 - DNA, 662 bp, Homo sapiens
ttttttttttttgagacggagtctcactctgtcacccaggctggagtgacagtggtgtgatttctgctcactgcaagctccacctcccaggttcatgccattctcctgcctcagcctcccggctagctaggactacaggtgcccaccaccacacccggctaattttttctatttttttttttttagtagagatgtggtttcaccacgttagccaggatggtcttgatctcctgacctcgtgatttgcccacctcagcctcccgaagtgctgggattacaggcgtgagccaccgtgccccrcccaagttgtccttgtaattttcatggctaggtcaatcctggaacttcaaagtttttaaatagatgtgtgctagaaaaaataatcaaatggttaaaaaaaaaaagttttttagagtgaaacaatattacgtccggaattagtgggttcttagtctcactgacttcaagaatgaagccgcggaccctcgcagtgagtgttacagttcttaaaggcggaatgtttggagtttgttctttcctcccatctggagctgttcattcctcccagtgggttcgctgtctcactggctcaggagtgaaactgcagatcttcacagtgagtgttacagctcataaaggccgtgtggacccaaagagtgagc

SEQ ID NO: 677386 - DNA, 662 bp, Homo sapiens
ttttttttttttgagacggagtctcactctgtcacccaggctggagtgacagtggtgtgatttctgctcactgcaagctccacctcccaggttcatgccattctcctgcctcagcctcccggctagctaggactacaggtgcccaccaccacacccggctaattttttctatttttttttttttagtagagatgtggtttcaccacgttagccaggatggtcttgatctcctgacctcgtgatttgcccacctcagcctcccgaagtgctgggattacaggcgtgagccaccgtgccccacccaagttgtccttgtaattttcatggctaggtcaatcctggaacttcaaagtttttaaatagatgtgtgctagawaaaataatcaaatggttaaaaaaaaaaagttttttagagtgaaacaatattacgtccggaattagtgggttcttagtctcactgacttcaagaatgaagccgcggaccctcgcagtgagtgttacagttcttaaaggcggaatgtttggagtttgttctttcctcccatctggagctgttcattcctcccagtgggttcgctgtctcactggctcaggagtgaaactgcagatcttcacagtgagtgttacagctcataaaggccgtgtggacccaaagagtgagc

SEQ ID NO: 677387 - DNA, 589 bp, Homo sapiens
tgtggtggggttgtccgagtacatcagaactaaacatcctcagagcattgcacaagtaagttgtttataattatttgatttgttttatatccatataataattacatcaatatgtctcaaaagctattaaatacaatctttaaatttccatgcttcattcagatgacgaaaaaagaatttctaaaaggaataattgaaagcaatctattgttcataacatcagaaagaataaatcttgtacttcagaaatatttgactctactgacaaggtcatttccatcctagggtaaatatattttacagtataggttttcaaatttgtgaagcacccattagccatatttcaaagtatactgtaatgaagaagctctgacaagaaacattccaaaataaaaccaaaatataaaatttcatgtgatatrtagtttttccttaaatatttccaaggaaaatacctaacatgtaggaaattagccagtctaaaatagaacatacagatactgaataatcagtctctactgcagatgatatatatcactgtatcatgccagcacttaatcacttttatggaattacaatttggttctca

SEQ ID NO: 677388 - DNA, 589 bp, Homo sapiens
tgtggtggggttgtccgagtacatcagaactaaacatcctcagagcattgcacaagtaagttgtttataattatttgatttgttttatatccatataataattacatcaatatgtctcaaaagctattaaatacaatctttaaatttccatgcttcattcagatgacgaaaaaagaatttctaaaaggaataattgaaagcaatctattgttcataacatcagaaagaataaatcttgtacttcagaaatatttgactctactgacaaggtcatttccatcctagggtaaatatattttacagtataggttttcaaatttgtgaagcacccattagccatatttcaaagtatactgtaatgaagaagctctgacaagaaacattccaaaataaaaccaaaatataaaatttcatgtgatatgtagtttttccttaaatatttccaaggaaaatacctaacatgtaggaaattagccagtctaaaatasaacatacagatactgaataatcagtctctactgcagatgatatatatcactgtatcatgccagcacttaatcacttttatggaattacaatttggttctca

SEQ ID NO: 677389 - DNA, 829 bp, Homo sapiens
ggcatgtatctgtatttatgggtatcaattcgtactaatctaatcttcagtttttaattctgatgtttccttgtcaattcaagcactttctggtagaaagatgagaaaatagaatttctgagatcacaatattaattaaggttctagagagaggaaatagttccttctttcattgccctagaatttaactccaggaaatcttattgggagaacacatctccttgtacttagaaaacaagtttgggagtctttcacacagatatagttggagaagtctgcagtcctccagggcatctgactcatctgtagatactatcattacacactttccattctgcctgttttttcttttctctccaaacatgtagtccacagatgctagcaaataagggagaagggcaagattccccatcaggtgtttttattataatagacctggtgagatacattggcttttcactaggatgtggaagggaccgttaattttgagccctgagtcgtaggacagccttagaggtgagagtccccttacattattatgagattcctttaaaagctcatagaacaggacccattcaagactgctgcttgtgctgccttacattgattctactttagaacaaatattcatgttaatacaagagcctattatgttctataagcragcataaatcttttccttagagaacacaccactatattaaccaatttggatatacacagcagagggcagaacttgtcttggagtaattaatttgtaattagtcagctaagggtgtgtgagtatgaatgcacatgtgcaaatatactggccttcaaacattcaccc

SEQ ID NO: 677390 - DNA, 1413 bp, Homo sapiens
gtgatttccgacgagttattttacctctctgaccctcagtttccatctctctccacagggacttcatgggaattacattaaatgatacttgtaaggagttgggctgtgggagaaacacaacagctagtggctgtaattttgttgttgtgtgtgtcagtaagatgatggatgcagagcatgtcacacagttcctgatacacacaggcctctgtaacattggctgtggcttggactgatacgtagccataggagtgcagttggagaagagaggcatgtattagtccattctcacacgactataaagaactacttgagactgggcaatttataaagaggtttaattggctcagggttctgcaggctgtacaggaagcatggctggggaggccccaggaaacttgcaatcatggtagaaggcgatgggggaagctggcacatcccacatggccagcaggagaaagagagagagaggggaatgctacacactttcaaacaaccagatcttgggagaactcactcaccatcacaagaacagcaagggggaaattagcccccacgatccagtcacctcccaccaggcccctcctccaacactgggaattacaagagggcgtgagatctgggtgggaacacagagccacactgtatcaaggcacctgcttggaacccagcaacagtcatttagaataaaattttgattaacaagctactaagatgtaatttttggtttaattttagccatattctctccctttaaaaaaaagaaaaagaaaagctcccaagaagtcatacttacaggggacatatagtataatgtcaggagccacatcaagtgtgcccctctcacagagggatcaacttagacttagtttgaacaaatgcaaagcatgttgtgggcatgataataacacatgacactgtgccctctcagagcaaagtgtctttgcaggaagccagcctagacccttcccctttgcttggaggtcccattactgctctcagaggtgctgccttgggtgctgtcttggccatgagagtagatgatgcttactggctttrggcgtcacccagaagagaattttttacttaatcctctcacaaccctatgtaacaagttgttatagacccattttatggataaagaaattgaggttcagctaggattaaatcatttacccttggtcctgtaactaggaattgaggaagataaaatcccaagcccaatctacctgactcctgctcctcctcaggactgcaaagacgtctcagaaggaccccaacaatgttgcagctttgcccttccctggagggaggcagtgcagactgagaagcagtgtgtgtcctggagctgtctgccttcacaaacacattttctaacagtgaaatagaatctcaattgagtcacttctatta

SEQ ID NO: 677391 - DNA, 1094 bp, Homo sapiens
ttagaagtgcactgtataatttccaaatattgcaaggcttttctatttatctttttcatattgatttatattttaattacattgtggtttgggaacttaccatctttggtatatttgattttcctttatttccattttctaatagatcatagctatttatttcagctcatttgtgaaacagtagatattgctatgctggtacagtaacctgaactggtaacttaaaatgtcagtgtactggataagggaattctggttacttgaatttttttgttgcatagaaattatttcacacttcaatattctttttatattaacaacatcatttaacagctatttctatcaattgttacatggcaaacatttcttgggttctaagaaattcaatagacatgatcttaaattttgagatttttcttgcaaatgtgttcagtagccatcaggagagtcaaaaaagaatgttcttctaagaagaccattatggttttcttttccagcatgtgtagcaattaggattgtattttatcaatgagctattttgttttgggttttgatttcatatttttttgggggggggcagattttaatgcccttgatggtgacttgtacacataatgattattcagggactacttttaaaaaataatataagatttattaagattacaagtttaaaaacctagtgctttcctaagttctcaaggcaatttacatgtacagttatgtaatgattgcttttaaagagcttaaaatataatcttaaacacgctaagctatatacatgtaaagctrtgtactcaataattctctcaattgtctttcttaagtacttaaataattcttaaatttaactaaacttagtgatacatagttttcttaaatattcattaattatttaggagcttacttaagattatctcagcacttacaactaaaatcacaggcccattatctcagcacttaacaactaaaatcacaggcccaagtcaatctcttaattaaacattttcacttaaagtccaagggtaacgtgttattccgcttggcaagttagattagacacttgtagaacgtaaaataccaaataggtatag

SEQ ID NO: 677392 - DNA, 1094 bp, Homo sapiens
ttagaagtgcactgtataatttccaaatattgcaaggcttttctatttatctttttcatattgatttatattttaattacattgtggtttgggaacttaccatctttggtatatttgattttcctttatttccattttctaatagatcatagctatttatttcagctcatttgtgaaacagtagatattgctatgctggtacagtaacctgaactggtaacttaaaatgtcagtgtactggataagggaattctggttacttgaatttttttgttgcatagaaattatttcacacttcaatattctttttatattaacaacatcatttaacagctatttctatcaattgttacatggcaaacatttcttgggttctaagaaattcaatagacatgatcttaaattttgagatttttcttgcaaatgtgttcagtagccatcaggagagtcaaaaaagaatgttcttctaagaagaccattatggttttcttttccagcatgtgtagcaattaggattgtattttatcaatgagctattttgttttgggttttgatttcatatttttttgggggggggcagattttaatgcccttgatggtgacttgtacacataatgattattcagggactacttttaaaaaataatataagatttattaagattacaagtttaaaaacctagtgctttcctaagttctcaaggcaatttacatgtacagttatgtaatgattgcttttaaagagcttaaaatataatcttaaacacgctaagctatatacatgtaaagctgtgtactcaataattctctcaattgtctttcttaagtacttaaataattcttaaatttaactaaacttagtgatacatagttttcttaaatattcattaattatttagragcttacttaagattatctcagcacttacaactaaaatcacaggcccattatctcagcacttaacaactaaaatcacaggcccaagtcaatctcttaattaaacattttcacttaaagtccaagggtaacgtgttattccgcttggcaagttagattagacacttgtagaacgtaaaataccaaataggtatag

SEQ ID NO: 677393 - DNA, 839 bp, Homo sapiens
gtatcttaagaactgaaaaagaaacggagcccttttacttagtcttgttttcccactcaacctgtatttttcttggaacttatatgtatttacatatttctgtatgcaatttatttactttagtttattgtaggtattcttataaactgtcctaattctgcagtacagatacaaagataaatatgtggtttgttacataaatatgttactatttatctatcttaaatcrggctcagggaggtttagtgacttgatcaaggttacatgcctaacgcatgacagagcctaacttggtactcagcttttctgaacctgtgagagctaaataataaaatcctaatcatattatctattttagattttcttaaactcctaggttatagaaggatcacataattattaaacagagaaaaaaattgaatatagcaaataatttttttttttttgagacagagtcttgctctgtcacccaggctggagtgcagtggcactatctcggctcactgcaacctccacctcccaggttcaagcatttctcctgcctcagcctcctgagtagctgggattacaggcacctgtcaccacactcggctaattttttgtacttttagtagagatggagtttcactatgttagccaggctggtcttgaactcctgacctcatgatctgcctgactcagcctcccaaagtgttgggtttacaggcgtgagccaccacacccggcagcaaatagttacatacctttttaattaggtatagtcaccatgttgtacaatagagctgttgaacttattttaactaatttgaacttacctaactgaaatttgcgtcttttga

SEQ ID NO: 677394 - DNA, 1388 bp, Homo sapiens
aaataatgcaggcccctaaaaaggcaggcgttcactgcattcattaaaaatgcggactttgtgaccataaagtgttcagcttctctgttattaagtttggaatgtggttttggagcttagctgaggaactcagctagttatttttcgttttggyctgagaagtgagagacttgtttttcaagaaggtaaaaaataaagaaaaaaaggttaggttcattttggaagaatagaagttttaaaatgtagtaactattttctgcagcaaatagtcagtttgagtatgttagccgaaaatagaattcatgacttttgtctcactgtttatttctccaaccacattaaaaagggttcagttaaatgtgccatttggcttttctaatgtcagtgggctatttagctgagtcaggataaccaaagtttgattgactcatatttctaagaataagtcagatgtctgattttagatggattagatgtgaggtcttcgtgatacagttttgagttttaaagaaaaacgtctgtagcaggggttagtggcaacttgtattgcagtgttcagccttctacatgaaggatgttcagctagagcttagtagtgttgagttttctggtaagtattaataggcattgtcctaacttcttacaaacataacattttactaaaaatgtatcattaaaatagatatttaatagaatagaaaaataatgtggattcgaacattagaagtagggcagaatattaataatacacatttttcccgttatataactttctttttgcttttcatgtttctccattgctatctgatctctattaaataagagagaatttctgcaaacataatataccaagtatcagatgcacagaaatacacatatttaaaccacacacataaaccataattgatgacactttcttttaactactaactttcaaaggtttatagatgtatctattttaaaatatactagtaggacccacataaagaaaacaatgaaagttttccaagaaatttaaaaacagattgtagacaatggagaaacaagtactgttcttggatgggaaaactaaacgctggggaaggatgctaattctgtccacattaatttattattatatatttattatttataaatttaatttaatcttcaatatcctagcaaaaagatgtaaatttgaaatggattggggaagagagttactctagcagatatcgataaaaataataaatttataaaattcaaagcaatgttgtgctgacccgtgaattgacagtttaatgcatggaaaagaacagatgttcagaaacatgcttacatacataaagattaacagtgatatgataaatcaataaaagggagggtctgttcaatcaactataatttaa

SEQ ID NO: 677395 - DNA, 1388 bp, Homo sapiens
aaataatgcaggcccctaaaaaggcaggcgttcactgcattcattaaaaatgcggactttgtgaccataaagtgttcagcttctctgttattaagtttggaatgtggttttggagcttagctgaggaactcagctagttatttttcgttttggtctgagaagtgagagacttgtttttcaagaaggtaaaaaataaagaaaaaaaggttaggttcattttggaagaatagaagttttaaaatgtagtaactattttctgcagcaaatagtcagtttgagtatgttagccgaaaatagaattcatgacttttgtctcactgtttatttctccaaccacattaaaaagggttcagttaaatgtgccatttggcttttctaatgtcagtgggctatttagctgagtcaggataaccaaagtttgattgactcatatttctaagaataagtcagatgtctgattttagatggattagatgtgaggtcttcgtgatacagttttgagttttaaagaaaaacgtctgtagcaggggttagtggcaacttgtattgcagtgttcagccttctacatgaaggatgttcagctagagcttagtagtgttgagttttctggtaagtattaataggcattgtcctaacttcttacaaacataacattttactaaaaatgtatcattaaaatagatatttaatagaatagaaaaataatgtggattcgaacattagaagtagggcagaatattaataatacacatttttcccgttatataactttctttttgcttttcatgtttctccattgctatctgatctctattaaataagagagaatttctgcaaacataatataccaagtatcagatgcacagaaatacacatatttaaaccacacacataaaccataattgatgacactttcttttaactactaactttcaaaggtttatagatgtatctattttaaaatatactagtaggacccacataaagaaaacaatgaaagttttccaagaaatttaaaaacagattgtagacaatggagaaacaagtactgttcttggatgggaaaactaaacgctggggaaggatgctaattctgtccacattaatttattattatatatttattatttataaatttaatttaatcttcaatatcctagcaaaaagatgtaaatttgaaatggattggggaagagagttactctagcagatatcgataaaaataataaatttataaaattcaaagcaatgttgtgctgacccgtgaattgacagtttaatgcatggaaaagaacagatgttcagaaacatgcttacatacataaagattaacagtgatatgataaatcaayaaaagggagggtctgttcaatcaactataatttaa

SEQ ID NO: 677396 - DNA, 1158 bp, Homo sapiens
ttttcatggggagaaaatcactgggtgatttctgggaggccaatacatgtatggcatctggggacagtatcaggagtcttaggctgagaagtaagaaaactttttgttttttcctttttgactgagatgggatcaaggatgtgagggaaagggaaaaagatgtgttaaaggcagctctgtctagggcctgtccatagattgaaacattatttctttttcttttcttttcttttcttttttttttgaaacagagtttcgctcttgttgcccaggctggagcgcagtggctcaatctcggcttactgcaatctccgcctcccgcgttcaagtgattytcctgcctcagcctcccacgtagctgggattacaggcacccaccaccacgcccagcaaaatttttttttttttttgtatttttagtggagatggggttttaccatgttggccaggctgctcttgaactcctgatctcaggtgatccacccaccttggcctcccaaagtgctgggattacaggtgtgagccactgtgcctggcctgaaaactatttctttcttcttctgtttttttttttttttttagagacagagtctcctatgttccccaggctgatctcgaatgctggcccaggctggagttcagtagcataatcatagctcactgcatcctcgaactcctgggttcaagctatcctcccacctcagcctcatgaatagctaggactacaggcacgctaattttgtaattttttattctttttttttttgtgtgtgtgacaggttctttctcttttgcctgggctggagtgcagtggtgtcatcacagctcactgcagcctcaacctcccaggctcaagcgatcttcccacctcagcctcttgagtagctggcatgagccactgcacctggccttaaattttaaaattttatgggggtctctcctgagctcaagcaatcttcccactttagcctccccaaatttttggtttacagctgtgagccaccatgcctgatctgaagtactatttctaaatatgattttcatgtatctgtaataatcttgatgtacaattatttttactctgtttaggagttggagcactatgtatacctgactgatagcttacctgaaataaatagattgtgctgagataatttt

SEQ ID NO: 677397 - DNA, 517 bp, Homo sapiens
cttgaattagagttatttgtgtacctgtgcctggtagcctccccacgacttgacgatttgagcgtctgagtgacagggccatctttttcatttttctattcctcggagcaccctgctcaatattttacatttaggtactcaatgtgtggtttgaattgaattgaatgcaacaactgggatttagatttgctggatgaaccactaccctgtgtaccctcaaaaatacacgaacttgggtaagtttcacaactaggctggagtggttgtcaacagtgagcccatgaaaagggctacacacagcctgaaattttctagatartcttggatcaaagtagcctatcttgttctctgagtatatgtacactttttttttttttgagaccgagtctcgctctgtggcacgatcttggctcactgcaacctccgcctcctggattcaagtgattctcctgcctcagcctcctgagtagctaggactacaggcgcccgccaccatgcctggctaatgtttgtattt

SEQ ID NO: 677398 - DNA, 1149 bp, Homo sapiens
tgattttctcttctttatagtacctgcttccgagtactaataaacagagcaaccttgacttaatgccttagatagagaaaagaaggttcaattgcacaccttgagaaaaatgaaccagaaggtttgctagaatccctgcaggagaggacattatttggtttgggaaggaaatggacttcaattctctggtctcttcattgtttgactttgcagcttttttttttttttttttttccccaaactccatgggtcaaggaaaaaggaaggtgaaacccatggacaactgcgacatcagacacagctggctgggccgctccgccagcccccactcagcaggcgggatgcaatgttcagggcaagggaggcagccagcccctggcgtgacattttcagctgtgcagctgtgggccctggcacgttgctgctggagcttgatggttgccttccagcccctgaatagcttttgattaggatgggatgcctagcagatgagtcagatttaaaccacgctgcatgtggttagtagcagccatttttttaatcactgtcatattgacggggattacaactccccatgagatgtcttaatttatttggcccctaacctttaagatgacaatcgcattttgtgagcttctgatgcttttctttttacagtcacaatttcccccagacccaggcctttaactcctttccagaattagatggaccatggataccatcagttctgggcctgactgtactgtaattagagtcccagaaatgtttggagctgacttttacaccctattcttcttatgataccagaagctggtgtgctctggatcagagagggaatttcaaagcagaaacaactaataaaactgtgacctggagtggtgggggaaatggataccaggcattcaacagaaaggccgtagaatatgsggcctcctaaagtgtgattcccctcatggccactaggtcaatgagtcctgaaattttgccaacagaaaataattcttctggcttaaacgtgttattttattggcaagcaggtgttcctggaaggggtcgccaattggtctcttttcagacatagatgcctaaatgtgcatgagtttgtcagatcacttcctgaggttagattttgttggagagctcaaaaag

SEQ ID NO: 677399 - DNA, 1149 bp, Homo sapiens
tgattttctcttctttatagtacctgcttccgagtactaataaacagagcaaccttgacttaatgccttagatagagaaaagaaggttcaattgcacaccttgagaaaaatgaaccagaaggtttgctagaatccctgcaggagaggacattatttggtttgggaaggaaatggacttcaattctctggtctcttcattgtttgactttgcagcttttttttttttttttttttccccaaactccatgggtcaaggaaaaaggaaggtgaaacccatggacaactgcgacatcagacacagctggctgggccgctccgccagcccccactcagcaggcgggatgcaatgttcagggcaagggaggcagccagcccctggcgtgacattttcagctgtgcagctgtgggccctggcacgttgctgctggagcttgatggttgccttccagcccctgaatagcttttgattaggatgggatgcctagcagatgagtcagatttaaaccacgctgcatgtggttagtagcagccatttttttaatcactgtcatattgacggggattacaactccccatgagatgtcttaatttatttggcccctaacctttaagatgacaatcgcattttgtgagcttctgatgcttttctttttacagtcacaatttcccccagacccaggcctttaactcctttccagaattagatggaccatggataccatcagttctgggcctgactgtactgtaattagagtcccagaaatgtttggagctgacttttacaccctattcttcttatgataccagaagctggtgtgctctggatcagagagggaatttcaaagcagaaacaactaataaaactgtgacctggagtggtgggggaaatggataccaggcattcaacagaaaggccgtagaatatggggcctcctaaagtgtgattcccctcatggccactaggtcaatgagtcctgaaattttgccaacagaaaataattcttctggcttaaacgtgttattttattggcaagcaggtgttcctggaaggggtcgccaattggtctcttttcagacataratgcctaaatgtgcatgagtttgtcagatcacttcctgaggttagattttgttggagagctcaaaaag

SEQ ID NO: 677400 - DNA, 635 bp, Homo sapiens
gaggctgcagtgagctgtcatcatgccactgcactccagcctgggccacagagggagaccttgtcacaaaaacaaaaacaaaacaaamcaaacaacaacaacaacaaaaccgtatagagtcaccaaagactcagagaattagaacttcagaggttaaggctctgaaacatggattttatataaacttccaaggcagttctggttcatttaagttctgagaacccccgaggtagccaccagtcattaaggcttcactgagcagcattcgaaccccagcctccaggcccccctcctgcctccatatctaacagtgggtccagtgttttcacccctcaggctccgtatgcctccctgaagacttgcagtcatttcctaactgatcagcccacgaccatttcctcttcccaacgtagtcttctcatcacgtaactccctgctcaagaatctgtggtgaatcctcgtttccttcctatttcaaaacctattcttcagctttaaatgtaaaggctgaaagaaaatcccttctggcctgagtcccccaccgtcccctgcaccctccccgcattccctccttctgaacccccagcaagactggccgttcttccagcacctgtgatgtccttcgccctcgtgca

SEQ ID NO: 677401 - DNA, 637 bp, Homo sapiens
gaccagctatacaccgtttcacttaaagtcactgtttcaaagaatctaccaagaatgttaaatgaggacctactgtacccatctcatagggtcacagggaagatcagctgcacaattatgcacataagagcctagaaaaatgatcgatatgccctacaaatgttatatgrgtaatagtcattgtcctcttgggatcacaaaggtctgtgaacctatgtcctcatatcctcaacatcctctcctcaccctcccagctcaggcttaaaccctagaaatacgtgttacagtgaagctggataactctaacctcagaattatgcggccttaggcttactcatccatcctgaaatctgttagggcaatctggtccaagtttgaaccacagccttattgctttatatagcaagcctagtacatctgtaaaatgagcacagtccctggcctgcaagggtgctttaaggctccaagtcaatgtgtgtaaggattatagtgtaaaattcggtacatcacaggtgctccatgcatggtaaataacagcatttttttgttttttgtttgcttgtttgttttgagaaggagtctcactctgtcaccaggctggagtgcagtggcatgatctcagctcactgccacctcc

SEQ ID NO: 677402 - DNA, 1577 bp, Homo sapiens
tcaagcaattaacattaacacatgaataaatgacagatgtttttataacccaaatttatagaacgtgctggggaactatcttgaactcaaggctttgcgcttcttcctttttccaggaagcagcccttcttgggcttcttacctccagctgttctgccaagaagtaaaatcagtatttaggctgtgtgcagtggctcacacctgtaattctagcactttgggaggccgaggcggttgcatcacttgagcccaggagttcgagaccagcctgcactgcatggcaagaccccgtctcttcaaaaaaaataccaatattagccaggtgtggtgatgtgtgcctgtagtcccagctactcatgaggctgaggtgggaaaacgaggatatagtgagctgtgattgtgccactgcacttcagcctgggcaacagagcaaaatcttgtctcaataatagtaataattaataaataaaaaggaaataagtatttggaagtaaaataagctggaaggagagccctttattgagcccagggtgctcccagagggagtttgggtgcagaattggggggccctccctttacttcctggctgtggcgggtggagggtgagtcctgctgcattcagcctacttgctgtgaagtttggtgggtgaaggatccttagccatgggttggagtgccaagcaggtaaagtctctcctcgtcaacacccaactcctctcctcctgcagaatggcagggcccaagggtaggtggatgaaactggcagagagaggaaggctgcccatgtgctccatccctcctgccttgtctcctggagccccttccaggccctgccttgtgcgtctggagtctccacattgaacccraggtggtggccctaaggctgccactgcagttggggaagagccctgtcttgtgagtagaagaaggacactctgagatgaacatggtacaggaagttcttctcacaaaagttaaggtctgggcatttattcttggcagaggaggcagaggcagctactgaagctgtcttgtcccatccagtgtgccaaggagtgacacagatgggatcagtgctgtttgccacatgtagggtccctgcctttcaagccctgccacaagctcctcttcttaatgctcggcaaaagcagagttaccaagggaggtgacatggaggaaggaacagcagcacacagcctaggctcagaactgctagggaactgactgcgagctgagggctgccagtttgctgtcttggtcaggccctcagcagactgagcattcagggctgaccttggcaaaaagggagcagtacccagagatggaagagaggtcatgggacagccacattggtgactaatcttgggaaaggaactcgagtgattaatgtcattaatatggctagtccatgtcataaatggtcctcaaatacacgaaggattggctgggtgcactggctcatgcctgtaatcccagcactttgggaggccaaggcaggaggatcactcaaggccaggagttcaagaccagcctgggaaacatagaaagactccatctctaccaaaaaataaaaataa

SEQ ID NO: 677403 - DNA, 666 bp, Homo sapiens
tgccagcctgcctgattctacactgcagctcagggggatagaggtgcctgtgctttccatgactgtaggatccctgctaggatactctcgccaccacactagaattccaatgggccagcaaaggaaaataacaagcgaactatgggaaaccattagccagagagaagatcaagtggaactgttaggacttacactcagcaaaatggaattattagagcagaaaaaaaaaccctgaattagaaaataaattaaaggtattttaaaggagatttgagtatatcttattcagcagattcattcaaagagaaaatggggctgctgagattcacatcagcaggcttggaaggtcaagtataagaacttctcaagcagacagcatmtaccatgagacagatgtcatgagagatccacagaatggaatcagaggcctaaaatgtgagtaatagtagttgcagaagaacaaaaaggaatgcatagagaaaaaccgacaataaatactagaagaataattccaagagataatgaaaacctgaagtagcaaatttaaaatattcactaagattcaagctggatttcaaaaaaagacacatcaatatgtacatcatgaaaaaattcctgatctctaaagaaaaagaacatctaaagtcagaaagaaggaattcacta

SEQ ID NO: 677404 - DNA, 609 bp, Homo sapiens
tttttactgcatatttttaaacatttgaatataaagaggaaaataaaattctcactatcaaaagaaaattgatattaaaattttagtgcatctatgtcaagactttgcatctctacttagaaatacttataaaatataaacctgattgtacatgtgaaattacagtttaattcttcagaaactggccctgacgctagatttcctgtattttcattttagcctcacaatcactgtaggcaatttaccgcagctttctaaatctgagtatttttttttctgtaaattgtagcaaataatagtcccaacttcataagattgctaggtcaattaaatgatgaaatatatggaatgtgcttagaatactttctgacacaacaaaagcattacataaaggttagcaataatgataactataataattaagtgatgataatgatatgtatgtgtttctctgtagaaataaatgcaaaaaggataacaaaagatarcacagcagcattttattttgaacatggactttgatttcatattcaaatatatgaatacttcaatgagtgagtttaaatctatagaaaattacttgattctttcacagtttcagttttgaag

SEQ ID NO: 677405 - DNA, 927 bp, Homo sapiens
tgccccccacccctgtccctggctccttcccttgccctctcactcagtctttcagaagccagctggacagctctcagggtccttgggaagatgggtgctccccaggagaggtggtgaccttggctcgggccaggctccagccacttcctccttcatctcttctcccttcttccatcttgactgttcactcccatcccttcctcaccctggagtgtttcaaagggagcaagttccattatcacatcctggagcgggtgcttgtgggcggtagtagtactggttagagctgtgtttctccaagtgtggttcttccgtcagcatcagctgagctcattaaaaatgtgaatttccaggtcccaccgcagacctcctgaaccagaaactcttaatggtgcccagccaactgtggttaacaacacccctggctgagtcagatgcctgctcaagtgtgagagcccttgatgcagagtagcagcagggactgaagaccagagagacccccctccttctttccctgcatcatcagcccaccccctccctgcagcacacaarcatgcgctaacagcttccatctaaaaactaactccacagcctctctggctgcttctccagtttctctgatctcatcaacacaaaacttctacaagttgtctccattttctcaccttcatacccaccctcacttaaaaaacaacaacaacaacataacgttaataataaaatgatgttacgtttcacacatacaaaaaagcatagaggccaggtgcggtggctcacacctataatcccagtactttggaaggctaaggagagtggatcatttgagcccaggagtttgagaccagcctgggcaacatggtgaaactccatctctactaaaaatacaaaaattagccagccatggtggcataagcctgtggtcttagc

SEQ ID NO: 677406 - DNA, 624 bp, Homo sapiens
aagtttggatttacaattcattaayctgcttttattttaaaatatgcataatgagctataagtatattcttaaatttctagatacaagcactagcgattacaataaagaaaaaatcaaggtattagctaaagaacaaaagagtttcaaggtcattgctttatgtctcttttacttgataagttttttactattctatttgcctgagggaaacattccaggaactgtacttcacatgccttagaagatcaatactgctgttggagagtaatagtaaacatagaatgagaaaaagaaatgtataggttgcaataatccagaaaaaaccttttcgggaagaaaactttgttagtcaactaaaaaaaaatagctcaaatattagcattttctttaagcaacaaataaagacatgattataagtataagggaagtgctaaaaatgtgaaagtctgtagtcaatctttttcaagtttcccttagttcatggccagggaataataatcttagatgtcttcatttacatttgacagagagttttgtttttatcatgaacacataataagttatgtaacaaggaataattgtttaatttacacatattttactcagaatgtgcttattcatca

SEQ ID NO: 677407 - DNA, 624 bp, Homo sapiens
aagtttggatttacaattcattaatctgcttttattttaaaatatgcataatgagctataagtatattcttaaatttctagatacaagcactagcgattacaataaagaaaaaatcaaggtattagctaaagaacaaaagagtttcaaggtcattgctttatgtctcttttacttgataagttttttactattctatttgcctgagggaaacattccaggaactgtacttcacatgccttagaagaycaatactgctgttggagagtaatagtaaacatagaatgagaaaaagaaatgtataggttgcaataatccagaaaaaaccttttcgggaagaaaactttgttagtcaactaaaaaaaaatagctcaaatattagcattttctttaagcaacaaataaagacatgattataagtataagggaagtgctaaaaatgtgaaagtctgtagtcaatctttttcaagtttcccttagttcatggccagggaataataatcttagatgtcttcatttacatttgacagagagttttgtttttatcatgaacacataataagttatgtaacaaggaataattgtttaatttacacatattttactcagaatgtgcttattcatca

SEQ ID NO: 677408 - DNA, 597 bp, Homo sapiens
ttgtttaagtaaaactttcactaattatatagaggrttatacttcctattgagataatttatcactatagccaaagtttcaatgtagaaaaacacccctgctcatcagtgtctgggatagaagtaaaacagaggatactgcttgaaacaaaactgcttagaccagcacacttctctgatttgtcaatgtcactgatttaaaaatgaaagttaataccttttaagatatctgtacaattctagggcagctgtttcagaaggtcaaataactcacagccaatggggaactagagagatatctgaggatttggctggtaaaccagactttcactgacagggtcccctttggggctgtggtagaggttctcttaaaagacagagcagcttaaagaaatcactgaggattttcactattacaacaacaaaatgatactgaagtgctatattgattttaaatttgacaaaacaacagaatccctgacaaaacagaaccattactgtggaataaatcagttagattctggatcagccccattattcttcatatcatcacaagtgctttctaagatgttgtcaccagattagggcacaaagtggg

SEQ ID NO: 677409 - DNA, 597 bp, Homo sapiens
ttgtttaagtaaaactttcactaattatatagaggattatacttcctattgagataatttatcactatagccaaagtttcartgtagaaaaacacccctgctcatcagtgtctgggatagaagtaaaacagaggatactgcttgaaacaaaactgcttagaccagcacacttctctgatttgtcaatgtcactgatttaaaaatgaaagttaataccttttaagatatctgtacaattctagggcagctgtttcagaaggtcaaataactcacagccaatggggaactagagagatatctgaggatttggctggtaaaccagactttcactgacagggtcccctttggggctgtggtagaggttctcttaaaagacagagcagcttaaagaaatcactgaggattttcactattacaacaacaaaatgatactgaagtgctatattgattttaaatttgacaaaacaacagaatccctgacaaaacagaaccattactgtggaataaatcagttagattctggatcagccccattattcttcatatcatcacaagtgctttctaagatgttgtcaccagattagggcacaaagtggg

SEQ ID NO: 677410 - DNA, 597 bp, Homo sapiens
ttgtttaagtaaaactttcactaattatatagaggattatacttcctattgagataatttatcactatagccaaagtttcaatgtagaaaaacacccctgctcatcagtgtctgggatagaagtaaaacagaggatactgcttgaaacaaaactgcttagaccagcacacttctctgatttgtcaatgtcactgatttaaaaatgaaagttaataccttttaagatatctgtacaattctagggcagctgtttcagaaggtcaaatractcacagccaatggggaactagagagatatctgaggatttggctggtaaaccagactttcactgacagggtcccctttggggctgtggtagaggttctcttaaaagacagagcagcttaaagaaatcactgaggattttcactattacaacaacaaaatgatactgaagtgctatattgattttaaatttgacaaaacaacagaatccctgacaaaacagaaccattactgtggaataaatcagttagattctggatcagccccattattcttcatatcatcacaagtgctttctaagatgttgtcaccagattagggcacaaagtggg

SEQ ID NO: 677411 - DNA, 597 bp, Homo sapiens
ttgtttaagtaaaactttcactaattatatagaggattatacttcctattgagataatttatcactatagccaaagtttcaatgtagaaaaacacccctgctcatcagtgtctgggatagaagtaaaacagaggatactgcttgaaacaaaactgcttagaccagcacacttctctgatttgtcaatgtcactgatttaaaaatgaaagttaataccttttaagatatctgtacaattctagggcagctgtttcagaaggtcaaataactcacagccaatggggaactagagagatatctgaggatttggctggtaaaccagactttcactgacagggtcccctttggggctgtggtagaggttctcttaaaagacagagcagcttaaagaaatcactgaggattttcactattacaacaacaaaatgatactgaagtgctatattgattttaaatttgacaaaacracagaatccctgacaaaacagaaccattactgtggaataaatcagttagattctggatcagccccattattcttcatatcatcacaagtgctttctaagatgttgtcaccagattagggcacaaagtggg

SEQ ID NO: 677412 - DNA, 597 bp, Homo sapiens
ttgtttaagtaaaactttcactaattatatagaggattatacttcctattgagataatttatcactatagccaaagtttcaatgtagaaaaacacccctgctcatcagtgtctgggatagaagtaaaacagaggatactgcttgaaacaaaactgcttagaccagcacacttctctgatttgtcaatgtcactgatttaaaaatgaaagttaataccttttaagatatctgtacaattctagggcagctgtttcagaaggtcaaataactcacagccaatggggaactagagagatatctgaggatttggctggtaaaccagactttcactgacagggtcccctttggggctgtggtagaggttctcttaaaagacagagcagcttaaagaaatcactgaggattttcactattacaacaacaaaatgatactgaagtgctatattgattttaaatttgacaaaacaacagaatccctgacaaaacagaaccattactgtggaataaatcagttagattctggatcagccccattattmttcatatcatcacaagtgctttctaagatgttgtcaccagattagggcacaaagtggg

SEQ ID NO: 677413 - DNA, 671 bp, Homo sapiens
tggtgtgatctcagcttactgcaacttccgcctcccgggttcaagggattctcctgcctcagcctccccagtagctgggtttacaggcacctgctaccaaacccagctaattttttgtattttaagtagagacgtggtttcactacattgtccacgctgatctcaaactccggacctcaggtgatccacccgcctcagcctcccaaagtgctgggattacaggcgtgagccaccgcgcctggctcaaaagccactttcaaaacttaactcccaatctctataagacaccctttcaccttttttttttgagacagaatctccctctatccacccaggctagggtgcagtggtgtaatctcggctcacagcaacctccgcctcccaagttcaagtaattctccctgcctcagcctccggagtagctgggatcacaggcacccgccaccatgttcggctaatttttgtactttttagtagagatggggtttcgtcatgttggyggccaagctgatcctgaacttctgactgcccacctcagcctcccaaagtgctgggattacaggtatgaaccactgtgcctggccaagacacccattttaaatggataggccctaaagaaccatactgaaaattctccaaataccctcagaagcaaataaattatgctagca

SEQ ID NO: 677414 - DNA, 2252 bp, Homo sapiens
  misc_feature 708, 726, 760: n = A,T,C or G
tcaaacacattaacctcaatgaactgaaattaaatatgtctctattcaacttccccttagctgaatactaaaagtattgtaggctggacccgcactacctgacagggagataaatgactaaaggcaaatgggagtcaaaacaggtgtggcttttcttatttttaattaagcatcttacatagcaaattttgcaaaactcatatgaccccgagaaagacccatacatatgaaaggtcttaaagatttaactttcttagctttaacgtaagctttccactggattttcccattacactcattccataaagaaatgaaataatcatatatctcattatataattatactaaattgatctcaacacattttcttagcaatatataccaacattgtttccaatattgtttattacaaatgatgctacagttgaaatctttatatctgaacgcttgtgtgtgtgtgtgtgtgtgtgtgtgtgtgtgtgtgtgtacctattctgtgtataatactgattttatttatttgtataggcctggaagtggaaatactgtgacataaaatagaggcacagcaaattattcaagatgtcgacaaacagcattgtttccaagtttttgttcccttacaatccttgccattggccaatttctcaaaatcccgtgttgcttaacatttagtagcttagtaaatattttaaatctcagagattntacccaactgataccagngtttttaaaatttgtttatatagattaagcgtcnttgaagaaataacagtatgcaaaaaatatggtcgctcttctttcatgttaaaactatcttaaacacttttccagaggaaaaaataacaaaatagaaaccaatgaaggtcttttgcttggtgattacatatattgattacctgtgtaagttaaacagattgggaaaaggaaatatccaaaattgtgcctagattatatcatgacatcatgtatatatgtaaataagttaatttttgcaatcgcaacatagagaaaaatgttattttaaatgaaaaaaataaatagaacataaagtaatatttcagcatattaaatttaggagtaaaaacctttgacatccctgaaaatctttggtaaaaagtccagattatgataacttggctttaatgaactaggaaatagatggataatagcacacacatttttagcattgtagggattattttcactggttgtaggatcaacaaacttggtttaaataatggttctgagaatttaattaattaatttaatacatttttgttaggaaaataaattcatttctagacacaggatattttacaattggatcgtatttcaaaaaaagaatcactgtgtttttaatgaacaaatgtcacataaagaagtcttttcaaaaagtgcttcaaaaacttaaatttgaaatatatgcaacggatccacaaggtatctaataatttttatttttaccaagctcatgagtaagttacttagccctgaaacagtttcggagaaaaaaaaagtgttttagtttcttcatctgtaaaatatttatgtggcaaatgattgagcaaatatataaatttaagcagtttgatcctagaacttgttgtgtttaagaatatggattattgagaagtacttcaccatagtatttatcacatagtatgtcctaatttaagattaagtatggttgtaatcataataaagtattttgaaaattcttttgaaaactgttttaatgaattatagattgaacactgagataagatggrgttatccatgatctttaagacagcaaaattaggtcttgaaattaaaattgaaatgaatataatacacatatattgattttatgtcgatgttttataatcaaatctgattagaaaaaggaaattggtataaaggttctccacatcttctcagtcacccgacttcattttctaagggaattacattacgtacttttattttatttcttgttatatagcagtatcttttccttgatttcttggcttgcttctgctctcttctgctatgcctatccatcagtttccagagctcagaaaaacagtttttaacagcctaatatatgtatttggcaatttcctcccataactatgatttaatattcatggccacataaagggtataaaatattttgcacttggtgtatacacattttctttatatcactttatctttcatcaataactcaatggaaatcccgttaagagaatatgaatagctctagt

SEQ ID NO: 677415 - DNA, 1260 bp, Homo sapiens
caggagaatcgcttgaacctgggaggcggaggttacagtgagccgagattgcaccattgcactccagcctgggcaacaagagcgaaactcagtctcaaaaaaaaaaaaaaaactttacacacacacacacaaacatggattatggattgagttgcatgtatttgaatattagttttgttattcttgcaacttattagggggtttgacactttttctaaattacaattgggtgaaatttttgcaattgataaattgctagataacataatctagctcatattatatgataactttagatgttaaatcagtaataaaccttatgaagatctatgtttctaggaaacaattacttcaacaagaagggaaagtaaagacagaaggtaaaacaaaatataagatgaaataaaataaagatgggaattgaatgccatagaagtgtggaagttggaaggaaagtttctaaaattatttggataaaaaggaagccatatattttactgaatcttctagatgggttttaattctgtatcctttcatactcatgtactatgccttttttttcaacttttcattccacttctacttcctaacttatgatgaatttacctatatagagtccttttatcatttagactaaaattgtatttatttgaaggtaagaacggtcatatacttcttagttgttttcagaattgaaaacatggttgaggccaggcacggtgtctctcatctgtaatcctagcactttgagaggccgaggcggggggactacgagatcaggagttcgataccagcctgaccaacatggagaaacgtggtctctactaaaaatacaaaattagctgggcatggtagtgcacacctgtaatcccagctatttgggaggctgagtaaggagaatygcttgaaccctggaggcagaggttgcagtgagccaagatcacgccattgcactccagcctgggcaacaagagcaaaactcatctcaaaagaaaaaaaaaaaaagaaaacatggttgaaagtcaatatccatgtgataaattgagttagaaagccaatgagagcttagctaatataaaggtgatggaattcactatcaaaacttttcagagacttagaaaaaatatggaaaattagtgaaaatgtaacagaatgaggcttgaaatcaagataattaaactgcaaactttaagaaggcaggaaagatatcctttacttagtttgtcttgtccaactaatggttagttgaatgccatgcac

SEQ ID NO: 677416 - DNA, 1260 bp, Homo sapiens
caggagaatcgcttgaacctgggaggcggaggttacagtgagccgagattgcaccattgcactccagcctgggcaacaagagcgaaactcagtctcaaaaaaaaaaaaaaaactttacacacacacacacaaacatggattatggattgagttgcatgtatttgaatattagttttgttattcttgcaacttattagggggtttgacactttttctaaattacaattgggtgaaatttttgcaattgataaattgctagataacataatctagctcatattatatgataactttagatgttaaatcagtaataaaccttatgaagatctatgtttctaggaaacaattacttcaacaagaagggaaagtaaagacagaaggtaaaacaaaatataagatgaaataaaataaagatgggaattgaatgccatagaagtgtggaagttggaaggaaagtttctaaaattatttggataaaaaggaagccatatattttactgaatcttctagatgggttttaattctgtatcctttcatactcatgtactatgccttttttttcaacttttcattccacttctacttcctaacttatgatgaatttacctatatagagtccttttatcatttagactaaaattgtatttatttgaaggtaagaacggtcatatacttcttagttgttttcagaattgaaaacatggttgaggccaggcacggtgtctctcatctgtaatcctagcactttgagaggccgaggcggggggactacgagatcaggagttcgataccagcctgaccaacatggagaaacgtggtctctactaaaaatacaaaattagctgggcatggtagtgcacacctgtaatcccagctatttgggaggctgagtaaggagaatcgcttgaaccctggaggcagaggttgcagtgagcyaagatcacgccattgcactccagcctgggcaacaagagcaaaactcatctcaaaagaaaaaaaaaaaaagaaaacatggttgaaagtcaatatccatgtgataaattgagttagaaagccaatgagagcttagctaatataaaggtgatggaattcactatcaaaacttttcagagacttagaaaaaatatggaaaattagtgaaaatgtaacagaatgaggcttgaaatcaagataattaaactgcaaactttaagaaggcaggaaagatatcctttacttagtttgtcttgtccaactaatggttagttgaatgccatgcac

SEQ ID NO: 677417 - DNA, 1260 bp, Homo sapiens
caggagaatcgcttgaacctgggaggcggaggttacagtgagccgagattgcaccattgcactccagcctgggcaacaagagcgaaactcagtctcaaaaaaaaaaaaaaaactttacacacacacacacaaacatggattatggattgagttgcatgtatttgaatattagttttgttattcttgcaacttattagggggtttgacactttttctaaattacaattgggtgaaatttttgcaattgataaattgctagataacataatctagctcatattatatgataactttagatgttaaatcagtaataaaccttatgaagatctatgtttctaggaaacaattacttcaacaagaagggaaagtaaagacagaaggtaaaacaaaatataagatgaaataaaataaagatgggaattgaatgccatagaagtgtggaagttggaaggaaagtttctaaaattatttggataaaaaggaagccatatattttactgaatcttctagatgggttttaattctgtatcctttcatactcatgtactatgccttttttttcaacttttcattccacttctacttcctaacttatgatgaatttacctatatagagtccttttatcatttagactaaaattgtatttatttgaaggtaagaacggtcatatacttcttagttgttttcagaattgaaaacatggttgaggccaggcacggtgtctctcatctgtaatcctagcactttgagaggccgaggcggggggactacgagatcaggagttcgataccagcctgaccaacatggagaaacgtggtctctactaaaaatacaaaattagctgggcatggtagtgcacacctgtaatcccagctatttgggaggctgagtaaggagaatcgcttgaaccctggaggcagaggttgcagtgagccragatcacgccattgcactccagcctgggcaacaagagcaaaactcatctcaaaagaaaaaaaaaaaaagaaaacatggttgaaagtcaatatccatgtgataaattgagttagaaagccaatgagagcttagctaatataaaggtgatggaattcactatcaaaacttttcagagacttagaaaaaatatggaaaattagtgaaaatgtaacagaatgaggcttgaaatcaagataattaaactgcaaactttaagaaggcaggaaagatatcctttacttagtttgtcttgtccaactaatggttagttgaatgccatgcac

SEQ ID NO: 677418 - DNA, 1573 bp, Homo sapiens
aaatttgctaatattatagaaaggtcattggaaagtgtttgtcctttcttttttttttaataggaccttcccattttcacttacagttttgaatacatttatacatttccttcttcaaatgtcatttaaattaaaagtgtttctattttctccagatggagtttcaatgctcgtaaacatttacattaggagagaatatagtacctattatctaacttaagttgaaaaagaatgaaactgtaaaatatatttaccaaaataactaaagatttatttaccttcggtaggcctcaattagtttacctttaaaaagcattcattgatacaaattttaaaaatccatgtaacagacatcaatcaaatgtgatttttctccagtttattattttctgccaggggaaataaaatgcaataatcacattttaaatatacatctttttaaatgattctgttgttatacatgattgttattcatatttttactattattgaatgcccctgtactgacctttccaatttgatagtgcagtaagaaataaacttttttttaatattgagaattggaaatgacctggtaatttctttgtactagagaccactaattgtgcatataatgcattctttcattttgtttagtaatagaatcctaagtacatatgaccacaagcaggagattaccttctatagtctcttatcagtgattaattttgatcaaatataatatgaattatattatgagcataaatttaagttaatctccataaaggcaaagccgattgtttttacatctcttcttacacattttactgtctggaatgcagaagtattgctgaacttagccatgaggatgaaacactaagataggattataaagagaatacaagatgaaaatctcctggggcccgggatgaactcatggaaaaaacatccccaccaactctcttaattgttggagagaaatataagactacaataagggtcactccttatactcatcatttttgagttagagatattgacaaktgtatcaaactatatattttctcccacaagacattgagggacacacttcttttattctccaaaagtaacaaaaaatgctttggtgtctaagttttagcctgcaaggactgtcatagtgttgttttcaaagacttacatgttttatttccttacctcactgcaacttataaatttatcttctatgctaacatcatgatagcatctaatggttccaagagtgaagattatcactagtttatgaacctttgtattccccaaaagagaaagagatattacataaccaaattccaagtatgattaaccaagatttttctaaaattttccatctctcaattctgtctactaatttgaaataactgaacaaaatacatttgcaacatgataattcttcaaactcggctcttataccaagcagtactgatgattggggcattaacaaaaccaataaaattgttttgcaaaacaaaaacgaagtgaaaaatatgctcagcttatcttacacaatattgttttctacatcgaaaatggctagataaccttagaaaaagtg

SEQ ID NO: 677419 - DNA, 1573 bp, Homo sapiens
aaatttgctaatattatagaaaggtcattggaaagtgtttgtcctttcttttttttttaataggaccttcccattttcacttacagttttgaatacatttatacatttccttcttcaaatgtcatttaaattaaaagtgtttctattttctccagatggagtttcaatgctcgtaaacatttacattaggagagaatatagtacctattatctaacttaagttgaaaaagaatgaaactgtaaaatatatttaccaaaataactaaagatttatttaccttcggtaggcctcaattagtttacctttaaaaagcattcattgatacaaattttaaaaatccatgtaacagacatcaatcaaatgtgatttttctccagtttattattttctgccaggggaaataaaatgcaataatcacattttaaatatacatctttttaaatgattctgttgttatacatgattgttattcatatttttactattattgaatgcccctgtactgacctttccaatttgatagtgcagtaagaaataaacttttttttaatattgagaattggaaatgacctggtaatttctttgtactagagaccactaattgtgcatataatgcattctttcattttgtttagtaatagaatcctaagtacatatgaccacaagcaggagattaccttctatagtctcttatcagtgattaattttgatcaaatataatatgaattatattatgagcataaatttaagttaatctccataaaggcaaagccgattgtttttacatctcttcttacacattttactgtctggaatgcagaagtattgctgaacttagccatgaggatgaaacactaagataggattataaagagaatacaagatgaaaatctcctggggcccgggatgaactcatggaaaaaacatccccaccaactctcttaattgttggagagaaatataagactacaataagggtcactccttatactcatcatttttgagttagagatattgacaattgtatcaaactatatattttctcccacaagacattgagggrcacacttcttttattctccaaaagtaacaaaaaatgctttggtgtctaagttttagcctgcaaggactgtcatagtgttgttttcaaagacttacatgttttatttccttacctcactgcaacttataaatttatcttctatgctaacatcatgatagcatctaatggttccaagagtgaagattatcactagtttatgaacctttgtattccccaaaagagaaagagatattacataaccaaattccaagtatgattaaccaagatttttctaaaattttccatctctcaattctgtctactaatttgaaataactgaacaaaatacatttgcaacatgataattcttcaaactcggctcttataccaagcagtactgatgattggggcattaacaaaaccaataaaattgttttgcaaaacaaaaacgaagtgaaaaatatgctcagcttatcttacacaatattgttttctacatcgaaaatggctagataaccttagaaaaagtg

SEQ ID NO: 677420 - DNA, 1573 bp, Homo sapiens
aaatttgctaatattatagaaaggtcattggaaagtgtttgtcctttcttttttttttaataggaccttcccattttcacttacagttttgaatacatttatacatttccttcttcaaatgtcatttaaattaaaagtgtttctattttctccagatggagtttcaatgctcgtaaacatttacattaggagagaatatagtacctattatctaacttaagttgaaaaagaatgaaactgtaaaatatatttaccaaaataactaaagatttatttaccttcggtaggcctcaattagtttacctttaaaaagcattcattgatacaaattttaaaaatccatgtaacagacatcaatcaaatgtgatttttctccagtttattattttctgccaggggaaataaaatgcaataatcacattttaaatatacatctttttaaatgattctgttgttatacatgattgttattcatatttttactattattgaatgcccctgtactgacctttccaatttgatagtgcagtaagaaataaacttttttttaatattgagaattggaaatgacctggtaatttctttgtactagagaccactaattgtgcatataatgcattctttcattttgtttagtaatagaatcctaagtacatatgaccacaagcaggagattaccttctatagtctcttatcagtgattaattttgatcaaatataatatgaattatattatgagcataaatttaagttaatctccataaaggcaaagccgattgtttttacatctcttcttacacattttactgtctggaatgcagaagtattgctgaacttagccatgaggatgaaacactaagataggattataaagagaatacaagatgaaaatctcctggggcccgggatgaactcatggaaaaaacatccccaccaactctcttaattgttggagagaaatataagactacaataagggtcactccttatactcatcatttttgagttagagatattgacaattgtatcaaactatatattttctcccacaagacattgagggayacacttcttttattctccaaaagtaacaaaaaatgctttggtgtctaagttttagcctgcaaggactgtcatagtgttgttttcaaagacttacatgttttatttccttacctcactgcaacttataaatttatcttctatgctaacatcatgatagcatctaatggttccaagagtgaagattatcactagtttatgaacctttgtattccccaaaagagaaagagatattacataaccaaattccaagtatgattaaccaagatttttctaaaattttccatctctcaattctgtctactaatttgaaataactgaacaaaatacatttgcaacatgataattcttcaaactcggctcttataccaagcagtactgatgattggggcattaacaaaaccaataaaattgttttgcaaaacaaaaacgaagtgaaaaatatgctcagcttatcttacacaatattgttttctacatcgaaaatggctagataaccttagaaaaagtg

SEQ ID NO: 677421 - DNA, 1573 bp, Homo sapiens
aaatttgctaatattatagaaaggtcattggaaagtgtttgtcctttcttttttttttaataggaccttcccattttcacttacagttttgaatacatttatacatttccttcttcaaatgtcatttaaattaaaagtgtttctattttctccagatggagtttcaatgctcgtaaacatttacattaggagagaatatagtacctattatctaacttaagttgaaaaagaatgaaactgtaaaatatatttaccaaaataactaaagatttatttaccttcggtaggcctcaattagtttacctttaaaaagcattcattgatacaaattttaaaaatccatgtaacagacatcaatcaaatgtgatttttctccagtttattattttctgccaggggaaataaaatgcaataatcacattttaaatatacatctttttaaatgattctgttgttatacatgattgttattcatatttttactattattgaatgcccctgtactgacctttccaatttgatagtgcagtaagaaataaacttttttttaatattgagaattggaaatgacctggtaatttctttgtactagagaccactaattgtgcatataatgcattctttcattttgtttagtaatagaatcctaagtacatatgaccacaagcaggagattaccttctatagtctcttatcagtgattaattttgatcaaatataatatgaattatattatgagcataaatttaagttaatctccataaaggcaaagccgattgtttttacatctcttcttacacattttactgtctggaatgcagaagtattgctgaacttagccatgaggatgaaacactaagataggattataaagagaatacaagatgaaaatctcctggggcccgggatgaactcatggaaaaaacatccccaccaactctcttaattgttggagagaaatataagactacaataagggtcactccttatactcatcatttttgagttagagatattgacaattgtatcaaactatatattttctcccacaagacattgagggacacacttcttttattctccaaaagtaacaaaaaatgctttggtgtctaagttttagcctgcaaggactgtcatagtgttgttttcaaagacttacrtgttttatttccttacctcactgcaacttataaatttatcttctatgctaacatcatgatagcatctaatggttccaagagtgaagattatcactagtttatgaacctttgtattccccaaaagagaaagagatattacataaccaaattccaagtatgattaaccaagatttttctaaaattttccatctctcaattctgtctactaatttgaaataactgaacaaaatacatttgcaacatgataattcttcaaactcggctcttataccaagcagtactgatgattggggcattaacaaaaccaataaaattgttttgcaaaacaaaaacgaagtgaaaaatatgctcagcttatcttacacaatattgttttctacatcgaaaatggctagataaccttagaaaaagtg

SEQ ID NO: 677422 - DNA, 1573 bp, Homo sapiens
aaatttgctaatattatagaaaggtcattggaaagtgtttgtcctttcttttttttttaataggaccttcccattttcacttacagttttgaatacatttatacatttccttcttcaaatgtcatttaaattaaaagtgtttctattttctccagatggagtttcaatgctcgtaaacatttacattaggagagaatatagtacctattatctaacttaagttgaaaaagaatgaaactgtaaaatatatttaccaaaataactaaagatttatttaccttcggtaggcctcaattagtttacctttaaaaagcattcattgatacaaattttaaaaatccatgtaacagacatcaatcaaatgtgatttttctccagtttattattttctgccaggggaaataaaatgcaataatcacattttaaatatacatctttttaaatgattctgttgttatacatgattgttattcatatttttactattattgaatgcccctgtactgacctttccaatttgatagtgcagtaagaaataaacttttttttaatattgagaattggaaatgacctggtaatttctttgtactagagaccactaattgtgcatataatgcattctttcattttgtttagtaatagaatcctaagtacatatgaccacaagcaggagattaccttctatagtctcttatcagtgattaattttgatcaaatataatatgaattatattatgagcataaatttaagttaatctccataaaggcaaagccgattgtttttacatctcttcttacacattttactgtctggaatgcagaagtattgctgaacttagccatgaggatgaaacactaagataggattataaagagaatacaagatgaaaatctcctggggcccgggatgaactcatggaaaaaacatccccaccaactctcttaattgttggagagaaatataagactacaataagggtcactccttatactcatcatttttgagttagagatattgacaattgtatcaaactatatattttctcccacaagacattgagggacacacttcttttattctccaaaagtaacaaaaaatgctttggtgtctaagttttagcctgcaaggactgtcatagtgttgttttcaaagacttacatgttttatttccttacctcactgcaacttataaatttatcttctatgctaacatcatgatagcatctaatggttccaagagtgaagattatcactagtttatgaacctttgtattccccaaaagagaaagagatattacataaccaaattccaagtatgattaaccaagatttttctaaaattttccayctctcaattctgtctactaatttgaaataactgaacaaaatacatttgcaacatgataattcttcaaactcggctcttataccaagcagtactgatgattggggcattaacaaaaccaataaaattgttttgcaaaacaaaaacgaagtgaaaaatatgctcagcttatcttacacaatattgttttctacatcgaaaatggctagataaccttagaaaaagtg

SEQ ID NO: 677423 - DNA, 621 bp, Homo sapiens
ttttgtgacatctaccttcttcacsatgaactccttcctaaccaaccattatatctaaaataaattatcagcaaacataaataatgtgctattccagaactacctcacatgagctagatgatgggaggcataattcataataaacagaccctacctttaaattctataaagccacagcatttaaattctaactatgccacagagcagtaacctattctcctattaattatatcccataaaagcaatataccttcactaattaattatacttgaagtaacaactatggcttaattaaatgaaccattcctaataatgaaaccttaaaataattggactcttctgtctagaggcagtaacaattattgtcattggaaaggatttcaaacatggctatgctaagcaaagctgattcataactgacattgaacctgagatttcctagagcagtagctctcaaaacctttcgtgaagggccaactattaagtattttagaatgtacgtgccatgtgatctctgtcacaagtaccagtatttgccatcgtagtgcataagtatccataaacaataagtaaaataaaaggatgtcactttattctaataaaactttgtttaccaaaat

SEQ ID NO: 677424 - DNA, 621 bp, Homo sapiens
ttttgtgacatctaccttcttcaccatgaactccttcctaaccaaccattatatctaaaataaattatcagcaaacataaataatgtgctattccagaactacctcacatgagctagatgatgggaggcataattcataataaacagaccctacctttaaattctataaagccacagcatttaaattctaactatgccacagagcagtaacctattytcctattaattatatcccataaaagcaatataccttcactaattaattatacttgaagtaacaactatggcttaattaaatgaaccattcctaataatgaaaccttaaaataattggactcttctgtctagaggcagtaacaattattgtcattggaaaggatttcaaacatggctatgctaagcaaagctgattcataactgacattgaacctgagatttcctagagcagtagctctcaaaacctttcgtgaagggccaactattaagtattttagaatgtacgtgccatgtgatctctgtcacaagtaccagtatttgccatcgtagtgcataagtatccataaacaataagtaaaataaaaggatgtcactttattctaataaaactttgtttaccaaaat

SEQ ID NO: 677425 - DNA, 596 bp, Homo sapiens
ctttaaactgaccataaattcccttgtctgccctcattacttccctatgtccatgtccccgaccctctaaaagctcatttgatctttgggtctctaattaaaacccatcttctgcaaattcakctcaatttcctcagtaaactcctttagctcaggagagaaacatttgtaagaatttatttgaattatgactcttggctttggagtacccatttgttactcattctctttctccaaaggagagctgagatcttggcttggccttccgcctgccaggggtatgtaggttgggagctcccaagaatatggtcagaaagaaatgttggttgcaccccatttgcacgtagtataccaactgttgccaactcacagagacactgtctttcttctgtatgtgtttggagtgactaactcttggaagaaatgtatcattttacttttgcattgaagatgggtgcgtctgtggttcagcacccataaaaggcttattagttttagaattgagtcacctgttaggtataactttgttttagaactttggtttatattcagagtgtaacagaatttaggctttctctccaaagctaaaatggaac

SEQ ID NO: 677426 - DNA, 596 bp, Homo sapiens
ctttaaactgaccataaattcccttgtctgccctcattacttccctatgtccatgtccccgaccctctaaaagctcatttgatctttgggtctctaattaaaacccatcttctgcaaattcatctcaatttcctcagtaaaytcctttagctcaggagagaaacatttgtaagaatttatttgaattatgactcttggctttggagtacccatttgttactcattctctttctccaaaggagagctgagatcttggcttggccttccgcctgccaggggtatgtaggttgggagctcccaagaatatggtcagaaagaaatgttggttgcaccccatttgcacgtagtataccaactgttgccaactcacagagacactgtctttcttctgtatgtgtttggagtgactaactcttggaagaaatgtatcattttacttttgcattgaagatgggtgcgtctgtggttcagcacccataaaaggcttattagttttagaattgagtcacctgttaggtataactttgttttagaactttggtttatattcagagtgtaacagaatttaggctttctctccaaagctaaaatggaac

SEQ ID NO: 677427 - DNA, 1387 bp, Homo sapiens
gactacatgtttctgtgattaaactacccacttcttggcactttctcttggtaactctaggaaagtaatacaatccctctgccagtcatttggcgataagaggagggatgattaaagcaggacaagtcacttaacccacctgatctctcgttttctcatgtgtaaaatggagataaaatctattcagcatatctcatgatctcacatgaaagggaaaatgtcaaaatgtataaggtagaatggtgataaacataaaggaatatgaaaattcaggcacaaaaggcataataaggtaaatacataggagttcttttagatttaggaaagcttctttgaatattcatcacaagtaagcctttctgatccaaaggatactgttgtcaataacaaattctcaccctgtttctaaagagaattttccttctgggtgtcatttccagttgctaatggacccattgatggagtgtgatgtgagcaaagaatgttagctccatggtcagaatggcattcatcttccacagaaacaatgaaatgaaaaaaaaagtctatcttggaaaataactggcagtgaaagtggggactggtcatcttacagaaactgaacacaagtgattgaaaggtcaatggataaaagaaactgcccaggagatagatggtttcctggagcacaccctactggtaacagccctagacccagtgaactttgctgttcgtggaaatgaatgaacatggcacttagagcctgaggtagctctaacagactagtgctttaatctccatttctaaaattaaagtaatggataactgcccctttcccaaatctattaacaccttacaattaagtctttaatggaggttcaatagccaaataatttgtctttaaggaaaataaattgttgacagttccctttaggttgtgtgttgttagctttcacctaaattaccaccttgcaraaagggtaggtcagttggaagtttttaaaggggttgtgctttaccaagttgttctgagtcaaagaaaaaaaaaatcacggaatactactttgtcttgtcgtagttgactatttttagtgaaaacactgtaagggagaaataatcataatgtccaaatcacaggctacttacgtggaataaataagggtatgcaacaagcaattcttagcacagtgctccgcacagcataagtgctcaaaaagtaatagtcaataataaacaatgataaatggaacacaaagatttattcaatagatattttattagcatctaaagtctgtaaggcacgatgattagcatggtcagaaagaataaatctctgccttcgaaaagcatgcactagtttcctgattttaggaagcagggtttagaagttcatacctgtccatgttta

SEQ ID NO: 677428 - DNA, 1387 bp, Homo sapiens
gactacatgtttctgtgattaaactacccacttcttggcactttctcttggtaactctaggaaagtaatacaatccctctgccagtcatttggcgataagaggagggatgattaaagcaggacaagtcacttaacccacctgatctctcgttttctcatgtgtaaaatggagataaaatctattcagcatatctcatgatctcacatgaaagggaaaatgtcaaaatgtataaggtagaatggtgataaacataaaggaatatgaaaattcaggcacaaaaggcataataaggtaaatacataggagttcttttagatttaggaaagcttctttgaatattcatcacaagtaagcctttctgatccaaaggatactgttgtcaataacaaattctcaccctgtttctaaagagaattttccttctgggtgtcatttccagttgctaatggacccattgatggagtgtgatgtgagcaaagaatgttagctccatggtcagaatggcattcatcttccacagaaacaatgaaatgaaaaaaaaagtctatcttggaaaataactggcagtgaaagtggggactggtcatcttacagaaactgaacacaagtgattgaaaggtcaatggataaaagaaactgcccaggagatagatggtttcctggagcacaccctactggtaacagccctagacccagtgaactttgctgttcgtggaaatgaatgaacatggcacttagagcctgaggtagctctaacagactagtgctttaatctccatttctaaaattaaagtaatggataactgcccctttcccaaatctattaacaccttacaattaagtctttaatggaggttcaatagccaaataatttgtctttaaggaaaataaattgttgacagttccctttaggttgtgtgttgttagctttcacctaaattaccaccttgcagaaagggtaggtcagttggaagtttttaaaggggttgtgctttaccaagttgttctgagtcaaagaaaaaaaaaatcacggaatactactttgtcttgtcgtagttgactatttttagtgaaaacactgtaagggaraaataatcataatgtccaaatcacaggctacttacgtggaataaataagggtatgcaacaagcaattcttagcacagtgctccgcacagcataagtgctcaaaaagtaatagtcaataataaacaatgataaatggaacacaaagatttattcaatagatattttattagcatctaaagtctgtaaggcacgatgattagcatggtcagaaagaataaatctctgccttcgaaaagcatgcactagtttcctgattttaggaagcagggtttagaagttcatacctgtccatgttta

SEQ ID NO: 677429 - DNA, 1387 bp, Homo sapiens
gactacatgtttctgtgattaaactacccacttcttggcactttctcttggtaactctaggaaagtaatacaatccctctgccagtcatttggcgataagaggagggatgattaaagcaggacaagtcacttaacccacctgatctctcgttttctcatgtgtaaaatggagataaaatctattcagcatatctcatgatctcacatgaaagggaaaatgtcaaaatgtataaggtagaatggtgataaacataaaggaatatgaaaattcaggcacaaaaggcataataaggtaaatacataggagttcttttagatttaggaaagcttctttgaatattcatcacaagtaagcctttctgatccaaaggatactgttgtcaataacaaattctcaccctgtttctaaagagaattttccttctgggtgtcatttccagttgctaatggacccattgatggagtgtgatgtgagcaaagaatgttagctccatggtcagaatggcattcatcttccacagaaacaatgaaatgaaaaaaaaagtctatcttggaaaataactggcagtgaaagtggggactggtcatcttacagaaactgaacacaagtgattgaaaggtcaatggataaaagaaactgcccaggagatagatggtttcctggagcacaccctactggtaacagccctagacccagtgaactttgctgttcgtggaaatgaatgaacatggcacttagagcctgaggtagctctaacagactagtgctttaatctccatttctaaaattaaagtaatggataactgcccctttcccaaatctattaacaccttacaattaagtctttaatggaggttcaatagccaaataatttgtctttaaggaaaataaattgttgacagttccctttaggttgtgtgttgttagctttcacctaaattaccaccttgcagaaagggtaggtcagttggaagtttttaaaggggttgtgctttaccaagttgttctgagtcaaagaaaaaaaaaatcacggaatactactttgtcttgtcgtagttgactatttttagtgaaaacactgtaagggagaaataatcataatgtccaamtcacaggctacttacgtggaataaataagggtatgcaacaagcaattcttagcacagtgctccgcacagcataagtgctcaaaaagtaatagtcaataataaacaatgataaatggaacacaaagatttattcaatagatattttattagcatctaaagtctgtaaggcacgatgattagcatggtcagaaagaataaatctctgccttcgaaaagcatgcactagtttcctgattttaggaagcagggtttagaagttcatacctgtccatgttta

SEQ ID NO: 677430 - DNA, 1080 bp, Homo sapiens
agacccagtgctggcaattggaagtctgcccagtgcacacttaattgtgagggtcgggggtgtgggcgacgaggcgctggcagcatctcttctattagacacagtctttgacttaaagcccgctgatggcttccctctgctctttggagtaaagactcaagttatttgggtgtttgttttgttttgttttagaggaagtttcgctctttcacccaggctggagtgcagtggtgtgatcttggctcactgcaacttctgcctcccaggttcaagcaattctctcacctcagcgtcctgagtacaggcgcatgccaccacgcccggctaatttttgtatgtttagtagagatggggtttcgccatgttggccaggctggtctcgaactcctgacctcaggtgttccacccgtctcggcctcccaaagtgctgggattacaagcttgagccaccgtgcccagcctttttttcttttttgatatagtrtctcactctgtcatccagactggagtgcagtggctcaatgtcagctcgctgcaacctctgcctcccgggttcaagcgattctcctgcctcagcctcctgagtagctgggactataggcacccgccaccacacccagctaatttttgtatttttagtagagatggggtttcaccatgttggccaggctggtcttgaactcctggcctcaggtgatccactgcctcggcctcccaggtgcttacaggtgtgaggcactgagcctgaccagcttttctttttcttatatattgttttcatttatgccacctttttgtgctttatgtatctttgtcagcaatcttaaattctttctggaataatgtggtggtataaataaaaacatacaacataaatataaataaatataaaatgtaacaagctctataaaaacctgttcctaaaatatcaacagtgcttgtttttttgcagaaagaaataagatgattagagatgtgttggggggaaatgtgcatcctgtgggggctgatgtgtgtgattttacgaaacccaaagtgtaagcattacagatcactttaagaaataccatggagataaaa

SEQ ID NO: 677431 - DNA, 1080 bp, Homo sapiens
agacccagtgctggcaattggaagtctgcccagtgcacacttaattgtgagggtcgggggtgtgggcgacgaggcgctggcagcatctcttctattagacacagtctttgacttaaagcccgctgatggcttccctctgctctttggagtaaagactcaagttatttgggtgtttgttttgttttgttttagaggaagtttcgctctttcacccaggctggagtgcagtggtgtgatcttggctcactgcaacttctgcctcccaggttcaagcaattctctcacctcagcgtcctgagtacaggcgcatgccaccacgcccggctaatttttgtatgtttagtagagatggggtttcgccatgttggccaggctggtctcgaactcctgacctcaggtgttccacccgtctcggcctcccaaagtgctgggattacaagcttgagccaccgtgcccagcctttttttcttttttgatatagtgtytcactctgtcatccagactggagtgcagtggctcaatgtcagctcgctgcaacctctgcctcccgggttcaagcgattctcctgcctcagcctcctgagtagctgggactataggcacccgccaccacacccagctaatttttgtatttttagtagagatggggtttcaccatgttggccaggctggtcttgaactcctggcctcaggtgatccactgcctcggcctcccaggtgcttacaggtgtgaggcactgagcctgaccagcttttctttttcttatatattgttttcatttatgccacctttttgtgctttatgtatctttgtcagcaatcttaaattctttctggaataatgtggtggtataaataaaaacatacaacataaatataaataaatataaaatgtaacaagctctataaaaacctgttcctaaaatatcaacagtgcttgtttttttgcagaaagaaataagatgattagagatgtgttggggggaaatgtgcatcctgtgggggctgatgtgtgtgattttacgaaacccaaagtgtaagcattacagatcactttaagaaataccatggagataaaa

SEQ ID NO: 677432 - DNA, 1080 bp, Homo sapiens
agacccagtgctggcaattggaagtctgcccagtgcacacttaattgtgagggtcgggggtgtgggcgacgaggcgctggcagcatctcttctattagacacagtctttgacttaaagcccgctgatggcttccctctgctctttggagtaaagactcaagttatttgggtgtttgttttgttttgttttagaggaagtttcgctctttcacccaggctggagtgcagtggtgtgatcttggctcactgcaacttctgcctcccaggttcaagcaattctctcacctcagcgtcctgagtacaggcgcatgccaccacgcccggctaatttttgtatgtttagtagagatggggtttcgccatgttggccaggctggtctcgaactcctgacctcaggtgttccacccgtctcggcctcccaaagtgctgggattacaagcttgagccaccgtgcccagcctttttttcttttttgatatagtgtctcactctgtcatccagactggagtgcagtggctcaatgtcagctcgctgcaacctctgcctcccrggttcaagcgattctcctgcctcagcctcctgagtagctgggactataggcacccgccaccacacccagctaatttttgtatttttagtagagatggggtttcaccatgttggccaggctggtcttgaactcctggcctcaggtgatccactgcctcggcctcccaggtgcttacaggtgtgaggcactgagcctgaccagcttttctttttcttatatattgttttcatttatgccacctttttgtgctttatgtatctttgtcagcaatcttaaattctttctggaataatgtggtggtataaataaaaacatacaacataaatataaataaatataaaatgtaacaagctctataaaaacctgttcctaaaatatcaacagtgcttgtttttttgcagaaagaaataagatgattagagatgtgttggggggaaatgtgcatcctgtgggggctgatgtgtgtgattttacgaaacccaaagtgtaagcattacagatcactttaagaaataccatggagataaaa

SEQ ID NO: 677433 - DNA, 1080 bp, Homo sapiens
agacccagtgctggcaattggaagtctgcccagtgcacacttaattgtgagggtcgggggtgtgggcgacgaggcgctggcagcatctcttctattagacacagtctttgacttaaagcccgctgatggcttccctctgctctttggagtaaagactcaagttatttgggtgtttgttttgttttgttttagaggaagtttcgctctttcacccaggctggagtgcagtggtgtgatcttggctcactgcaacttctgcctcccaggttcaagcaattctctcacctcagcgtcctgagtacaggcgcatgccaccacgcccggctaatttttgtatgtttagtagagatggggtttcgccatgttggccaggctggtctcgaactcctgacctcaggtgttccacccgtctcggcctcccaaagtgctgggattacaagcttgagccaccgtgcccagcctttttttcttttttgatatagtgtctcactctgtcatccagactggagtgcagtggctcaatgtcagctcgctgcaacctctgcctcccgggttcaagcgattctcctgcctcagcctcctgagtagctgggactataggcacccgccaccacacccagctaatttttgtatttttagtagagatggggtttcaccatgttggccaggctggtcttgaactcctggcctcaggtgatccactgcctcggcctcccargtgcttacaggtgtgaggcactgagcctgaccagcttttctttttcttatatattgttttcatttatgccacctttttgtgctttatgtatctttgtcagcaatcttaaattctttctggaataatgtggtggtataaataaaaacatacaacataaatataaataaatataaaatgtaacaagctctataaaaacctgttcctaaaatatcaacagtgcttgtttttttgcagaaagaaataagatgattagagatgtgttggggggaaatgtgcatcctgtgggggctgatgtgtgtgattttacgaaacccaaagtgtaagcattacagatcactttaagaaataccatggagataaaa

SEQ ID NO: 677434 - DNA, 677 bp, Homo sapiens
cagtatgactctgctgctaggggcacccaagcagaaggccatgccccttcagggtcctgcagctactgaagtgcctgggagcagtgccctaggtaaggcagcagtggcaagggtgaggctcccctttcaagtgacatgggggctgcagatgccaacgcagcgcctgagcagagggccctggagaggagtatacataagacaggagtatacatgagcttaagcacatgcagaaagaacacggttgttcatgacagctggrctgagattattttactggtgcatgtggaagctcttgggtcagagaaagttaatgaacatcaaggtagcatcatgtaagtgctcagaatgtcaggcttggaaaaatttagatcttttaaatatatacataggcatttaattaattactttagagacaaggtctcactctgttgcccaggctggagtgcagtggcactgctagctgtaaccttgactttcaggctcaagccatcctcctacctcagcctcccgagtagctgggactacatgtgtgcaccaccacacctggctaatttttttctaaacaaaaacttgtgatttctatgttttcaatgtcaggtttatttttaataaaatgaaagaacaggaaaagatgcacaattttctgaaacttctgaggttgaggtagatgggttttt

SEQ ID NO: 677435 - DNA, 677 bp, Homo sapiens
cagtatgactctgctgctaggggcacccaagcagaaggccatgccccttcagggtcctgcagctactgaagtgcctgggagcagtgccctaggtaaggcagcagtggcaagggtgaggctcccctttcaagtgacatgggggctgcagatgccaacgcagcgcctgagcagagggccctggagaggagtatacataagacaggagtatacatgagcttaagcacatgcagaaagaacacggttgttcatgacagctgggctgagattattttactggtgcatgtggaagctcttgggtcagagaaagttaatgaacatcaaggtagcatcatgtaagtgctcagaatgtcaggcttggaaaaatttagatcttttaaatatatacataggcatttaattaattactttagagacaaggtctcactctgttgcccaggctggagtgcagtggcactgctagctgtaaccttgactttcaggctcaagccatcctcctacctcagcctcccgagtagctgggactacatgtgtgcaccaccacacctggctaatttttttctaaacaaaaacktgtgatttctatgttttcaatgtcaggtttatttttaataaaatgaaagaacaggaaaagatgcacaattttctgaaacttctgaggttgaggtagatgggttttt

SEQ ID NO: 677436 - DNA, 592 bp, Homo sapiens
gctcactttatatagacccattattacaaacatcatatatgaaacattcatcaagtttacagaatcaatttgaaggcagatcctacattatgcaatctatactaggttatcttgaaacatctacataaccacgcagcttaggaatccccatggataccagcttggatagattctttcttctctcctgtcctcctttcttttctctcctttcctctgctcttctcctcccttctcttttctatctctttctctgccaatttccccggagctttaattcagtacttagaccactggttcgccaactttgttgcatattgatattatctggggaayttaaagaaatactgctgcctgagtcccagcccctcaaacaaaattctggggttttgtttgtttttgtttttgagacagagtctcgctctgtcacccaggctggagtgcagtggcgcgatctcagctcactgcaagctccgcccctcaggttcacaccattctccggcctcagcctcccaagtagctgggactacaggcacctgccaccacgcccggctaattttttttgtatttttagtagagacagggtttcaccgtg

SEQ ID NO: 677437 - DNA, 652 bp, Homo sapiens
gagaaacagaaaagctggcaaaatctagggaagattttgttcctcctacttgcagactggagaaagatgttgtaattaaatcataaattgggaaggaaacccaagtatargtacaagaaaaacatttggtgaagaaaagaggacggtacattttgcaaaataagcagatcactgaggagatggccccaaattcctgcatagcagatctaaaagttgcatgactactgttacttcctacctatgtgtttggataattttgtgactgttcttccaggatttgttaggattggctcaggccttggaggtcctatgttggcagatgacggttttcttaactgcaggtgagcaaactaggtgggtagggaatgctgtatctccttactccataaacaagcaaaaatctcaagactataggggtttattttagagcatgagattcatccttctacttaatttctttttactgttttaaaattgtgtttatatttttcaatatatatttcgtcttaatctttgatgaattatgtatgataaattctttctgtgatatcaggatactagatattgaatctaagctaaattaaatttaaaataattaatgaggaaatggcataaaaaactatccttcaaaaagagaataaatacttcaaaa

SEQ ID NO: 677438 - DNA, 1190 bp, Homo sapiens
agagataccaaggaaagacaagtagttcaattccttaacatgatgtttttcaacagctccttgactgctccttcttccagtatcccctggttttatattttcaatattcctctaatttccctgcactgttaaagaggaagcagagagcacccaggcttcgtgttgtaaaattaatgaaggtgtcaagctgttgagttaaatcactctaaaggaatgtaatgactcagtgtccaagatgctccctgagagaactgtgagctcacacagtgacggtggcgggtgactccaacactaaaaatatgtggcacacagtccccagcacctccctaatgataacactgcctctatttcctagtctctttctctccaccactggttgaatttcatgctttctgaaaggtatttctcctaacctccagcagcttcagatgctcagcagatgaaaccctgcttcagcttccacttcttttgaagttcggccagatggagattggtgaagctctctagtcatgcactattgaactgcgggatgattaggaaggagacgaagaaaggttgtgtcatggataatggcaacctcaaacattaaggcatcactgggggtcagctactgaataggtgaccaccagctggtgcaaggcaggatccccctcaagggcttagggccacctgccctaagggcaagaagatgggctcctgaattccaaggaagataagctctggaccaaaaaattatgtgtaccatcaacccacactctgcacaaaactaaaaccttcaaggagtctttaaaaggcacttctaggccaagcacagtggctcacgcttgtaatcccaacactttgggaggccgaggcgagtggaccagttgaggccaggagtttgagaagagcctggccaacatggcgaaaccccatctccactaaaaaaaatacaaaaattagccaggtgtggtggtgcatagtcttagctactagggtggctgaggcaygagaattacttgaacctgggaggcagaggttgcaatgaaccaagattgcaccactgcactccagcctgggtgacagagtgagactctgtcttggaaacaaacaaacaaaaaaataaataaataaaaggcaattctaccaaacaccccataagaaaattagagaatgacctaatgctaaaaaataaatttgaatacaaaaaa

SEQ ID NO: 677439 - DNA, 1190 bp, Homo sapiens
agagataccaaggaaagacaagtagttcaattccttaacatgatgtttttcaacagctccttgactgctccttcttccagtatcccctggttttatattttcaatattcctctaatttccctgcactgttaaagaggaagcagagagcacccaggcttcgtgttgtaaaattaatgaaggtgtcaagctgttgagttaaatcactctaaaggaatgtaatgactcagtgtccaagatgctccctgagagaactgtgagctcacacagtgacggtggcgggtgactccaacactaaaaatatgtggcacacagtccccagcacctccctaatgataacactgcctctatttcctagtctctttctctccaccactggttgaatttcatgctttctgaaaggtatttctcctaacctccagcagcttcagatgctcagcagatgaaaccctgcttcagcttccacttcttttgaagttcggccagatggagattggtgaagctctctagtcatgcactattgaactgcgggatgattaggaaggagacgaagaaaggttgtgtcatggataatggcaacctcaaacattaaggcatcactgggggtcagctactgaataggtgaccaccagctggtgcaaggcaggatccccctcaagggcttagggccacctgccctaagggcaagaagatgggctcctgaattccaaggaagataagctctggaccaaaaaattatgtgtaccatcaacccacactctgcacaaaactaaaaccttcaaggagtctttaaaaggcacttctaggccaagcacagtggctcacgcttgtaatcccaacactttgggaggccgaggcgagtggaccagttgaggccaggagtttgagaagagcctggccaacatggcgaaaccccatctccactaaaaaaaatacaaaaattagccaggtgtggtggtgcatagtcttagctactagggtggctgaggcacgagaattacttgaacctgggaggcagaggttgcaatgaaccaagatygcaccactgcactccagcctgggtgacagagtgagactctgtcttggaaacaaacaaacaaaaaaataaataaataaaaggcaattctaccaaacaccccataagaaaattagagaatgacctaatgctaaaaaataaatttgaatacaaaaaa

SEQ ID NO: 677440 - DNA, 626 bp, Homo sapiens
tttgatctgctgtgaactccacccaatgtctttttcattgcagatattgtatttttcatctctatataattaagtgctactcaacaatttaaaaaataaacttttattatgtgcaataatgtgtgtaaatatcacaagcactatgctgagtggaagaaaccagacacaaaagttgttatactgtttgattccatttatatgaaatcctagaaaacacaaaataatataggcagagagttgatcacttgatggacactgggagcagatgccagtattgactgcaaaagggcatgagggaacttttgggtgtataaaaattgtctgtgtcatgattgtgatagtagtaatgactgtaatatttgtcaaacctgattaagttgtattcttaaagttggagtaagaacggttcagttctttgaaattctctagtttatctcctttctctacagttaagtaaaaatattttctttccttctctcttcttttctttacttttttggattagttaacataacccaaatagacaaaagttttctaacttctacatctgcatctccagaagttctgtttggacacayacatacacacacacacacatacacacacacacatacacacacagaaag

SEQ ID NO: 677441 - DNA, 608 bp, Homo sapiens
gaaagtaatgaaggtaatatacagttttatcattttattttcaacgtacccatataaatggtgctttaaaattcaaaaacaattatgaaaacatcaagtttatcattccatctcaaggaatgtatcaaatccttaaagttaggaacaggcccttcctaatctttttgtctctccctgttctagctgaataacttaatgactcctcgttgagcgtggtatttcacaaattgtgcgatacagctgcaagccactgagactaggtaacgcacaggaagaatgcttcgtgaagaaatccatcctccgaacaaatgtttcctaagtgtctaccacataccacacgttgttctaaagtggggataaaatggagaarctccctgttttcatggaacttaggttcacatggaggaaacagataacaaacaagttaataagtaaataacttagtttcagagggtgatatagaaaggtaacattgaaagcacctgagtattatatgagagctatgcgatgagcatggaagcacacatttgtagtcctacctacttgggaggctgaggtgggaggaacacttgagcccaggagttcaaggctgcaatgagctatgattg

SEQ ID NO: 677442 - DNA, 1550 bp, Homo sapiens
cgggcagcaatactgctttgtaaagcattgagatgtttatgtgtatgcatatctaaaagcacagcacttaatcctttacattgtctatgatgcaaagacctttgttcacgtgtttgtctgctgaccctctccccacaattgtcttgtgaccctgacacatccccctctttgagaaacacccacagatgatcaataaatactaagggaactcagaggctggcgggatcctccatatgctgaacgctggttccccgggtccccttatttctttctctatactttgtctctgtgtctttttcttttccaaatctctcgtcccaccttacgagaaacacccacaagtgtgtaggggcaacccacccctacattttcaaatactaaatagcatcttaccatataaatttataatttaatcaatcccctctcattgggcatttaagttatttactgtattttattatcaataaatgaacataaatcttgtagtccttcgacaaaatcacgctgaatttattatgccctattcttgtatacatatatatcattattgaggatttatgaatttcaaatcttaaatcctttggacttctgttttcttatctgtaaaattagagagttggctcagagttctaattatgctccaattctaaaaaaaaaaccaagttctaaacatagtagattcttaataattggggtaaaacaatttgtgaattcttagaggaaacaagatacaatgcatgcctttcaaatgactataaagaggttgcatgtggagagggcatacacagaatcatacagaggaattctgtttctgaaatagctgttttacatcaaaatttggggacaaagttttcttttttccctgttaaataaagcctttcggggaaaatcattatttctgagtgtgctgctttgatctctgcctccagaaattgggatttatttcccactgccattaggatgcaaggtcctgattaagaaaacttactaagtttaagaattttaatttaagaactggtctcacattcttaatcaggatatttaaagttgtcttttgccttgaaatytaaacacacattccactcttttcactgcttcactccagaacttgttatcggttaaattttgattgattttactaactctttttttttctttcttttttttttttttttttttttgagatggcatttcgcttttgttgcccaggctggagtgcagggcacagtcttggcttactgcaacgtgcgtctcccgggttcaagcgattctcctgcctcagcctcccaagtagctggagctacaggcatgcaccacgacgcccagctaattttgtattttaagtagagacggggtttcaccctgttggccaggctggtctcaaactcctgatctcaggtatccacccgcctcggcctcccaaagtgctgggattacaggcgtgagacaccgtgcccggccgactttactaattcttaatcctgtcccaccttgctggctacaattttgtgaaacttctatctcacttctttttttttttttttagatgg

SEQ ID NO: 677443 - DNA, 1550 bp, Homo sapiens
cgggcagcaatactgctttgtaaagcattgagatgtttatgtgtatgcatatctaaaagcacagcacttaatcctttacattgtctatgatgcaaagacctttgttcacgtgtttgtctgctgaccctctccccacaattgtcttgtgaccctgacacatccccctctttgagaaacacccacagatgatcaataaatactaagggaactcagaggctggcgggatcctccatatgctgaacgctggttccccgggtccccttatttctttctctatactttgtctctgtgtctttttcttttccaaatctctcgtcccaccttacgagaaacacccacaagtgtgtaggggcaacccacccctacattttcaaatactaaatagcatcttaccatataaatttataatttaatcaatcccctctcattgggcatttaagttatttactgtattttattatcaataaatgaacataaatcttgtagtccttcgacaaaatcacgctgaatttattatgccctattcttgtatacatatatatcattattgaggatttatgaatttcaaatcttaaatcctttggacttctgttttcttatctgtaaaattagagagttggctcagagttctaattatgctccaattctaaaaaaaaaaccaagttctaaacatagtagattcttaataattggggtaaaacaatttgtgaattcttagaggaaacaagatacaatgcatgcctttcaaatgactataaagaggttgcatgtggagagggcatacacagaatcatacagaggaattctgtttctgaaatagctgttttacatcaaaatttggggacaaagttttcttttttccctgttaaataaagcctttcggggaaaatcattatttctgagtgtgctgctttgatctctgcctccagaaattgggatttatttcccactgccattaggatgcaaggtcctgattaagaaaacttactaagtttaagaattttaatttaagaactggtctcacattcttaatcaggatatttaaagttgtcttttgccttgaaatctaaacacacattccactcttttcactgcttcactccagaacttgttatcggttaaattttgattgattttactaactcttttwttttctttcttttttttttttttttttttttgagatggcatttcgcttttgttgcccaggctggagtgcagggcacagtcttggcttactgcaacgtgcgtctcccgggttcaagcgattctcctgcctcagcctcccaagtagctggagctacaggcatgcaccacgacgcccagctaattttgtattttaagtagagacggggtttcaccctgttggccaggctggtctcaaactcctgatctcaggtatccacccgcctcggcctcccaaagtgctgggattacaggcgtgagacaccgtgcccggccgactttactaattcttaatcctgtcccaccttgctggctacaattttgtgaaacttctatctcacttctttttttttttttttagatgg

SEQ ID NO: 677444 - DNA, 1179 bp, Homo sapiens
ggatgaagctggaaaccatcattctcagcaaactatcacaaggacaaaaaaccaaacaccgcatgttctcactcatagaagggaattgaacaatgagaacacatggatgcaggaaggggaacatcacacactgcggcctgttatggggtggggggaagggggcggggcgggatagcatttggagatatacctaatgttaaatgacgagttactgggtgcagcacatcaacatggcacatgtgtacatatgtaactaaactgcacgttgtgcacatgtaccctcaaacttaaagtataaaaaaaaaaaagaattctatagcattgtgaaggggataaatttcaggcattagaaggactgtcaaaatatttcttctctgctaatttatatccatctagaaaactgttgagcaatgagccctgattctgtttctagacagttatttcttgctttctctcttgcttcacagtaagaactctggctccagcaacatcatacatttagatatttgctcaatcctattatacttcataaaaagtttcagaattattttatacatacatctataataacaaatcagctggacttccatttgtacttaagatgtaaaaagctttaaataatgttgcttttacagtaacaaygagaaaaagtcagattataactttctttgaacccatcggaaaactgaaggcatgaggcaaccaaggaacatgaattccaagcagacaaaagtataaggagagtcagggcacacagattgtatctcctgtggtagcacattggaggaagaggcacaggccaccatttaagtgaatataaataaatcaggtaaattttaatgaatggccaaaggccaaatagaggatagcatgtcatttttgaacagtttggggccacagacctaagtgaaaatgatactcttttagctttttcctacataccttcactgggtgcttacaaaaaccaaacaaacaagcaagcaaacaaacaacaaaaaaagaaaagaacagaagagagagagagaaagagagagattggaagaaggagagaagactgaaaaaaagctctatcagtaatgacgaaatttagtacatgatcagtgattgtggggtcacaggcgcataataacgctcatttctctggacccttctcttataggaagcagaagacttaagcta

SEQ ID NO: 677445 - DNA, 1179 bp, Homo sapiens
ggatgaagctggaaaccatcattctcagcaaactatcacaaggacaaaaaaccaaacaccgcatgttctcactcatagaagggaattgaacaatgagaacacatggatgcaggaaggggaacatcacacactgcggcctgttatggggtggggggaagggggcggggcgggatagcatttggagatatacctaatgttaaatgacgagttactgggtgcagcacatcaacatggcacatgtgtacatatgtaactaaactgcacgttgtgcacatgtaccctcaaacttaaagtataaaaaaaaaaaagaattctatagcattgtgaaggggataaatttcaggcattagaaggactgtcaaaatatttcttctctgctaatttatatccatctagaaaactgttgagcaatgagccctgattctgtttctagacagttatttcttgctttctctcttgcttcacagtaagaactctggctccagcaacatcatacatttagatatttgctcaatcctattatacttcataaaaagtttcagaattattttatacatacatctataataacaaatcagctggacttccatttgtacttaagatgtaaaaagctttaaataatgttgcttttacagtaacaatgagaaaaagtcagattataactttctttgaacccatcggaaaactgaaggcatgaggcaaccaaggaacatgaattccaagcagasaaaagtataaggagagtcagggcacacagattgtatctcctgtggtagcacattggaggaagaggcacaggccaccatttaagtgaatataaataaatcaggtaaattttaatgaatggccaaaggccaaatagaggatagcatgtcatttttgaacagtttggggccacagacctaagtgaaaatgatactcttttagctttttcctacataccttcactgggtgcttacaaaaaccaaacaaacaagcaagcaaacaaacaacaaaaaaagaaaagaacagaagagagagagagaaagagagagattggaagaaggagagaagactgaaaaaaagctctatcagtaatgacgaaatttagtacatgatcagtgattgtggggtcacaggcgcataataacgctcatttctctggacccttctcttataggaagcagaagacttaagcta

SEQ ID NO: 677446 - DNA, 586 bp, Homo sapiens
ccacacactcgaggccatgttggagacatttcatgaaaggattaggtgggttacccctggctttctgctccagagtttatcaagactgatattaaagtaaatgcattgtaagccacacatacaagttgtggagtgaagtaaacagagtgatttttttgtttgtcctgttttataggctttaattaaattgtggccttggattgggggcaggattttgtgattattwttatttttattatacttgaagttctggggtacatgtgaagaatgtgcagttttgttacatagctatacacacgtgccatggttgtttgctgcacccatcaacccctcatctacattaggtatttctcctagtgctatcccttctttagcccccaaccccccgacaggccccgatgtgtgatgttcccctccctgtgtccaagtgttctcattgttcaactcccacttatgagtgagaacatgcagtttttggttttctgttcttgtattcgtttgctaagaatgatgatttccagcttcatccatgttcctgcaaaggacatgaactcatccttttttatgcctgcatagtattccatgg

SEQ ID NO: 677447 - DNA, 586 bp, Homo sapiens
ccacacactcgaggccatgttggagacatttcatgaaaggattaggtgggttacccctggctttctgctccagagtttatcaagactgatattaaagtaaatgcattgtaagccacacatacaagttgtggagtgaagtaaacagagtgatttttttgtttgtcctgttttataggctttaattaaattgtggccttggattgggggcaggattttgtgattatttttatttttattatacttgaagttctggggtacatgtgaagaatgtgcagttttgttacatagctatacacacgtgccatggttgtttgctgcacccatcaacccctcatctacattaggtatttctcctagtgctatcccttstttagcccccaaccccccgacaggccccgatgtgtgatgttcccctccctgtgtccaagtgttctcattgttcaactcccacttatgagtgagaacatgcagtttttggttttctgttcttgtattcgtttgctaagaatgatgatttccagcttcatccatgttcctgcaaaggacatgaactcatccttttttatgcctgcatagtattccatgg

SEQ ID NO: 677448 - DNA, 645 bp, Homo sapiens
ttcggataatcataacacgtgcccacatctataaccaggtcacaggactccatattggactgtggtcaactcttttctttgtcttaaatgagtttgcatattttgcgtaactttgaacacttgaatgttatatattaaaacataaaccctattatctgagcttactgaagcctggctttatttgaagaagggagtcttctttgtaatggtgatctcaaactggcaataaaatagttaacatttattaaggatttactacatactaggcactgtcctgagtatattgcatatgctatctcttttaaaattcatgattttattatccaggcactactgctgtccactttattagagagaaaactgagggacagaggagttaagtaatttgccacagttaccaagtggacaagttaaataagggagaaatttaaaagtataaatttttcttttgtaccaattctaatgaatgcccaactctatctgcaatggaatttagttttggccagtgactgcactgatcttttatcttagtattccartatagagatggatggtctaggtgtttacacttagcagaactgaacctgtggaattgtatgatcttttcacttcactttgtgtattgtcaaagccaagtagcactgg

SEQ ID NO: 677449 - DNA, 863 bp, Homo sapiens
gaataagtgaataagaaaaaataaaacgagttttgttttgggggttaggggaagaaaaatatcagaataagttgtctcatgcagtaagataaattaaaaacgaagaaaggaagaaagaaaggattgcctccccttaaataggtgtcaaactgtgaacatgttctgttattggttcatgaaattttccctaaatcgtgcattacattttctttaaatttggggcagaacaatataagtcacagtaatggaagcaagatgtgaaaagtctacacatctgttaggaaaaatcctactccccccatgcccctgttgcctctatggtaatccaagggaaggtaagtctaagtaaaataaaaaagggagaagggaaaaggaactttgagcccttgtggccagttcacaacaaaagtctgttacgccatggtttgtagcctgttattcagcaggaaaaaatcttggaaaaacaagcatcttgttctgggaatgtcagggagaaggaaaacaattcaaaatccaatcagtgtctttgagcgaaacacagattcttttattctgctagtttggacaacagttcctcatgcagattttacagagctagaggttgtcggaatcatgagaaagtctaggaaaagcctgaatcacacaagcttataagatttggggccgctgcaggattgtggagcttcaccaagggagaggatgggagggcggagtgatatatgaaatggaaaactgcattctggcaaaggatgtgcctgctctgaaattctcatagcaggatgacacttgaaacmtttgtttctacttttccttaaagtgcatgaggccacacaattgttccagtcactcttactgtataaaaa

SEQ ID NO: 677450 - DNA, 602 bp, Homo sapiens
tgagttaggacttttgtccccattttacagattaggacactcaagtccagaaggtagagaccacctgctcaagtcctgcagacagtgtggaaccctggcagagtctgggtccctgaaagcagacaaggacttggggacaygtcatttgttgcagatgatcccaggacacctgagtgaggacatgggaaggtgagcccggaggaggggagccggagagtggccctgatgagcgagctctgtggtgggtgcctgggctcagtctcggctcagcctcccggcgtcccacctggatgggctccatctctgtggtaaagggtcgtccctggggcattaatgctcttgctctgctggctggtgctggcatgcaaacgaggacgctcccatggggtttgaagtacatgatgctatcccacctgggagcaggggtcttcaccgtggatccctgttctgttctaaacaaggaagccggtgctcagagagggaaacggtcatgactaaagtctctcggccagagagcggtgcagctgtggttcctgcccagctcgggctgcctcggcacagagcctgaagcgaatgcaccaggagctttgtaagtagaaaaa

SEQ ID NO: 677451 - DNA, 912 bp, Homo sapiens
cacagagccagaaaggtgacagatacaagtaaccaaatcaaaacagggttcggtcagcagagccaccaggcggatgtgagtctagccagaggcactgggaggcaggcaggagaccccactcacttgttctggaaggcttccctgccccctagacctgagctcttccatccctggcacccaggcacgagatttcctttcttctttttttttttttttttttccctgagatggaatctcgctctgtcgcccaggctggagtgcagtggtgcgacctcggctcactataacctctacctcccggttcaagtgattctcctgcctcagcctcccaggtatctgggattacaggcacatgccaccatgctcggctaatttttttttgagacatcgtctcactctgtcacccaggctggagtgcagtggcatggtctcggctcactgcacctctgcctcccgggttcaagcgattctcctgcctcagcctcctgggtagctgggactacaggcgcatgccaccacacccagctaatttttgtatttttagtagagatggggcttcactacattggccaggctggtctcaaactcctgacctcgtgatatgcctgcctcagcctcccaaagtgctgggattacaggcrtgagccaccacactcagccacttggctaatttttttgtatttttattagagatggggttttgccatgttggccaggctggttcgaactcctgacctcaggtgatccacctgccttggcctcccaaagtggtaagattacaggtgtgagccaccgcacccggccacaagatttcattttaactgggcgcaggggtgggggatgccaatggtttgtttcattaagtagggtggtaaaaaataataatattaccaccactactcccaccattca

SEQ ID NO: 677452 - DNA, 1882 bp, Homo sapiens
acatatgtgccgatggaactctgggcttaggggttccacaccatttatcatagtacgtggtactgtggttgcctggtttcatattctcctcccctaccagactctaagatactctgaaggccagaaacgtctaccttttgttcactactatatccactatcattcctagcacatagtatgaacatggaatattcatttttggaaaaagtgaatgtattaatgaatgagtgagtaagtgaatagtctaccttagaagctaggcatgcctaattcttagaagcatttactctgaagtaaagcaggggtgtttcatataatgaaaacatcggagtgtaatcactcagtactttaagcaaaagacaggtcttaatgctgcttgtgttttcagagttcaaaactctgaaagcatgaagatagtagaaagttaaatatatccaataacagggtattaaatatgttaatgtcttaaatacacaatttgcaaataaacagaagtaagttgaaattaagggagacaattaaaatagattataccacatttcctgaacttggttcccaaagatcagattcagatgttgcttttattcataagctttgaaaaagtaaataaaacattctgcacactgctcaccataaatcttaactcaccattcaaatttaatctaaacacaaacataaacctaaaacctcctccagtcccacaaatactcagacaaccaaaatctgatttccaggacaaaaatgttactctacaagtacaatatttatgctgaagagataaattatgcaaatcacaatggtttatgcttatgttatagctacgcttacgcttctgcatacgacaagtttcaagagtctacaaatttacataaagctcaggttgtctaatgattaaacaattttactatttaggacagttttaatattgatttagctttaagatatatttgggaacagcttcaaatgatatgcactgctttacattattgacttagcacttgatcacagtatctctataacaatctcaaaaattaattcacaaattaaacctctacttcatttaaaccactattatattcacctttcttccatgctgtctagaaatattttttcttaagtaatttcaatgaaatcgcaaagctatatttaaactagatcaatcatccctaacctttggctaactgacaacccaattagccaaaactgtattggtaaattttccaaatgtaagttttaaaattcttttatatttttaaaatatcgatacatatatgaaaatgttggaagattttagaataattgaaatttcaagcaaagtaattagtgacacctcaattaacagtggaatascatccgatttttccagtgaatttgggaaaaaggcaaaatttctgcttaaaacaagaaaaaaaattcctattcaaggaatggaggaaagcatcacatgaataagaaacaaacatgactatcttcttagtcaaaaagactttcctgccacactgctgtagcactggagattctgggagcacagtcccagccctggagttgctcacaatgtagcagggaagacagctgtgcaaacagataattagggttcagagtattcaggggatgttgccctaaggtctttgcagtagtctggtgctacttttttaactatttaccactactactactatactaccactactaaaagtaaataaagtattttcaagaatttctaaatctagtttggagcgctatacaaatgtacaaataattgtcccacaagggacaaagtaataagtgccttaagaaaaagactgcaaaataagaggtattcctgggaaacaatatggataggacacaatatcaaaagagtgtcagaaagagatggaggtag

SEQ ID NO: 677453 - DNA, 1331 bp, Homo sapiens
tagaacaacaagacttatatttagggtatggttaaaaccaagtgaaatagtaagtagaagcaaatacagtaagagcaaaccaaaaggcatgggaataataaataccaaaatcagaatagtgcttaaggatggaaaatggggaaaggcagatagggagattgacagtgactgacacagtataatttaaatggtaactctagtcttcagatgtgtttgtacattattagttcctaaactcgggtcaatgagtgttcaacataacattcatgtatatttgtggctaaaatattttattaggctttgtgtcataagagtgaatgtctttgtagactgataggtatacagaatccatattgcagaggagttaagaagtaagcaaattgtgaagacaaagaagcagaaaagataaaacattctttggagaaattctgcaaagaaaacaagtaagagaaacgtggtctgaaaagttagaggagctcagacaggttgtgttcataagttggcagtttgtttttcactacagggaaaaaagagactatcacaggcaaaggggatgaagccaagagagaaaacgatattgaagatctaagccagagggaaaatggtatgaaagggtccgaggagagaatatgatcaagagcacaaatgaaaagggtgcccctggagggagaaaaaagaaaccctttttttccctcagaaaccaaaggtaagagatacagaaaaaaaatctgtggttaagaaatacatatattaaaactgctcatgttagaaaaccaatttattaccaattttttccactaaactgtacacttcttaaaagagacagaatttatctttccyaattcagggtctaacagggtgctcaataaataacagctacatgaacaaaataatcatctgaggaaagttaaagatggggctatctgctaagggagacatgataggaaggaatcgaggagtactagaaggaagaaaacattgggtccaactggaaagggtaaaatgaaactctgctataatcccagcactttgggaagccgaggtgggcggatcacctgaggtcaggagttcgagaccagcctgaccaacatggagaaaccccgtttctactaaaaatacaaaattagccaggtatggtggtgcatgcctgtaataccaactactcaggaggctgaggcaggagaatcacttgaacctgggaggtggaggttgcggtgagccgagatcacgccactgcactccagcctgggcaacaacagcgaaactccatttcaaaaaaaaaaaatgaaactctgaatcagtaagaaatgagtaacagaaatggcaaatag

SEQ ID NO: 677454 - DNA, 1331 bp, Homo sapiens
tagaacaacaagacttatatttagggtatggttaaaaccaagtgaaatagtaagtagaagcaaatacagtaagagcaaaccaaaaggcatgggaataataaataccaaaatcagaatagtgcttaaggatggaaaatggggaaaggcagatagggagattgacagtgactgacacagtataatttaaatggtaactctagtcttcagatgtgtttgtacattattagttcctaaactcgggtcaatgagtgttcaacataacattcatgtatatttgtggctaaaatattttattaggctttgtgtcataagagtgaatgtctttgtagactgataggtatacagaatccatattgcagaggagttaagaagtaagcaaattgtgaagacaaagaagcagaaaagataaaacattctttggagaaattctgcaaagaaaacaagtaagagaaacgtggtctgaaaagttagaggagctcagacaggttgtgttcataagttggcagtttgtttttcactacagggaaaaaagagactatcacaggcaaaggggatgaagccaagagagaaaacgatattgaagatctaagccagagggaaaatggtatgaaagggtccgaggagagaatatgatcaagagcacaaatgaaaagggtgcccctggagggagaaaaaagaaaccctttttttccctcagaaaccaaaggtaagagatacagaaaaaaaatctgtggttaagaaatacatatattaaaactgctcatgttagaaaaccaatttattaccaattttttccactaaactgtacacttcttaaaagagacagaatttatctttcctaattcagggtctaacagggtgctcaataaayaacagctacatgaacaaaataatcatctgaggaaagttaaagatggggctatctgctaagggagacatgataggaaggaatcgaggagtactagaaggaagaaaacattgggtccaactggaaagggtaaaatgaaactctgctataatcccagcactttgggaagccgaggtgggcggatcacctgaggtcaggagttcgagaccagcctgaccaacatggagaaaccccgtttctactaaaaatacaaaattagccaggtatggtggtgcatgcctgtaataccaactactcaggaggctgaggcaggagaatcacttgaacctgggaggtggaggttgcggtgagccgagatcacgccactgcactccagcctgggcaacaacagcgaaactccatttcaaaaaaaaaaaatgaaactctgaatcagtaagaaatgagtaacagaaatggcaaatag

SEQ ID NO: 677455 - DNA, 656 bp, Homo sapiens
ctacaggagtgtgagctggcacagccaatgctaaatgtatyccacatggttattagccagtaagttttgaaaaagggagagaaaatctgacacttagggtttctaaatgaatacagtgcactacattcactctcagttatgattctggatgcacagtttaatatgattaaaacttacagaactgcacagagcctaatgtcaggatgtttccatgtccctcaacatcatatgaatatcccaggtcaaatataacatgacactaaaggtctggaagcaaagtagatgacctgaaactgtgtattttaacagatctcattgactcttcttttcaatgactgtgggacaaacacagcagtttgaatagtaacaatggctgttaaggtaaagcttaatcccaaatgtgtaagcataaaactacattcttcaaaaagattttagagtatattttattaaatcctgaaatgcatgtcctggtaaatttctatataaatttgatttacaaattccagtgaaaatgtgccacagctggcagaataaattactgcaataaatcattattaaataactgtaaatctttgtaatgacataaagcctaacttttaaaagtatgcagaagtcaacatttggttcaagaaaagcactcttcacacgggaaa

SEQ ID NO: 677456 - DNA, 656 bp, Homo sapiens
ctacaggagtgtgagctggcacagccaatgctaaatgtattccacatggttattagccagtaagttttgaaaaagggagagaaaatctgacacttagggtttctaaatgaatacagtgcactacattcactctcagttatgattctggatgcacagtttaatatgattaaaacttacagaactgcacagagcctaatgtcaggatgtttccatgtccctcaacatcatatgaatatcccaggtcaaatataacatgacactaaaggtctggaagcaaagtagatgacctgaaactgtgtattttaacagatctcattgactcttcttttcaatgactgtgggacaaacacagcagtttgaatagtaamaatggctgttaaggtaaagcttaatcccaaatgtgtaagcataaaactacattcttcaaaaagattttagagtatattttattaaatcctgaaatgcatgtcctggtaaatttctatataaatttgatttacaaattccagtgaaaatgtgccacagctggcagaataaattactgcaataaatcattattaaataactgtaaatctttgtaatgacataaagcctaacttttaaaagtatgcagaagtcaacatttggttcaagaaaagcactcttcacacgggaaa

SEQ ID NO: 677457 - DNA, 582 bp, Homo sapiens
actgataatttaacatagtatatagggtcattcaaagccctaggaatcccgcaaaagccaaagcaagatatttctatagagacattgagagaccatctcctcttggttgttgcaaaggcacttttagctmaaagggaaatcattcctgcctaccaagcctgttcatctgccaatgcaccctactcacaaatggcaccacttcccattaaggcacatgagttgtccctgacacccccataccaattcatcactaaggctaattaattttactttctaaatatctgcccactctgtccatttccaaaacctcatcctagttcaaaccactatcatctctcaccagtctcctaactggtctaccctgcatccactctatcaggtggtaccatataaaattgctatcttgtaagtcaaaaccagcctggaagtggcagttccatagcattcaacctaatatttcctcccatctgatgtcctcactccagatagagttaccttttcatgaaggaaattttatcatgttgcacctacccctcgctgaaatcttctgtggctttcccgctattcttaagatgataaagt

SEQ ID NO: 677458 - DNA, 582 bp, Homo sapiens
actgataatttaacatagtatatagggtcattcaaagccctaggaatcccgcaaaagccaaagcaagatatttctatagagacattgagagaccatctcctcttggttgttgcaaaggcacttttagctaaaagggaaatcattcctgcctaccaagcctgttcatctgccaatgcaccctactcacaaatggcaccacttcccattaaggcacatgagttgtccctgacayccccataccaattcatcactaaggctaattaattttactttctaaatatctgcccactctgtccatttccaaaacctcatcctagttcaaaccactatcatctctcaccagtctcctaactggtctaccctgcatccactctatcaggtggtaccatataaaattgctatcttgtaagtcaaaaccagcctggaagtggcagttccatagcattcaacctaatatttcctcccatctgatgtcctcactccagatagagttaccttttcatgaaggaaattttatcatgttgcacctacccctcgctgaaatcttctgtggctttcccgctattcttaagatgataaagt

SEQ ID NO: 677459 - DNA, 582 bp, Homo sapiens
actgataatttaacatagtatatagggtcattcaaagccctaggaatcccgcaaaagccaaagcaagatatttctatagagacattgagagaccatctcctcttggttgttgcaaaggcacttttagctaaaagggaaatcattcctgcctaccaagcctgttcatctgccaatgcaccctactcacaaatggcaccacttcccattaaggcacatgagttgtccctgacacccccataccaattcatcactaaggctaattaattttactttctaaatatctgcccactctgtccatttccaaaacctcatcctagttcaaaccactatcatctctcaccagtctcctaactggtctaccctgcatccactctatcaggtggtaccatataraattgctatcttgtaagtcaaaaccagcctggaagtggcagttccatagcattcaacctaatatttcctcccatctgatgtcctcactccagatagagttaccttttcatgaaggaaattttatcatgttgcacctacccctcgctgaaatcttctgtggctttcccgctattcttaagatgataaagt

SEQ ID NO: 677460 - DNA, 582 bp, Homo sapiens
actgataatttaacatagtatatagggtcattcaaagccctaggaatcccgcaaaagccaaagcaagatatttctatagagacattgagagaccatctcctcttggttgttgcaaaggcacttttagctaaaagggaaatcattcctgcctaccaagcctgttcatctgccaatgcaccctactcacaaatggcaccacttcccattaaggcacatgagttgtccctgacacccccataccaattcatcactaaggctaattaattttactttctaaatatctgcccactctgtccatttccaaaacctcatcctagttcaaaccactatcatctctcaccagtctcctaactggtctaccctgcatccactctatcaggtggtaccatataaaattgctatcttgtaagtcaaaaccagcctggaagtggcarttccatagcattcaacctaatatttcctcccatctgatgtcctcactccagatagagttaccttttcatgaaggaaattttatcatgttgcacctacccctcgctgaaatcttctgtggctttcccgctattcttaagatgataaagt

SEQ ID NO: 677461 - DNA, 594 bp, Homo sapiens
cattccataaggagggacgtgtagttctacttagttgttactttttacatccttacacattataaagccatgtgtctgtggattatcttttgttagccacaagatggtaccattgcacaacctagagagagcatcagtcagctgaaaacatcttcagaaagattaatcttcaatgtagcacaaacacagaagaaacsttacatttatattataaaacagtcgcaaattgttttcatccttcattaaaggtataaaggaaacttgtatatactataatttgatatatcccttttctctctgtacccacactctcaacctgaaaaaagccaaagttctgtttgttccacgagaactttgtgatctcctttacttctactgaaggagatatttgtcattctgatgttgggagttcattagacttgattgtaactccccttcccttcaaacctcttttgaacgaggctgattataggaggtcagcactcctgaaagaattccaaattcatttttgcaaagtgggaaatgactaagaacagtgggttctgtcaggataagataggatttgcatttaagatcaagcagagagcaatcaaa

SEQ ID NO: 677462 - DNA, 666 bp, Homo sapiens
  misc_feature 488, 489, 490, 491, 492, 493, 494, 495, 496, 497, 498, 499,500, 501, 502, 503, 504, 505, 506, 507, 508, 509, 510, 511,512, 513, 514, 515, 516, 517, 518, 519, 520, 521, 522, 523,524, 525, 526, 527, 528, 529, 530, 531, 532, 533, 534: n = A,T,C or G
  misc_feature 535, 536, 537, 538, 539, 540, 541, 542, 543, 544, 545, 546,547, 548, 549, 550, 551, 552, 553, 554, 555, 556, 557, 558,559, 560, 561, 562, 563, 564, 565, 566, 567, 568, 569, 570,571, 572, 573, 574, 575, 576, 577, 578, 579, 580, 581: n = A,T,C or G
  misc_feature 582, 583, 584, 585, 586, 587: n = A,T,C or G
ggtgctggcatccaattagaaggcagtatcactgaagcagtttcaacaagcaggtccttctctgcccttcagtagcaaaattaaatagaggaatacaggtggacagatttcgtgtatccsccaaaagcatcaccattacctattccattcgttgcaagatgtgaaatgtaactgttaaaaaggtgcccatgtatgaagtaaattgttcaatagtcacagtttgaaaattacattttcggccaggcgcggtggctcacacctgtaatcccagcactgtgggaggccgaggcaggcagatcacgaggtcaggaatttgagaccagcctagccaacatggtaaaaccccgtctctactaaaaatacaaaaattaactgggcgtggttgtgcgcatctgtaatcccagctactcgggagactgaggcaggagaattgcttgaacccaggaggtggaggttgcatgagccgagatcgtgccattgcactacannnnnnnnnnnnnnnnnnnnnnnnnnnnnnnnnnnnnnnnnnnnnnnnnnnnnnnnnnnnnnnnnnnnnnnnnnnnnnnnnnnnnnnnnnnnnnnnnnnntaacaaaaactcattaatttctaagtgttaggaagtatttttttagctcccaaaggataacttggccagggagtttgca

SEQ ID NO: 677463 - DNA, 1038 bp, Homo sapiens
attgactcagaatctctggtgtgaggcccggaaatctgcatagttaacaagttctcctatgtgattctgattatgcaaaagtgtgagatgtactgatagaaatctttgtcttcagctctgacrtttaaatttttatcttctttggtgcttttgaaaatatttttgttgttaacaatactctgttgtcacctgacttccttgatgggcagtaataatttgaagtttgcccccttatttctgaaatcattttgcttagagccaattgttatctttgtgtatgtgtgtgtgacagagatttttattacatataatagaagatttcaaataacagcagagagttatttaaaaaagaaacagttaaatacatgtctaattagcaggcaagaaggcaaatttattctgttagaacttcttaaggaagagtcaataatgaaccaattataattccttctcctagctgtatacagccaagatgccttctaggtttgaaaccttgtcccacaatgctccggtggaatagagcagatattgatgcactacagatagtgaaaatgagactcagaaagagtaggtgacttgtggatggtaacataactagttacttgcaaaggcaagaattggaacccaagtcctcctgggggtctttcactctgtctgcctctaagaccagacctcctttttttttggtttgatgtctatgctaaaacacatacagatgcatacacacacatacactcctattctttgcaatataatatgatgtgtgtcaaatattggtcctttttgcacctgtcttttgcaaaagcaaagtgagctcctttcttcaagagcaaaaagatatttgaaaatacctctgtcattgctagggacactgcgaatgaatatgttttattccctgagtggtgctgactgcaaatggagcgggatggtgtacactgaagtgaagcaaatagtcatgataatttcaaggtccactgaaacagcagaaaacaagtcaactgccaccaaacaatggcaatgaaataactcaaggtttag

SEQ ID NO: 677464 - DNA, 1038 bp, Homo sapiens
attgactcagaatctctggtgtgaggcccggaaatctgcatagttaacaagttctcctatgtgattctgattatgcaaaagtgtgagatgtactgatagaaatctttgtcttcagctctgacatttaaatttttatcttctttggtgcttttgaaaatatttttgttgttaacaatactctgttktcacctgacttccttgatgggcagtaataatttgaagtttgcccccttatttctgaaatcattttgcttagagccaattgttatctttgtgtatgtgtgtgtgacagagatttttattacatataatagaagatttcaaataacagcagagagttatttaaaaaagaaacagttaaatacatgtctaattagcaggcaagaaggcaaatttattctgttagaacttcttaaggaagagtcaataatgaaccaattataattccttctcctagctgtatacagccaagatgccttctaggtttgaaaccttgtcccacaatgctccggtggaatagagcagatattgatgcactacagatagtgaaaatgagactcagaaagagtaggtgacttgtggatggtaacataactagttacttgcaaaggcaagaattggaacccaagtcctcctgggggtctttcactctgtctgcctctaagaccagacctcctttttttttggtttgatgtctatgctaaaacacatacagatgcatacacacacatacactcctattctttgcaatataatatgatgtgtgtcaaatattggtcctttttgcacctgtcttttgcaaaagcaaagtgagctcctttcttcaagagcaaaaagatatttgaaaatacctctgtcattgctagggacactgcgaatgaatatgttttattccctgagtggtgctgactgcaaatggagcgggatggtgtacactgaagtgaagcaaatagtcatgataatttcaaggtccactgaaacagcagaaaacaagtcaactgccaccaaacaatggcaatgaaataactcaaggtttag

SEQ ID NO: 677465 - DNA, 1038 bp, Homo sapiens
attgactcagaatctctggtgtgaggcccggaaatctgcatagttaacaagttctcctatgtgattctgattatgcaaaagtgtgagatgtactgatagaaatctttgtcttcagctctgacatttaaatttttatcttctttggtgcttttgaaaatatttttgttgttaacaatactctgttgtcacctgacttccttgatgggcagtaataatttgaagtttgcccccttatttctgaaatcattttgcttagagccaattgttatctttgtgtatgtgtgtgtgacagagatttttattacatataatagaagatttcaaataacagcagagagttatttaaaaaagaaacagttaaatacatgtctaattagcaggcaagaaggcaaatttattctgttagaacttcttaaggaagagtcaataatgaaccaattataattccttctcctagctgtatacagccaagatgccttctaggtttgaaaccttgtcccacaatgctcckgtggaatagagcagatattgatgcactacagatagtgaaaatgagactcagaaagagtaggtgacttgtggatggtaacataactagttacttgcaaaggcaagaattggaacccaagtcctcctgggggtctttcactctgtctgcctctaagaccagacctcctttttttttggtttgatgtctatgctaaaacacatacagatgcatacacacacatacactcctattctttgcaatataatatgatgtgtgtcaaatattggtcctttttgcacctgtcttttgcaaaagcaaagtgagctcctttcttcaagagcaaaaagatatttgaaaatacctctgtcattgctagggacactgcgaatgaatatgttttattccctgagtggtgctgactgcaaatggagcgggatggtgtacactgaagtgaagcaaatagtcatgataatttcaaggtccactgaaacagcagaaaacaagtcaactgccaccaaacaatggcaatgaaataactcaaggtttag

SEQ ID NO: 677466 - DNA, 1023 bp, Homo sapiens
cctctatccagagaacacccaccccagtcctgtgactgtctatttatgtatatgttccctctagccctgcactggttttggtgggggccaggccctgggtctgatccccaagtgaaaccctggtggatgcagggactcaacaaaggcctgtgtctagggggagcttagggggcctaaggctctaggtgcataagaaacgatgaggatgatggggacacgtccgtaacagaatgccaggggctgggtagagagatcagaaaaccacagacctctagtcyagtcttgaaattagaattaaaagcagatgggaggaggccagacttcagtttgccatggtaacactggctcctccctttgggatgtggagttaaggaggcccctgcttttcaccttttcaccctgggtgtaaaaggatcacgactgtgattgtcaacatgcaccgaaaggtgcttctttagggccagccgctgttcttgctggagtgtgtcatctcacctcatgcatgtcatctcacttcaggccccagccctggaaggggggtctatttctgtccccattttttcaggtgaagaaactgaagctcagagaagttaagggcctagctcaaggtcacacagctggtgagtggcagagttgggatctgcttgcagatctggctggctctaaatacctgcctgtgaccctgtccgcctctcctggacctgaggggtttcagtcaacagtgctgagttccagagcttgggctgagaaagagagtaggctccggcctcatagggtctggctttccactcacttctattaaaggagacaaaacaaaccattacagtgctggtccaggttgactccagctactgaaggggaagctgtgtccttcgaatgcctccaggaggctgccgtgggggagtcggggggcggcaggggaggaattgttaccagaatctgatgggcaccatggctggaaggggaatttccagggcctttggaactggggtggggagagaggatggcaatgggcaattcctg

SEQ ID NO: 677467 - DNA, 1023 bp, Homo sapiens
cctctatccagagaacacccaccccagtcctgtgactgtctatttatgtatatgttccctctagccctgcactggttttggtgggggccaggccctgggtctgatccccaagtgaaaccctggtggatgcagggactcaacaaaggcctgtgtctagggggagcttagggggcctaaggctctaggtgcataagaaacgatgaggatgatggggacacgtccgtaacagaatgccaggggctgggtagagagatcagaaaaccacagacctctagtccagtcttgaaattagaattaaaagcagatgggaggaggccagacttcagtttgccatggtaacactggctcctccctttgggatgtggagttaaggaggcccctgcttttcaccttttcaccctgggtgtaaaaggatcacgactgtgattgtcaacatgcaccgaaaggtgcttctttagggccagccgctgttcttgctggagtgtgtcatctcacctcatgcatgtcatctcacttcaggccmcagccctggaaggggggtctatttctgtccccattttttcaggtgaagaaactgaagctcagagaagttaagggcctagctcaaggtcacacagctggtgagtggcagagttgggatctgcttgcagatctggctggctctaaatacctgcctgtgaccctgtccgcctctcctggacctgaggggtttcagtcaacagtgctgagttccagagcttgggctgagaaagagagtaggctccggcctcatagggtctggctttccactcacttctattaaaggagacaaaacaaaccattacagtgctggtccaggttgactccagctactgaaggggaagctgtgtccttcgaatgcctccaggaggctgccgtgggggagtcggggggcggcaggggaggaattgttaccagaatctgatgggcaccatggctggaaggggaatttccagggcctttggaactggggtggggagagaggatggcaatgggcaattcctg

SEQ ID NO: 677468 - DNA, 1023 bp, Homo sapiens
cctctatccagagaacacccaccccagtcctgtgactgtctatttatgtatatgttccctctagccctgcactggttttggtgggggccaggccctgggtctgatccccaagtgaaaccctggtggatgcagggactcaacaaaggcctgtgtctagggggagcttagggggcctaaggctctaggtgcataagaaacgatgaggatgatggggacacgtccgtaacagaatgccaggggctgggtagagagatcagaaaaccacagacctctagtccagtcttgaaattagaattaaaagcagatgggaggaggccagacttcagtttgccatggtaacactggctcctccctttgggatgtggagttaaggaggcccctgcttttcaccttttcaccctgggtgtaaaaggatcacgactgtgattgtcaacatgcaccgaaaggtgcttctttagggccagccgctgttcttgctggagtgtgtcatctcacctcatgcatgtcatctcacttcaggccccagccctggaaggggggtctatttctgtccccattttttcaggtgaagaaactgaagctcagagaagttaagggcctagctcaaggtcacacagctggtgagtggcagagttgggatctgcttgcagatctggctggctctaaatacctgcctgtgaccctgtccgcctctcctggacctgaggggtttcagtcaacagtgctgagttccagagcttgggctgagaaagagagtaggctccggcctcatagggtctggctttccactcacttctattaaaggagacaaaacaaaccattacagtgctggyccaggttgactccagctactgaaggggaagctgtgtccttcgaatgcctccaggaggctgccgtgggggagtcggggggcggcaggggaggaattgttaccagaatctgatgggcaccatggctggaaggggaatttccagggcctttggaactggggtggggagagaggatggcaatgggcaattcctg

SEQ ID NO: 677469 - DNA, 1023 bp, Homo sapiens
cctctatccagagaacacccaccccagtcctgtgactgtctatttatgtatatgttccctctagccctgcactggttttggtgggggccaggccctgggtctgatccccaagtgaaaccctggtggatgcagggactcaacaaaggcctgtgtctagggggagcttagggggcctaaggctctaggtgcataagaaacgatgaggatgatggggacacgtccgtaacagaatgccaggggctgggtagagagatcagaaaaccacagacctctagtccagtcttgaaattagaattaaaagcagatgggaggaggccagacttcagtttgccatggtaacactggctcctccctttgggatgtggagttaaggaggcccctgcttttcaccttttcaccctgggtgtaaaaggatcacgactgtgattgtcaacatgcaccgaaaggtgcttctttagggccagccgctgttcttgctggagtgtgtcatctcacctcatgcatgtcatctcacttcaggccccagccctggaaggggggtctatttctgtccccattttttcaggtgaagaaactgaagctcagagaagttaagggcctagctcaaggtcacacagctggtgagtggcagagttgggatctgcttgcagatctggctggctctaaatacctgcctgtgaccctgtccgcctctcctggacctgaggggtttcagtcaacagtgctgagttccagagcttgggctgagaaagagagtaggctccggcctcatagggtctggctttccactcacttctattaaaggagacaaaacaaaccattacagtgctggtccaggttgactccagctactgaaggggaagctgtgtccttcgaatgcctccaggaggctgccrtgggggagtcggggggcggcaggggaggaattgttaccagaatctgatgggcaccatggctggaaggggaatttccagggcctttggaactggggtggggagagaggatggcaatgggcaattcctg

SEQ ID NO: 677470 - DNA, 2652 bp, Homo sapiens
cccacatccaggtgagagatggcagtggggagaagtgcacagagccaagatcttggtccagctgctctctgagtccaggttttgtcctctgtaaagtgggctgtaatttctaccttgcaatgaggatgaagtaagaaaatgaatataaagcacttggtaggtgcctggcacataaggagtactcagcaaatggcagctgtgattcctcatcttatcatcttattattagaaagcacagaggacctgtccccctgccctcgctgtgggcttccagtggtctgtgccactcggggccaagctcacagatggcgcccagagctcgtggaggcacagatgttctcgcttttgttctcagaggccctggagccctcaggtgcccccatgctcctcaatttacactcaaggtctccccaggcataagcactcttagggaattggtgcctgggaggaccttgccaaggttttctctcctcctagatactgcaaggagctgaggcagacacccagccacacaggcttgccaaggacgttcatgatcttgtagagatggggaaactgaggctcgggacagtacatcacacactgagtagcagtgctgggatttgagaccaccctgactcccaaaactgtgctttttaattttttgatccgaggttcagaaacttgagttaatcacacatctcagttcccggcagactattcatgcaggatccgtctcctgacttgttattactaaaaaatcgatacatgtcaatcattcccagagccttattttgcacccggctcagtgacagggcccgcgcgggcgcatccacaggtggttcagcggcaggtcctatccttggggagcatgtgagctggtgacagtcaactctgggcaaagaacttccactctcctgcccggaagtgctgatttaaggaatttatccaagaaaaacaaggacgagggtctataaaggtgtttgcatcagactaataataaagatttcatgcccttcagtgaggaataaatgcattatgatatatcagtccagtggaacattatgtatctattaaaactggtggcaagagcattcctttattgatgtggaaagatggctacactttgttattcagatttttaaaaaaataggtcatataacagtattcatagagatttccattttgaaaaacatagataatacatgcatatattttctttattctaagatgcacattttttaacatttgaacatttctaaaatcaggatgtgcattgcaattaatggatatgtttaatgcatagttcttttctccaaaagagccgtgtaattaaatcagtgatgcatcccccagtcagtgttgtcccagaatcaagaaaaacatatatatacgtacacacataggacaaattccagaaagacagcaaccaaaatgctaaaagtcattaaatctaggtgatttccactttcttcatcaaccttctgtactgtctgggttttataaactgaacacgaattatttttataattagaaaaaaatcccccatttccatattgaaaaacaaaacaaagtctcaggtcaaaaaaagtccaagcttctcatacacagcaggccagaatactcgctaaacagagccccagaagcaggggacgggaaccaaggggacttggcagcctggttgtaaaggagctgggcttcctaacacaggagggatctgggtagatggggaacaggtttagaccctgcaagccgaggagacagtctaaaaggaggcctggggatccagagcattcccttagggtctggagggaaatagtgtgaccgaggccaggcagatggcagtggtggtagttagaataacaaccctagctgacatttattgagtgcttactctgtgctgggtactgctctaagcatttcatacgcatttccttatcgtaacagactgccttgtatccccgcaagatgcatatgttgatgtcctaacccccagtgtcttagagtgtgatcgcatctggagataaggtctttaaagaggtgataaggttgaaatgaaatcactagggtggaccctaatccagtataagtggagactttataagaagaggagattaggacacacacatcaacagacagaagawcaggcaaaagcacaaggaggagaagacggccatccacaagccaggaagagagacctcagaaggaaccaacccctgctggcaccttgacctcagccttctagccttcagaagagtgagaaaatacatttctgttgtttaagacccccaatctgttgctcttcgtgatgacagccctagcaaactaatatacttccttaccccacaacaaccccgtgggggtggttgtttcagttatctcttgctgcgtaacaagctgccccaacactttgtagctcaagatatcaataataatttgctttgctctggagcttggcaaggtcagcttatctacactctgcattgctgggcagacgacattcaggatggctcatgcatgtgactcacatgacaagctggtgctgtgagccagacacttattgtggcctctccatgtggctgctcggcctcctcacagcatggccactggaatccaacagtgggcatcccaagagaacccgatgaagtacgtggcattcttaagaccgaacct

SEQ ID NO: 677471 - DNA, 2652 bp, Homo sapiens
cccacatccaggtgagagatggcagtggggagaagtgcacagagccaagatcttggtccagctgctctctgagtccaggttttgtcctctgtaaagtgggctgtaatttctaccttgcaatgaggatgaagtaagaaaatgaatataaagcacttggtaggtgcctggcacataaggagtactcagcaaatggcagctgtgattcctcatcttatcatcttattattagaaagcacagaggacctgtccccctgccctcgctgtgggcttccagtggtctgtgccactcggggccaagctcacagatggcgcccagagctcgtggaggcacagatgttctcgcttttgttctcagaggccctggagccctcaggtgcccccatgctcctcaatttacactcaaggtctccccaggcataagcactcttagggaattggtgcctgggaggaccttgccaaggttttctctcctcctagatactgcaaggagctgaggcagacacccagccacacaggcttgccaaggacgttcatgatcttgtagagatggggaaactgaggctcgggacagtacatcacacactgagtagcagtgctgggatttgagaccaccctgactcccaaaactgtgctttttaattttttgatccgaggttcagaaacttgagttaatcacacatctcagttcccggcagactattcatgcaggatccgtctcctgacttgttattactaaaaaatcgatacatgtcaatcattcccagagccttattttgcacccggctcagtgacagggcccgcgcgggcgcatccacaggtggttcagcggcaggtcctatccttggggagcatgtgagctggtgacagtcaactctgggcaaagaacttccactctcctgcccggaagtgctgatttaaggaatttatccaagaaaaacaaggacgagggtctataaaggtgtttgcatcagactaataataaagatttcatgcccttcagtgaggaataaatgcattatgatatatcagtccagtggaacattatgtatctattaaaactggtggcaagagcattcctttattgatgtggaaagatggctacactttgttattcagatttttaaaaaaataggtcatataacagtattcatagagatttccattttgaaaaacatagataatacatgcatatattttctttattctaagatgcacattttttaacatttgaacatttctaaaatcaggatgtgcattgcaattaatggatatgtttaatgcatagttcttttctccaaaagagccgtgtaattaaatcagtgatgcatcccccagtcagtgttgtcccagaatcaagaaaaacatatatatacgtacacacataggacaaattccagaaagacagcaaccaaaatgctaaaagtcattaaatctaggtgatttccactttcttcatcaaccttctgtactgtctgggttttataaactgaacacgaattatttttataattagaaaaaaatcccccatttccatattgaaaaacaaaacaaagtctcaggtcaaaaaaagtccaagcttctcatacacagcaggccagaatactcgctaaacagagccccagaagcaggggacgggaaccaaggggacttggcagcctggttgtaaaggagctgggcttcctaacacaggagggatctgggtagatggggaacaggtttagaccctgcaagccgaggagacagtctaaaaggaggcctggggatccagagcattcccttagggtctggagggaaatagtgtgaccgaggccaggcagatggcagtggtggtagttagaataacaaccctagctgacatttattgagtgcttactctgtgctgggtactgctctaagcatttcatacgcatttccttatcgtaacagactgccttgtatccccgcaagatgcatatgttgatgtcctaacccccagtgtcttagagtgtgatcgcatctggagataaggtctttaaagaggtgataaggttgaaatgaaatcactagggtggaccctaatccagtataagtggagactttataagaagaggagattaggacacacacatcaacagacagaagaacaggcaaaagcacaaggaggagaagacggccatccacaagccaggaagagagacctcagaaggaaccaacccctgctggcaccttgacctcagccttctagccttcagaagagtgagaaaatacatttctgttgtttaagacccccartctgttgctcttcgtgatgacagccctagcaaactaatatacttccttaccccacaacaaccccgtgggggtggttgtttcagttatctcttgctgcgtaacaagctgccccaacactttgtagctcaagatatcaataataatttgctttgctctggagcttggcaaggtcagcttatctacactctgcattgctgggcagacgacattcaggatggctcatgcatgtgactcacatgacaagctggtgctgtgagccagacacttattgtggcctctccatgtggctgctcggcctcctcacagcatggccactggaatccaacagtgggcatcccaagagaacccgatgaagtacgtggcattcttaagaccgaacct

SEQ ID NO: 677472 - DNA, 2652 bp, Homo sapiens
cccacatccaggtgagagatggcagtggggagaagtgcacagagccaagatcttggtccagctgctctctgagtccaggttttgtcctctgtaaagtgggctgtaatttctaccttgcaatgaggatgaagtaagaaaatgaatataaagcacttggtaggtgcctggcacataaggagtactcagcaaatggcagctgtgattcctcatcttatcatcttattattagaaagcacagaggacctgtccccctgccctcgctgtgggcttccagtggtctgtgccactcggggccaagctcacagatggcgcccagagctcgtggaggcacagatgttctcgcttttgttctcagaggccctggagccctcaggtgcccccatgctcctcaatttacactcaaggtctccccaggcataagcactcttagggaattggtgcctgggaggaccttgccaaggttttctctcctcctagatactgcaaggagctgaggcagacacccagccacacaggcttgccaaggacgttcatgatcttgtagagatggggaaactgaggctcgggacagtacatcacacactgagtagcagtgctgggatttgagaccaccctgactcccaaaactgtgctttttaattttttgatccgaggttcagaaacttgagttaatcacacatctcagttcccggcagactattcatgcaggatccgtctcctgacttgttattactaaaaaatcgatacatgtcaatcattcccagagccttattttgcacccggctcagtgacagggcccgcgcgggcgcatccacaggtggttcagcggcaggtcctatccttggggagcatgtgagctggtgacagtcaactctgggcaaagaacttccactctcctgcccggaagtgctgatttaaggaatttatccaagaaaaacaaggacgagggtctataaaggtgtttgcatcagactaataataaagatttcatgcccttcagtgaggaataaatgcattatgatatatcagtccagtggaacattatgtatctattaaaactggtggcaagagcattcctttattgatgtggaaagatggctacactttgttattcagatttttaaaaaaataggtcatataacagtattcatagagatttccattttgaaaaacatagataatacatgcatatattttctttattctaagatgcacattttttaacatttgaacatttctaaaatcaggatgtgcattgcaattaatggatatgtttaatgcatagttcttttctccaaaagagccgtgtaattaaatcagtgatgcatcccccagtcagtgttgtcccagaatcaagaaaaacatatatatacgtacacacataggacaaattccagaaagacagcaaccaaaatgctaaaagtcattaaatctaggtgatttccactttcttcatcaaccttctgtactgtctgggttttataaactgaacacgaattatttttataattagaaaaaaatcccccatttccatattgaaaaacaaaacaaagtctcaggtcaaaaaaagtccaagcttctcatacacagcaggccagaatactcgctaaacagagccccagaagcaggggacgggaaccaaggggacttggcagcctggttgtaaaggagctgggcttcctaacacaggagggatctgggtagatggggaacaggtttagaccctgcaagccgaggagacagtctaaaaggaggcctggggatccagagcattcccttagggtctggagggaaatagtgtgaccgaggccaggcagatggcagtggtggtagttagaataacaaccctagctgacatttattgagtgcttactctgtgctgggtactgctctaagcatttcatacgcatttccttatcgtaacagactgccttgtatccccgcaagatgcatatgttgatgtcctaacccccagtgtcttagagtgtgatcgcatctggagataaggtctttaaagaggtgataaggttgaaatgaaatcactagggtggaccctaatccagtataagtggagactttataagaagaggagattaggacacacacatcaacagacagaagaacaggcaaaagcacaaggaggagaagacggccatccacaagccaggaagagagacctcagaaggaaccaacccctgctggcaccttgacctcagccttctagccttcagaagagtgagaaaatacatttctgttgtttaagacccccaatctgttgctcttcgtgatgacagccctagcaaactaatatacttccttaccccacaacaaccccgtgggggtggttgtttcagttatctcttgctgcgtaacaagctgccccaacactttgtagctcaagatatcaataataatttgctttgctctggagcttggcaaggtcagcttatctacactctgcattsctgggcagacgacattcaggatggctcatgcatgtgactcacatgacaagctggtgctgtgagccagacacttattgtggcctctccatgtggctgctcggcctcctcacagcatggccactggaatccaacagtgggcatcccaagagaacccgatgaagtacgtggcattcttaagaccgaacct

SEQ ID NO: 677473 - DNA, 2652 bp, Homo sapiens
cccacatccaggtgagagatggcagtggggagaagtgcacagagccaagatcttggtccagctgctctctgagtccaggttttgtcctctgtaaagtgggctgtaatttctaccttgcaatgaggatgaagtaagaaaatgaatataaagcacttggtaggtgcctggcacataaggagtactcagcaaatggcagctgtgattcctcatcttatcatcttattattagaaagcacagaggacctgtccccctgccctcgctgtgggcttccagtggtctgtgccactcggggccaagctcacagatggcgcccagagctcgtggaggcacagatgttctcgcttttgttctcagaggccctggagccctcaggtgcccccatgctcctcaatttacactcaaggtctccccaggcataagcactcttagggaattggtgcctgggaggaccttgccaaggttttctctcctcctagatactgcaaggagctgaggcagacacccagccacacaggcttgccaaggacgttcatgatcttgtagagatggggaaactgaggctcgggacagtacatcacacactgagtagcagtgctgggatttgagaccaccctgactcccaaaactgtgctttttaattttttgatccgaggttcagaaacttgagttaatcacacatctcagttcccggcagactattcatgcaggatccgtctcctgacttgttattactaaaaaatcgatacatgtcaatcattcccagagccttattttgcacccggctcagtgacagggcccgcgcgggcgcatccacaggtggttcagcggcaggtcctatccttggggagcatgtgagctggtgacagtcaactctgggcaaagaacttccactctcctgcccggaagtgctgatttaaggaatttatccaagaaaaacaaggacgagggtctataaaggtgtttgcatcagactaataataaagatttcatgcccttcagtgaggaataaatgcattatgatatatcagtccagtggaacattatgtatctattaaaactggtggcaagagcattcctttattgatgtggaaagatggctacactttgttattcagatttttaaaaaaataggtcatataacagtattcatagagatttccattttgaaaaacatagataatacatgcatatattttctttattctaagatgcacattttttaacatttgaacatttctaaaatcaggatgtgcattgcaattaatggatatgtttaatgcatagttcttttctccaaaagagccgtgtaattaaatcagtgatgcatcccccagtcagtgttgtcccagaatcaagaaaaacatatatatacgtacacacataggacaaattccagaaagacagcaaccaaaatgctaaaagtcattaaatctaggtgatttccactttcttcatcaaccttctgtactgtctgggttttataaactgaacacgaattatttttataattagaaaaaaatcccccatttccatattgaaaaacaaaacaaagtctcaggtcaaaaaaagtccaagcttctcatacacagcaggccagaatactcgctaaacagagccccagaagcaggggacgggaaccaaggggacttggcagcctggttgtaaaggagctgggcttcctaacacaggagggatctgggtagatggggaacaggtttagaccctgcaagccgaggagacagtctaaaaggaggcctggggatccagagcattcccttagggtctggagggaaatagtgtgaccgaggccaggcagatggcagtggtggtagttagaataacaaccctagctgacatttattgagtgcttactctgtgctgggtactgctctaagcatttcatacgcatttccttatcgtaacagactgccttgtatccccgcaagatgcatatgttgatgtcctaacccccagtgtcttagagtgtgatcgcatctggagataaggtctttaaagaggtgataaggttgaaatgaaatcactagggtggaccctaatccagtataagtggagactttataagaagaggagattaggacacacacatcaacagacagaagaacaggcaaaagcacaaggaggagaagacggccatccacaagccaggaagagagacctcagaaggaaccaacccctgctggcaccttgacctcagccttctagccttcagaagagtgagaaaatacatttctgttgtttaagacccccaatctgttgctcttcgtgatgacagccctagcaaactaatatacttccttaccccacaacaaccccgtgggggtggttgtttcagttatctcttgctgcgtaacaagctgccccaacactttgtagctcaagatatcaataataatttgctttgctctggagcttggcaaggtcagcttatctacactctgcattgctgggcagacgacattcaggatggctcatgcatgtgactcacatgacaagctggtgctgtgagccagacacttattgtggcctctccatgtggctgctcggcctcctcacagcatggccactggawtccaacagtgggcatcccaagagaacccgatgaagtacgtggcattcttaagaccgaacct

SEQ ID NO: 677474 - DNA, 1420 bp, Homo sapiens
tgtgtggaattttgtgttgattattcagttaaagagtttgtctgtgtttcttaacagtctgtaattacttcctgtacatattgcatgtctgtggtactgtagtttgttgctgtaacatttacctttggtctcagcagactcaagctgttatttcaaagtataccatcatttctttcagtcattttgtcattggagacagaaacaagtctctgtaaaagtgcccagaagccagaagtaaaaatacacgagccagttttttctttttctatattgaggaagatgccaggcattgcagtttacttctaaaagtgccatgctgcattatggaggagtaaaggtgttgggcaaatgtaacaaacttttctatccattcagtatggcttgtggcattttgctcacctggtacactgaacacwcttaactcatttctagattttccataaagacattttggtcagtacagttttgttataagtctataaaagaattaagacctgtggtatttttgttatgccatgttgctaatgtactttgtataattttatgtattagatttgtaaacaatagatttgtatatttacatgggcctagtgagataatttgttatttttatttctttcagctgtgttctcatttcacccaagacctttggctagatcagaacataaaaaattcatttcaaaaagtgatgctgagaagatatgggaaatgcagacatgagaatttacaaataagaaaaggctgtaaaagtttgaatgcatctaaggtgcaggaaggaggttataatgaacttaaccaatgtttgtcgattactcagagcaaaatacttcaatgtaatacatgtgtgaaagtcttaaggaaattttcaaattcaaatagacttaggagaagacatactggagagaaacctttcaaatgtaaagaatgtggccaattctttcacaggttctcacacctaagacaacatcagataattcatactgaagagaaaccctaccaatgtgaagaatatggcaaagattttaagcagtcttcaggtcttactatacatgggagaattcatactaaagagagaccctacaagtgtgaagaatgtgacaaagcctttaaacaatcttcaagactgaataaacataagaaaatttatactggagatacaacctacaaatgtgaagaaatagtcttcaaacctgactatacataagattattcatatgggagagaaaccctacaaatgtgatgaatgtgtcaaagcctttagaaaatcctcaaaactgaaagaacataaaagaattcatacttgagagaaaccctataaatgtgaagaatgtggcaaagctttttactattcctcaggccttactcaacataacatagttcatactggagacaaaccctacaaatgtaaagattgtggcaa

SEQ ID NO: 677475 - DNA, 1420 bp, Homo sapiens
tgtgtggaattttgtgttgattattcagttaaagagtttgtctgtgtttcttaacagtctgtaattacttcctgtacatattgcatgtctgtggtactgtagtttgttgctgtaacatttacctttggtctcagcagactcaagctgttatttcaaagtataccatcatttctttcagtcattttgtcattggagacagaaacaagtctctgtaaaagtgcccagaagccagaagtaaaaatacacgagccagttttttctttttctatattgaggaagatgccaggcattgcagtttacttctaaaagtgccatgctgcattatggaggagtaaaggtgttgggcaaatgtaacaaacttttctatccattcagtatggcttgtggcattttgctcacctggtacactgaacacacttaactcatttctagattttccataaagacattttggtcagtacagttttgttataagtctataaaagaattaagacctgtggtatttttgttatgccatgttgctaatgtactttgtataattttatgtattagatttgtaaacaatagatttgtatatttacatggscctagtgagataatttgttatttttatttctttcagctgtgttctcatttcacccaagacctttggctagatcagaacataaaaaattcatttcaaaaagtgatgctgagaagatatgggaaatgcagacatgagaatttacaaataagaaaaggctgtaaaagtttgaatgcatctaaggtgcaggaaggaggttataatgaacttaaccaatgtttgtcgattactcagagcaaaatacttcaatgtaatacatgtgtgaaagtcttaaggaaattttcaaattcaaatagacttaggagaagacatactggagagaaacctttcaaatgtaaagaatgtggccaattctttcacaggttctcacacctaagacaacatcagataattcatactgaagagaaaccctaccaatgtgaagaatatggcaaagattttaagcagtcttcaggtcttactatacatgggagaattcatactaaagagagaccctacaagtgtgaagaatgtgacaaagcctttaaacaatcttcaagactgaataaacataagaaaatttatactggagatacaacctacaaatgtgaagaaatagtcttcaaacctgactatacataagattattcatatgggagagaaaccctacaaatgtgatgaatgtgtcaaagcctttagaaaatcctcaaaactgaaagaacataaaagaattcatacttgagagaaaccctataaatgtgaagaatgtggcaaagctttttactattcctcaggccttactcaacataacatagttcatactggagacaaaccctacaaatgtaaagattgtggcaa

SEQ ID NO: 677476 - DNA, 1420 bp, Homo sapiens
tgtgtggaattttgtgttgattattcagttaaagagtttgtctgtgtttcttaacagtctgtaattacttcctgtacatattgcatgtctgtggtactgtagtttgttgctgtaacatttacctttggtctcagcagactcaagctgttatttcaaagtataccatcatttctttcagtcattttgtcattggagacagaaacaagtctctgtaaaagtgcccagaagccagaagtaaaaatacacgagccagttttttctttttctatattgaggaagatgccaggcattgcagtttacttctaaaagtgccatgctgcattatggaggagtaaaggtgttgggcaaatgtaacaaacttttctatccattcagtatggcttgtggcattttgctcacctggtacactgaacacacttaactcatttctagattttccataaagacattttggtcagtacagttttgttataagtctataaaagaattaagacctgtggtatttttgttatgccatgttgctaatgtactttgtataattttatgtattagatttgtaaacaatagatttgtatatttacatgggcctagtgagataatttgttatttttatttctttcagctgtgttctcatttcacccaagacctttggctagatcagaacataaaaaattcatttcaaaaagtgatgctgagaagatatgggaaatrcagacatgagaatttacaaataagaaaaggctgtaaaagtttgaatgcatctaaggtgcaggaaggaggttataatgaacttaaccaatgtttgtcgattactcagagcaaaatacttcaatgtaatacatgtgtgaaagtcttaaggaaattttcaaattcaaatagacttaggagaagacatactggagagaaacctttcaaatgtaaagaatgtggccaattctttcacaggttctcacacctaagacaacatcagataattcatactgaagagaaaccctaccaatgtgaagaatatggcaaagattttaagcagtcttcaggtcttactatacatgggagaattcatactaaagagagaccctacaagtgtgaagaatgtgacaaagcctttaaacaatcttcaagactgaataaacataagaaaatttatactggagatacaacctacaaatgtgaagaaatagtcttcaaacctgactatacataagattattcatatgggagagaaaccctacaaatgtgatgaatgtgtcaaagcctttagaaaatcctcaaaactgaaagaacataaaagaattcatacttgagagaaaccctataaatgtgaagaatgtggcaaagctttttactattcctcaggccttactcaacataacatagttcatactggagacaaaccctacaaatgtaaagattgtggcaa

SEQ ID NO: 677477 - DNA, 1420 bp, Homo sapiens
tgtgtggaattttgtgttgattattcagttaaagagtttgtctgtgtttcttaacagtctgtaattacttcctgtacatattgcatgtctgtggtactgtagtttgttgctgtaacatttacctttggtctcagcagactcaagctgttatttcaaagtataccatcatttctttcagtcattttgtcattggagacagaaacaagtctctgtaaaagtgcccagaagccagaagtaaaaatacacgagccagttttttctttttctatattgaggaagatgccaggcattgcagtttacttctaaaagtgccatgctgcattatggaggagtaaaggtgttgggcaaatgtaacaaacttttctatccattcagtatggcttgtggcattttgctcacctggtacactgaacacacttaactcatttctagattttccataaagacattttggtcagtacagttttgttataagtctataaaagaattaagacctgtggtatttttgttatgccatgttgctaatgtactttgtataattttatgtattagatttgtaaacaatagatttgtatatttacatgggcctagtgagataatttgttatttttatttctttcagctgtgttctcatttcacccaagacctttggctagatcagaacataaaaaattcatttcaaaaagtgatgctgagaagatatgggaaatgcagacatgagaatttacaaataagaaaaggctgtaaaagtttgaatgcatctaaggtgcaggaaggaggttataatgracttaaccaatgtttgtcgattactcagagcaaaatacttcaatgtaatacatgtgtgaaagtcttaaggaaattttcaaattcaaatagacttaggagaagacatactggagagaaacctttcaaatgtaaagaatgtggccaattctttcacaggttctcacacctaagacaacatcagataattcatactgaagagaaaccctaccaatgtgaagaatatggcaaagattttaagcagtcttcaggtcttactatacatgggagaattcatactaaagagagaccctacaagtgtgaagaatgtgacaaagcctttaaacaatcttcaagactgaataaacataagaaaatttatactggagatacaacctacaaatgtgaagaaatagtcttcaaacctgactatacataagattattcatatgggagagaaaccctacaaatgtgatgaatgtgtcaaagcctttagaaaatcctcaaaactgaaagaacataaaagaattcatacttgagagaaaccctataaatgtgaagaatgtggcaaagctttttactattcctcaggccttactcaacataacatagttcatactggagacaaaccctacaaatgtaaagattgtggcaa

SEQ ID NO: 677478 - DNA, 1086 bp, Homo sapiens
gggtgacagcgacagaaacaattacttttcattcttgccaatgaatctagcagcaaataagcgggacacagactgaactctccataacccatacctatctatttagcagtgatttaattcagcctaatgatgtgtcatttttaagaaggatattaatagctaacattcacttgagccttaccaggttcccagtcctggataaagtaccttataaatattatcttgttgaattctttagaaactgctcctaaaggagtgtcgcagaatcaaacggcccagaggctaggaggaggggatgtgggtgaacacagaacaccgcagctgatgatgcagcttaaaagcagaagggagggaggtgcagcccgaggctgtcggagaagcggcccagactggccccagggctctgcaacaggctccagttgtgcagggaggggacaagcttgtgataccgcgtgaaggactcaggaggtccggtggaggggtggcctctctcccgctggttggctccattgctatttctgtctcctcgttctcggtctctccaggccgctccctctccatctgtcctgatcgccagcctctcccccgctcctctccgcagcggtcggcccacctggagcactccccgccgccacgtgacccgtgcgtaaatcgcagtactcttcccacccctgcgctgggccagcacccggctctgcggaggctgcaggccgcgcatgcgcagctgtggacgcacctgcgcgcccgctggctggtgccgccgaccaaccccgcgcatcctgcggctgctaccccggctggccctggcgctgggaccgggtcgggggcgcggacccgcctgggtccaaactcccgagggtgctgattctctttgctgatactctcccaacgagctgtccacacagccaaacytcaccttaggtctgggcactggagctgcaccctgggcgctcgacgttctcccctggtcatcaggaagtcagagtcctggctcagccgttagagctgtgtgaccttggacaagtgacttgatctctctgcgccccaggaacgtggagataataatagcaccgacctcatagggca

SEQ ID NO: 677479 - DNA, 1086 bp, Homo sapiens
gggtgacagcgacagaaacaattacttttcattcttgccaatgaatctagcagcaaataagcgggacacagactgaactctccataacccatacctatctatttagcagtgatttaattcagcctaatgatgtgtcatttttaagaaggatattaatagctaacattcacttgagccttaccaggttcccagtcctggataaagtaccttataaatattatcttgttgaattctttagaaactgctcctaaaggagtgtcgcagaatcaaacggcccagaggctaggaggaggggatgtgggtgaacacagaacaccgcagctgatgatgcagcttaaaagcagaagggagggaggtgcagcccgaggctgtcggagaagcggcccagactggccccagggctctgcaacaggctccagttgtgcagggaggggacaagcttgtgataccgcgtgaaggactcaggaggtccggtggaggggtggcctctctcccgctggttggctccattgctatttctgtctcctcgttctcggtctctccaggccgctccctctccatctgtcctgatcgccagcctctcccccgctcctctccgcagcggtcggcccacctggagcactccccgccgccacgtgacccgtgcgtaaatcgcagtactcttcccacccctgcgctgggccagcacccggctctgcggaggctgcaggccgcgcatgcgcagctgtggacgcacctgcgcgcccgctggctggtgccgccgaccaaccccgcgcatcctgcggctgctaccccggctggccctggcgctgggaccgggtcgggggcgcggacccgcctgggtccaaactcccgagggtgctgattctctttgctgatactctcccaacgagctgtccacacagccaaacctcaccttaggtctgggcactggagctgcaccctgggcgctcgacgttctccccwggtcatcaggaagtcagagtcctggctcagccgttagagctgtgtgaccttggacaagtgacttgatctctctgcgccccaggaacgtggagataataatagcaccgacctcatagggca

SEQ ID NO: 677480 - DNA, 686 bp, Homo sapiens
tgaggagagcttcggtgtccgccgcccagcgccgcagtctgcaatctccctgsttgcggggctctgccctgccgtggccgaacgcttcgggagctcagaccacggtggcagggaggaaatggttgtttatgggtttggatgaaaggcaccacatgaatggatttttaaaagtgggtggcggcgagtggcggccgcagcggagcgagggctgatggtgggtgacatttgcaaaacggcatccacagtgctaaataagattggtgatatgtgtggaaaaacagtgccttgtcaatattttgtccatttctttataacaaaaaaaatgtgtaaggattgctgtggcttttgctatctctttggggattaagtgaagattaaaactgggcttttctctgtaggagaggataagaaaggaaaaagaataaaatggtggaaatctagtttcctttccaatgattctctcctatcgtagcgcgcgctcgctgtggaatgcttttggccatgtagtgttcttgttgggcaccatagctgttttatttcccctctccattcttttcattgatatataggaaatactcctactgaggaatctagttgtaaaaccttatctcacctattacatcagaagaaaattgttataaaaactgaacaccaaatgaaacaaaattttaaaaggtgctcatcgt

SEQ ID NO: 677481 - DNA, 1557 bp, Homo sapiens
taattcgtattttgctgattttttcacaattgaagaaacagttaaagaaaaaggctaattaatatatggttcatattggaattaaataattttgatcagtggataaaatgaaaatatttgtccaaacatattgtaacattttcttagtgtgaaaaatagcaacatgaaaccaaaaaaattacattgtgayttaatcattattagagagctgacgtacatttgaatgtggagtcaaatgtgctccttataagtttctgagttcatgtgcatttttctcaacatcatccttttatttgtttcattttaaaaatttgtctttgtttataatgtattgttatcttttaattcttttatatattttaattcttttatatctttaattttatacatatttattttagaaattctatgcactaattagataacatgatgccttggatggtctaatgctacttttgtctctgtcttgtgacctttattcatgatagatcatttcccagtatattataatgatttaatattaaatctttttaaatgaaattctattcatgacaacctgagttaaagagtttccctctggaaaaattttgcatttagcttcagaagtttcccctcacgtatatcatcaattatatgaaatttttatattatttatttggtagaggttttctacatgccacctgacatacatttgttatgcttaaggcacgtttttaggatatggttatttagttgtgaccaactgggtctaagtccgatatgacacatatagctttctattaatgtttctaaatttttgtactagttctttttttattatagttaaaaacagtaccatatacaattttgaatataaatgtgatgtgtttatctttatagctttttagaaaactaagaaaacctggaggattcatagctcaacaggttctacaacttcttgacatattgacagacaaaccctgaatctaagtaaattattatactgtttaataacaatgttaataactaattttattaatgttgatagttgagcttagaaagatctgcagtgatgaaaactgttttcaggaggctgaggcaggagaatggcgtgaactcgggaggcagagcttgcggtgagtcgagatggcaccactgcacttcagcctgggtgacagagtgagactccatctcaaaaaaaaaaaaagttttctaaaaaatatttgttagatcagacaaaacgcacttttcttcatgtttgaaaatttctatagatgggtaaaaatgacccttcacctgcaaatgtccattctagagctggctttgggagtcagggtttatgaccttgcaaactatttttctcccgtgctaccttgtttcctgtttggctctttcaagaggatgtgtggtaaagaagtcagaaggttgaaagaaggatcagtttcttctggataattatttctgtttttgcatcctactcttgtagtgctactagtctcgttttttcacctgaataccggcagtttgttacactctgaggtttttccacctctcacatgactaggtcttataataacc

SEQ ID NO: 677482 - DNA, 1081 bp, Homo sapiens
cagatttcacttggttatagaattcagagaaatactactggggcaatgacagggaagagacactgcacattctcagtggaggaatcgtcccctctgtccttcaactggtgccatccaaaagttgctatgtcaagtaatgctagcttcactcaaatgctattacccctggtcaactcacagtgatatgcactaatgagcaacccatctaatctgtgaagcaatgcttaaggaaggtttgaggaaggacgagctgcrgatcagctcaaggatgggactcaaatatcatgacagtaccatgagctaaggtgcctcttgcaagctgcctgtcgaggccatcagtgggttagaaccaaatcttccaaaattattgcagcctgcagtcttctcatcttgtcatataacacttaacattctggaaaaggccctgcattggttttgagtggtatttccagaatctgtggacctttgaaacaactccattttgctgtactttctccacaatggctctttcagataaatcacttgtccgttcctgccttagatgaggcctgtggaatgactgcatcatttgccctttcattgttgaaatggttatcagatttcaggtatatcaagacttgcagatcaggcctcttactctgtgtgactaacaggctcccccagaacaaaccatccaggcacaaacaggggatgcagcctgtggctatcccatcacaggtttccacaccacagtgtgagtccatcttgctgacttaacaaccgtaatttaaaaatcaccttccaaattgcactgattttatttgttcaaaagataacacacacattattacatgactatcattttagggcaaagtggatgcacggacaaatgtttcaagcaaggaggtaaaactctcctggataaaaattcacagcatcaattttctattttctgcttcctgaattgcattttcctggatctgatgattttcttctttgtattcttgatgtatgcatcggtatgtcttcttctgtgtttgtgtcatggaggcagcattcttcttcttttttttttttttttttgagacggagtttcgctctt

SEQ ID NO: 677483 - DNA, 1081 bp, Homo sapiens
cagatttcacttggttatagaattcagagaaatactactggggcaatgacagggaagagacactgcacattctcagtggaggaatcgtcccctctgtccttcaactggtgccatccaaaagttgctatgtcaagtaatgctagcttcactcaaatgctattacccctggtcaactcacagtgatatgcactaatgagcaacccatctaatctgtgaagcaatgcttaaggaaggtttgaggaaggacgagctgcagatcagctcaaggatgggactcaaatatcatgacagtaccatgagctaaggtgcctcttgcaagctgcctgtcgaggccatcagtgggttagaaccaaatcttccaaaattattgcagcctgcagtcttctcatcttgtcatataacacttaacattctggaaaaggccctgcattggttttgagtggtatttccagaatctgtggacctttgaaacaactccattttkctgtactttctccacaatggctctttcagataaatcacttgtccgttcctgccttagatgaggcctgtggaatgactgcatcatttgccctttcattgttgaaatggttatcagatttcaggtatatcaagacttgcagatcaggcctcttactctgtgtgactaacaggctcccccagaacaaaccatccaggcacaaacaggggatgcagcctgtggctatcccatcacaggtttccacaccacagtgtgagtccatcttgctgacttaacaaccgtaatttaaaaatcaccttccaaattgcactgattttatttgttcaaaagataacacacacattattacatgactatcattttagggcaaagtggatgcacggacaaatgtttcaagcaaggaggtaaaactctcctggataaaaattcacagcatcaattttctattttctgcttcctgaattgcattttcctggatctgatgattttcttctttgtattcttgatgtatgcatcggtatgtcttcttctgtgtttgtgtcatggaggcagcattcttcttcttttttttttttttttttgagacggagtttcgctctt

SEQ ID NO: 677484 - DNA, 472 bp, Homo sapiens
accatataattcatcatctaacccagaacactttttaagaaataaaaaatacacaagtgatagttactctgggacagtaagtgcaaagtagaactgcaatgaacaaatgtaaatgaaagtttaagagcattactaccatatgcatgcaatacatacatatcctaagtatgatttctgtaaacagcatatattttgacaaactgtgcaagatcaccatatgtgtgtataatatatatgtaatatatgattatccatatcataaagacaatacatcattataaaaktatgagataatgctgataatgaggttctaagaaagaaaatatttgcattgtaaatccaaatgtcatgagtaatagaaaaaatactaatataaatttccccaaagtgtagaaatgaacccaaaaaaaataaaaacagggtaaggaaattgtgttcaagatagggagaaagtgagaaatcaactatgtaa

SEQ ID NO: 677485 - DNA, 472 bp, Homo sapiens
accatataattcatcatctaacccagaacactttttaagaaataaaaaatacacaagtgatagttactctgggacagtaagtgcaaagtagaactgcaatgaacaaatgtaaatgaaagtttaagagcattactaccatatgcatgcaatacatacatatcctaagtatgatttctgtaaacagcatatattttgacaaactgtgcaagatcaccatatgtgtgtataatatatatgtaatatatgattatccatatcataaagacaatacatcattataaaagtatgagataatgctgataatgaggttctaagaaagaaaatatttgcawtgtaaatccaaatgtcatgagtaatagaaaaaatactaatataaatttccccaaagtgtagaaatgaacccaaaaaaaataaaaacagggtaaggaaattgtgttcaagatagggagaaagtgagaaatcaactatgtaa

SEQ ID NO: 677486 - DNA, 1469 bp, Homo sapiens
ttgaatacatcagaagggaaaacaaaaatactgaatttttaaatatgtatatatacgttattttatagttccgagatccttgcaatttattctaacaattaacctacaaaaatatgttgaaaattagtaatatgaaaagaatccttcctggccttttgggtgatgagaagatgtgcattacattgttcccaatcttagtgagattttcctgtttatttgcaagataatgtcaataattagatttcaatgcataataaaacaaatattgatataaagcaaagttattaattttaactggaaagatctggcatgttttcacatagcaagggcattatcaaggtctcttgatgaattttttttaaaaaaaaacaaaagcaaacaacagcttgatgagaatgcagattagtgaaaaaatggagtgtttagaacragagaatagaatactatgaaattggagtatggtgaatacaggaatgacaaaagcaatatcttaaaaagataatcttaaaagtataaaagtttttgaataaaaatggtttgtactaaacctgttaaaagtaaaatgtcatttgggggctaatgtaggagaaaatataattttttaaggtttttgacatttttattttgcaaaaatgcagaatatacattttatttaaaaatctatactgtatacattctcaactataaataatatttgagaaaaacattaaatgtaaatatttccatttcactctaaacaaatgacaataaaatgcaggtttcttttggaaagagtagtataaatgaaaaggtagaatattaattgtctttggagccaaattactggccatccgtataaacagaattgtgaatcttaaagttgtctttaacgaaaaacttgggtttgttgtcttaaaacttaacttggagccaggtgcggtggcttaagcctgtaatcccatcactttgggaggccaaggcgggtggatcacgaagtcaggagatccagaccatcctagctaacacggtgaaaccccatctctactaaaaataaaaaaaaattagctgggcgtggtggcgggggcccgcagtccgagctactcgggaggctgaggcaggagaatggcgtgaacctgggaggcggagcttgcagtgagcaaagatcacgtcactgtactccagcctgggcggcagagcaagactctgtctcaaaaaccaaaaaaaaagaaagaaaaagaaaaactctatgaagctaaagaaatacaaacaagcaaaaatagaatatttaagatgatggcagtgtatcagtattaagagagattaaatagcttagaaacttttagactggaaatgaaaagaggaaatgagggcagttacgaatgcccccgctaaaaacaagagaacaagagaagcttgttcaccaaatcccattatgaataagcccctgtgtggcattttacatgtaaacactagttaaaatgaatattgaa

SEQ ID NO: 677487 - DNA, 1469 bp, Homo sapiens
ttgaatacatcagaagggaaaacaaaaatactgaatttttaaatatgtatatatacgttattttatagttccgagatccttgcaatttattctaacaattaacctacaaaaatatgttgaaaattagtaatatgaaaagaatccttcctggccttttgggtgatgagaagatgtgcattacattgttcccaatcttagtgagattttcctgtttatttgcaagataatgtcaataattagatttcaatgcataataaaacaaatattgatataaagcaaagttattaattttaactggaaagatctggcatgttttcacatagcaagggcattatcaaggtctcttgatgaattttttttaaaaaaaaacaaaagcaaacaacagcttgatgagaatgcagattagtgaaaaaatggagtgtttagaacgagagaatagaatactatgaaattggagtatggtgaatacaggaatgacaaaagcaatatcttaaaaagataatcttaaaagtataaaagtttttgaataaaaatggtttgtactaaacctgttaaaagtaaaatgtcatttgggggctaatgtaggagaaaatataattttttaaggtttttgacatttttattttgcaaaaatgcagaatatacattttatttaaaaatctatactgtatacattctcaactataaataatatttgagaaaaacattaaatgtaaatatttccatttcactctaaacaaatgacaataaaatgcaggtttcttttggaaagagtagtataaatgaaaaggtagaatattaattgtctttggagccaaattactggccatccgtataaacagaattgtgaatcttaaagttgtctttaacgaaaaacttgggtttgttgtcttaaaacttaacttggagccaggtgcggtggcttaagcctgtaatcccatcactttgggaggccaaggcgggtggatcacgaagtcaggagatccagaccatcctagctaacacggtgaaaccccatctctactaaaaataaaaaaaaattagctgggcgtggtggcgggggcccgcagtccgagctactcgggaggstgaggcaggagaatggcgtgaacctgggaggcggagcttgcagtgagcaaagatcacgtcactgtactccagcctgggcggcagagcaagactctgtctcaaaaaccaaaaaaaaagaaagaaaaagaaaaactctatgaagctaaagaaatacaaacaagcaaaaatagaatatttaagatgatggcagtgtatcagtattaagagagattaaatagcttagaaacttttagactggaaatgaaaagaggaaatgagggcagttacgaatgcccccgctaaaaacaagagaacaagagaagcttgttcaccaaatcccattatgaataagcccctgtgtggcattttacatgtaaacactagttaaaatgaatattgaa

SEQ ID NO: 677488 - DNA, 2231 bp, Homo sapiens
ccctccttctaatgctgaatgatcttttaacttggcactgatgcaccatcatttttcttttccttatagttctctgatgttctgatccaccaagtgattagtttttgcactttaagtaattattattattattactatttatttattttttgaaacagaatctcactctgtcgcccaggctggagtgcagtggcgccatcttggctcactattattactatttttgagacagaatctcactctgttgcccaggctggagtgcagtggcgtgatctcagctcactgcaacctctgcctcctgggttcaagcggttctcctgccttagcctccagagtaactgggattacaggtgcttgccaccacacccagctaatttttgtatttttagtagagatggggtttcaccatgttggccaggctggtcttgaactcctgacctcaggtgatccacccgcctcagcctctcaaagtgctgggattacaaatgtgattaagtaattatttttatagaaatagaagaaagtctatgatttctgtagttagaacacatcaaatttcaacgtggcaaattaagtaccaggctaggtaactacatgttgctttccccaatagaaccccatctataaataaatatccttttattttccagtggagcctagaatattttcttaaaagcaaacttccaatatgaatccaaagacatcaacataaccagatttttttttttttttttgagatggagtctcgctttgtggcccaggctggagtgcagtggcgcgatctaggctcactgcaagctccgcctcccgggttcacgccattctcctgcctcagcctccagagtagctgggactacaggcgcccactaccatgcccggctaattttttttttttttttttttgkatttttagtagagatggggttttactgtgttagccaggatgtctcgatctcctcgcctcgtgatccacccgcctcggcctcctaaagtgctgggattacaagcgtgagccaccgcgcccggcccataaccagatattttatcagtcattgtgacttagaaatctcatgcatctgtggctgaatatttgacaacagttttctttttttccccagatatatgaacacaaatgctttcattgccacatatacccttggccacagttagatgattgaattataactgagtcatgcctgtgctgagttttagcagagtattcctgcaggatccaacaaggataaaaattgatgtccctcttgaaacagagtggtacagatggtgcagctttatagctgtctccaaataccaaatgccaaactgctcctttgataaggcaaggcggtgtaaaggtttaaatatagcctcttggtggaatgtcagtgaatgatggatcccagttacaaacacaccaaaatattctctgtttaaacattttttacaaccatggttgtgaagattctatatcaaggaaattatgcttttttttaaagaacaggaaacttaccctgaaaaatctatgtgtatactaacaaatcagttaaatttggaggaggggagtgtggaaaagtacaatggcaactagtaaagtcaatttttctgctaacacctgccacaagtagaatctaaaaatgttacgttaaattcacaagacttacatataacaacaatgaaatagggaacttggctttcctaaattagcttggttatcgttttacagcacagttttcaccaaaatgtcaaatgatggtcttgtagtaggagaatggcatacatatatagaatggttaacttgatcattttatatgtatgcgtatatgaatttattcttttgataaaatatatttttaaagtattgctaatattcatatccatcttcataatttgtactagggagatgaacagcaagaagtaaaattttaaagtacctgagaccttgtcaattttttgttaaaactggttaaagagccataaggaaaactggaattatagcaaacagtaggttcatgttttagaacctttaaaaattagctagtgaattagttaaaattatttcagctaattttgaaataattgtgaagatatacaaaaagaaacatattggataatgtaaacggtgtcagcaagtaaatcaagacaagaaagtcatcaaataattttgaaagatgtttgcagttattgattttatagtgaaaataaatgattaccaaactaaaatgttacccctaaag

SEQ ID NO: 677489 - DNA, 2231 bp, Homo sapiens
ccctccttctaatgctgaatgatcttttaacttggcactgatgcaccatcatttttcttttccttatagttctctgatgttctgatccaccaagtgattagtttttgcactttaagtaattattattattattactatttatttattttttgaaacagaatctcactctgtcgcccaggctggagtgcagtggcgccatcttggctcactattattactatttttgagacagaatctcactctgttgcccaggctggagtgcagtggcgtgatctcagctcactgcaacctctgcctcctgggttcaagcggttctcctgccttagcctccagagtaactgggattacaggtgcttgccaccacacccagctaatttttgtatttttagtagagatggggtttcaccatgttggccaggctggtcttgaactcctgacctcaggtgatccacccgcctcagcctctcaaagtgctgggattacaaatgtgattaagtaattatttttatagaaatagaagaaagtctatgatttctgtagttagaacacatcaaatttcaacgtggcaaattaagtaccaggctaggtaactacatgttgctttccccaatagaaccccatctataaataaatatccttttattttccagtggagcctagaatattttcttaaaagcaaacttccaatatgaatccaaagacatcaacataaccagatttttttttttttttttgagatggagtctcgctttgtggcccaggctggagtgcagtggcgcgatctaggctcactgcaagctccgcctcccgggttcacgccattctcctgcctcagcctccagagtagctgggactacaggcgcccactaccatgcccggctaattttttttttttttttttttgtatttttagtagagatggggttttactgtgttagccaggatgtctcgatctcctcgcctcgtgatccacccgcctcggcctcctraagtgctgggattacaagcgtgagccaccgcgcccggcccataaccagatattttatcagtcattgtgacttagaaatctcatgcatctgtggctgaatatttgacaacagttttctttttttccccagatatatgaacacaaatgctttcattgccacatatacccttggccacagttagatgattgaattataactgagtcatgcctgtgctgagttttagcagagtattcctgcaggatccaacaaggataaaaattgatgtccctcttgaaacagagtggtacagatggtgcagctttatagctgtctccaaataccaaatgccaaactgctcctttgataaggcaaggcggtgtaaaggtttaaatatagcctcttggtggaatgtcagtgaatgatggatcccagttacaaacacaccaaaatattctctgtttaaacattttttacaaccatggttgtgaagattctatatcaaggaaattatgcttttttttaaagaacaggaaacttaccctgaaaaatctatgtgtatactaacaaatcagttaaatttggaggaggggagtgtggaaaagtacaatggcaactagtaaagtcaatttttctgctaacacctgccacaagtagaatctaaaaatgttacgttaaattcacaagacttacatataacaacaatgaaatagggaacttggctttcctaaattagcttggttatcgttttacagcacagttttcaccaaaatgtcaaatgatggtcttgtagtaggagaatggcatacatatatagaatggttaacttgatcattttatatgtatgcgtatatgaatttattcttttgataaaatatatttttaaagtattgctaatattcatatccatcttcataatttgtactagggagatgaacagcaagaagtaaaattttaaagtacctgagaccttgtcaattttttgttaaaactggttaaagagccataaggaaaactggaattatagcaaacagtaggttcatgttttagaacctttaaaaattagctagtgaattagttaaaattatttcagctaattttgaaataattgtgaagatatacaaaaagaaacatattggataatgtaaacggtgtcagcaagtaaatcaagacaagaaagtcatcaaataattttgaaagatgtttgcagttattgattttatagtgaaaataaatgattaccaaactaaaatgttacccctaaag

SEQ ID NO: 677490 - DNA, 656 bp, Homo sapiens
acaggtggcagaggtggaagaaaattggtgtttgagtgaacctctgcagttcaaacatatgttgctcaagggtcaactgtaattcataaatgtttgacttctcaaaggtagatggaagggggcccaggttccagtcagacagctccctcaccttcttagttctttcagctatcctatctaatagagatgtattatgacatttacagtgctaatgtgtaacttcacaccaccatagggaaaggcagccttgaggagattttatctgtggcattcactagggtctgctctgatatctctataatgatgctctgtgatggttcatgtgatgtgtcaacttgattaggacatagtgtgcctatgcctttgatccaacattattctggatttgtctatgagagyttttctggatgagacaaacatttgaaggaatagattgagtacaggagattcccctttctaatacgggttggctccatctaccagtggaaggcctagatagaaccataagagggaattcctactgcctgactacttgagctgaaacactagtcttttcttttctttttttttttttttttttttttgccagatttgaactaaaatataagttcttcttgggtctcaaggctgctagcttttgttttggaaccatacca

SEQ ID NO: 677491 - DNA, 930 bp, Homo sapiens
tcccaacaatttgggaggccaaagtgagtggatcacttgaacccaggagtttaagaccagcctgggcaacaaggagaaaccctgtgtctaccaaaaaatataaatacaaaaaattagccaggcatagtagtgcatgcccgtagtcccagctgctcaggaggctgaggtgggaggattgcttgcgcccaggagacagaggtgcagtgagctaatatcatgccactgcatgggcaacagagtaagagcctgtctccctacacacacacacacacacacacacacacacacacacacacagatatacatacacacacacacayatatctccatatatatatatgaatgacacattaagaataaattacagattggccttggagagcatactactatttatcaatagcttctcatagagtttgatgatcatctgtaaaaagataagttaactttatcatttaaactacctttactgttttagacgtattaattaccttgattgttatttatgtgaaagcactaagacttatgtaagttaatgatacatgtataattcttaacaatttaaagcaattggagagcccttgactagtgtatcaccctagtcactattgattagcccaacaatgtacacccaggcttgaagatgctaacaatctagcagaaaagagaggccagaaatttcctctcctctatcttgctatttattacatagtcctttattattttttttcaaatctactttttagcaagaaaagattcatcatagttcaatagaatttatggaaaccaggctaggtaacaagtatttgacccacacaaatttgcttttaatacaaagtgatccatgcaaagttgcttttaagtaaaagtaaatgatagagtacttttattcacttaattcatgaaagaattaaaattaagagagatgta

SEQ ID NO: 677492 - DNA, 642 bp, Homo sapiens
gcgccagacagaagctaagtcgtggaactaacagaaggttttcactgattgctaatctgctatttgtagggggacttggaaccctcaagggctgaagatattcttagaagctacttctcttagtaaaaggttttcagccactgcccagagaatgagaacaagcctggctggtctaatgatcaagggaacaaagtcagtaaaccttggactagtggtcaagragaacattttaaacagttcttattgtatgtttttatcttccttaaatctctactttgcttaaatcattacttaatggaagaatttacgtaagtacttccttaacctattttttttaacatcaatcataatatattacacagatcttcagatttatattgctgtaggcttctacttgtactctaaatagagacaaccaactcaattatggaaaaagcagtccgaagttgtactgacaaaatatcataaagtatgtgtggagggaatattatacccagaaaataggaaattccctcatgctcacagagactgtattctacttttcattttataattataaactatttaacacaggaattaagacttccaatttattttattttttcagaagttatttgaataaagtttcatgacaccaaatat

SEQ ID NO: 677493 - DNA, 642 bp, Homo sapiens
gcgccagacagaagctaagtcgtggaactaacagaaggttttcactgattgctaatctgctatttgtagggggacttggaaccctcaagggctgaagatattcttagaagctacttctcttagtaaaaggttttcagccactgcccagagaatgagaacaagcctggctggtctaatgatcaagggaacaaagtcagtaaaccttggactagtggtcaagaagaacattttaaacagttcttattgtatgtttttatcttccttaaatctctactttgcttaaatcattacttaatggaaraatttacgtaagtacttccttaacctattttttttaacatcaatcataatatattacacagatcttcagatttatattgctgtaggcttctacttgtactctaaatagagacaaccaactcaattatggaaaaagcagtccgaagttgtactgacaaaatatcataaagtatgtgtggagggaatattatacccagaaaataggaaattccctcatgctcacagagactgtattctacttttcattttataattataaactatttaacacaggaattaagacttccaatttattttattttttcagaagttatttgaataaagtttcatgacaccaaatat

SEQ ID NO: 677494 - DNA, 1434 bp, Homo sapiens
catgaactgcccgaaggaaaaaaagggacacagaacataaacaaaaggcaattccagttttcattatcactctccctaaggaatctagacttttcctaatgtccccatgaaattttaatatcactatatacgtatctctttacgcattatatgtataactgagtcttatacatacaaagcattaatttttttttgctcccaagagtgaattttcagatgcataattaagtaacatgagagaaagaatacttggggagtattactcaacacctattttaaaatgacgtaagaacacagacattaaccctatacttttttcatgtgagcatgtggtgataactgaaccctacaattactatgtgcagcgattaacaaatcttgttttatttctcctctgtagtgaaaattatattaataattctatctgtgcaaatatccagagagagagggacagtaccagaatattttagaatgaaaaaaaaaatctggaagttgttggcacttccttggcctttaatcaaactttacccctaactagaatcttcctgcccccaaaaactcatctggttaactccaactgatccctcctcaggcctgarcataactatcacttcctcagaaaccatccttgatcctcccatttcaaagaggtccctccaatatactcagcagtgcacgtacttttcccataattatggtcacattgttgctcatttgtttaatggctgtgtccttcacaacatcataggccctgtgaaaataaggactagttttgttcatcactatatacaaagcacttgtgcccaggacttacataatacagaatatggatttacacataggttcccattcctaatgtattctttgatccttctaattttaaatatcctatctgaatacatccttaaaaaaacaaacaggaacaccccacaaaatccaacaacaccacttactaaaggagtctctgagattagaacatacctcaatccacagaagaatgagaaaataatattaaagctctgcttttgtcactcaaatgacaaccactggaagtaatgccttaccaaatcctacaaattctgaaatactatgaaataattcacacagttgcttgtatcaatacttccacaagttattttagaattctggtaaatatccagtgaaccaaggcataagtgtcttgctgtcttacaccagtgtgcttaaactttgccaaggcgtgtagattgatcacaacacacacttgcagagcactctttttactacttgccacacttaatcattttcctgaagccccaaaataagtaaattgtgtattcacttaattaaacacacatttacctgcaaggaagacacaggatctttggaatcaacatacacatcttttagaaacgacagcagcttttcatctttacgagcaatctctcctttaac

SEQ ID NO: 677495 - DNA, 2024 bp, Homo sapiens
tgatcttcaagctctgagactatagcatagccagccaagggaagccacaaggagttaatgtgtaattctttttctcaaatcaggaaggcttctttacaggatctgtatagtacctgcagaacagtgagaagtcatctgaaactttaagaaaggcatgcatggttacagcaaggcagagaccagcagaaaggactgcctataagagaggactaaaggtattagccacatggagagagaaagaaaagagaataaaattatgaaacataaaaaattaatttgggaatccctgttttggtaagtcagagataataacaatgtccactagaggaagagaaaaataaagaactatttctaacttatatgagaaagggttgagggagagagaagggatgattagctgaacaaccactaccagaatttttcccaagaaggaatggaagttccctatgtcatggtggaattagaagtataattcgtgatttccaaatgccgaagcgtttacttaactaccttgtctttctagttaagcccctgcagaactgggctggcagtgtgtgagccatgaagactccttttgcttctgtagataaaagcagagtttcaaaacccttagtcatatataaaaactttcttgaattttgcatatcctcaaaatatctgcacttttattcacttaacatttttattaaattgacttatttgaattaattgctttttagtagagacagggtctcactatgttgcccagcctggtctcaaactcctggtctcaagtgatctcctgccttggcctcctaaaatgttgggattataggcatgagccaatgctcccagccaaaaacgaactcattaaaaaaaaaatctagcgtcatcctaagaagtaatatccgtgaaatgagattgatatgttatttttctaattcttgatacattaaatagacatattaaaagttaccctaccctggccgggcagcagtggctcacacctgtaatcccagcactttgggaggccgaggcgggcggatcacaaggtcaggagattgagaccattctggctaacgtggtgaaaccctgtctctactaaaaatacaaataattagccaggcgtgggaatacaggggtgcctgtagtcccagctagtcgggaggctgaggcaggagagtggttgaacccgggaggtggagcttgcagtgagccgagatagcgccactgcactctagcctgggcaacagagccagacttcgtctcaaaaaaaaaaaaaaaaaaaaaaagttaccctaccctaaaagtaatcatgtgtcaataatggtccagataccagtgttggaaaaacaacaggctaaggcatggactaaaagcaggctgaatggctgctctacgtcttccttcattggtcttggcctactgaatcttatttaccgctgcagtgttttcttggagtgtgtgtgcacgcacacacttgtgtgtcttctttgaggggtagaaaatagtgcgatgtggtaggatgagggaaasgtttctggccaagagaccatgtctctactaaggcttacaaaaagaacagaagcatcaaccatttagtccctatggacttaaccacagacttcaccatggacatcccaagatggaggcagccagagctagtcactggacaccagccacccgagaaagatgggagcccagagatacttggagagtaagcaactgcagcgcagagaggcagctggcagccagagctagtcactggacaccagccaccctagaaagatggaagcccagagatacttggagagtaagcaactgcagcgcagagaagccgctgtgtaggacggagtgtgctctccctacagaatccctcactggtcactcttttggtccaatcctatgccactgagggttcccttagcaaagagactggcattagagccttgtcctcagtgtacagtgagttgaaagatgccttgaatgtaaccagtaaatattggtcaaaaatattataataaaagatttctgaaacttaaagc

SEQ ID NO: 677496 - DNA, 2964 bp, Homo sapiens
tagctgtgggcagaattaagggaattagcaagggatgttgagacacccagagaccagcaatagaaggaaaccactcctagagagagacctggtgagagctggtgagacctggagccacggaagacagaccaccagcaggatctataatggtggagggagccttccagagaggtggctccaaagcagggagggaatggggaaaaataacccaacctttccttttatctcccagtctcctgctgctgccacccattggctgtgcccccacctggaaaccagctatcaagggagcctggggcaataagtggcaggaattagagactcctggaaacagaagaggaggaagacattgccatggagagcagagaagttgaggccatgtgctagtcttgtcctrttttgctcttagatttatcccctgtccccgctctaccctgttccgtatcacagagaattactttttccttgttcctttgccctctggtttctgggtcagttcagccattggatggccctgaagagagagcagaaagggagaagctgggtatttttccccacttctctcagcttcaagtattgtctctggcagcggccatctcttctatggacccagctcttgctccaagagcttctgtggttccaacttctccctggtggcctggctccttttgtcccttaagctttaggcagtggtagcagcttcctgctcttgataatctcaaggatgccttactctcccactttaggcttcttacctttgtcatctcctggtattaaatctcttctttaaaatatcaagaatatttagaatcctgactgatagaggaaactatcacatgggagagcctcaaccttcacagaaaagcatgagggaaatgaaaatacacatggcttgcatatcataaatatggaaaaacttccattgaatctgtcactgctgtgtgcctattccctcctctcactggggcctccaatccctcaaccaccagtgttctggtccactttttagcctggcttgcccttcatacccctggagatcatgaacagtcatatccgcaatattctgttagaattcttgattttcctgctgacttttccttctgctgtagctattttatcaatccctatccctgagtacagtaaattatctattttctctcctcctgctttttttactggacaaaggaacatgacctggccaaaatttcttctcctgggatgtttgtctgcccggctacttatatccattgtacccatttccaacaaccatgcacccatggctttgcccagagtccctggaatcttttcaggttcatgtaaacttaaaatttatgcaaaggaaatccaccaaggattggagaccaaaaaacaaacgtatgacatcatgctataatttcacacacacagaattattttaaaaatagaatgggttcataaaaatgaaataaattgctgatatgtaaaactcatcatagaaaaatcaatgttattaaaatggttattcataaaataattcaccacatttttcactttagaataccaaacccccaccatgcatttggaatttaattcaatttacaaagtttccatttgcccacaactcttcaggaccacatgccttttccaagtcaaatatatttcaaggtccaatatcaatggtttagatatacattaagacatgtcagacagagattctgtctgctccactatatgcttttgtttttggacctgggatgcagtttaatctacttcttaaatgcaaagatgtggtagattgcgttattggttttgattctttcctatactatatctttgcccttcaccattggctttggagtccctctcatgttgaaggttagatttcatagagtaattattgaggaatgctcttggaaacagccattttaagggaataggggaagcaagattgacacagaaaaaaatgggactaatttaattgcaacccaggcctcacccaatcctatgggaagctctgatgctaggatagctcttcagagatgtcttgaattgaggcaagaggtcagacttcatactcacatctgactagtctttgaatgtgggttgaccataggggcacccttgggcaaagcagtgcccttcagctgaggacaattcctggtgggcagtgggatggggactccagggcgagggtggaggtgaaaggatgggagtcagtggacttggtgagccatcatcagcaagcaatattcctagcagctgagaaagtaagtgccttggttctggaaagggaccaggaagtgcacctcagcatccactacaccccacaaaggtgaagtatatctcagttgggcacagtggtgcacatttgtagtcccagcaatgcaggatgatcccttgagcccaggcatttgagtacaacctaatcaacaggcatacccttatctcttaaaaaaaaatgaggtatgtctctttgctctttgacattagtctcagccttgtaacttgccttgacgaacaggatgaggcagaaattagtgtgccagttccaagcctaggccttaagagaccttgcatatttccaattttcttcttacacatgtccagggcaacctactggtcccaggaggaagatgagaggcatatagagcagagctaccccagccacctagcctagcccagcttaaatcagccaacccccaagatgactcaaagatactactggttttgtgtgatgcggtttgttatgcattgatagcaagtcaatacaataggcttggactcaagagtcagatctgtttcagtgccatgtacttctggcttgtgaccttcaagaatttttccaacctttcttctaaacctgagatttatccttggtatagaaataatcatgtctgttttatgatgttgctataatatatccatgtgtttgccatggtacatgggaacttagaagcactgaattactgtaagttatggtcaata

SEQ ID NO: 677497 - DNA, 2765 bp, Homo sapiens
aataacagaaggggagacagggaatattcaaagatacaacagccaagaattttctagaactaatggaaaaattgtagacaaaagacgtgtatatgagtttaaggatagcaatagctgacaaacagtacaaacgttacttaaactaagtagagatctaggttcagctttttaaaagaaaaaatgtaaaatatgaggtagacatattttagactgtagagtaaatggatgtaccagggccaaaaggagcatgaattgccttaagggagaggaagggggaagctaaggaaacaattcctgctgaagcaattgggttttgaaaaaggtgatcccagtagacaagggtcagggagaaagaatgctacctgaagagggaataggacatgaaaagcccatgttgccaaataaaccctgagatctttacattttgaagaatgacattttacccttgcatgaaatgaaaaaggtatacataaaaatgtatataagaagttctataaatgatgaaatctggttttcacagggataatgccctggtaatttctattatgtattaaaaaaagccttgtgggatgggggtgggggagggtccctaaaacacaaactttagcagttccacctaactatttggtctcatttaatgataaaatattttcgtcatatgacaggcttattatattttttctagaatgtcttttttatctattttgttaagaacatgaacttactgctgtaactcataaatgraaccttccttttcagaatagcattgttctctcttatcatcttacaattgaatacaaaccgaaaaggtgttgaaaaattaatctcttctttcagcatcttctcatttatcaatcacatgattcacctgtgtcatttgtctaaatattggagtcatggtttgtgcttttagcataaatatttagtgccaactccgtctctttcctatgttctgggccctagtttatctttctgagagattgctaatgtaaaatgtttaagtaaatactgaatggtcctggaatagggcctgatacttgcattactattagttagtagaatatttgtattttgattgtgttctctagccaaatttgtcacatgcgattcttcccagttctttgcttttactggctcttataaacacactttgacatatatttaatatcttgaagaataaagatatcctgtgattttacagcctgtcagtactattttggggtataacaggtgggtaaccgaaggggaaaaggcatgtgtgtgcttagggcagggagaggatccttttatggaattgaacgtgctaaaacattggtgaagttgttctttctgtgcacacttaagacagcagttaggattagatctttcatgaacttgtatttctaagaccatccaaatactgggaataggtctgtcactttcattttgcaaaagttggcatcttagttactgtaattcataataacaacgttccctggaagtatagaacatgttaaatatacaatatatatttctttattttgcccttattccacagcttagttttttagtgactgggtatattcatgtgtgtgtatagtgtgagtgcatgtgtgtgcaattgagtgaagtgggaaagtagtgcttctatagtttgatcagggctttacacaaaaaagccacagagattttcccttaaatttgggaaaagacaaagatacccccatgattgccactgtttaatacagtactgaaggaccttttcttaaaaaaaaaaaagtaataggattgggaaggaagaaataaaaactgcagatgatatggatatgattattaacctagaagaaccaacagaatcaacagactgaacactaaaatgaatacatgtaaatcaaggttgccagtgacaagataaacctacaaaaacagcacttctcaaaccagtaaaaatcaagtagaaaatacaaattcacaatagcagcaatatccacgaagactactatgaagaatacatgggaactctatagatctgaataaatgaagagacatatatcatgcctttaaacagagagatgttataaagatgtctaatttctcttgttttttgagaaacacaataaacttaccctagaatttatatggaaaagttggagaagtaaaagtccataaatagctaagttatctttaaagaagattgagggacctgctctatcaaatattaaagtgtagtacaaggctagtgctattaaaaaaaaaaacccaaaacttggcactggtataagaacagttaaatacactaatgcatggcatagagattttagagataaatagcgaatatacattcgctaggggaaagatggattgcttggtaaataatgttggggaaaatggctatttggaagaaaaaaacaaaacattcttacctaactgcatgcaggggttgatgctaggtggattaaagacataaatataaggaaggtagaactataaagttaataagagaaaatataggaaaataggaccaaagggtgggggaagaccttaggtcaaaacttcaaaagcatacgccataaggcaaaaaaaaaaaaaaaattgatcgcatcaaaataagagtctctctttagtgcaagacatcccagacgtggttcatatatgagaggatgagagatggttgcaatgtctgtaaccaacaagaatctcttgagtatacaaatcaacaagggaacagtaactcctgtttaaaaatagaaaagcaaaataggaaaagtctatgaataggctaacaa

SEQ ID NO: 677498 - DNA, 1750 bp, Homo sapiens
gctgacaagagcctaagtcagttttataagagactctataaagcattctgactttacaccccatttaaccctgaggctgctgaaaatcagtatacagtgaatacttcatttgtaaagcaagcccagggtaacatcaagcagaagctgcaggcatgaataccacctagtctttaaaaggtgtatgttaactgtgaccaaggaacaaaactggaaagagcaaaagcaacaagcatggaagctaggcacgccaaggattaagtccctctccccagcctggctctaaaaaaggagccagggactggagctgggaaaagagcaaaagaaaaagaaagactaagagtaagtgtgaaaaagagaatcagcagaaaacaggagagacagacagcagtacgcgggggcagggcccgtgccattgcccggccctgccagctggctgtaggatcagggaggaaaaaaaattaattaaagtttaaggaaaaaaaaaaaaggcaatctgttggcaacagctcttacaaaaagagagattagcaatgtgagggatgtggatgtggatgtagatgtggaagaagtcaagttaggcaaggattcaagagccagacaaggctagagagagattaatgtgtgagatgcaaaaagaaaggacactagaaagataaatrttcagaagacaatgaggaaagtggccaaggccgcaagacaaagaggccatcggccaaggactgccgcaccttggaggaaccaaatactgatctgatcaggctggcaggagctgaagaatgtaaagactagatcaggccaggcatggtggctcacgcctgtaatcccagcactttggaggccgaggtgggcggatcacgaggtcaggagatcgagaccatcctggctaacatggtgaaaccccatctctacaaaaatacaaaaaattagccgggcgtggtggcgggcgcctgtagtcccagctacttgggaggctgaggcaggagaatggcgtggacctgggaagcggagcttgaagcgagccaagatcatgccactgcactccagcctgggcgacagagcgagactctgtatcaaaaaaaaaaaaaaaaaaaaaaaaaaaaaaaaagactagatcagaccagatggaccagacacattctcattaggctcccaggagtccatggtcatgttaaaagttaaaagcagcaagattctaccatatctagattccaatttctcaatgatggctaagccactagatagagttacaaagcgggggaagaaaaagaacccctcctgtaagaaacttaaacaggaggaagagtcataccttgtgaaaacttgcttatagatattacagaactgccccatgccggaggctattggtacatgctagtgcttgtttgcaccttttcagggtcagttaaagctttccccaccaggacagaaaaagtacaagaagtaattaaagtactttcaaaagacattatccccaggtttagactgcctctaactttaaagtcagacaataggccagcatttgtagctaaaacagtgcaagatttaacaagactgttaaaaataaaatagaagttacacacagcctatcggccacaaagttcaagaaaagctggaaagcatgaaccagacactcaagcagctactgaagaaatattgccaggaaattcatttaagataaaatcaggtttttgcctatggtcctcctccgagtcaggtgcacctccaccaaacaaattaggtatttgcccta

SEQ ID NO: 677499 - DNA, 1750 bp, Homo sapiens
gctgacaagagcctaagtcagttttataagagactctataaagcattctgactttacaccccatttaaccctgaggctgctgaaaatcagtatacagtgaatacttcatttgtaaagcaagcccagggtaacatcaagcagaagctgcaggcatgaataccacctagtctttaaaaggtgtatgttaactgtgaccaaggaacaaaactggaaagagcaaaagcaacaagcatggaagctaggcacgccaaggattaagtccctctccccagcctggctctaaaaaaggagccagggactggagctgggaaaagagcaaaagaaaaagaaagactaagagtaagtgtgaaaaagagaatcagcagaaaacaggagagacagacagcagtacgcgggggcagggcccgtgccattgcccggccctgccagctggctgtaggatcagggaggaaaaaaaattaattaaagtttaaggaaaaaaaaaaaaggcaatctgttggcaacagctcttacaaaaagagagattagcaatgtgagggatgtggatgtggatgtagatgtggaagaagtcaagttaggcaaggattcaagagccagacaaggctagagagagattaatgtgtgagatgcaaaaagaaaggacactagaaagataaatattcagaagacaatgaggaaagtggccaaggccgcaagacaaagaggccatcggccaaggactgccrcaccttggaggaaccaaatactgatctgatcaggctggcaggagctgaagaatgtaaagactagatcaggccaggcatggtggctcacgcctgtaatcccagcactttggaggccgaggtgggcggatcacgaggtcaggagatcgagaccatcctggctaacatggtgaaaccccatctctacaaaaatacaaaaaattagccgggcgtggtggcgggcgcctgtagtcccagctacttgggaggctgaggcaggagaatggcgtggacctgggaagcggagcttgaagcgagccaagatcatgccactgcactccagcctgggcgacagagcgagactctgtatcaaaaaaaaaaaaaaaaaaaaaaaaaaaaaaaaagactagatcagaccagatggaccagacacattctcattaggctcccaggagtccatggtcatgttaaaagttaaaagcagcaagattctaccatatctagattccaatttctcaatgatggctaagccactagatagagttacaaagcgggggaagaaaaagaacccctcctgtaagaaacttaaacaggaggaagagtcataccttgtgaaaacttgcttatagatattacagaactgccccatgccggaggctattggtacatgctagtgcttgtttgcaccttttcagggtcagttaaagctttccccaccaggacagaaaaagtacaagaagtaattaaagtactttcaaaagacattatccccaggtttagactgcctctaactttaaagtcagacaataggccagcatttgtagctaaaacagtgcaagatttaacaagactgttaaaaataaaatagaagttacacacagcctatcggccacaaagttcaagaaaagctggaaagcatgaaccagacactcaagcagctactgaagaaatattgccaggaaattcatttaagataaaatcaggtttttgcctatggtcctcctccgagtcaggtgcacctccaccaaacaaattaggtatttgcccta

SEQ ID NO: 677500 - DNA, 1750 bp, Homo sapiens
gctgacaagagcctaagtcagttttataagagactctataaagcattctgactttacaccccatttaaccctgaggctgctgaaaatcagtatacagtgaatacttcatttgtaaagcaagcccagggtaacatcaagcagaagctgcaggcatgaataccacctagtctttaaaaggtgtatgttaactgtgaccaaggaacaaaactggaaagagcaaaagcaacaagcatggaagctaggcacgccaaggattaagtccctctccccagcctggctctaaaaaaggagccagggactggagctgggaaaagagcaaaagaaaaagaaagactaagagtaagtgtgaaaaagagaatcagcagaaaacaggagagacagacagcagtacgcgggggcagggcccgtgccattgcccggccctgccagctggctgtaggatcagggaggaaaaaaaattaattaaagtttaaggaaaaaaaaaaaaggcaatctgttggcaacagctcttacaaaaagagagattagcaatgtgagggatgtggatgtggatgtagatgtggaagaagtcaagttaggcaaggattcaagagccagacaaggctagagagagattaatgtgtgagatgcaaaaagaaaggacactagaaagataaatattcagaagacaatgaggaaagtggccaaggccgcaagacaaagaggccatcggccaaggactgccgcaccttggaggaaccaaatactgatctgatcaggctggcaggagctgaagaatgtaaagactagatcaggccaggcatggtggctcacgcctgtaatcccagcactttggaggccgaggtgggcggatcacgaggtcaggagatcgagaccatcctggctaacayggtgaaaccccatctctacaaaaatacaaaaaattagccgggcgtggtggcgggcgcctgtagtcccagctacttgggaggctgaggcaggagaatggcgtggacctgggaagcggagcttgaagcgagccaagatcatgccactgcactccagcctgggcgacagagcgagactctgtatcaaaaaaaaaaaaaaaaaaaaaaaaaaaaaaaaagactagatcagaccagatggaccagacacattctcattaggctcccaggagtccatggtcatgttaaaagttaaaagcagcaagattctaccatatctagattccaatttctcaatgatggctaagccactagatagagttacaaagcgggggaagaaaaagaacccctcctgtaagaaacttaaacaggaggaagagtcataccttgtgaaaacttgcttatagatattacagaactgccccatgccggaggctattggtacatgctagtgcttgtttgcaccttttcagggtcagttaaagctttccccaccaggacagaaaaagtacaagaagtaattaaagtactttcaaaagacattatccccaggtttagactgcctctaactttaaagtcagacaataggccagcatttgtagctaaaacagtgcaagatttaacaagactgttaaaaataaaatagaagttacacacagcctatcggccacaaagttcaagaaaagctggaaagcatgaaccagacactcaagcagctactgaagaaatattgccaggaaattcatttaagataaaatcaggtttttgcctatggtcctcctccgagtcaggtgcacctccaccaaacaaattaggtatttgcccta

SEQ ID NO: 677501 - DNA, 598 bp, Homo sapiens
taatccatatatacaaaatgctgttgtttaagaaaataatgggacccagttttagaataaaataattttatacaaaaaagcctactgcattcaaatcaatattttaaaaaaaaactttaaaaaagaatattgacatgtcttagttcagaagaataactataaagtgttgatttgcttttatgccctctgcacatcttgcaggtagaacaccagtcagctgagggaaagtatcctgcttctccctaggaagagattcatcaccaaggcagacagtcatcgccgagatgcgtacttggaagcccagtctgtccggccatgcactggctgggcggctggaggccgtggtatcaacccaggagtgcttctaggctgggtgtggaagaatggtcgcccaggatgaggtctcatggccttcagggaggaataacctgcaatgaaagaaaaaggccggcatgactgatatggggccaatgtaagcaaagtacaaataaatgcattttsgtgacaaaaacatgagaaaataaggagttcaagaggagcatcttgtctcctacttataatcttctctactgcagttaaagacatcgttttaaagttg

SEQ ID NO: 677502 - DNA, 475 bp, Homo sapiens
agatgtttttaaaagataaggtcattacactaataagaacagcttactttttttttttttttcagggatggagcatgtggtaggcagaataatggccaccccaccaaagctttctacagcctaatccctggatcctgttacactacctggcaaaaggctttgtggatggacttaaggttatccaggtaggcccaggacaatcacgtgggcccttaraagtggacaaggagggccaggcatagtggctcacgcctgtaatcccagaactttgggaggctgaggtgggcagatcacttgaggtcaggagttcaagaccagcctggccatcatggcgaaacccggtctctactgaaaatacaaaaattagctgggtgtggtggcacacacctgtaatcccagctactcaggaggctgaggcacaagaattgcttgaacctgggaggtggaggttgcagtgagctgagatcacatcact

SEQ ID NO: 677503 - DNA, 645 bp, Homo sapiens
ggaaggcttttttttaaaggctatgtattcatttactcagaggcagctgtgtatctggaaacaatcccacatcctcctatgaaaagaaccatgccacgtgcctccccgagacaaggttcagttttattcagctaacatttgttaactccagctgcatgaaaacagactaacagaaaaccaggtataagagggtgaggccctaccactcacatggtcatggagctgaggtcatctgatagtcaggtccaggagtccctcgttagcaagaattgyaagacttgaagacgcatatcactttgttgtacaacttgctattaaatgtaagctactgttcataaacataggtggctaagagcatttaatgtcaattttagctacgagggaggagtatgcattcttttcttgaaacattggtggtccattatacagtttagtttctatgaaaattgccattcaaggtggtttataaacttaaaactccaggcaggaagacaagtttgttgcctaagactgtacagtctgagagtgaacttcttgcctcatttgcaacatctggaaccagtgggctcttcatgcactttaagtgctcctttccctaagattatcaagaaatttgtgttgagttagaatacagctgttgaagcc

SEQ ID NO: 677504 - DNA, 660 bp, Homo sapiens
ctgtttagaaaatatttcaaaagctacttagagacaaatggacatccccaggcaatattcttggcagcaaatcaagtgaggtcccatagagtccatgtaattttcatccttgggtcactttgagatgatgacaatagaataaayagaataagggagagtatggctggtctagaggcacccggcacttctagagatctagggagcaacaattccagaataatccttgtgattatctcattcctaaggcaaaatagcgtccaagttaaatcttaagcagttcagtgaacaggaaggtatttctacctcctctcctcctgctggggacaactgggatgagaagccttgtcccccccacttccaccctcttatagctccctgccatgggaggagtcacttatccgactggtcagagcccaggacaagcagttagctgtgctcgctggtgggcggcatcgctgtgccttgcggctcagaagcccttctctggatcttcaagcttctacacgcttcaggtttcccataggaaggcccagttaagtccgtctctcagttccatcttcccctcctgcaactgggtgggtaagccagggagggtctgctctacagggcagtcagtttgggaaataacgtgccagaagcttcactttaggtctcctctaa

SEQ ID NO: 677505 - DNA, 660 bp, Homo sapiens
ctgtttagaaaatatttcaaaagctacttagagacaaatggacatccccaggcaatattcttggcagcaaatcaagtgaggtcccatagagtccatgtaattttcatccttgggtcactttgagatgatgacaatagaataaatagaataagggagagtatggctggtctagaggcacccggcacttctagagatctagggagcaacaattccagaataatccttgtgattatctcattcctaaggcaaaatagcgtccaagttaaatcttaagcagttcagtgaacaggaaggtatttctacctcctctcctcctgctggggacaactgggatgagaagccttgtcccccccrcttccaccctcttatagctccctgccatgggaggagtcacttatccgactggtcagagcccaggacaagcagttagctgtgctcgctggtgggcggcatcgctgtgccttgcggctcagaagcccttctctggatcttcaagcttctacacgcttcaggtttcccataggaaggcccagttaagtccgtctctcagttccatcttcccctcctgcaactgggtgggtaagccagggagggtctgctctacagggcagtcagtttgggaaataacgtgccagaagcttcactttaggtctcctctaa

SEQ ID NO: 677506 - DNA, 660 bp, Homo sapiens
ctgtttagaaaatatttcaaaagctacttagagacaaatggacatccccaggcaatattcttggcagcaaatcaagtgaggtcccatagagtccatgtaattttcatccttgggtcactttgagatgatgacaatagaataaatagaataagggagagtatggctggtctagaggcacccggcacttctagagatctagggagcaacaattccagaataatccttgtgattatctcattcctaaggcaaaatagcgtccaagttaaatcttaagcagttcagtgaacaggaaggtatttctacctcctctcctcctgctggggacaactgggatgagaagccttgtcccccccacytccaccctcttatagctccctgccatgggaggagtcacttatccgactggtcagagcccaggacaagcagttagctgtgctcgctggtgggcggcatcgctgtgccttgcggctcagaagcccttctctggatcttcaagcttctacacgcttcaggtttcccataggaaggcccagttaagtccgtctctcagttccatcttcccctcctgcaactgggtgggtaagccagggagggtctgctctacagggcagtcagtttgggaaataacgtgccagaagcttcactttaggtctcctctaa

SEQ ID NO: 677507 - DNA, 660 bp, Homo sapiens
ctgtttagaaaatatttcaaaagctacttagagacaaatggacatccccaggcaatattcttggcagcaaatcaagtgaggtcccatagagtccatgtaattttcatccttgggtcactttgagatgatgacaatagaataaatagaataagggagagtatggctggtctagaggcacccggcacttctagagatctagggagcaacaattccagaataatccttgtgattatctcattcctaaggcaaaatagcgtccaagttaaatcttaagcagttcagtgaacaggaaggtatttctacctcctctcctcctgctggggacaactgggatgagaagccttgtcccccccacttccaccctcttatagctccctgccatgggaggagtcacttatccgactggtcagagcccaggacaagcagttagctgtgctcgctggtgggcggcatcgctgtgccttgcggctcagaagcccttctctggawcttcaagcttctacacgcttcaggtttcccataggaaggcccagttaagtccgtctctcagttccatcttcccctcctgcaactgggtgggtaagccagggagggtctgctctacagggcagtcagtttgggaaataacgtgccagaagcttcactttaggtctcctctaa

SEQ ID NO: 677508 - DNA, 1746 bp, Homo sapiens
aagaaagtgtcacaagataagttcaaacagaagaacagcaaatgccattttatatcattgtaatagatcaaagaatattacaaataatattcattcaaggaatacaaattttcttctctctaaacatttttgtaactcataatgtacaagatattgtcaaaataattccatgattttggtactaatatttgccaaccggggcaaaagagttgcgatttctttttgagctgggcaaaccatctgtataattgattagaaagagccacaagtttaacttcctctacagttttcctgtgggaaacgtcacatgaagggaaataaaaccatattttcatgtaatgtaattttttttaagatggggtcttgttatgttacccaggctggtctctaactttggcctcaagggatccttccccctcagcctctcacctctctcacctccagcctcccaaatgctaggattacaggcgtgatacatcgcgcctggtggaagaagagcacttcaatttcacccctaaaaacctcccaggcaaagactgtatttctttgccttcagatgggggcaaatttttggaagaacctttagacagcgattcccaaacagggacaaagtagatttcctgctttcatcttcctgatagtgatcaaggctggaggrtagtagtttctccaggagatcttatctcacgcaccaccatggccctccatgtccagctggttgaagcctgcagaatgtggtggtgggaacaggagtcttgggtcttctggattttgagactatgtcctgtttcccaagagaactaggagcaggtctttgtattcaggcctgactaagaggagatactattcagatatctactattcaggtatctcaaatgcatgaagatgtccttacttttaagccatggctccaaggcgtatcccaggaaagggagcaggcaaggctggagcagagcgtccccagccaggagcagagagcaagggacggagaatgtcagcgattccgggagagcccgcgagggggcgagcgaccaccgctcggccgcgagctcagcgcttccctcgccgcttcccaacggccagcagagggcgcgcgcctggcgctgagcccaaccgccgcctccaacgggactggaccagaccgggtgggaccggaccgcggtttgagtccaagcccagcggtgtttgcggcgggtccggggcctggaagcgcgggggcggcgccgagagtgagtaagaagttctggaacagcctcagttccaaaaaaatgagtcgctttgttgcggcattaaattttgcccctaactcatgtgtcccggcgtggcccgggagcagcgggcccttcctcttccaggctccctggccccggtctttgatgactcagagctcctgcggtcaccgggccgctctggagactcatcagagcagctcccccatcccgtcagctctgcggttacagcctcagttaatttccaaagtcgcccactttcaaaacacgatcttagggcgggacgatatgtacgcatcttcctgtggccagcagcagtgatggcaacgctgtaggcacctccttcccttaggaagaagccaaacatttcacgaagtccttctgtgcttttagacgaaactggaaaatggccttcattggaaaagccccagtcctcggggagcagatcccccatctctggcagtgcagtgtgcctgggagctgtctggaacattccgcaagtgagtacttttccttt

SEQ ID NO: 677509 - DNA, 652 bp, Homo sapiens
ttgagacagagtcttgctctgttcasccaggctgtagagcagtggcgcgatctcggctcactgcaatctccgcctcccagattcaagtgattctcctgcctcagtctccccagtagctgggactacaggcacctgccgctaagcccaggtaatttttgtatttttagtagagatggggtttcaccatgtgggccaggatggtcttgatctcttgacattgtgatctgcccgcctcggcctcccagagtgctgggattacaggcgtgagccactgcgcccggccggctcattctcatctttaaggtgggttcggagaaaggagatggaaatggccttcactctggcaaagaaggacggaaaagtccctggtgactcattgggacgtactgctttgctcaaggctcctattgtcatcttgaggcaagttctgctttccaagaccattgcctgaatactgtttatgatactttttgaggaaaggcattcattcatacaaggtaaatgaattactgttatgcaaagtaggaaacccacagcagtgtttggagtccttttggacagtctctttcttttaaaaaattatgtctcttaattcttatttatttggtatcttttcttttctccactgtttctagaaaaaacaaaatgcatg

SEQ ID NO: 677510 - DNA, 606 bp, Homo sapiens
gttcatgccattctcctgcctcagcctcctgagtagctgggactacaggcgcccgccaccatgcctggctaattttttctatttttagttgagacgaggtttcactgtgttagccaggatggtcttgatctcctgacctcatgatctgcccgccacggcctccaaaagtgctgggattacaggcgtgagccaccgcgcccggcccctaattttttgtatttttagtagagacgggttttcaccatgttggccaggctggtctcgaactcctgacttcaagtaatcctcttgcctaggctttccaaagtgctgggattacaggcgtgaacccctgcacctggccactccagaccacttttacctcaccatgttgctcttcagttcctttgtgatcatgtcttgtggagtctccagcccagttccgattcaagatagagctactgtgattttttttaaaaaaatttaattagaataggttaaytgacatggttttataattaaaatgatatcaaaggggtggggtatctcattcccatgttgctcctgttcaccccaaaccccaatagtttctaatgtctcttcagtgtttcattttacagatacaag

SEQ ID NO: 677511 - DNA, 431 bp, Homo sapiens
tttatttccccaggaaaataaatcggcagttttgctccaagaaaagtgatcagaggaagcagtgttcctaaccagaaggagggcctggaccatctccagcccctcayagccccctccaggcctgcctcccatcctgaaggtgcctgacgttaagtcagagcctcagacaaagcaccctttgggcttggactcaagaaacctctcctgcctatggcagtggataaaggtcttaggagctggagggttactttctcccaccccaacttaggtgaaagacatttggcagtgtctggatttgagaactggagaggggtgctactggcctgtaggaggtcgaggccagggatgctgccaaacatcctgccatgaaagggactgcccccacaacaaaactccttggcccaaaatgtcaacggtgttgagggtgaaaa

SEQ ID NO: 677512 - DNA, 431 bp, Homo sapiens
tttatttccccaggaaaataaatcggcagttttgctccaagaaaagtgatcagaggaagcagtgttcctaaccagaaggagggcctggaccatctccagcccctcatagccccctccaggcctgcctcccatcctgaaggtgcctgacgttaagtcagagcctcagacaaagcaccctttgggcttggactcaagaamcctctcctgcctatggcagtggataaaggtcttaggagctggagggttactttctcccaccccaacttaggtgaaagacatttggcagtgtctggatttgagaactggagaggggtgctactggcctgtaggaggtcgaggccagggatgctgccaaacatcctgccatgaaagggactgcccccacaacaaaactccttggcccaaaatgtcaacggtgttgagggtgaaaa

SEQ ID NO: 677513 - DNA, 431 bp, Homo sapiens
tttatttccccaggaaaataaatcggcagttttgctccaagaaaagtgatcagaggaagcagtgttcctaaccagaaggagggcctggaccatctccagcccctcatagccccctccaggcctgcctcccatcctgaaggtgcctgacgttaagtcagagcctcagacaaagcaccctttgggcttggactcaagaaacctctcctgcctatggcagtggataaaggtcttaggagctggagggttactttctcccaccccaacttaggtgaaagacatttggcagtgtctggatttgagaactggagaggggtgctamtggcctgtaggaggtcgaggccagggatgctgccaaacatcctgccatgaaagggactgcccccacaacaaaactccttggcccaaaatgtcaacggtgttgagggtgaaaa

SEQ ID NO: 677514 - DNA, 645 bp, Homo sapiens
tttctacaaaataacaaaaacaaaaatagcaaggtgtggtgatgagcacctgtagtcccaactacctgggagagtgaggcaggaggatcccttgagcccaggagtttgaggctgcagtgagccatgatcaggccattgcactccagcctttggcaacagagagagactctctctcaaaaaacaaacaaacaaaaacaaagcacagcataaaaccaaacagtgataaatgagattaacgaagaatggaaatctggattatgtaatagggtgtgttgggataggktggaacagcaggggggcatttatagtgggcagtgaggtgaggccttactgccaaagtgccatttacctgaaagatgaaagacaagaaatagctgaaggaaaggcaagctagatggacaaacacagaggctctaggataaagatgagcttggtgtttgaagaatagaaagataccatgggtttgagcctgataggtcagaggaagagtgctgtggaataaatttaaaatcaggtagtcaagtcttttgctacttggaggccaaagtaaggaaaattgattttatttcaggtgctgtggttaagaggcagaggactttcaccaagaagagtaatctggatttgtttacgttttacagatcattc

SEQ ID NO: 677515 - DNA, 645 bp, Homo sapiens
tttctacaaaataacaaaaacaaaaatagcaaggtgtggtgatgagcacctgtagtcccaactacctgggagagtgaggcaggaggatcccttgagcccaggagtttgaggctgcagtgagccatgatcaggccattgcactccagcctttggcaacagagagagactctctctcaaaaaacaaacaaacaaaaacaaagcacagcataaaaccaaacagtgataaatgagattaacgaagaatggaaatctggattatgtaatagggtgtgttgggataggttggaacagcaggggggcatttatagtgggcagtgaggtgaggccttactgccaaagtgccatttacctgaaagatgaaagacaagaaatagctgaaggaaaggcaagctagatggacaaacacagaggctctaggataaagatgagcttggtgtttgaagaatagaaagataccatgggtttgagcctgataggtcagaggaagagtgctgtggaataaatttaaaatcaggtagtcaagtcttttgctacttggaggccaaagtaaggraaattgattttatttcaggtgctgtggttaagaggcagaggactttcaccaagaagagtaatctggatttgtttacgttttacagatcattc

SEQ ID NO: 677516 - DNA, 666 bp, Homo sapiens
aaagaaggcagaataagattgagaacaaaaattactgacataggaaatgaaccaacaaaaaccaacatggggtgaccaataaaacccaacctggttctcaggaaacactaaaatgtgaaacaaatctctaccgagcctgggcacagtggctcacgcctgtaatcccatttttttgggaggtcaaggtgagaggatcacttgagcccaagagttcaagacatccctgggtgacatgacaagaccctgtctccacaaaataaaaaaaaattaaccaggtgtggttgcacgcacctgtagtcccagctacttgggaggctgaggcaggaggattgcttgaacccaggagtttgaggttgcagggagctgtgatcacaccactgcactccagcctggatgacggtgcaagaccctagctctaaaaaaaatgtctactgagattgagcaaggaaaaagagagaaygcagaagaatatcaaaaatcaggccagcctggtcattacacaggcccagtgtggactgaacctccttgaggggacactggtgggtgacatgacaagaccctatctccacaaaataaaaaaaaataaccaggtgtggctgtgcacacctgtaggctcagctacttgggaggctgaggcatgaggatcgcttgaacccaggagttcaa

SEQ ID NO: 677517 - DNA, 603 bp, Homo sapiens
cttccctcataatgactgtgcaagcagccaacttcctacatgcctaatatttgatcaacaatttcctcaaaaaggaaagtacgaaacactaccacttcttaagcagctagctaacagcaattacttctcataatcctaccaatatctaaaayccaataaaaattccaaaacactctcaagcaagacaatcaacaccacctttcacttcatatgactaacctctctatcccaaatgtcatgactaaatgttactctgtatcattcaagatgccaactatgacgacaaaatgtctatacctagcatttctcaagtcagaagttccagtatactctgttatccagtatagtacagttacatctgacacagggatgttatttaacaaacgtggttctctcttttcaagacacttggtggagaagtgaaaaatctgttaacagactttgactacagtcgtctcaacagccgattcctaagtggcccatcctttgaaatagaagaagatatttacacatacatacgataggtacttacattattataaaaagcatgtctttataagacatccatgcttatgtttacagcatcatctaccatacttcaaa

SEQ ID NO: 677518 - DNA, 1523 bp, Homo sapiens
ttacaaaagttcagaaatataactctataaagttcatacatttctggcttcacttatattgttagcatttttttcaattcaactactaaatattatttttaagagcagtaaagtaatccatcctatagttgtagcactatttctgtaactattctattatggctgggcatgtttatttttccagaatttttgcacatatgattaataccagtatacaatctttacatagtacttagaatcattccttgaaataaatttgtgtataattaccaaatcaaactattttagcattgatcacatgtatatactgccaaattatcttcctggacgactatcaactcaactaccactctcccttcctccacctacccttccccaatatgcacatggttgagcacatacactcattgcaagtaatagtaattccattttggaacatccctttgattttagccataactatcagatgatttctttggtatctagtattattctatattttgcttttatttatttgcaaaaattgagtattatttcatgtgagctgaatgtgtgaatttttgtcttttaaaaatattgatgtcctgaaccattttcttactctatttggagctttcattaaaaagataaaattggcctggagcggtggctcatgcctctaatcccagcactttgggaggcagaggcaggcagatcacgaggtcaagagatcgagaccatcctgtccaacatggtgaaaccccttctctactaaaaatataaaaattagctgggcgcggtggtgcgcacctgcagtctcagctactcgggaggctgaggctggagaatcgcttgaacccgggaggtggaggttgcagtgagctgagatcacgtcactgcactccagcctggcgacagagtgagactctgtctcaaaaaaataataaaataaataaaattatcaaaatttttaatattttgaagcaattaagccatttacttgccctaattatgacgcctttctcaatttgggtttaaattttgtttgtggtgctttcttatatgtagggtagacttctttcttcatttctrtagttctattgctgtttaaattattgtttagctgaactgaactctttcagtaagtgaaaacaagctaaatttccttcaaatagtttcccatttgtcccaacaccatgcatttaatctctcctttcaccactgatctacatgaccacctttatcacagactattaattactttttggtagattttaaatttttattctgcttcttttgttacagcagtcttagagtacattttaatagttgatgaggtaaattcatcattaacttctgaataattcattgtactaatgaactttacaatgttaattggccacattctacacacccttaaaaaaaactactgggatttcttttaaattggaatctaattaaattagtaattatggttactggtctatcccaattgtcctaaaattaatctgaactattttaatattttacattcttctttaaaa

SEQ ID NO: 677519 - DNA, 709 bp, Homo sapiens
ataaaatgacaggcttatgctataatatttatattaaataaatggyctaaatacacaattaaaaaactgagtctggcagagtagatttacaaagcatagtccaaccatatgctatctataagaaattcacctaaaagataatgagacagtaataggtataacaaggaaaggaagacctggtatgaatgcaggaaattctcaccacacatttaacaactttacaatgaatcatgcaactgcagaaaatgcattcttttcaagcacaagtatttcaaaatttaaccaattaccagttggtacagcaaatattatattcaaagaaagaaaacacaactttctgactacaatgcaattataacagaaatccagaacaaaaaaaaaacaaaatctcaatgttcaagtaataagacatttgtttctaaataagccacaggcctaagaaaaaaatataatgaaaattagaaattattttgaacaataataaacaaaatatgatgccaaaagaattaggtacagattaaaaaataagaaactatggccctaaatgcctacattagaaaaaataatctgcataataatatgcatatccacccaagccaacagattaggaaggaacaaaaaagtaaaaccaaagaaagcaggatggaaataataaagaacataaataaaacagaaaacaaacaaaacagagaggaaaaacaaagtcaaa

SEQ ID NO: 677520 - DNA, 609 bp, Homo sapiens
taatagtttgaaatatggccagagactcagaagaaaagaccaagaaactaaagaagaaatattggaagagttgatggctgaggtttttccagaactgaaaacagacatgaatacacagaaagtgaaattattccgatcaagtgagataattaaaaagaaacccacagtkagacacactaaggtgaaactgtgtttttgtctatacagcaaaaatatcttaaaaccaaaagaaagataatttatttaggaacaacaattaaaaaggcaaaatgcttttcaagagcagtagaaagaagctagagcaaaaaggacatcaataatcttaaaaaagttgagagaaaaaaatttcagcctaaaattcagaaccccaaaaggctatctcacaacatcataaacaaaaatgaagtttattaccagtgagccatctctaaaagaatttctgcctgtaatcccagctactcaggaggctgaggcaagggaatagcttgaacccaggaggcagaggttgcagagagctgagatcgtgccactgtgccactgtactcaagcctgggcaacagagcgagactccgtctcaaaaaaaaaaaaccaaaaaaaaaacttctgaag

SEQ ID NO: 677521 - DNA, 636 bp, Homo sapiens
tccgccactgaccggctgtgggatgttggactgaactcttccttagtaaccttatcaggaaaatagggaatgtgtgatcattcaatagttactacatgttacatcctcaaaactcactaacacatcctccatactcaaaggctagctactactttagccagctaaagcattgagggtgctctctctttcaatgtttaattaacgatctttcccacccccactagattaagttgcttgaggatagaaactaggttttcttcatctttaaatactcaaggctggctgggtgtggtgtcagacgcctgtaatcccaacaggcaggtggattgcttgagctagctcaggagttcaagaccagcctgaggaacatggtgaaagcccatctttacaaaaaaaaaaaaaaaaatcaaaagtttcaagccaggcatggtggttcatgcctgtaatctctgtaatcttagcatattgggaggccgaggcaggaggatcacttgagcccaggagttcaagaccaccctgggcaacacaggagaatattagccaggtgtggttgtggtagcctgwgatcctagctacttgggaggctgaagtgggaggatcacttatgcccaggaggtcatggctgcagtgagccat

SEQ ID NO: 677522 - DNA, 651 bp, Homo sapiens
tgtccctatatttatctaccctctatctatcatctatctatctgtatataaaaaggagatttattatgaggcattggctcatgtcatatggaggctaagaattgccacaatctgcattctgcaagctggggacccaggaaagccaatggtgtaattcagttttagtctgagaatgaatggtgtaaataccggttcaagggtagaagaggagatgggatgtcctactcaagtagtgaggcagaacaaaagggatgaattcttcctttctccaccttttctyatattcgggctcttaaggggttgatgattcccacccacattgggggtggcaacctaccgaggccacttattcaaatgttaatctcacaagcaccctcacagatacacccccaaagtcacatataatctgggcatttcatggcccaaccaagttgacacataaaattaaccatcacagggcccttcataatttggtggcaatgataaaacctgcccatcattcaatacaattgaatacaaccctacccatccattaagtttatgctaaaccacacctgctccatggagccttgcctgactctcttataggatgggaagctgcactataatcccatcactcaccttcttcaccattcttctccacccttcttt

SEQ ID NO: 677523 - DNA, 598 bp, Homo sapiens
ctcacaaatgccagggacttaagacagccataattaatctcgtagatttgtgggctcactgatgggctcagctgtatggctctgttgatctcaagggggtttggtcttttgtctagggttcagctggaggtgagttgatgtaggttttatgtggctrggatggctgaattcttttgcccaaacaagcatatttttcttgtggcaatggcaaaggcgaatgagagctagctcaataatgcaagcacttttcatgttgttggtcatgtgacacccaataacactccatcgcaagtcaagtcacaagacagaaaccaaagtctagggggtgggaatacataatcctctttagtcagattgcaaacatcccttgtcacagagaatgggtacaggcgtagatggagaacaagagcttttactgaaattaattgaaaacacaatacaactatagatagcttgagtcagtattatttttaaaagcttgatggcaccaggagaagaaagctaaccaatgctcagatgaagtacattttgtgtcaaattttaaaatgctttgaatgttatattttaaaatatgcttgtcatcataagcatcctttgc

SEQ ID NO: 677524 - DNA, 598 bp, Homo sapiens
ctcacaaatgccagggacttaagacagccataattaatctcgtagatttgtgggctcactgatgggctcagctgtatggctctgttgatctcaagggggtttggtcttttgtctagggttcagctggaggtgagttgatgtaggttttatgtggctaggatggctgaattcttttgcccaaacaagcatatttttcttgtggcaatggcaaaggcgaatgagagctagctcaataatgcaagcacttttcatgttgttggtcatgtgacacccaataacactccatcgcaagtcaagtcacaagacagaaaccaaagtctagggggtgggaatacataatcctctttagtcagaytgcaaacatcccttgtcacagagaatgggtacaggcgtagatggagaacaagagcttttactgaaattaattgaaaacacaatacaactatagatagcttgagtcagtattatttttaaaagcttgatggcaccaggagaagaaagctaaccaatgctcagatgaagtacattttgtgtcaaattttaaaatgctttgaatgttatattttaaaatatgcttgtcatcataagcatcctttgc

SEQ ID NO: 677525 - DNA, 598 bp, Homo sapiens
ctcacaaatgccagggacttaagacagccataattaatctcgtagatttgtgggctcactgatgggctcagctgtatggctctgttgatctcaagggggtttggtcttttgtctagggttcagctggaggtgagttgatgtaggttttatgtggctaggatggctgaattcttttgcccaaacaagcatatttttcttgtggcaatggcaaaggcgaatgagagctagctcaataatgcaagcacttttcatgttgttggtcatgtgacacccaataacactccatcgcaagtcaagtcacaagacagaaaccaaagtctagggggtgggaatacataatcctctttagtcagattgcaaacatcccttgtcacagagaatgggtacaggcgtagatggagaacaagagcttttactgaaattaattgaaaacacaatacaactatagatagcttgartcagtattatttttaaaagcttgatggcaccaggagaagaaagctaaccaatgctcagatgaagtacattttgtgtcaaattttaaaatgctttgaatgttatattttaaaatatgcttgtcatcataagcatcctttgc

SEQ ID NO: 677526 - DNA, 1107 bp, Homo sapiens
gtttatttaaacacaggcttatttttatttaaccctcttggtacttgatgttcatggtctaagtttatctttcttcaaatctaaaagttcttatctattcactttctaaatatcatttttctgccattctttctattttctttctttctttttgttttttggagtgccaattagcatgtgttgagtcttctcaaactcttttccatctccattaaccagtttttaatatttttagtctctttatccttctgcaatattctggcagaatgcctcaggattttcctatgttcactagctgtctcaattactaaaaccaattgagaggttttctgttttagttttttatttcatttactgtattatttgttagatttttacttcactatttttttcttttcttttttgctattttatattttctttttttccccccagtggtcttgtactttttatatctctttgaagatccttaacatatatgcttcaaattgattttcatatttctctatcatattttcatattttatctagactgaatttatctcatggctgctgttcctaaattggtattcttcatgaattttggaatatcagtttccagatycatcttgactgaaagcctgtcatggtctgtagtgtggctagggggcctctatctcacatcaatattgtaaatagtgcaatccagatgccaagctattgggtggtgtagtcttcgcctcatttcttggcattatctacttcctcttgtccccctagtgatgcaattgtataatagttctaaccattgattcacatacgtggtgagcaccactgttctgagcttccatcatggcagggagagccccactgaagcacctcatttcaggttgtgaattcttacttagtcctatctccagtggggcactttcagtttttatcatgcactggaaaccaaactgccagtaggctctacttgcttccatttctggaaccagctagccccatctactttgtgtttcgtttctatttctgatcaagaacatggatattttgtctttgagagtggttttatctttctgatttcctgtattttgcttcaattaaaattctgatgggaaatgggtg

SEQ ID NO: 677527 - DNA, 1107 bp, Homo sapiens
gtttatttaaacacaggcttatttttatttaaccctcttggtacttgatgttcatggtctaagtttatctttcttcaaatctaaaagttcttatctattcactttctaaatatcatttttctgccattctttctattttctttctttctttttgttttttggagtgccaattagcatgtgttgagtcttctcaaactcttttccatctccattaaccagtttttaatatttttagtctctttatccttctgcaatattctggcagaatgcctcaggattttcctatgttcactagctgtctcaattactaaaaccaattgagaggttttctgttttagttttttatttcatttactgtattatttgttagatttttacttcactatttttttcttttcttttttgctattttatattttctttttttccccccagtggtcttgtactttttatatctctttgaagatccttaacatatatgcttcaaattgattttcatatttctctatcatattttcatattttatctagactgaatttatctcatggctgctgttcctaaattggtattcttcatgaattttggaatatcagtttccagatccatcttgactgaaagcctgtcatggtctgtagtgtggctagggggcctctatctcacatcaatattgtaaatagtgcaatccagatgccaagctattgggtggtgtagtcttcgcctcatttcttggcattatctacttcctcttgtccccctagtgatgcaattgtataatagttctaaccattgattcacatacgtggtgagcaccactgttctgagcttccatcatggcagggagagccccactgaagcacctcatttcaggttgtgaattcttacttagtcctatctccagyggggcactttcagtttttatcatgcactggaaaccaaactgccagtaggctctacttgcttccatttctggaaccagctagccccatctactttgtgtttcgtttctatttctgatcaagaacatggatattttgtctttgagagtggttttatctttctgatttcctgtattttgcttcaattaaaattctgatgggaaatgggtg

SEQ ID NO: 677528 - DNA, 1107 bp, Homo sapiens
gtttatttaaacacaggcttatttttatttaaccctcttggtacttgatgttcatggtctaagtttatctttcttcaaatctaaaagttcttatctattcactttctaaatatcatttttctgccattctttctattttctttctttctttttgttttttggagtgccaattagcatgtgttgagtcttctcaaactcttttccatctccattaaccagtttttaatatttttagtctctttatccttctgcaatattctggcagaatgcctcaggattttcctatgttcactagctgtctcaattactaaaaccaattgagaggttttctgttttagttttttatttcatttactgtattatttgttagatttttacttcactatttttttcttttcttttttgctattttatattttctttttttccccccagtggtcttgtactttttatatctctttgaagatccttaacatatatgcttcaaattgattttcatatttctctatcatattttcatattttatctagactgaatttatctcatggctgctgttcctaaattggtattcttcatgaattttggaatatcagtttccagatccatcttgactgaaagcctgtcatggtctgtagtgtggctagggggcctctatctcacatcaatattgtaaatagtgcaatccagatgccaagctattgggtggtgtagtcttcgcctcatttcttggcattatctacttcctcttgtccccctagtgatgcaattgtataatagttctaaccattgattcacatacgtggtgagcaccactgttctgagcttccatcatggcagggagagccccactgaagcacctcatttcaggttgtgaattcttacttagtcctatctccagtggggcactttcagtttttatcatgcactggaaaccaaactgccagtaggctctacttgcttccatttctggaaccagcwagccccatctactttgtgtttcgtttctatttctgatcaagaacatggatattttgtctttgagagtggttttatctttctgatttcctgtattttgcttcaattaaaattctgatgggaaatgggtg

SEQ ID NO: 677529 - DNA, 601 bp, Homo sapiens
taaaaccttttgtaaagtaaggaaatatattttcagttttttagatgacaaaacatcggaggaagtttttgacattttctcaaaaaacagaaccatcatggttggaaccaggactgcaaacttgtcttttgagctccagtcttgtgctagtttcaccacatttggatgccttgtttagaaagctagttcaggccactctgagatacatcttttaaaacasacagacattcacacaaacatacatctttctttttaatagtataaaattgcctaagatgaaaaagcattctcagcagaggggaaaggtctattttgcactagttaatatctcagttaaaatatcttcttctaactaattctaaagcattgttgtcaatattgagaagtgacatccctgggaagtcccttaattgcataaaacaaaactaaagtgaaaaataaaaaacaaaaacaaaacaaaataatttgcattctcagaaatatctttaccactctatctttctctctccatccattcccttctcttatcctgtctttttttttttctaaacctgtgtttacggctttgtggtacaagcatctctgtgggcattgtttctct

SEQ ID NO: 677530 - DNA, 630 bp, Homo sapiens
agaggataagtctagcttgcactaggatgctgacatcagagaaggagagaaatagactcaagaggaattggcagataagtgtctcagaatatattgatgaatgcaaatgaggacaatttatggacagccagaattctggtctgaacagctggataggtggtggtgccacataacaggagggatcattgagggatacaggagaaycaggtttaagggtgaagatcatgattacaatattggttaggttgagttgaaccagtcttcgggacatggaagtgaatgtgtgaaggcaattggatgtatcaagttggagatcaggcaggatgttctgatgctatagatgctgatgagaaagtcactgttagtagaatgctctcctgctttctactaacaaagataagaactgaagtcatttgcatggagtcggtggagggagagaacttcaggtgtagactctgaggatcattaagttgaaaatacttattgtgtagtgtggatgaacacattatctagagtaacagtgtgctgagagtaattgcaaatcctcaacctcaatccagaggttgaatgaacctgaaaatagtttgttggaggctggcctccattaccagggaacatagagagctcaca

SEQ ID NO: 677531 - DNA, 630 bp, Homo sapiens
agaggataagtctagcttgcactaggatgctgacatcagagaaggagagaaatagactcaagaggaattggcagataagtgtctcagaatatattgatgaatgcaaatgaggacaatttatggacagccagaattctggtctgaacagctggataggtggtggtgccacataacaggagggatcattgagggatacaggagaatcaggtttaagggtgaagatcatgattacaatattggttaggttgagttgaaccagtctycgggacatggaagtgaatgtgtgaaggcaattggatgtatcaagttggagatcaggcaggatgttctgatgctatagatgctgatgagaaagtcactgttagtagaatgctctcctgctttctactaacaaagataagaactgaagtcatttgcatggagtcggtggagggagagaacttcaggtgtagactctgaggatcattaagttgaaaatacttattgtgtagtgtggatgaacacattatctagagtaacagtgtgctgagagtaattgcaaatcctcaacctcaatccagaggttgaatgaacctgaaaatagtttgttggaggctggcctccattaccagggaacatagagagctcaca

SEQ ID NO: 677532 - DNA, 623 bp, Homo sapiens
aataagaaaatccttctaaagcttccagtaagcatcagttaataattggtagtttctgtttctcttattgcttttgttaaaaacaattatcttctacatgtgagtaatggtaaaatgggacaacaatgtgatttgtttcaaacaatttatttttatgctggtatttcctacttcagaataaatgaaaatatagattattgaatctgacaataaatcatattctttataaatgaaagcagaatggaagattaatttggattcagatattaagaagactgaataactgatatgaaatattcctacacactagttttaaaattatgttctacaaggcaactttgagggttttttgaaatgacatgtttatggtagacaaacrtatcatatgctcttacgaatattcaatatgtcagcaaaagatccaactctaaattttcttgttacagtcagcttcctaagaccgctctatgcataactgtgttacacaggtttcctggaacagaccttgaagtggaggactgcaggcagaatctttgttgtggagtgatcttgagatacacacctgtaaagaagtgagaaatgcaggattagacagagggggaagctgccaaacaataaggtga

SEQ ID NO: 677533 - DNA, 2038 bp, Homo sapiens
taatatctggagggatttcattgaaatcacagaggttccttggctctttactttattaacaggcattaggaaagcacatcgactttcttatttaataaaatgcctgttgctttgaaaaattgctcaaaagaagaaaagagagggttacttaaagatatcactataggcatggcatgctggtccacacctgtaatccaagtactttgggaggctgaggagagaggatcacttgagtccagaagttcaataccagcctaggtgacatggcaaaaccccatctttacaaaacaaaacaaaatagaaaaaatattcaggcacagtggcatgtgcttgtattcccagttactcaggagactgaagtgggagaatcactgagcccagggaggttgaggctgcagtgagccatgatcgtgctgcccctctccaatctgggtgacagagcaagaccctgtctcaaaaaaaaaaaaaaaaaaaaaaaaggctatcactatactatctataactattcttcattaggataactaggtattttccaacagtggaaactccaaacagactaaattgttgtacatcaaggtgaattgtcatagttaattcctttgcttgcaactgtccaataaatggatgaggactcacttcaccaataaataagaaatgtgaacagcacatggggcctgtagatgccttttgcagggccctctttttctcttcctaaagttgcaatttgcgtgtttctgtagatgggcacatcatagaaactgtcatcctagatcagagcctggagagagagatacaagtgtcatgcttacatatgcagagtgggaacaagcccagagaaatcaagatgattaagcagaaagtttccatactggagataaaccagctgtgtaaaaaatcatgcttattgaacaaaaaagcattgcacagctgaaataactgctttaactaagaagtgaagaactgacacctgaacagagcacagatagccacacagacaggagctgcatttcaaacaaggtcattgctgttgtccccactccaaattaagtgtctctgcttcacccttccttaccaaagttctgcttgatcatccttttgttttgttttgttttgttttttgtacttcacttctttgagaaaatataaaccaaaattttacatgaaacaggaattcagcttttgacaatgttagccattgaaacaacaacaamaaaagtttctattatttctcatctctgtgctatccagtgcagtagccaatagccacaggtgactattaaaattaaaattaattcaaataaaacaaaatttaacattagctggtcagttgtactagccacatctcagttactcaatagccacatgtggctagtggctactgaactaggcagcatgaatgtagaacattttcatcatcatagctttctaggtcatggaaaaattgcagaactcaatttccagtgtgcacatttatttgcatgcctaggagctttctgaccctgtgttgagctgcctaaccagcttcctgattgacctcctgatatttctgcaaatgtggactaagaggccaggagtcctcagggcccaggtgactcaggttattcagtaattatgtttggactagcaggcctctacttaatttgggatgcaaaaggggacttctcttcctaattgctaaaatagcttttcaaggttcacctctcatcgtggtaagagtctcatttcctgagactcttatttctttccatgacttatgttatattctggagagagtggattcacatggaaaagctggctctgtgctggctttccaggggtcagccctcttgtgagtgacaagtctgcctatttacatgatgtacattgtgtcccactactggtaatagaagctcagcagctgattgactgttaggttattttcaaagctcaatattcacaataatctaacagacacccacacaaccacaaagacagacaaggctctcataacctgcaaaagacaaggtgcacatttcttctttccatcccagcaacaaat

SEQ ID NO: 677534 - DNA, 2038 bp, Homo sapiens
taatatctggagggatttcattgaaatcacagaggttccttggctctttactttattaacaggcattaggaaagcacatcgactttcttatttaataaaatgcctgttgctttgaaaaattgctcaaaagaagaaaagagagggttacttaaagatatcactataggcatggcatgctggtccacacctgtaatccaagtactttgggaggctgaggagagaggatcacttgagtccagaagttcaataccagcctaggtgacatggcaaaaccccatctttacaaaacaaaacaaaatagaaaaaatattcaggcacagtggcatgtgcttgtattcccagttactcaggagactgaagtgggagaatcactgagcccagggaggttgaggctgcagtgagccatgatcgtgctgcccctctccaatctgggtgacagagcaagaccctgtctcaaaaaaaaaaaaaaaaaaaaaaaaggctatcactatactatctataactattcttcattaggataactaggtattttccaacagtggaaactccaaacagactaaattgttgtacatcaaggtgaattgtcatagttaattcctttgcttgcaactgtccaataaatggatgaggactcacttcaccaataaataagaaatgtgaacagcacatggggcctgtagatgccttttgcagggccctctttttctcttcctaaagttgcaatttgcgtgtttctgtagatgggcacatcatagaaactgtcatcctagatcagagcctggagagagagatacaagtgtcatgcttacatatgcagagtgggaacaagcccagagaaatcaagatgattaagcagaaagtttccatactggagataaaccagctgtgtaaaaaatcatgcttattgaacaaaaaagcattgcacagctgaaataactgctttaactaagaagtgaagaactgacacctgaacagagcacagatagccacacagacaggagctgcatttcaaacaaggtcattgctgttgtccccactccaaattaagtgtctctgcttcacccttccttaccaaagttctgcttgatcatccttttgttttgttttgttttgttttttgtacttcacttctttgagaaaatataaaccaaaattttacatgaaacaggaattcagcttttgacaatgttagccattgaaacaacaacaacaaaagtttctattatttctcatctctgtgctatccagtgcagtagccaatagccacaggtgactattaaaattaaaattaattcaaataaaacaaaatttaacattagctggtcagttgtactagccacatctcagttactcaatagccacatgtggctagtggctactgaactaggcagcatgaatgtagaacattttcatcatcatagctttctaggtcatggaaaaattgcagaactcaatttccagtgtgcacatttatttgcatgcctaggagctttctgaccctgtgttgagctgcctaaccagcttcctgattgacctcctgatatttctgcaaatgtggactaagaggccaggagtcctcagggcccaggtgactcaggttattcagtaattatgtttggactagcaggcctctacttaatttgggatgcaaaaggggacttctcttcctaattgctaaaatagcttttcaaggttcacctctcatcgtggtaagagtctcatttcctgagactcttatttctttccatgacttatgttatattctggagagagtggattcacatggaaaagctggctctgtgctggytttccaggggtcagccctcttgtgagtgacaagtctgcctatttacatgatgtacattgtgtcccactactggtaatagaagctcagcagctgattgactgttaggttattttcaaagctcaatattcacaataatctaacagacacccacacaaccacaaagacagacaaggctctcataacctgcaaaagacaaggtgcacatttcttctttccatcccagcaacaaat

SEQ ID NO: 677535 - DNA, 561 bp, Homo sapiens
aaaacatgtctctttctttgttcaggtaacattatgcagacaggagagctctaatataacattttggaccaaactgagagagaagaggggtgatcttttctgcattctgtttgtctgtttcatagacaagaaaactctgaggaagtttagtaatcaacaagctttagaaattttgaaaactggaagaaaggtatatctctctatttcccatctctacttcatgctccacattttagtcagtgccttttatctaacyacaaatctaactgtgtccctctcttgcttcacaatggttcttcagtggttccccaccccatgtaaatgtatacatgctcgccttacattcagctctacgctattgagcatagtatattagttttccaaggctgccataacgaagtcatacaaactgggtggcttatagcagcagatattattgtctcagtattggaggctaaaagtccaaaactaaaccgtctttgcaaaactaatgaaaggccacattgttaggcttttatgagagggtcttgaacactgataagatagacacagtttctacca

SEQ ID NO: 677536 - DNA, 561 bp, Homo sapiens
aaaacatgtctctttctttgttcaggtaacattatgcagacaggagagctctaatataacattttggaccaaactgagagagaagaggggtgatcttttctgcattctgtttgtctgtttcatagacaagaaaactctgaggaagtttagtaatcaacaagctttagaaattttgaaaactggaagaaaggtatatctctctatttcccatctctacttcatgctccacattttagtcagtgccttttatctaaccacaaatctaactgtgtccctctcttgcttcacaatggttcttcagtggttccccaccccatgtaaatgtatacatgctcgccttacattcagctctacgctattgagcatagtatattagttttccaaggctgccataacgaagtcatacaaactgggtggcttatagcagcagatattattgtctcagtattggaggctaaaagtccaaaactaaaccgtctttgcaaaactaakgaaaggccacattgttaggcttttatgagagggtcttgaacactgataagatagacacagtttctacca

SEQ ID NO: 677537 - DNA, 614 bp, Homo sapiens
actagtggacatacacacacacaaacacaaagtatacctacagctttgtcttgcatcctgcaaaaccaaagccttagttgtccatgtatacttgraagaactgacctgaaatgcccttccagaagacatatgtgtctagatcattatgttgcaacccttcattagttttgagtttttgcactattaaaagaagagcaaagtgatcacctttttagtctcttattccattaccatagctcaagatgggcttccttttattctttgtctataaaaatattcttatccacctggagagtcaggccaaataccactctctacataaaacttttcttccggtataatatttctcttatacttctttgttagtatttcatccaggcttgaatatggtcacatttccagatgcccttttctcggttggactgtcaggtcctggaaggcagggacttttgacaaatctgggagcagctaaagaggcagtgtcagtagaggcggcatttgaggcgctgacccatgacaggaggagcacgggctacagccgaggacacactgctagcagccataacagtggcaagggttgaacaagcagaaaagatgtaatagttgtgaagtca

SEQ ID NO: 677538 - DNA, 614 bp, Homo sapiens
actagtggacatacacacacacaaacacaaagtatacctacagctttgtcttgcatcctgcaaaaccaaagccttagttgtccatgtatacttggaagaactgacctgaaatgcccttccagaagacatatgtgtctagatcattatgttgcaacccttcrttagttttgagtttttgcactattaaaagaagagcaaagtgatcacctttttagtctcttattccattaccatagctcaagatgggcttccttttattctttgtctataaaaatattcttatccacctggagagtcaggccaaataccactctctacataaaacttttcttccggtataatatttctcttatacttctttgttagtatttcatccaggcttgaatatggtcacatttccagatgcccttttctcggttggactgtcaggtcctggaaggcagggacttttgacaaatctgggagcagctaaagaggcagtgtcagtagaggcggcatttgaggcgctgacccatgacaggaggagcacgggctacagccgaggacacactgctagcagccataacagtggcaagggttgaacaagcagaaaagatgtaatagttgtgaagtca

SEQ ID NO: 677539 - DNA, 597 bp, Homo sapiens
tttctagtctagaaactcagttctttttccttgacttcttccccatggtttatttaatctgttccatgaattagcctcatgtataaatttacctgtacaagcaaagttacagagattcctctccacattgtgttccaaactgccgccatcatccaaytcttgaagcctgatatccttactttgttcaatatttgggttattattcacacatttattttcccaaactagaagtttaggagccaactttgacttcttccattttctccacacaaattcaatcagtcagtgtgtcttgttaaatctaactctgaaatgtttttcgagtctgtcacatcttattcattctttacagttttatatatagaaaacaagtggttctcttaacttttcatcctgtccttaatgtgtctcaatgtcatgaattcttctctgcctattcactttttggtcttttctcactgtttcctgaaaacctatctttgcccctgatgttttctttatgtgagtgatgtttcttaccaaactattataaaaaaataatttccaggattcaattccaatgtgattccttttaaaacttttattcttttagtttaa

SEQ ID NO: 677540 - DNA, 660 bp, Homo sapiens
tggaatcatacattatctgcagtttgtttctttccccctgcttttgcttacctaaagtttacatctcatgactcttgaaaataccatttttaaccaatatctaatatatcataagaattgatatactctattttcagttttcctggcagttataaacaattttgtacaaaaatggtgcacacattacacatacccctatctcactaatgaatttcttacaaaagggccctcaaagtatcactgagaatcgtgccccatcttagagcctttcactggtacgtccctctccacaagtgcttttctcccatatattacgttagactcccatattacactcagattattgctgaaatgttaccacaccagaaagacatttccctgaacccgtatgtaaaatgtcgtatctgctgcctccgaagttatttgtcttatcctgcgttatttttgtcttaacgttcagtagtacttaatatgtaatgtttatttgtctacttgttatctctacctcatagaatcgaagataaacgargcagaaattttgttttgttaaatgctttattcctagcatctgaaacagtgcctgagacatagtacgtgatcaataaatacttatttgttcaacaaataaatacataaaaacaaaaagtacaaaacttttgg

SEQ ID NO: 677541 - DNA, 647 bp, Homo sapiens
aaaaggaactctactaatcaaatctaaaaatctccaaccttagaaatttattgtgctttaaattttataatctaataaaattgagtcatttttacagaactatttaggatctataattctaaatatatgtctttatatttcaagtaaagattatgttatatgaaagaaagaattctcacattgatcattcttttgccttgtttcttttattcctttaatttcattttcctgctcacagcacccctttattttttcttagcttccagctctcaaacctcgccctatagcttttatgcttctaaacttcccctcctgccccatttccattctaaatggagttctctttcatctttttttttaacaacctcatattctgcactttacttaatttttcttcccaacgctattaaagattctttatttctcccttcacccaagtatagcatctcatctatttctctatactgaagatgtggtttacccaggggaggaagtttctcatgcacactgctcagtgctgggatgatttcartggtgccagcatattttaaccacatcattatcatgtagtcccaaagccttgctcactgaaaacaccatctttaaaaggatttagtttccattaatcaatttcagaacttgaaatt

SEQ ID NO: 677542 - DNA, 1271 bp, Homo sapiens
ccgtgaactagtgatgtgacgttgctttgcttctctgtaaagtgaggaagttgaaccagttgatttttaaattaccttctagttataagactaatgctgttttaatgaagggcatcataatttttaataataattctctacaccagataatagtctgttacatttctagaatgtaaaacttgggccacttaagctgaaaccttatgatcatgtccacataatggatttcaatctcagcacctatttttttaataatttaaaaagatgttattaaatctaaaagtcttagttttgtcattttgttattttttagctgttattttgttttattgtagcaatatggagtgatttttcttttttctttttacctttaccaactgtcaatttaaacattactaaattgactaatcgttttgaataacaatgagtcttttttttttttttttaaattttgagatggagtcttgctctgtcacccatgctggagtgcagtggcatgatctcaactcactgccacctctgcctcctgggctcaagtgatcctcccacttcagtctcctgagtagctgaggtgccaccaccatgcctggctaatttttgtatttttgatagagatggggtttcaccatgttgcccaggctggccttgagctccggagctcaagcaatcaacctgcctcagcctctcaacatgctgggattacaagcatgagccaccacgccccaccaagagttttaatcattacattcatgctctacagagcacaaacatgctcatgcttttattctaatgctcatgtgccctttgtcactatcagtgttgccartctcatgtatgtatgagaaggaacagagaatgccttgccacagtgtatcgttaccaaatacaccactaacactcactgtgtataataatgttaaagcagttagctatttttttaaattctctatttcatctattttctgtttcttttccaggacatccataaaaattcatcagagagcattttactactgagctgcaaaggtaggaaaaataaattttttttggttagaaaatatacttctttcatctgcgtttcaataatttattccccttgttagatatacatggaattgatattgcttattctgactaagtgaaaagtgttatttctacttactgctcaattagaaacatgtagtgtttaattgtcagtttgaatttttctttcatactattacagtttatattttactataggcagaatttcctctttatcctaaattttg

SEQ ID NO: 677543 - DNA, 1271 bp, Homo sapiens
ccgtgaactagtgatgtgacgttgctttgcttctctgtaaagtgaggaagttgaaccagttgatttttaaattaccttctagttataagactaatgctgttttaatgaagggcatcataatttttaataataattctctacaccagataatagtctgttacatttctagaatgtaaaacttgggccacttaagctgaaaccttatgatcatgtccacataatggatttcaatctcagcacctatttttttaataatttaaaaagatgttattaaatctaaaagtcttagttttgtcattttgttattttttagctgttattttgttttattgtagcaatatggagtgatttttcttttttctttttacctttaccaactgtcaatttaaacattactaaattgactaatcgttttgaataacaatgagtcttttttttttttttttaaattttgagatggagtcttgctctgtcacccatgctggagtgcagtggcatgatctcaactcactgccacctctgcctcctgggctcaagtgatcctcccacttcagtctcctgagtagctgaggtgccaccaccatgcctggctaatttttgtatttttgatagagatggggtttcaccatgttgcccaggctggccttgagctccggagctcaagcaatcaacctgcctcagcctctcaacatgctgggattacaagcatgagccaccacgccccaccaagagttttaatcattacattcatgctctacagagcacaaacatgctcatgcttttattctaatgctcatgtgccctttgtcactatcagtgttgccagtctcatgtatgtatgagaaggaacagagaatgccttgccacagtgtatcgttaccaaatacaccactaacactcactgtgtataataawgttaaagcagttagctatttttttaaattctctatttcatctattttctgtttcttttccaggacatccataaaaattcatcagagagcattttactactgagctgcaaaggtaggaaaaataaattttttttggttagaaaatatacttctttcatctgcgtttcaataatttattccccttgttagatatacatggaattgatattgcttattctgactaagtgaaaagtgttatttctacttactgctcaattagaaacatgtagtgtttaattgtcagtttgaatttttctttcatactattacagtttatattttactataggcagaatttcctctttatcctaaattttg

SEQ ID NO: 677544 - DNA, 1271 bp, Homo sapiens
ccgtgaactagtgatgtgacgttgctttgcttctctgtaaagtgaggaagttgaaccagttgatttttaaattaccttctagttataagactaatgctgttttaatgaagggcatcataatttttaataataattctctacaccagataatagtctgttacatttctagaatgtaaaacttgggccacttaagctgaaaccttatgatcatgtccacataatggatttcaatctcagcacctatttttttaataatttaaaaagatgttattaaatctaaaagtcttagttttgtcattttgttattttttagctgttattttgttttattgtagcaatatggagtgatttttcttttttctttttacctttaccaactgtcaatttaaacattactaaattgactaatcgttttgaataacaatgagtcttttttttttttttttaaattttgagatggagtcttgctctgtcacccatgctggagtgcagtggcatgatctcaactcactgccacctctgcctcctgggctcaagtgatcctcccacttcagtctcctgagtagctgaggtgccaccaccatgcctggctaatttttgtatttttgatagagatggggtttcaccatgttgcccaggctggccttgagctccggagctcaagcaatcaacctgcctcagcctctcaacatgctgggattacaagcatgagccaccacgccccaccaagagttttaatcattacattcatgctctacagagcacaaacatgctcatgcttttattctaatgctcatgtgccctttgtcactatcagtgttgccagtctcatgtatgtatgagaaggaacagagaatgccttgccacagtgtatcgttaccaaatacaccactaacactcactgtgtataataatgttmaagcagttagctatttttttaaattctctatttcatctattttctgtttcttttccaggacatccataaaaattcatcagagagcattttactactgagctgcaaaggtaggaaaaataaattttttttggttagaaaatatacttctttcatctgcgtttcaataatttattccccttgttagatatacatggaattgatattgcttattctgactaagtgaaaagtgttatttctacttactgctcaattagaaacatgtagtgtttaattgtcagtttgaatttttctttcatactattacagtttatattttactataggcagaatttcctctttatcctaaattttg

SEQ ID NO: 677545 - DNA, 591 bp, Homo sapiens
tttatttccgatgactttcattctattattcccttttgtaatattctttctaaatttcactatgtgtaacctcatttgcccttcaactttatccaaagttctgratgtattcatattgactccttctttccctttttggcttttaaatatcctggcataatttgttttgactgggtagaactgtgttcttttggacagccaacttccttgaactctgctttctaaaagaagcccaaggattcatcgtactaattttcaaatttgatgcaattagcttcataaagttaattttcttaattctgctgacatttccatttccttcccttagggaagagaattcgatttcattaacttgtgattgtttcctcaaggtttctttctactattagaagcccatctaatttttccctatgagcaagaataaaatctgatatctgccctaggaattttacctttattacagaagatcaagccatgagatctcattgcttcagaaatactttgtcatcagtattcagtttgatatgcgcctgtcaatgcttcttcatctttatataaaattgctttaagtcaactaaaaaaaaccttatt

SEQ ID NO: 677546 - DNA, 639 bp, Homo sapiens
tgttctttaatatcaaaagaaaatgcctttgaaatatgtaacaaaatggcattccaatataatatgagacagaataggaaaatgagaatttttgcatgactgtgaaggagacaatacacacataaataatctcaaaaccaagattaatagaaattacgttctggccattacagatctaggtatagtctcgattttactattttctgtgttctttataatatcccagaattaaaatttttaaagaaagaatttaataaacattttatgaatctagatattacttttagataatgaggagcattacatacatgacataaatttatgcgattaaaatatgtttagtattttctgaaatgacattaccarttgtgacctcattacaatatttgatcatagtatgcaaaatttatggcttattttaaaatctgagcttgaaaaacttaacaatcctattttccactgacttgcagaataaagtataagtcaaattcaaataagaacaatgagaaaaaattgaatattttggcattattgttaatagtgcacaaattatttgaaaattttaattataaaagtataactagttaattttctttaaaaagataagaaaaataaatgtgatgaaataagtatgtagtt

SEQ ID NO: 677547 - DNA, 644 bp, Homo sapiens
gtgtaaaaaaaattatcattttttaagggcaggggaaggaccttaaaaaaataaatagaataaataaaaattaccattttaaagtgaagaattcagtggaatttagtactataaatcaaaagtaaaattctaagcgcctccaaccatctgaatggaccctcctctaggccaaggacattccaaagttaaactgaaaagctagttcarggcatgatgggaaggaggagttggacatgcctcattaccattaacatcaacacagaccttaaggctgatagaccagacttatttaaaatgtataatccagggatcatggcagatggaagccaggactagattgcagcacccactcagacagacagagcagcatgtggaggcttgcatcacgaacttttgctccagaatgactgcaggaatacattaggaaagccaagagaaccagcagaccctctgaaggaagtggattgctcctgcaggacttaggagataccccaaatactatgagtgcccaaactgtggaagcgagaaaggaagatcatgcaccccagaacacatacccctgcacaagagaacctgaaggcttagattatgggagaagattctgaccttacctggagctgagtcaatttagagagccgagtgaa

SEQ ID NO: 677548 - DNA, 644 bp, Homo sapiens
gtgtaaaaaaaattatcattttttaagggcaggggaaggaccttaaaaaaataaatagaataaataaaaattaccattttaaagtgaagaattcagtggaatttagtactataaatcaaaagtaaaattctaagcgcctccaaccatctgaatggaccctcctctaggccaaggacattccaaagttaaactgaaaagctagttcaagscatgatgggaaggaggagttggacatgcctcattaccattaacatcaacacagaccttaaggctgatagaccagacttatttaaaatgtataatccagggatcatggcagatggaagccaggactagattgcagcacccactcagacagacagagcagcatgtggaggcttgcatcacgaacttttgctccagaatgactgcaggaatacattaggaaagccaagagaaccagcagaccctctgaaggaagtggattgctcctgcaggacttaggagataccccaaatactatgagtgcccaaactgtggaagcgagaaaggaagatcatgcaccccagaacacatacccctgcacaagagaacctgaaggcttagattatgggagaagattctgaccttacctggagctgagtcaatttagagagccgagtgaa

SEQ ID NO: 677549 - DNA, 442 bp, Homo sapiens
cttttcaccttccaccatgattgtgaggcctccctggccaattggaactgtaagtccattaaacctctttcttttgtaaattgcccagtctcaggtatgtctttatcagcagtgtgagaacagattaatacagattcctaactaagcctaaagtcaaagtaatgtctgttttaggccaagagctaattacaaaactagttattgtatatcgctttatagtttataacacatttttgcacacttcactgagttactaaattagtaagaattgtagttagttaaaggtaaaatccttgactattcaaagacctaggctttgaacctgtacagcatatgactgtactgaatactataggcaattataaggcaatgtatttgtgtatctggacatactaaaggwatagtaaaaatactgtataaaagaaaaaaatggtatatcagg

SEQ ID NO: 677550 - DNA, 644 bp, Homo sapiens
ggatgacctttagattcttacaggcaattgataatgatgtttacattccagaaaaggcctaaaaggttatcttccagaccttcttaaaaagtgttgactgaatttgaggaaatctctaagagacttctgagcagctacaatagtcaggtggtcaaataacacaccaatctcaaacataataaaagcttctctgccctttgaagcagaatttggagtgttctggtaaaacaactttctcaatgctctctgtcatatcttgtttkctttttaacatctcttaattttatgtctttcttttctcaattctcagattgccaaagagaatatttgagatctcatagactattttttttgagacagggacttgctctgtcacccagactagagtgcagtggcatgatctcagctcactgcaacgtccacctcctgggttcaagcagtttcctgcctcatcctcccaagtagctgggactacaggcacaagatgcccagctaattattgtatttttagtagagacatgtttcaccatgttggccaggctggtctcgaactcctgatttcaagtgatccacctgccttagcctcccaaagtgctgggattatagatgtgagccaccgtgcctggcctcatagactaccctca

SEQ ID NO: 677551 - DNA, 923 bp, Homo sapiens
tgaaaggcatattcatagtaaattactgcttggaaaatgcagttttcatgtttaattgcctcgttcccttctataaatacatagtatcttgccgtatgagaggaataaacggcaaggatgactgggcatttatgtagtacatggattcactaataagaaaaagaatatgatatttcaccacctacttaccttataayaatagtttgagaattgattaaggtaatccaatacagtctctgataacggagaatgtttagaaacaaagtttttttggagaaataaaagttcagatcaaaatgagcattacccagtataataatcgtgttttaaatttagggttttttatgaatcttttaaagaaagtatccaaatagttgttttgttcaattctgtttcatcaaactcagaagggggaaggagtagggatctaatattggcattgttcctcctgctccttctcagtgggagtcaccatgttgacgatggtacagtggtatctgtattatctctctttcaattctcatgatcatcccctaagaaatatattttaatctccttttcagataataaatataaagttcaaataggctagatagcttgccaaatacatatagactgattgttgaaattaggtaatgcgtgaattcacccacgtctttttagtgattgagaatgtatgttacttgttgatctttattttcactatcaattatacataatgtgaaagacagggctaagtgtacactgccccccatttctgtagtttacgtgtagaagagaagatttctgctccactcatcaggagagaaaaatatgggtggcatactttcccatgctctctgacccctcattcatcatttccttctttgtccagagaaaattgggcagatgtttcagccaattctttatacttttaacaggta

SEQ ID NO: 677552 - DNA, 1447 bp, Homo sapiens
gcgcaatagatcaccagaagttattcctctcatttaactgaaatttgtgtcttttgaacaaaattttcccttttcccatccatgtcctcctcatccctcaggctctggtaaccacaaatctactctctgcatttatgaattcaaatttttaattctgcatataagtgagatcatgtgataattgtttttctgtgtttggcttattttacttagcataatatcctccagatttgcttattttgttgcaaaccttaaaagcttaatagaattccatgctctctctgtctctctgtgtttgtgtgtgtgtgtgtatctatgtgtttctgtgtgtatcacattttaaaaatgtatttatctgctgatggatacttatgtttcttccaaatattgcctactgtgaataatactggagtgaatataggagtgcaaacatctcttcaccatacttatttcaattcatttgaatatacccaaaaacgggattgctggattagatggtaattctatttttctttttttgtgaaacttccataatatttttccaaagtatttttcaaaatgtagacagttatatataccaaaatatatgcatatatgagtagatatatacagcattgtgaaaaagagaacaaacatggagtgggatctatcttacttaatgttacaaaaaaaaagagaagaaggatttttctgaggaaataatgcctgttcctattttatgtagtaaatgaaagttcttcaggagaaaaaaaactgaaaaagagtaagtataaagcagttatgcccaaagaaataaaaatacaaaatagcctgtgttattccatttgtgtcactataaacaaatacagaggctggaaaatttataaagaaaagccatttaattggctcacattctgcaggcttctacaagaatagtgctggcatctgctcagctttgggtgagggtgtcagggagcttataatcatcacaggaagtgaagagagagccacggtctcacgtggaaagaggggagcaagagagagagcggggaggtgccacactcttttagacaatgagatctcatgtgaactccgagggagaactccctcattattgtgaggacagcgtcaagactcatgaatgatgtatccccatgacccacacacctcccaccagggcccatctctaacactggggatgagttttcaacatgaggtttgatttttcaacatatcctagccctacatgaagtttggcatgctctctgtatctctgggcaggtatacctttctctctgtcagagtgtcattttctatttccattctcaactcagaaagtgtggactttaaaaatatatcwacttttttttgtctgtaaactttcccctgaaacaagaagtttcttttccctcttgatatatacacctgaaacatttatcttctcatttctagcaggtcctttctccac

SEQ ID NO: 677553 - DNA, 1432 bp, Homo sapiens
gaaaagcgggcttaatatagttttggatcaaatttttccccaatcttggaagctctgaggctattgtatcatgcatgatagaatcatgtacactttatctgttcctgcaagcaaattattagtattttttttgagaaaccattacrgaatgtgttaataatgataaattacttaaaattgtgatttaaaggcatacaacatattatggataataagagctaacatatgttgattattcctgtgtgacagccattcttctaaatgttttacatgtataactcgtgtaatgcccacagcaaccctatgagataaagtgctagttcctgttgctgctgtaacagattactataatcctaatggcctcaaataacacaaactgattttcttatagtttgggaggtcagaagtctaaaatgattcttatggggctgaagtcagggtgttgataaggttggtttccttctggaggcctccctatagaatctgcctcaggcctcttccagtttccagacgctgccaacattccttggcttccagccacataccctaaatccccttctactgtcacatcacattctcctcttttgtagtacagtctccttccgtctccctcttataaggacactgttgatccaataggcccacccagataatccagtgtaacttccctatctcaagaacctcaacttaaccacatctgcaaagtcccttttaccatggaaggtaacacatttacagatcctagggattctgatgtgggcatctttggggcactattattctgtctatcacagataattattattctcattttataaatgagaaaactgaggttcagaaagagatcaaataacttgtttaagattatacaactagtgagcagtgaagcctgaaatcaaatacagtgagtctcccactcttggccactgtatcattctgcctttatgttagttggaggagaataaaagcaccaaatgtaaaatcttggattatccagtgtagctcttatttccggaaaaaaggatcctaatactgagtccagcctgaaatgggctccctaggtgtggatgacctggcggccctcattagtgtgtacatcaatagtaatgttaacaatgtctatgtcggttgtccccaggctcctttagtgacagaaatatctttctggctcaggtgtcctcgataatgtgcagccaccaaggcaaacttcctatgatgccttcattgctgagagtctaccttgtgttcctgtaatagcagagctgtgtgttccctcttctctgtggcagccttttcagactcccgtgtgttcccaaatcacctgaggaacttagtatgaaagtgactctctggacgcatagcagacctactcgttcagaacattcagaatctcccaatatggggcccagataggggtgttatagcaaggttt

SEQ ID NO: 677554 - DNA, 1988 bp, Homo sapiens
atatactattacctatattctgtagttgtcttatgtctattgtacatgtctgcatatgatagaaatactatgtaactccgtattactgtgcattttttgaataccacattcagtaatgtcacattagtggctggtgtgccatttttgtgtgagaactatcatgaaattttttccaaatgaatactcatcatttcttcgtaaagaatatttattcaactgtatcatacccctgatgtgagatctagttcatctaactgcttcttggaaacagttttgaaatttcagggtggggagataatattttacatatatatgtaatatataatattttacatatatatgtaatatataatattttacatatattcatacatatgtaatatataatgtattacatatatagagacagatatatatatctatatatagatatatatgtaatatgtaatattttacatatataatatgtaatatataaaatatatattacatatatacatatataatatgcatataaaacatataatatacatatttattaaatatataaatatataatatgttatatataatatataatattttacgtgtatatrtagagatatatatatctatatatagagatatatatgtaataatattttacatatatatatatagagagagagagattgaggttttccaggaaaagtagaaaccacatattcttttttttcaaacaaacctacttttcaaaattgttaaaattgaatggatttaatgcagcacaatagtctctgaattgaaactgaatgaacttcattttccattcattttcagatttcatgggaagaaatgatggaaagttaagcaaataactcattcctttcttcactagtgtatgtaatttaaccaaccaaaattatctgcaaaactgttgctttagtatttattccatttaagccagagaattactaagcctgttcaaattttgtaatgtttgtctaacacgcgcatgaaaactggctacatccagtaatgtttcctagtaaagatgctctattagtcttatttctcaagttgttcttcttagaaacataaataaatacttgcttttgacagagtttagtgagggatcatttccggggtaggagccatgagaccagatctgacttccatttccgatactatcatggaacataaaaaaaaaaaaaaaaaaaaaatcgcagaaaaagtgtatttgaattagcgtaacctagtgaaaacattttttaaattagtatggtccacttctcagattttgtaacatggtgaaatacatccaaacaaatttttttttggtaaagctaaacatacacatccatacatatgcacaggtatgtacattcagtttagatagagaaaatgtcttctaacttttgatgtatttgtttatattcctgtcactgtaacataataaccatagtatcaacatattattaattattttgaataccaaccccatttctctacctatttgtgtttgtgtgtattctaattgtatgtgtgtgcagattgtgaaatatcatatatttgatatatttgttgaagcacacttaataaaatctaataatgcaagtgaaatttcaacagaagcttctgtgaaaagaggagctaatcttatgttttgtgaaaagtaatgacctcaaacacagaaactgataatcaaataaaatatcagtgtgtttgattagctgtaatgttgaaaaaatccaagataatttctcatacacagttatacttctgaaactgtcatacgtgtgtattatgaaaggtcattgtcatttttttgtaagttaaaaaacgttgatgctaagtagataaactacacagcaaagtgacgcttttaccttctaggagaaaaaggtagaagttaaaaaaactgcatctaaattttactctctcatctacttccctcataagaactttcagaaataactgatgcatatacattttaccatgttatttca

SEQ ID NO: 677555 - DNA, 1988 bp, Homo sapiens
atatactattacctatattctgtagttgtcttatgtctattgtacatgtctgcatatgatagaaatactatgtaactccgtattactgtgcattttttgaataccacattcagtaatgtcacattagtggctggtgtgccatttttgtgtgagaactatcatgaaattttttccaaatgaatactcatcatttcttcgtaaagaatatttattcaactgtatcatacccctgatgtgagatctagttcatctaactgcttcttggaaacagttttgaaatttcagggtggggagataatattttacatatatatgtaatatataatattttacatatatatgtaatatataatattttacatatattcatacatatgtaatatataatgtattacatatatagagacagatatatatatctatatatagatatatatgtaatatgtaatattttacatatataatatgtaatatataaaatatatattacatatatacatatataatatgcatataaaacatataatatacatatttattaaatatataaatatataatatgttatatataatatataatattttacgtgtatatgtagagatatatatatctatatatagagatatatatgtaataatattttacatatatatatatagagagagagagattgaggttttccaggaaaagtagaaaccacatattcttttttttcaaacaaacctacttttcaaaattgttaaaattgaatggatttaatgcagcrcaatagtctctgaattgaaactgaatgaacttcattttccattcattttcagatttcatgggaagaaatgatggaaagttaagcaaataactcattcctttcttcactagtgtatgtaatttaaccaaccaaaattatctgcaaaactgttgctttagtatttattccatttaagccagagaattactaagcctgttcaaattttgtaatgtttgtctaacacgcgcatgaaaactggctacatccagtaatgtttcctagtaaagatgctctattagtcttatttctcaagttgttcttcttagaaacataaataaatacttgcttttgacagagtttagtgagggatcatttccggggtaggagccatgagaccagatctgacttccatttccgatactatcatggaacataaaaaaaaaaaaaaaaaaaaaatcgcagaaaaagtgtatttgaattagcgtaacctagtgaaaacattttttaaattagtatggtccacttctcagattttgtaacatggtgaaatacatccaaacaaatttttttttggtaaagctaaacatacacatccatacatatgcacaggtatgtacattcagtttagatagagaaaatgtcttctaacttttgatgtatttgtttatattcctgtcactgtaacataataaccatagtatcaacatattattaattattttgaataccaaccccatttctctacctatttgtgtttgtgtgtattctaattgtatgtgtgtgcagattgtgaaatatcatatatttgatatatttgttgaagcacacttaataaaatctaataatgcaagtgaaatttcaacagaagcttctgtgaaaagaggagctaatcttatgttttgtgaaaagtaatgacctcaaacacagaaactgataatcaaataaaatatcagtgtgtttgattagctgtaatgttgaaaaaatccaagataatttctcatacacagttatacttctgaaactgtcatacgtgtgtattatgaaaggtcattgtcatttttttgtaagttaaaaaacgttgatgctaagtagataaactacacagcaaagtgacgcttttaccttctaggagaaaaaggtagaagttaaaaaaactgcatctaaattttactctctcatctacttccctcataagaactttcagaaataactgatgcatatacattttaccatgttatttca

SEQ ID NO: 677556 - DNA, 1988 bp, Homo sapiens
atatactattacctatattctgtagttgtcttatgtctattgtacatgtctgcatatgatagaaatactatgtaactccgtattactgtgcattttttgaataccacattcagtaatgtcacattagtggctggtgtgccatttttgtgtgagaactatcatgaaattttttccaaatgaatactcatcatttcttcgtaaagaatatttattcaactgtatcatacccctgatgtgagatctagttcatctaactgcttcttggaaacagttttgaaatttcagggtggggagataatattttacatatatatgtaatatataatattttacatatatatgtaatatataatattttacatatattcatacatatgtaatatataatgtattacatatatagagacagatatatatatctatatatagatatatatgtaatatgtaatattttacatatataatatgtaatatataaaatatatattacatatatacatatataatatgcatataaaacatataatatacatatttattaaatatataaatatataatatgttatatataatatataatattttacgtgtatatgtagagatatatatatctatatatagagatatatatgtaataatattttacatatatatatatagagagagagagattgaggttttccaggaaaagtagaaaccacatattcttttttttcaaacaaacctacttttcaaaattgttaaaattgaatggatttaatgcagcacaatagtctctgaattgaaactgaatgaacttcattttccattcattttcagatttcatgggaagaaatgatggaaagttaagcaaataactcattcctttcttcactagtgtatgtaatttaaccaaccaaaattatctgcaaaactgttgctttagtatttattccatttaagccagagaattactaagcctgttcaaattttgtaatgtttgtctaacacgcgcatgaaaactggctacatccagtaatgtttcctagtaaagatgctctattagtcttatttctcaagttgttcttcttagaaacataaakaaatacttgcttttgacagagtttagtgagggatcatttccggggtaggagccatgagaccagatctgacttccatttccgatactatcatggaacataaaaaaaaaaaaaaaaaaaaaatcgcagaaaaagtgtatttgaattagcgtaacctagtgaaaacattttttaaattagtatggtccacttctcagattttgtaacatggtgaaatacatccaaacaaatttttttttggtaaagctaaacatacacatccatacatatgcacaggtatgtacattcagtttagatagagaaaatgtcttctaacttttgatgtatttgtttatattcctgtcactgtaacataataaccatagtatcaacatattattaattattttgaataccaaccccatttctctacctatttgtgtttgtgtgtattctaattgtatgtgtgtgcagattgtgaaatatcatatatttgatatatttgttgaagcacacttaataaaatctaataatgcaagtgaaatttcaacagaagcttctgtgaaaagaggagctaatcttatgttttgtgaaaagtaatgacctcaaacacagaaactgataatcaaataaaatatcagtgtgtttgattagctgtaatgttgaaaaaatccaagataatttctcatacacagttatacttctgaaactgtcatacgtgtgtattatgaaaggtcattgtcatttttttgtaagttaaaaaacgttgatgctaagtagataaactacacagcaaagtgacgcttttaccttctaggagaaaaaggtagaagttaaaaaaactgcatctaaattttactctctcatctacttccctcataagaactttcagaaataactgatgcatatacattttaccatgttatttca

SEQ ID NO: 677557 - DNA, 1469 bp, Homo sapiens
ctggaaggaatcccccaagcttagctttttcttcattctgagaaggtaccgaatttgccccttcacttaaattctttagcagcatcaacaaaatagcaccaagtattttggagatcgaaagttgattcaggctaggagttacagtctaagcacaggtgcacttaaatctaactaatctaactatggatccttcagaaacaaataaacctgaaccctgtccccacatgtaacctgagattattagactagagatcctggagacaccttcaggctagaatcatccaagattctgagatgcctgaaatacttgcattgaaaaaacttaaacaaaaggttgtttctgtatttagccactccaatttatttgccatttaaaaatttatctgtcatcctttccctatctttatgaatactttggagtgcattctttgtaaactgtgttttctttgtataatacttaatcttggtactaaacataaatgtccctggctataatataaagagctcctgcaactgattggaggcctgagaaacagaattgctgtttactacttaaaacatttaaatggttgattttatggaaagtgggagtttttcagcctggtgaaatatttttcctatggctacatcgcagcacacttcatagcagttcaaacacatctcctcagtgagtccatgcatggcttttgaatgaaccaattaagtaatgagtaaattgttagatatttctttgattatagatgtcgattttatttgggtaatcactgttaccatgtgctactgaaaacctacacatgccttgtaatattctttctaaattgtttattttaaagaagggtatgcctttagaaatattttggaatgtgtaatataaagttcatgttacagtaattttatgattggcacttaacaaaagaaattagtatattctcacattaatggtaacatctttcataagtctctcattttagtgcttctaattaaaatcattatttttctaatgtggaagagggtgttttcctttttytctacaatattttgtagtagcatttgcagtactctgataagtttcacattttctgacaatgtacatcaaagtttactgttaagcaatgtaagtgttgaatatctagtagtatcatataattcatgaaagaaaggaaggcaaaaccttctgactgaacctttatgtgacagatatgtttgatttctgatttgtcaggtttctacacaaggtttatgctaaccttagtctggagagagaatacccacattggggaagacaaagcacttacataagcatctggagacttaggtattaggcacagtgcaaacactcctgtaatttaatttagtactgcgtaatattagtggtgataaaaaaatcttacactatgttctatgttgacttcatcaaggcagctaataacttacatgtctaagtgttgcctgttgaaataaacttggat

SEQ ID NO: 677558 - DNA, 1678 bp, Homo sapiens
ggtagatcatgttttacaaaactttcatttttctttataggtaataaaaaattggggggaaataatcagcgtttggaccatgtggtttagacatcatgcattaaaatcttagaaatcacgcttaaaaatcaccattaattgtttcccaattttttttcagctcttcttcaagtgacaatttcacttagcaaagtagagcttagtgttggagaatctaaattcttcacatgtacaggtacgtatttctgtaaataccttcagataacgtggtttctgttaaaatattaataaaatgtgttggctaaatttaactagttaaaaactcagttctctaacaataacatcttacagttggttttttgtttttgtttttgttgtttttgagacagagcctcgctctgtctcccagactggagggcggtagtgtgatctcggctcactgcaatctccccctcctgggttcaagccgttctcctgcctcagcctcttcagtagctggactacaggtgctcaccaccatgcctggctaatttttgtctttttgtgtttttgtagtagagacggggtttcaccatgttggccaggctggtctcaaacttctgacctcaagtgatccgcccgccttggcctcctgaagtgctgggattacaggtgtgagccatcatacctggccattgttgggcttataatgattggaaaagtgttaatagccataacttgcatataaaatgatattaattttatttttgttaatttgttaatttagactgctaatctagatcatttattttgaaaatamcttatgcttgcattatatctgataataacttaaatcaatttaaatatttctgtctaaacagtaatattaggatgaatataaagattataactgaaccatttttgtaaatatgcaatgaataaatttggtatggcacactgcactatagttatacttgaatgaaaatattaggccaaaaatttattctaatattcattgaagaaatagttatttagtcaggaaagctttgactagatttttatgacaatggaaagaatcatatgtcatcatgcctatggcatattttatgggcctcattcagaataataatatacatatggttttctttccaaagaaatttaaatatttcagcatcaaagtttaatcaaacatattatagaactgacaaatgaatgcattatttatttaggtacaatatattcatttttacaaatacaagtcttcatatccaaactatgatatacctaaataattttttaaaccttagtgctaaaattagttgagactattttagaattgtttctaatcttgattacactaaatcaacttaaaactggattaaaatagacactagaaacataaaatgcattataaaaattgtcttgagaatgacatgatttatttaaaccaagattcaaatttataaatatagagatataatattttataaataaaagatatagttataacattttataaatcatattcagagcatatatgtataacatgtcacattttataggaatattaatagagcccatgattctttatacattttccttcttaaagatgtcagttgatagttatgttaatacaagtatttgtatattgacaaatgaaaaaatcagagagtgtggaagagattgattcagcatcata

SEQ ID NO: 677559 - DNA, 649 bp, Homo sapiens
ttgagacgagtctcgccctatagtcaggttggagtgcagtggcgcgatctcggctcactgcaacctccgcctcccggattcaagctattctcctgcctcagcctcccgagtagctggggctacaggtgcgtgctaccatgcccagataatttttgtatttttagtagagacggggtttcaccatattggccaggatggtctcaatctctcgaccttgtgatccgcccaactcggcctcccaaagtgccgggattacaggcgtgagccaccgtgcctggccctatttctgctctaaagctttttaataaatgttcactcctactctaaaacgtgccttagcctctccttcttccttatgcccctcagtctaattctttcttctgaggggcaagaattgaggttcttgcagacctgtatggattcactgccaataactcagatacccaccactgataacagaaacatttgttatgtttcatattttgyttatgaatatgctctgaaaatcacaattatagaagctcttttcacaggtcataaaagacccataggaaaatataaacaaacaaaaaataagtcacatagagatacagtcactaacacagaaatgataaactctgtaattctcttaacctgcagatttgtttca

SEQ ID NO: 677560 - DNA, 684 bp, Homo sapiens
taattatatttatggggatgccccatattcaaagctgaaggttgaggtttatttatcctcaggtgagaggccaaaagtcagacttaaaaattatctgtcattcttcagttttgaatttcaaagaatacaactgaccatgttagcaagattgcagtaataaaaatcaagactagtggaagaaggggtgttacttaaggtgataatgcaarctcaagatctaagtaatgacgtcactacatatccagactagaaagagaaagaagaacaatgatagaaagaaggtgaaacagcatgagacccctccactcagcacacctggagtcgagtttcaagaggggagtcatggcccggcgcgtggctcacgcctgtaatcccagcactttgggaggccgaggcgggcggagcaggaagtcaggagattaaggccgtcctggctaacacggtgaaatcccttctctactaaaaatacaaaaaattagccgggcgtggtggcgggcgcctgtagtgccagctactccagaggctgaggcaggagaatggtgtgaacccaggaggcagagcttgcagtgagctgagatcgcaccactgcaccccagcctgggcgaaagagcaagactccgtctcaaaaagaaagaaaaaaaaaagaggggggtcatttgaaacattcagttaggtatgtgtgaa

SEQ ID NO: 677561 - DNA, 590 bp, Homo sapiens
tttcctcacagtttccatttaattaagtccaattccctttctaaacagagactagtttctgatatcaaattgttccctgtagcattattatttatacattgtccaaacgatatacaaaatatttattttttcatgtcattatttgccagtttaaaaattattttaacgttttgggtttcataatgtactgcacttgttgaatttagagctagacgactaaagagtcatatatggaaccagcgatatttggaccatgaagaaatattaaattagtagcagaaactagactatttatasaacctatcagtgctgtcacatcagagaaaaacttctctgtacggttctattgtttttttgactacttttatttgtatatatttatttatttatttatttatttgagacggagtcttgctctgtcgcccaggctggagtgcaatggcccgatctcaggtcactcaacctccgcctcccaggttcaagtgattctcctgcctcagccttctgagtagctgggattacaggcacgcgccgccccgcccggctaatttgcgtacttttagtagagacggggtttcaccatattggtc

SEQ ID NO: 677562 - DNA, 590 bp, Homo sapiens
tttcctcacagtttccatttaattaagtccaattccctttctaaacagagactagtttctgatatcaaattgttccctgtagcattattatttatacattgtccaaacgatatacaaaatatttattttttcatgtcattatttgccagtttaaaaattattttaacgttttgggtttcataatgtactgcacttgttgaatttagagctagacgactaaagagtcatatatggaaccagcgatatttggaccatgaagaaatattaaattagtagcagaaactagactatttatagaacctatcagtgctgtcacatcagagaaaaacttctctgtacggttctattgtttttttgactacttttatttgtatatatttatttatttatttatttwtttgagacggagtcttgctctgtcgcccaggctggagtgcaatggcccgatctcaggtcactcaacctccgcctcccaggttcaagtgattctcctgcctcagccttctgagtagctgggattacaggcacgcgccgccccgcccggctaatttgcgtacttttagtagagacggggtttcaccatattggtc

SEQ ID NO: 677563 - DNA, 590 bp, Homo sapiens
tttcctcacagtttccatttaattaagtccaattccctttctaaacagagactagtttctgatatcaaattgttccctgtagcattattatttatacattgtccaaacgatatacaaaatatttattttttcatgtcattatttgccagtttaaaaattattttaacgttttgggtttcataatgtactgcacttgttgaatttagagctagacgactaaagagtcatatatggaaccagcgatatttggaccatgaagaaatattaaattagtagcagaaactagactatttatagaacctatcagtgctgtcacatcagagaaaaacttctctgtacggttctattgtttttttgactacttttatttgtatatatttatttatttatttatttatttgagacggagtcttgctctgtcgcccaggctggagtgcaatggcccgatctcaggtcactcaacctccgcctcccaggttcaagtgattctcctgcctcagccttctgagtagctgggattacaggcacgcgccgccccgcccggctaatttgcgtayttttagtagagacggggtttcaccatattggtc

SEQ ID NO: 677564 - DNA, 639 bp, Homo sapiens
gcaggcaaagagagcgtgcacaggagaattcacctttataaaaccatcagatgtcatgagacttattcaccatcacaagaacagcacgggaaagacccacccccatgatttaattacctcgcaccaggttcctcccatgacacatggtaattatgggaactacaattcaagatgagacttgggtagggacacagccagaccatatcattccacctgtggtcccccccaaatctcatgtcctcacatttcaaaaccaatcataccttcccaacacttccctaaagttttaactcacttcagcattaagtcaaaagyccgtagtccatctaagttactttcctccagtattatggttttgtcgtttttcaacttcttgaattattagtatttgtgcacatatatatatatatatatatatagacagagagagagagaaaatatatatatacagatatatatatatatatatacagatatatatatacagatatatatatatatatatagagagagcacactctgtatttaccattaattttctcactcttcttgcatttcagatagattctggaatttttttcttctttttgtattatattctattaataaaggcatttgtatataagctatgtgtttttt

SEQ ID NO: 677565 - DNA, 639 bp, Homo sapiens
gcaggcaaagagagcgtgcacaggagaattcacctttataaaaccatcagatgtcatgagacttattcaccatcacaagaacagcacgggaaagacccacccccatgatttaattacctcgcaccaggttcctcccatgacacatggtaattatgggaactacaattcaagatgagacttgggtagggacacagccagaccatatcattccacctgtggtcccccccaaatctcatgtcctcacatttcaaaaccaatcataccttcccaacacttccctaaagttttaactcacttcagcattaagtcaaaagtccgtagtccatctaagttactttcctccagtattatggttttgtcgtttttcaacttcttgaattattagtatttgtgcacatatatatatatatatatatatagacagagagagagagmaaatatatatatacagatatatatatatatatatacagatatatatatacagatatatatatatatatatagagagagcacactctgtatttaccattaattttctcactcttcttgcatttcagatagattctggaatttttttcttctttttgtattatattctattaataaaggcatttgtatataagctatgtgtttttt

SEQ ID NO: 677566 - DNA, 639 bp, Homo sapiens
gcaggcaaagagagcgtgcacaggagaattcacctttataaaaccatcagatgtcatgagacttattcaccatcacaagaacagcacgggaaagacccacccccatgatttaattacctcgcaccaggttcctcccatgacacatggtaattatgggaactacaattcaagatgagacttgggtagggacacagccagaccatatcattccacctgtggtcccccccaaatctcatgtcctcacatttcaaaaccaatcataccttcccaacacttccctaaagttttaactcacttcagcattaagtcaaaagtccgtagtccatctaagttactttcctccagtattatggttttgtcgtttttcaacttcttgaattattagtatttgtgcacatatatatatatatatatatatagacagagagagagagaaaatatatatatacagatatatatawatatatatacagatatatatatacagatatatatatatatatatagagagagcacactctgtatttaccattaattttctcactcttcttgcatttcagatagattctggaatttttttcttctttttgtattatattctattaataaaggcatttgtatataagctatgtgtttttt

SEQ ID NO: 677567 - DNA, 615 bp, Homo sapiens
aaaacttaattaaaaattcaaaatgtagatgaaaatataaaattaaattaaaagctcttctcagccctcactccaaatttttcttccccaaattaatcatagttactagtgggctttttattctaggagaaaatattttatctgtctaccaacatgtatacatgtctgaaggatatttaatttttgattacaaaaatggattatatttatcagggctctgttaaaaaagcaaaatatcatyaagtgttgcttagtcagtacccagtaaaaatcttcatatgagctttcacatgtatgtgcttccacagtatatttggggtttttcaaccctttaattaagaaaaaagggccaggctcggtcgcttacacctgtaatcccagcactttgggaggctgaggtaggaggatcatttgaggtcaggagtttgagaccggcctgcgcaacatggtgaaaccccatctctactaaaaatacaaaaaattagccatgtgtggtggtgggcacttgtaatcccaggagaattgcttgaacctgggagatgaaagttgcagtgagtcgagatcatgccactgcaccccagcctgggtgacagaaaaagactccatctcaaaaaa

SEQ ID NO: 677568 - DNA, 389 bp, Homo sapiens
tccatgttagattttagaatagtgatgttttgtattatatttgtagacttatgacctatgtttttcttctgctgctaacctaactgggaagaccaactatcattttaagatagagtcagagggccgcgcgtagtggctcacgcctgtaatcccagaactttgggaggccgaggcaagtggatcacctgaggtcgagagttcgagaatagcctgaccatgtggtgaaaccttgtctctactraaaatacaaaaattagccgggcatggtggcatgcatctgtagtcccagctactcaggaagctgagacaggggaattgcttgaacctgggaggtggaggttgcagtgaaccaagatcacaccacggcactccagcctggccacagagca

SEQ ID NO: 677569 - DNA, 607 bp, Homo sapiens
aggagaactggtcttgcttggaaaggtttgaggaggagaaagtggttaaacagaaaattgagtaatattttactatataaatgagagttgaaggagggcaaccaggaggaaaaaaaagcattacgaaaaacaagggatgatagagaatgagatgtttcagggacagttagtgactcaatgtgaggagtgtgcagggtattcgatggaacagtggtgcttaatggagcccccaaagcagacagaaamtagaacagaaatggccctgcatgccatgctaaaggatttggaattgatcttgtattcactggagagccgcaggagaagtataataaagggaacaaaagtggacttcagaatgtagtctgtgtggcatgagaagataaattcagagcactttcagaaagaaagcagaaaaccctatactacggctattttattaatgcagggaaaaattatggtgtcctggcataagatagcagcagttgagaatgaagaggaggggctggatttgagatatattaagaacattgaatcaataggttggaatggttgagcagtgggggattgaggaattggtgaagaacgtaaatgagtcaaggatgactca

SEQ ID NO: 677570 - DNA, 607 bp, Homo sapiens
aggagaactggtcttgcttggaaaggtttgaggaggagaaagtggttaaacagaaaattgagtaatattttactatataaatgagagttgaaggagggcaaccaggaggaaaaaaaagcattacgaaaaacaagggatgatagagaatgagatgtttcagggacagttagtgactcaatgtgaggagtgtgcagggtattcgatggaacagtggtgcttaatggagcccccaaagcagacagaaaatagaacagaaatggccctgcatgccatgctaaaggatttggaattgatcttgtattcactggagagccgcaggagaagtataataaagggaacaaaagtggacttcagaatgtagtctgtgtggcatgagaagataaattcagagcacttycagaaagaaagcagaaaaccctatactacggctattttattaatgcagggaaaaattatggtgtcctggcataagatagcagcagttgagaatgaagaggaggggctggatttgagatatattaagaacattgaatcaataggttggaatggttgagcagtgggggattgaggaattggtgaagaacgtaaatgagtcaaggatgactca

SEQ ID NO: 677571 - DNA, 607 bp, Homo sapiens
aggagaactggtcttgcttggaaaggtttgaggaggagaaagtggttaaacagaaaattgagtaatattttactatataaatgagagttgaaggagggcaaccaggaggaaaaaaaagcattacgaaaaacaagggatgatagagaatgagatgtttcagggacagttagtgactcaatgtgaggagtgtgcagggtattcgatggaacagtggtgcttaatggagcccccaaagcagacagaaaatagaacagaaatggccctgcatgccatgctaaaggatttggaattgatcttgtattcactggagagccgcaggagaagtataataaagggaacaaaagtggacttcagaatgtagtctgtgtggcatgagaagataaattcagagcactttcagaaagaaagcagaaaaccctatactacggctattttattaatgcagggaaaaattatggtgtcctggcataagatagcagcagttgagaatgaagaggaggggctggatttgagatatattaagaacattgaatcaataggttggaatggttgagcagtgggggattgaggaattggtgaagaacgtaaaygagtcaaggatgactca

SEQ ID NO: 677572 - DNA, 662 bp, Homo sapiens
gcagccacaggtggttacatctatccttgctttgtactgtctagctcaactaccaccacacctaactgtaccatgccattctactccagtggccagatgccagatgggcactaaggtgtctggcaccatccacagactgaccagtatatgccatagcctagtgcaagtgcaagaggccaactcaatcagtctgcctttgaatgctagatctggacaccagaaaatctggacaccaaaaatcaagatgtccacataagtcatactttcaggctgccctgattatttctcaagtacctcatagctaaaatgtaaaaggcctagctattttwaaaaaaattttaaatagctctgaacccgagaatgctttaagttcacagtaatatagatgaaagctaaaatgtcaaaggtacagctataataacttaaaagacaagtacctttgtgaatcagaaataatctagaaagagttttagaaaatatataaatctatggtcattcttggatctggctggagaagcaggcagaaccagctaaatgataacattgactttttgatatgccattctgcataccggtctcacattcaggctggtaacaggacgggtgcagttgttcctgccatcgcatctcatattcacataggaccgtattaagaatataaa

SEQ ID NO: 677573 - DNA, 662 bp, Homo sapiens
gcagccacaggtggttacatctatccttgctttgtactgtctagctcaactaccaccacacctaactgtaccatgccattctactccagtggccagatgccagatgggcactaaggtgtctggcaccatccacagactgaccagtatatgccatagcctagtgcaagtgcaagaggccaactcaatcagtctgcctttgaatgctagatctggacaccagaaaatctggacaccaaaaatcaagatgtccacataagtcatactttcaggctgccctgattatttctcaagtacctcatagctaaaatgtaaaaggcctagctatttttaaaaaaattttaaatagctctgaacccgagaatgctttaagttcacagtaatatagatgaaagctaaaatgtcaaaggtacagctataataacktaaaagacaagtacctttgtgaatcagaaataatctagaaagagttttagaaaatatataaatctatggtcattcttggatctggctggagaagcaggcagaaccagctaaatgataacattgactttttgatatgccattctgcataccggtctcacattcaggctggtaacaggacgggtgcagttgttcctgccatcgcatctcatattcacataggaccgtattaagaatataaa

SEQ ID NO: 677574 - DNA, 571 bp, Homo sapiens
cctggcatttaactagatgttcaataagcactaatcaaatgaatagaataaatttgcctgtgaagcaccattctacraccaaattcaaaacagaatttagattctattattgttagtgtgatacttcaaatagttatctatattgagtaagtaaaaatttggcaaacatatattactttaaaatgaacagtacattaaatttcagttcactttatgtgattacaaaattgggcaggcacactttagaaatactactataaaatcatgcttataagagaaaggaaattttacatccaatatactaaatatttttaagcattttgaaataaaataatgtatgaaatataacaaagtagtttttccatataatttaaaatagtatataaaatataaaaatagaaaacatatctactataattgaacattaattttataggtttaagatttctgttgacataagaattatatatatgtacacacagatattcacacacatgttgtttcttgatatatatctttatttctagttatagtgataaataaaacaggagaaggtaaacctcttgtccaa

SEQ ID NO: 677575 - DNA, 622 bp, Homo sapiens
tccctccacctatttggaaagggagctcgctgggccagccaggaaaacgcagtgggatttgattctgcgcagccccgtcctgggggtgccccaggaagaagtgctgtgccagcactgaccgaccagttctagactcagcctggcttctgcgtccactcaagggagatgggtttgtgtcggcagagagggcctctccctaggttaccttaccttgctctgttttgggggatccctcacctggctctgttttgggggatccctcacctggctctgttttggatgcagagcccttgatgaggtgggttgtttgaggggtggacctggggatttgacccaaacttcctaatccgccagagccctcgttgactcagcagcctccacccccaggcttctctgtgcaggcagagccckgcccggcctggagagctcaggacagcgcggcttcgggccggccctgcaggagtgccgggtgggtgttttgtgtgtccccatctctgcctgtatcaaccctaaaacatacatcatgtgtacttgatccccgttctcctcatttcctgcaacactattgtgtggacgccatttaggggctgctgacggtaactcacgtggccgtggctatccc

SEQ ID NO: 677576 - DNA, 670 bp, Homo sapiens
tatctccagggctagtcccagtgaatgatcacttaagtgtttgaattgcattgaattacatgatggttgtgttttaataattaatgttaataataacacctgccatatattaagacactaccatgtcccaggagtggtactaagtgctttacatacaaggggtcttcaaaaaaatcatggaagatacgttatgaaaaaactatgcatggatttcaacactttttgcaccaaaataagctcctactcactgagcaggatctagtttgaggcactaagaaggataagacatcagttttaaaagagcccctatcagagcaacatgaattctgctaaaattaaatcaagaaccaacattggccgggtgcagtggctcacgcctgtaatcccagcactttggggggctgaggcaggcggatcacctgaggtcaggagttcaagatcagcctggctaatatggcgaaaccccatctctactaagaatacaaaaattagctgggcgtggtggcaggcgcctataagcccagctacttgggaggctgaggcaggagaattgcctgaacccaggaggcggaggttgcagtgagccaaaattgcgccactgcactccagcctgggcaacgagcraaactccgcctcaacaacaacaacaacaacaaaacaaccaacatca

SEQ ID NO: 677577 - DNA, 646 bp, Homo sapiens
cagagactctgtcccaggaggtaggcattttttcttttctttctttccttccttccttcctcccttccttccttccttcctaacttccttccttcctttttctttctctctcttttcttttctttctttctttttttttgacagagtcttgctctatcgcccaggctggagtgcagtggcgtgatctcggcttattgtaacctccacctcccaggttcaagcaattctcgtgcctcagcctcctgagtacctgggactaggggtacgcaccaccacgcccagctaatttttgtatttttagtagagatggggtttcaccatgatggccaggctgatttcgaactcctggccttaagtgagcctcctgcctcgttctcccaaagtgctgggattacaggcgtgagccaccatgcccagccggcattttcatctggactctgccatggggctcagcaaatcagatgtgacctggtgacaggtgccaagaaggtctggcgaccacaggtttcttgtcggtttctgcctgggaccccygcacctccctaccagtattcccaacccaacgaaagaccggccaagtacaaaccaagggcagccctgaagcccaggaccatgaggcctggaaggccccaggacaggtgatttg

SEQ ID NO: 677578 - DNA, 600 bp, Homo sapiens
ggcatcacagtgggcacgtgggcatggctctgctctctggcatcacagtgggcacgtgggcatggctctgctctctgtggcatcacagtgggcacgtgggtgtggctctgctctctgtggcatcacagtgtgcacgtgggcgtggctctgctctctggcatcacagtgggcacgtgggcgtggctctgctctctgtggcatcacagtgtgcacgtgggcatggctctgctctctggcatcacagtgggcacgtgggcatggctctgctctctgtggcatcacagtgggcacgtgggcatggctctgctctctgtggcatcacagtgggcatgtgggcatggctctgctctctggcatcacagtgggcacgtgggcgtggctctgctatctgtggcatcacagtgggcaygtgggcgtggctctgctctctggcatcacagtgggcacaagggcgtggctctgctctctgtggcatcacagtgtgcatgtgggcgtggctctgctctctggcatcacagtgggcacaagggcgtggctctgctctctggcatcacagtgggcacgtgggcgtggctctgctctctggcatcacagtgggca

SEQ ID NO: 677579 - DNA, 587 bp, Homo sapiens
ctgaagtctgcgtttgttggatgtatggaacagccagcctcaccatcctgccagtgttgcccagtcctgggacttctcgggccttgatttccccttctgtgaaagggggttggggacaagacaggccaccttgcaagttccttccagccagcccacaagtcctgtcctgtgtggctctgggtcacgcctttcctgttggccaggggtyggtgctgttgagcaggggagggcgttgttcaaggatatctatttgcacaataacctgtgcaaaggtagctagaagacttgaaacaggccgggcgcggtggctcacgcctgtaattccagcactttgggaggctgaggctggtggatcacctgaggttaggagttcaagaccatcctggctaacatggtgaaacctcgtctctactaaaaatacaaaaaattagctgggcatggtggtgcgcatctgtaatcccagctactcaggaggctgaggcaggagaatcgcttgaaccaggaggtgcaggttgcagtgagccgagatcgagccacggcactctagcctgggcgacagagcgagactctgttgcaaaaaacaaaca

SEQ ID NO: 677580 - DNA, 587 bp, Homo sapiens
ctgaagtctgcgtttgttggatgtatggaacagccagcctcaccatcctgccagtgttgcccagtcctgggacttctcgggccttgatttccccttctgtgaaagggggttggggacaagacaggccaccttgcaagttccttccagccagcccacaagtcctgtcctgtgtggctctgggtcacgcctttcctgttggccaggggttggtgctgttgagcaggggagggcgttgttcaaggatatctatttgcacaataacctgtgcaaaggtagctagaagacttgaaacaggccgggcgcggtggctcacgcctgtaattccagcactttgggaggctgaggctggtggatcacctgaggttaggagttcaagaccatcctggctaacatggtgaaacctcgtctctactaaaaatacaaaaaattagctgggcatggtggtgcgcatctgtaatcccagctactcaggaggctgaggcaggagaatcgcttgaaccaggaggtgcaggttgcagtgagccgagatcgagccayggcactctagcctgggcgacagagcgagactctgttgcaaaaaacaaaca

SEQ ID NO: 677581 - DNA, 673 bp, Homo sapiens
tttatacatcagctgaatcttatgttgttctccctggtcgattttctttcctagcactgattaatgacatttgcatttgtttatctgtcccactatgaaatgcagacatcagggggtgagaggcattggtttgttcatggctattcacttggcacaagcctgctatgttgcagatattaaataaatatattctgtattaattttaaaagttcccagacataccatgcgtcagagctttgccacctgggaagcaggtttgcatgagatgcttaaattgagaaacaaaatttaggaaatcttacaagaggtttacagtgtaaaaatcagtactttgctaagtttgtggtggtttttttttttttttttcttttgagacggagtcttgctatcgcccaggctggagtgcagtggcgcgatctcggctcactgcaacctccgcctcccgggttcacgccattctcctgcctcagcctccctagtagctgggactacaggcgcccgccaccaggcccggctaattttttgtatttttagtagagacggggtttcaccgtgttagccaggatggtctygatctcctgacctcgtgatccgcccgcctcagcctcccaaagtgctgggattacaggcgtgagccaccgcgccctgcctgcggtggttcttaaaaagctaa

SEQ ID NO: 677582 - DNA, 1565 bp, Homo sapiens
acagccatcctcacctaacaggcatttgtgagccgaaggggatgcctgctattgcccgggccttaccctgagctctggagtcactgaagctgaacagactccgcaccctcagaggatcaggactaaccctgacagtcctcctgcccagtgagacctgggccccaggtggacaaagcccttgtcccacccgccaagggcatctgtctagctgcaggctggggcagtcctgaggagcctggaaggacctctcacaccacgcccaccatggctgattccagctcactcggagacccggccttggctgggaccctcaggagttaaatgtgtgttttccagctcttctcagaagcagcagaggcccgcgagaggtgggaaaggggagggcacccgcagaggcctgcgcactgacactgctgagtggctctgctcagctctccttcctgaagaggacaaaggtcacgtggcctccagccagggctcaaggacaccaagttccggcagccacaggcagagagcggagacaaggacagctccgccgtggcgagcagaggctcagctgctcccactgaggcccagggcctgacggaggctcccgcccacaacaactgagccccgctagggtctctctcacttcctgctctcgctggcctggtgtgtcccactggaagccccaggcccgcaccctgtgcccccagcccacagtgggctccacatcaggcgggcaccaggaggcctcaacaatgtccccacaagtagcttccatccccgaggacgcaggcctgaaatgggctcacctgcttgcggaccgggaggcccaggccccgcacgtccgagacaatgaaagtgatgatggtcttgacgatggtggcaaagaacgtgttgaccccgaagaccagggcacagagctctttagacagagaagatgcaatctgaaagctgaacgggaagagcgggcagatcaggcgctgctgggagaataagcagcagccacagggaaaagcctgcagcccggctcccaccagcccatgaccckcccggcagccacggggtcccagggcacgcacaagccccccaccaggcccccatctctcccacacatgcccgcccctgccaggcaggagccagcacccaggccaccctcgaggggccattctgggagctgccgtgtccccctggctcagtacagagtgagggtcccttatccaaaatgcctggggccagtagttttggatttgggaatattcacatgtccataatgagatgtcttgaggatggaacccaagtctaaacacgaaatgcatttatgctcatatgcactgtacacacacagccagaaggtgattttatataatacctgacaaacatttgcaagccaaaggggttgcctgctactgcccagggcctcaccctgagttctggagtaattttgtgcatgaagaaacttttgaccgtgttctgagactcgtcaaacaaggtcaggtacaggattttccaccgggttgtctttccggtgctcaaaaactgtcagattttggagtatttcaaattctggattttttgttatt

SEQ ID NO: 677583 - DNA, 629 bp, Homo sapiens
cctggaggtgagtggcagcagggcagggtgggccctggaggtgagtggcagccaggcagggcgggccctggaggtgagcggtggcatgaacatgtccaggaatgaaggcaccacattcctgacatggagaggtgacacgccaggcttctggtgctctgcaaagaaactagtcttccgatgcagttccaattaaaatctgcaaagtgcttaaaaaaaaaaaaaaaaaagaactggacaaaaaatgtcctaaagttcacctgaagaaaaaataaacaaaaatgcccaggaaccctttggagaagggcagaggtgtctgtgctgctgggcactggagacggggggacagtggggacagtggaggctcgggggcaggcaggcrggccggcagcagggaggacgagagaagcacacagaggtcccggtgagcaggtcagtgggatgaagggcagacgaacaacagggagaactgagcacaaacacgagcttctggatgccagcgctgggcagggcagagcccaggccagcccccagggtgcttccaaggacactcagaaacactgtgagttgaattaaaggcagacgagtgtggggcgtgatgggggcacaggtgattgaaaatacatgataca

SEQ ID NO: 677584 - DNA, 629 bp, Homo sapiens
cctggaggtgagtggcagcagggcagggtgggccctggaggtgagtggcagccaggcagggcgggccctggaggtgagcggtggcatgaacatgtccaggaatgaaggcaccacattcctgacatggagaggtgacacgccaggcttctggtgctctgcaaagaaactagtcttccgatgcagttccaattaaaatctgcaaagtgcttaaaaaaaaaaaaaaaaaagaactggacaaaaaatgtcctaaagttcacctgaagaaaaaataaacaaaaatgcccaggaaccctttggagaagggcagaggtgtctgtgctgctgggcactggagacggggggacagtggggacagtggaggctcgggggcaggcaggcaggcsggcagcagggaggacgagagaagcacacagaggtcccggtgagcaggtcagtgggatgaagggcagacgaacaacagggagaactgagcacaaacacgagcttctggatgccagcgctgggcagggcagagcccaggccagcccccagggtgcttccaaggacactcagaaacactgtgagttgaattaaaggcagacgagtgtggggcgtgatgggggcacaggtgattgaaaatacatgataca

SEQ ID NO: 677585 - DNA, 1130 bp, Homo sapiens
ggatcaaggctgagcaaactgccggaaggagggtctctgcctgacgggctctgggacaggccggacttcgtcctcctcctcacaaggagcccagcgcagcccccgctttcgccccacagagggctaagccccaccactgagcttagaaaacaaaactttctcttatccaagcagggctcagccccacaggaggcctgggagcagtcacactggaggctctccgccactctaggaaccaggaccacagttctagagacaaagtcatcccctggagggcccccggaggcagcttcaggctaacggcccgcccactgcccagggacacttcccagggactgaggggacacttctctgggaccagatgctgaaaagaggcgtctttcctataaagaacccgaagaccatgaggtcttagggcagctgcagaaagtgctgagcccatgagagagacgctccttctctgggaccctctgcccagctgtggcccctgtcagtgtgaggcatctacttccaagagctgccttgtgtgctttctcgtgttttgttgtttttgacccagggtcttgctctgtcaccaaggctggagcgcagtggtgtgatcacrgctcactgcagccttgacctcctgtgctcaagcaattctcctgcctcagcctcccaagtagctgggaccacaggcaccaccgtgcctggctcatatgtatctattgtacagccagggtcccactatgttgcccaggctggtctcgacctcctctattcaagtgatcctcccgcctcagcctcccaaagtgctgggaccacaggcgagaaccattgtgcctgggctgacataggtgttttctagaacaagacagtgggggtgatacaaggggtcttgggggagtatacacttatacagtggtcagggtgggctctgcagacacatttgggtctccgtctgtggtgccgccgtgagcgagatcttagaaggcagcggacaccccggccctgttggaggaggccaaagccccgggaactgcccgtgaagtgaggtctccctacctggctcagcccagccaaccaccgtgctctccagcaactcagccccaacagctgcttcctgctttgcggcaggaggcctggggtcc

SEQ ID NO: 677586 - DNA, 650 bp, Homo sapiens
ttgctatcattttgcattgaatacaaataattcacacagaaaggaaagcttcacagctgaaatattttaaaaagatgtactgaaacttactcttccagcaacttgacttcacttgattaattagctttcaaaactctatttaattttgagacttctttaaatcaatgctatgaaaactgagacatgcttacagaattaattttttaaaatttttttcttagcaaagtagaagatatatatatatatakagagagagagagagagagatgtaatacgcatatataaatatatattggaagcccacatgtgtaagtctgcttactaagaaatccaaaatgcttcttgccacttaaaacttgtaactaaaaatatttattacaggaaataattgtgttaggatgtttgttgcagaaaattgtttgctcacccaaagttgaatagcacatatatttttagaggttgttttatccaaaaatcttgtgataattaactcagtatgatcttgctctaattaactcaagtatgaataacagaataatatagtttcttaaaattaaaagcataaaggtattgcagcaggccaggtctcactaacacaggcctccgtaacaactgtttcagcactgacttggtggttaagttaaatatta

SEQ ID NO: 677587 - DNA, 648 bp, Homo sapiens
cttctctaaaactggtccttctatacccttcctatttgtaaattgcaccaccatctaggctcattcttgatttttaccctttcacaaatgtaactattgcattgaaagagtagcaatttacaaagttatagtaaaaaatcaaccctttcattttttcccctagtacctggtcatacctgtttttttccatgtccttgacacctcaagtagatcacatgactatygagtaagaaaactccttcaattatttaatcttatatcagtgtcactttggtaactgtctacccagtctaataaaatactaagagtagaaattaaactctttctcctcttcagatcttatcctagttggaaacctgcattggaaagaggtatagaataggcttttctctatttcctctataggagctcctctcccactcccaacccccaatctcaggctgccttctgggccctctggttttaggttaaaatagactagaggaaaagaagagaaaaagtctcctttgattggtactctcatagtgtggctttattactctttggacttacaggtatatgaaaagcagtgttcttcccaacaaatcttcagagataaaatactgtttctcgtaagtgcaatatgagaaattgaagaaatattgcaat

SEQ ID NO: 677588 - DNA, 537 bp, Homo sapiens
ttacttgtcataacaaaaaataaagaaaacatagccattcagaaaagccaggtttaaaaaattctggtacatctatacaataccgttaatttatgttttggtttatttcttcagggcggtagacttacatgtattaacatggaaagatgtccatgatgaaatagtaaatgaaaatagcaaattcatgagaatgcaaattagaatcatagtgcgataccatgaatgccttagacaaaatagtcttcaaaagtgaaggagaaataaatacttttttttttcctttctgagatggagactcactctgtcacccaggctggggtgcagagtgcaatggcgtgatcttggctgcacacaccaccacgcccagctaatttttgtatttttagtagaggtgggttttcaccatgttggccaggccggtcttgaactgctgacctcaagtgatccacctgccttggcctcccaaagtgctgggattacagctgtgagctaccgtgcctggmagagacttttgtagaaaacaaaaattgaggcaat

SEQ ID NO: 677589 - DNA, 639 bp, Homo sapiens
tcaccagacattgtgctccctgagaaagaatctctgctgttcatctaacacaaagttccactgacttgatctccttaatagccctggaatgtgtcctctccactctgtccccactgtcacctctttagttcagatccttcataaatttcatctggactaccrcaataaccacctaactagtttctctttgccttagttctaactcctagacaatactaaagagtaaaagctaagttagccaaagtacaaatgtgcttaaaatctttcaataacttcctcattcttctgaacagaatccaaattccttaactaccaagactgaaaagatctcactctttcctaattcaccagcctcttctcttggcactcttccacttgcaacctcagcttcataccagtgacaacaatttatatatagctccctaaatgagctattgtctcatataactaagtctctgctaatgctagtctcgttgcctgagagactcttctaattgggtctggttgaccaattttctatgatcattccaatctgggtcaatcgacctcatcaatgccaccataagtaaactgcacatacttccaccacactgtgtagtaactatgtgtacttacttgcagattaagaacaacttgagc

SEQ ID NO: 677590 - DNA, 616 bp, Homo sapiens
gaagatgttttgggtaatcttaaataaattgcagtgatacctaaactcagatgagaaaacgggacaaatgaaccacatcctcgtgttcatcctgaagtrgtagatttcccaggagatgagagaactttttggtcccacatgacctaagctgtgtgatatctctaaaaggtgccattgctgaaatgcctaccagcaggagtcagaaaatgctgcacatacctccttcttggcatcattctggaggctctggatggtgatcactctggcacagttcataaagtaaaaaaaccgattgcatttataccaagatataatgaggtccaagattataatgtgattgatactagaacagaaaaatgcatgcggatgctgaacttgctctgcagcgatagccgtcttcagttcaacccagtttcctgaaagtgttggctcaggacaacagctccttgctgctattttcctaatgacggattaaatatttttgtattgaaagaaactaggtatattatggaatagctttcaaaatctatatcactatgacatagggctagagagtaaaagaagttttaaattttaaaaaaatctacatcaaattttaagataaaacataagatga

SEQ ID NO: 677591 - DNA, 616 bp, Homo sapiens
gaagatgttttgggtaatcttaaataaattgcagtgatacctaaactcagatgagaaaacgggacaaatgaaccacatcctcgtgttcatcctgaagtggtagatttcccrggagatgagagaactttttggtcccacatgacctaagctgtgtgatatctctaaaaggtgccattgctgaaatgcctaccagcaggagtcagaaaatgctgcacatacctccttcttggcatcattctggaggctctggatggtgatcactctggcacagttcataaagtaaaaaaaccgattgcatttataccaagatataatgaggtccaagattataatgtgattgatactagaacagaaaaatgcatgcggatgctgaacttgctctgcagcgatagccgtcttcagttcaacccagtttcctgaaagtgttggctcaggacaacagctccttgctgctattttcctaatgacggattaaatatttttgtattgaaagaaactaggtatattatggaatagctttcaaaatctatatcactatgacatagggctagagagtaaaagaagttttaaattttaaaaaaatctacatcaaattttaagataaaacataagatga

SEQ ID NO: 677592 - DNA, 610 bp, Homo sapiens
aaatgtctaagaataactggggaacacattaaactacgtattcctgaatccttcagtcatctccctgtcaatattcctactcagcaggtctggggtaggacccaggagcctgcattactcacaartactgcagaaaatagggtagagatggtcaggggacaacacagagaagcactgctctgtggtggcaagctctgagtccttagcagaattaatatatgttcatattctacaacagaccccaccctgcttttggagaacaattctggctttgcctttagctacccctccaccccacctctgtgttccatagggtagacttcctattgggttccctgattttttaaaggaaagaatgactctacccctgcttatctggttgccaaggtctatgttctgtccctaatcagcaattaaagcaatccgtattccaacgaattaatataattgttatctcctgccattcagcggcttgccaaaggttgatttccatcaaacaacacttgagcaagataatctaaaggatgctacaatctaaagagtctaagttccatctttggaccaaatcaaagactagatgaaattaacattttaataaaataatacctcc

SEQ ID NO: 677593 - DNA, 610 bp, Homo sapiens
aaatgtctaagaataactggggaacacattaaactacgtattcctgaatccttcagtcatctccctgtcaatattcctactcagcaggtctggggtaggacccaggagcctgcattactcacaagtactgcagaaaatagggtagagatggtcaggggacaacacagagaagcactgctctgtggtggcaagctctgagtccttagcagaattaatatatgttcatattctacaacagaccccaccctgcttttggagaacaattctggctttgcctttagmtacccctccaccccacctctgtgttccatagggtagacttcctattgggttccctgattttttaaaggaaagaatgactctacccctgcttatctggttgccaaggtctatgttctgtccctaatcagcaattaaagcaatccgtattccaacgaattaatataattgttatctcctgccattcagcggcttgccaaaggttgatttccatcaaacaacacttgagcaagataatctaaaggatgctacaatctaaagagtctaagttccatctttggaccaaatcaaagactagatgaaattaacattttaataaaataatacctcc

SEQ ID NO: 677594 - DNA, 610 bp, Homo sapiens
aaatgtctaagaataactggggaacacattaaactacgtattcctgaatccttcagtcatctccctgtcaatattcctactcagcaggtctggggtaggacccaggagcctgcattactcacaagtactgcagaaaatagggtagagatggtcaggggacaacacagagaagcactgctctgtggtggcaagctctgagtccttagcagaattaatatatgttcatattctacaacagaccccaccctgcttttggagaacaattctggctttgcctttagctacccctccaccccacctctgtgttccatagggtagacttcctattgggttccctgattttttaaaggaaagaatgactctacccctgcttatctggttgccaaggtctatgttctgkccctaatcagcaattaaagcaatccgtattccaacgaattaatataattgttatctcctgccattcagcggcttgccaaaggttgatttccatcaaacaacacttgagcaagataatctaaaggatgctacaatctaaagagtctaagttccatctttggaccaaatcaaagactagatgaaattaacattttaataaaataatacctcc

SEQ ID NO: 677595 - DNA, 575 bp, Homo sapiens
tttaaagaggggcttgatttgtttatatattctggaacagcatgagaagggaaatgatgtggggtttctgcccttcatgtcagaaactgactgcagttttgtgattacagacttactaagtaccatgtcagtgtgacgtttaccatccccacaaacactatgggatctaatttaacagtttttgacgaggccatgttactgggaacagtcttactgtttacagaaaaaagaaagaacttcctaactggatggatatacccagcaatattcccaaatggctttatgtcttcttcacaggctggcaaatcataaaaaaaaaaaaaaaaaaaaaaaaaaaaaaaaagttttatcttcttgaaattaaragacatgcatgtaaatttatcaggaaaataaaaagccattgaattcattgactactacaatttgtaacccatccagacggcaccctaaggcaccagcattcccccatcaagtcaaatctcttccttggtcatattttactagttaacatttaacagggttttcttcttcttcttctcctttcttctctttcttcttcttcttcctcttct

SEQ ID NO: 677596 - DNA, 634 bp, Homo sapiens
aaaataagccactttaatcaatgcacaatcaagtccttattcagtgagaacaagggtatacatatacagttagcaagaggacttgggttagctgacayaagggcagaaatctgaaaattagacattggatacaaagaaggtccagcaaatgagagtgggggtgatcaggttctaagtgcccaggagactcatgttacatacccaatgtagtcagttgttagcagaggggaaaaaaaagaaaaaaagcacgttaccttagcaaccaatactcaaaccgaaaaaaaattatgtcaccaaaagatttttgaagtgattgtacatatggtccagaaactaaatgtaaaaaatacttcactagactctaaaggggattttaaatatatgaagttattagagacttacttaatatcttaaaagtatacatgtctggatgttattttacttatataaatacatattagccatattttagggtttgagcattacgataatagctggttaaccttaatttttcaaaaaaaaaaattgactgttatatctgaacatgttatctagaaacatatatcagttgcagtagtttttaagacacaatttttctaataagcatattactaaatgtaataaataaatcaat

SEQ ID NO: 677597 - DNA, 634 bp, Homo sapiens
aaaataagccactttaatcaatgcacaatcaagtccttattcagtgagaacaagggtatacatatacagttagcaagaggacttgggttagctgacacaagggcagaaatctgaaaattagacattggatacaaagaaggtccagcaaatgagagtgggggtgatcaggttctaagtgcccaggagactcatgttacatacccaatgtagtcagttgttagcagaggggaaaaaaaagaaaaaaagcacgttaccttagcaaccaatactcaaaccraaaaaaaattatgtcaccaaaagatttttgaagtgattgtacatatggtccagaaactaaatgtaaaaaatacttcactagactctaaaggggattttaaatatatgaagttattagagacttacttaatatcttaaaagtatacatgtctggatgttattttacttatataaatacatattagccatattttagggtttgagcattacgataatagctggttaaccttaatttttcaaaaaaaaaaattgactgttatatctgaacatgttatctagaaacatatatcagttgcagtagtttttaagacacaatttttctaataagcatattactaaatgtaataaataaatcaat

SEQ ID NO: 677598 - DNA, 645 bp, Homo sapiens
gtccctcccacaacacgtgggaattgtggaagctacaattcaagatgagatttgggtggggacacagtcaaaccatatcagtcccccagtgtaatgctgaatcacagtgggaaagagctccctctaaaagacattcccattatcatgagacctggrgacaagtcaactctaatatactccttctgttagttggtagcccaccatggaattactaacagtggaaaagagacgtccagagcagcctagtgggcagacaacacagctcctcctaacaaaaataccaagctcagtcccttgcaaaggagtctaggttatctcaaattttggagatgaaccaattataattagctcagggtattcaggttaagaatctgagcagaactaactccttctatatgagcttcaatattcagtacataaacattgattctaagttctgtgattgtaagatctattaatagtaggattggctcattgttgaacttcaaagcctgtccttttacaaaagcaatggccccagattctgaaaataagggattaaactgaattgaatcactgctaaaaaacatcaatgtctatcccactgcataaaatgttgtcctggcttttacaaagacaagacccagaagttctaggtttttctta

SEQ ID NO: 677599 - DNA, 2619 bp, Homo sapiens
tttcttatttatgaattcatagcatcaacatatagacacataaatgcagcctctcaccccacctgcacagatatatatatatggaatgagttcaaacatcattgaatctctatttggattagctcccatattattttataattaaaaaccttattttggtacattttggtttcataacaaatgatattttcactgactcagaaaagcatcaattgttatgagtaagtttaaagtatgcttaacagactgtaccagacataacctgaaattaatttcaaattaaaattattttaaccataaaataattactatcaattcagtgtctcttactacaatttctgacatgtatgtttataatttgtgacatgaatagattatttaactcaaatttaaaaagtaaaagaaagattatatatctgatttattagaaaaacaaagcagagacaatggggaatttgataaagccaatagaatccaaagcagtagaaaaatgaaaatctagtatttgtaattcatctatattgtggttggtctgaaaatattgaaagaaattttatttttttacccaacatgtaaggaaaattatagacacatatgtagcatagatgatatctgtgatccacagaaaaaaatagcttgtgttttcattattaatttttggagtgagggcttaattaatatgtattttaaacagcatttgggaagatcagtgttttcctatatcttggttatttagtcttataaaaaattcctctgtatcttttaaacttatattattatcttcatgtaaggaaattcaatcccaggaacttagcttaaaggcagagataatccctattttccataaagttatctgtgataataacactgacaccaacataccatttattctgatgtgcactgaggaagattcaatgttcattgcatgaaatcaagaagatattaaatgtaactttgtttttactcttaaaaagatgcccaaaggcaaaagtgccattttctgtcaagcatgactcaattgatagttcactcttgattctgcacaaatgcctcttttaaaatgattcaattcctctactacctcatcttctctggtcaggcaggagtcatggagagagaagattggcctattatcttcccactctgtcagaaacagcagcagtaatggtcatgattctcttgtatgctaccagttcaatgctccataaaacatatgaactatgatatctagacttaattgtgcctagaggaaaataaaatgaaatgaggtgggtagttaagtaaaatgttggtatatatgttaatgtctgtctatgtatgtatcttaattctttaaaaactacattagtatgtgaattaagcatcttactagaaattcacaaatttaaaaacaatttttattttatctaaaagttgagttagtttggatattcttacaatgaataaactaaggagcatttatagagtatattaagttcactttttttatccatttaggaattaaaaaaaaagttaccaggtgttatttgtctcttaaatcaattaatttttaaacatatggacaaagctttgagactaattgaaagcgacccttcctcctttttttctcattagctactgagaatgtgattttatcattctacgtatgtacatgcataactacgtgtttgcatgagttcagaaaccagctgcagtagaaaatatcctgtgtgacagtttacttttcatggcatttctgatcttgccagttagggagtgaaaaaatttcatgaagtttattcctgtcagatttttcacatttttccaaagcaagttctcagagaaatacagataaactacagataattttttaaaaaccacatactaaaataattgtatttagtaatctgaggaccaagaagatctcccccttaggaattttaatgattatctatagaaagctattagtcctttaggaaaattttactaataactttggtgtgctctatctgcaaacccyagtcatggagagagatatgagtaggagaactatgatacctcccccaaaataaaaaataataataattgcaaggaactaatagagattgaaaggtggaacaaacctctctgggtaaaagagttctgaactaatgttagtggaaagttccaggaagaacagcagaggactagcaccagatgaagtagacaagagtgatgccaagtgatgagagcacagctggggtgacgaacagatggcaagaggtgcaaacctgccagctcatgcattttctaatctcttttatctgctgaaaatgatcagaagaaggagcagtacatggaaaagtattaatagcgcatactgctggggtgagatcagtgaattttggcatttaagagttaattgtggttcaggaagacatcactcactggagatgtcaccttgaactttaaccaaccagggtggtcccaagttacctatgcactttagtcccatccaatgatcagtgtatcattttaacacactctgtcctcactccttaaaatacgatcagtgaaagttcctgtctgccttataccttcagatttccaatattaagttacagaaattatttgtctttacataaaactgaaaacttgggg

SEQ ID NO: 677600 - DNA, 1963 bp, Homo sapiens
tgtgaggacatagctagaacagctgtctgtgaaccagaaagcagccctcgccacatcacacactgaatctgcctgtgccttggtcttggacttcccagcctccagaattgtgttcagaactgtgagagatttatgtttgtaagccacttggtttatagaatcctgttacagaagcctgcatagactgagacatctgtcttctagtatagcatgtgctgcagttcctggagctgtactgggtgcctcccttttccctggcaggctggcagagtccaagtgtcttccagagcctccgggaagcatgttcagatactcatggcatgagccaggtcttcacagagctctgtgtcctcagagttctctcaaaggttcctttcacttctagaatctcaacattctatctgctggagctcgatcgtgctgtcagccagagctcaggtgcatgtttgagactcacatcctccaggtcttgcttcagtgtccatttctatttactcatggactgatgatcttgattggctccatgaggtcagctacaatcacactgttagcatttctagacttctccagagacctagtgactttttccatggaaaagagactttcttcttgtgtttgtacgcttgccatccactgttcacacttgtttcttcccatttctcttgctgtacatcctaaagaacacataagaattctttagaatgggcttctttatcttcacacagatttattattgcatttttttctgcctccaaagctcatcccatacatcaaatcatacagatcagacttcagagttttattctttgcagttttgaaggtttttgaaagtcggtctatgtcgaatgccattccttcttgtaaataagcacaaaactcccctgaagatcttccaccaaaaaacttttttaaagatggggtcccttctgtcacctaggctggagtgcattactgcaatcatagctcactgcagcctccaactcctgggctcaagtgatcctcctacctcagcctcctgaatatctgggactataggcatgcaccaccacacccaggtgacttctttaaatttctttcagagatggcatcttgctacgttgcccaggctggtctcaaactcccggccccaagtgatcctcccacctcggcctctcaaagtgctgaaattataagcatgagcccctacacccagcctcatttctgatttttctaatatttgacactatttagttgaagctgtatatgcacatgtcttatagaaaatgagttggcttctttctcccgactctgaatgaactacacccagctccttcaaagtcagcttgcctgcagagttaaactataaaggttgtatacctcttttcagtcgttctgagtttgagaacctctgagctgcatgccaactgtgagggatgctgttgctgctgtgtggtccggtcagttcttcctgataaggacaatgcctgcatctgtgtgaggacatgttccagtttatcaatctgttgctgatgctttggcatctatgatcctctttgttcaacctcacctgatgagacaggtgttgttgcccctttttgagcccctcaggaatggtctccatagagtgctcactcatctcaggaatgacttaacttgatctaatcatcttatcataagttgccgctctggaattctgagcacagaaccaaagctttatatttcaaggtgtggtcagggactgccaagactggtgggttgtcaatgggcttatagccttatagtcttatagcttatagtctttctgcacaaattttatttagcttagaagtttyttagtactcacaggctttttgagtttaaagttaccttttgcaaaaacttaaaccccaacttgaagtctagttatttcttcctaattctttgagttttttatgtgtttgctttgactcattcagctctgaatcagcaggtggtgtgcttttaa

SEQ ID NO: 677601 - DNA, 419 bp, Homo sapiens
gtagattctgctgccagttcaggtactttataggaacttctgaaggtctcagacaaaaaagagtaagtaaaaaaattgtatggcattctagatgttctatgaaacattattattatccatattttaaagctgaggacaagttaagtaaaatccaaggtttcacagctaatccatggcagaaccaggattcaaacccaggcagtgtggctcctgtctgtactcttaaccactggactctcytgcccctctaggatggatacttattcaggtgtccctctgtagagaatggcacaggtgggagtcactgctagaattgcttccctcgcctgcaggctcaagtccagtccccttggcaaggcacacgaggccagtaaacccttgtgctccccctttccatcccattcctcttgcccacgttt

SEQ ID NO: 677602 - DNA, 642 bp, Homo sapiens
tcttgaaagtagtgacctctggcttgagatttcatccgtatatctaaaaatcacgtattaaatacctggactattcagaacatggccaaactcagaaagtaattaaaatggcagtcataaaaatcactgtaactaactcacgaaaggccctttggtctcctgttttgggtctattgttctaactttgcatttcatactaagcaggttgattaattgacacaggttgaatctcccttctctgaaatgattggcaccagaagtcttttgtattttagggcattttggatgtcagattttcagattrggggtatttaatctctatggctcaaagattttaaagtagcccctatgatcctcacctcctggtctttatagcctggtgttcataatcctttcccttgagtgtgggcagaatctgtgactgcttctaaccaatagaatatggcaaagacgacaggatattattcctctgatgatgttgtgtaagacaccctcatactagaagatttgcttgagagtcttgctctccttcctactggctttgaagaagccagctaccatgagttttacagccacaggccatgaattcttccaacaacctgtaaactaagaagtaaacacttcccctgatgagtcatcaga

SEQ ID NO: 677603 - DNA, 642 bp, Homo sapiens
tcttgaaagtagtgacctctggcttgagatttcatccgtatatctaaaaatcacgtattaaatacctggactattcagaacatggccaaactcagaaagtaattaaaatggcagtcataaaaatcactgtaactaactcacgaaaggccctttggtctcctgttttgggtctattgttctaactttgcatttcatactaagcaggttgattaattgacacaggttgaatctcccttctctgaaatgattggcaccagaagtcttttgtattttagggcattttggatgtcagattttcagattgggggtatttaatctctrtggctcaaagattttaaagtagcccctatgatcctcacctcctggtctttatagcctggtgttcataatcctttcccttgagtgtgggcagaatctgtgactgcttctaaccaatagaatatggcaaagacgacaggatattattcctctgatgatgttgtgtaagacaccctcatactagaagatttgcttgagagtcttgctctccttcctactggctttgaagaagccagctaccatgagttttacagccacaggccatgaattcttccaacaacctgtaaactaagaagtaaacacttcccctgatgagtcatcaga

SEQ ID NO: 677604 - DNA, 619 bp, Homo sapiens
ctcacttaaagataaaagtaaatgtttctgtggtccttctgggagtggggaaagttacaactccacaaatgttaagagagaagggtgaacagttagcagtcaggcagcatggttgggagtcatgaggaagagcattcaagatgacacaagttttgtaagcagacctaaggaacgggctgaagaatgttgtggagacccaggtacttmgacttagcattctgagttcagagttcgcccaggagttccaggcttgtggcaggtttagaaaatccaggatgatcggccaccttctttctcccagaggtcgatctgatcttaagttgtacctgactaaaacctgctgcaggagagatggtcagattttatttacacacagggagatggcttcctaagattgtgtagtgaaccaagaaggtgtttacaggcatgtgaaactggctattgtaaagaggcagtgatctgggacacgtgatgttagttaaagtggaggaaaaggtgtacccttcaagcagaggattccagggcctctccaaaccgtacaagtctgagccaagggacagaaattccatcagtggcttggaagccaaatatttgccctgatactgaggaagggaaagag

SEQ ID NO: 677605 - DNA, 600 bp, Homo sapiens
agggtctcaggtctcactctgtcacctagactggagttccattaatacactatatttaacattaaaaaattattcctttatgcagtacaaaagcaaagatattatttttcctaagctacatcttgtttcaccagtgaaaagaaacataacacaaattttaaaactatttattttgagaccgagcctcactctgttgcccaggctggagtgcaagggcgtgatctcggctcactgcaacctcctcctccccggttcaagagattctcatgactcagcctgccgagtagctgggatcctcaggtgaaccgcccgcctcggcctcccaaagtgctggaattacaggcaygagccacctctcccggcctaaaacttatttttaaaatttctttagttcttgtgttcaatttcatttctgtcaaattttacactaattcacaaagccttttagtgtcttctgcttttaattttttaaaaatttgttttgttttaaaacattcttagtaaataaaatttgaaaaatatttgaaaaaaggaagaagaaaagtaagtcctactgtccaaattaatttctttctagtctcattttcttttctttctttt

SEQ ID NO: 677606 - DNA, 658 bp, Homo sapiens
ggaatgatattgggttttacaccaccattttttattatacctataaaaagaaccaaattactagaattaagcttggtgaccatttctttaagcttaaatacacccattaagtttttcagccaatatgttcataaagaaaaataatttaaactcactagctccaccaatacaccaatcaaagattttgttatgttgtacaactgaaatttctttacatagggtgatattttttggctgataagaaaaaataattatccatatgcacttcattcagaagaatttayataatgttaagaaattatgatccagactataatgaaacttagaaattatataaccacaaaaaaaattagtaacatcttaagctttctggaaaagattttaccatacctcaacaatggtatgaggttctataattaccctcatacctcaggaatcccatgagcattttaaatggcatttagctataggaaaaataattttcatgccaagaaaaaaaccaatgcaggtcaaagatcactaagtattatcaactgtcaaaacaaatgtatttatttggaattataaagaattaagatttattcattcgaagtaataactaaaatagatacaaaaaatccaatgtcctatgacctactttaaaaaaatatttctacac

SEQ ID NO: 677607 - DNA, 631 bp, Homo sapiens
ctgatcttaattatttatatgccacggtgtagaaagctgtaaatcctctctgccctacattatgttgtttacaagatttatatcagaggatggaataaagacccagaatgcctacctaccagatacatagatgacataatactgacataagtaacaaattcactggatggcaaaatcaacaggccagaaaaatgggcacagacacataaaaagtataaaatctaatagggattgaaataaatattcatatttsattcccatccaataaatgaactatacattttcaaggtagaggagattggttctggggaaatatcaggatttgtgaattgaccatgtgcttcctctatgccgacatcactactattatattaattgggtccaaaacatatcttctacttgttgctcttgttttcttatcctttggagttcatttattctaccatatctactcattcctacttctatctatagattggcacctatagactgaaatgagtgttttaagaatatgagtatttaatacttaatatgtatattagatgctatttcctctcctaaaatatcaactaaactaaaggatcaagaactaggaaaagtaagttctaacagtcagagaaacctgtatttg

SEQ ID NO: 677608 - DNA, 631 bp, Homo sapiens
ctgatcttaattatttatatgccacggtgtagaaagctgtaaatcctctctgccctacattatgttgtttacaagatttatatcagaggatggaataaagacccagaatgcctacctaccagatacatagatgacataatactgacataagtaacaaattcactggatggcaaaatcaacaggccagaaaaatgggcacagacacataaaaagtataaaatctaatagggattgaaataaatattcatatttcattcccatccaataaatgaactatacattttcaaggtagaggagattggttctggggaaatatcaggatttgtgaattgaccatgtgcttcctctatgccgacatcactactattatattaattgggtccaaaacatatcttctacttgttgctcttgttttcttatcctttggagttcatttattctaccatatctactcattcctacttctatctatagattggmacctatagactgaaatgagtgttttaagaatatgagtatttaatacttaatatgtatattagatgctatttcctctcctaaaatatcaactaaactaaaggatcaagaactaggaaaagtaagttctaacagtcagagaaacctgtatttg

SEQ ID NO: 677609 - DNA, 631 bp, Homo sapiens
ctgatcttaattatttatatgccacggtgtagaaagctgtaaatcctctctgccctacattatgttgtttacaagatttatatcagaggatggaataaagacccagaatgcctacctaccagatacatagatgacataatactgacataagtaacaaattcactggatggcaaaatcaacaggccagaaaaatgggcacagacacataaaaagtataaaatctaatagggattgaaataaatattcatatttcattcccatccaataaatgaactatacattttcaaggtagaggagattggttctggggaaatatcaggatttgtgaattgaccatgtgcttcctctatgccgacatcactactattatattaattgggtccaaaacatatcttctacttgttgctcttgttttcttatcctttggagttcatttattctaccatatctactcattcctacttctatctatagattggcacctatagactgaaatgagtgttttaagaatatgagtatttaatacttaatatgtatattagatgctatttcctctcctaaaatatcaactaaactaaaggatcaagaactrggaaaagtaagttctaacagtcagagaaacctgtatttg

SEQ ID NO: 677610 - DNA, 663 bp, Homo sapiens
gaaacagtaaataatcaatgtaaagagaaggtgaactaggatagtgtgaaataggggccctgaatataaacaaaatggttaaagaaccaaaggatagttagatgagaaaataaaacttggtgcagtgtagggctgggcataaagtttgtcttcagatacataaaggaatgtgatacagaagagtgagtctattgctgcaaagaacagaagtaggaaccaagggtaaaagttaccaagggactgcttcgggtttactataaataggaattatttattataaataagaatttagatggaaaacctcaagcatttgatgaaaaatggtcagatgtactatagagacatcctcacactgggtaaaaataaatgagctctaggtgacaacattcatttcatgtatatcrtatatgaatataaagatacaaaaataattcattataagcctgtaagtctattatttcatgatagatgacacagaagttcctgatacttgtaagaaagaaaaataattgatggcaattgtggaatctctgtgtcttagtctgttttgtgctcaccataacggaatacctaagactggatagcttataataaacacaaatttatttctcacagttctggaggatgggaagtccaagatcaagggatcagtatctggtgagg

SEQ ID NO: 677611 - DNA, 650 bp, Homo sapiens
caaaataatcacatctcaggtgatctgctaaaattttagttccaaagaaagagtaaattggaagtttcagcttggtagcaagctgctgtcgctgcactaaatgaaaagattttgagctggacagtggctctaaatttaagaatattctgacgatgttggcaagactggaaacgggatatgcttgaagcaggacattaagccagaggctgctttggccgtcaagattgacatatgggcctcaggagagctgaagaaaggatgacgtggaaactcctgggtggggagaattgagagggcttagggtccatctgaatgtaggaggcacaggaggggaaggagttcaagtgatagcataaggctttccagatggttttaggagcagctgaaaggaacaacttgacaaaaatgtcctacttttagaccaacaatgaaataggttctaacctccagcaaagccttcagaagccactagcttatccttctgaaaraaatctattctacctaggttcttgagaaaagagccctcatttaacattaactctgacttaaacttgggtaaaatatagttttatcataggaatttttccgtggaaaacataatctttttagtaactgctgtacccatcccactgtccccaccttttaactta

SEQ ID NO: 677612 - DNA, 617 bp, Homo sapiens
cctcaggcccagagcagccctttctcttgggttggggcaggggacattggacaaagacaggaacatctgccacctgaggcactcctactttgtgctttccaccctagccactgacaccatccagaggtagctatgggctgacccttcaccatgaggacaaccaaccacacttccaactccacccaagatgaacactttggcctttagactccttacctcaatcatcactaggacagcttacttcttgacctcctctgagtcacccaacctcatgggccaattctgtggatatcaaagagttattgtcaagtgtaaaatgattcctgggatgatctgggacttgactatccactgcctgaccagcatcttccagagcaggtctcctgtactgagaaagagaatcagccttcatcagtgacctgtgtgtctccaacaagaatccaacaagaccgtgctccctgccatgaccagagacctgagtgtattggtcagggtcctccagaaaaagaaccaacaggatgtgtgtgtgtgtgtgtgtgtgtgtgtgtgtgtgtgtgtgtgtgattataatacatatatttattattatttatrtagtatatgtacgtgtgtatgtg

SEQ ID NO: 677613 - DNA, 408 bp, Homo sapiens
taacttttatatgcaccgagaaaccaaaaaatttgtgtgactcacatattcactttattgtggtagtctggaaccaaacccacaatatctccagggtaggcctgtatgtgtctttttgactataaccatgttcgtgaatgtgaagtagtatctccttgtggttttcatttgacttccctaatgattaaggacrttgatcatgtgttcatgggcttattggccatttgtatatcgttgaagaaatgtgtattcagatcctatgcccgtttaacatttttttaaaattgagttgtaagagttctttagatattctagatacaaattccttaccagctacatgatttgcaaaatttttcttccatcccatgctatgcattgtcttttcacttcttttcttttcgtttcttt

SEQ ID NO: 677614 - DNA, 1507 bp, Homo sapiens
aaagggaagtgaaaccaaatataaccaggcatctaccatgtcccagacaccgtgcaagaggcctttacacatatgaccactagcctgaaagaaggaatcccagttacaagtgaggatgagaggccttgggaggtcacacagcaggaaggtggtagagttgggatttgaatccaggtcatctgaactccaagcccacgctcttcacagtacagaacacctacaatcggaagtgtcctgacaagccactgcaagggcagggtctccctgattcaacagctgacttcccactggtcacaaggtacaaagaaaaagctgagagccacacccacaaacataccacagaatgttgatatctaagactaccttaggttaccttctattttccaccagaaaatacatctatatatatatatatayacacacacaaatactgatattgatatatacacatagtttgtaaacacacaaacacacatatacatacacatacttgcacacacagagttgacacctcacctatctggaattcagctatccagcgccctcatctatccggaacacagccgagaaacaaggaagttagcaaaaaaggaatctgagcagccagattagacgtttaaaaagttcatgcaccaaagctcatgcaccaaagctcatgcacttaactcctaggagaaatcttaggcccccaactcagagctccttcattttgattttatttgtaatctgaacaagctgggttgaaggagcacattgacattgagttgctatactcaggcaggctggctacagcaagaaggacagacaacagcttaataacgagagaggaggaactaatataaaaagtagacacataaaccctggggccatttaatgtaggggcacaccagtcaaccctgagaacacacctgcatcacagcgttacagcatgaaaacctctcgagtaagcagtcctctagaccatcagtgtgtttatattttgttcatgagattgtgttaatgaaggacaggagattatgttttagagagagttccatcttgtataaataaaattaaaatgttgagttaagtgtgaaagctaatggtcaccagcaacctacagagtttaggtcagcaaatctgaggttggtccaatgtcttaacttttctaatccgaattcctttaggctagacaggcactctccagtcctccgcaggtcccaccactccctgctgggcagtattgggctgattcacatgcttatgttactgtcagggcttacagacatttaaatttgtgtttctcggtatgaatccttagctcgctaggaaattaggctttccagaatgatgcactcccttgtggcatccagggagtgagattataatattttaatttcattccactcattctccttcccctttctgatcatttcattccaactagatgaatggatttttccatttgcaggcatgaagcctggggctgcagatcctaattatattgagtatgaatcagaattttatt

SEQ ID NO: 677615 - DNA, 2146 bp, Homo sapiens
tggtaatctttaaaacaatttcattcattttcagggcaccagtccagagcaagaggttcatcaagggttcatttctgttttgttaggttttgttttgttttctctaggattcaagtctccccctgttctatgtgtggaacactttctcttggctgcctggcaactcttcaacaaggccccatacactctgacatcaaggagggtattatcccagagctttctcccaagatactcaaacctggtggtttgcaggcatgaggtggccaccaccaaactttagtcagtcaatagccagcaggctctgcatgggcatcagcccttggacacaaaagtgactaaaaggagctgctaaatgccccagtagggcttctgagaagaaagggcagcagagtaccaggaggagaagcctaaagaacaaaatgcatttgctgatcctgggggagcttgcagtttctatgcccttgatactgttaccaagctgagcaagagggagaggaagcagtgctcagcgagtaagtccttgaccaggccttctgtagcctgagatttgccacaagctgtttcagccccagctgttgcaagcaggatgagcaagccagaatattcacctggccatccactccagtagtgacaaggtgtgtcgaacagtgtctgcagcttgggtcatttcaggtacacgaggatagaagacacctcagagactagcccaaacttctcactttacatatgaagaaaactgaggtccacattcatagatttacagttcagtgcttactttactttstttgtttgaaataagttacatgtcaaaaaaaagtgggggtgatgtggagagtattaaaatagtactgagcttcagaggaagaatttctagtatcttactctctcctattcccaagccttcccctttcttcctaatagaagggaaaattcgtcacttccatggtcttctttttcttgctttcgaactggagaaagcccaccgtattttacctttcttctctccctttagaaaaagagtatggtaagtaaagtacaatattcttcactcaccaaagataaaacccaggcatctttctcctcctctctcctctccagaatctaccccagcagctaggctggagaagctgtctaggtgatctcccttaacattatcataagcaaagattctttcttggtttgggtctctctgtgattattacctttgttctagtccttccttcacatcataagataaggtccaagttttaggtttgaatcgtcccagacaaatgcagaatgtctagtctctcctgtctatcgcaattcaacatttaaattgagctaccttaaaaataagtttactaggttgggcatggtgccacatgcctgtaatcccagcattttgggagggtacactgggaagatcacttgaagccaggagtttgagatcagcctaggcaacaaatgagactccgtctcttaaaaaaaaaaaaacaataaaagtaaagaaaaaagaaaaaaagaaaattagccaggcatgctgacacatgcctacaagcccagctacttgggagctgaggagagaacattgcttgagcccaggagttcaaggctgcactgagctgtgatcttcccactgtattccagcccatgtaatagaacgagaccgtctcaaaaaaaataaaaaaataaaaacaaggaagtttactaaatgttctagtccagtttataaaatacttttcattttatatttgatacctaagtcactgcttaaaaaatattttttggccaggcacagtggttcactcctataatctgagcactttgggaggttgaggcaaatggatttcttgagccaaggtgttcaagaatcccatctctccaaataaaagtatctaattcaagtatctattggtgtgtgtgtgtgtgtgtgtgtgtgtgtgtgtgtgagaaggtgtgcagggaaaatgcacctatcttcatagattaatgttacttagcatccctgggaaaatagtaactctgactacagagaaaaaaatctccaatttaaaaaagttttttatataacttcgaaggtcaatggttaccttatttaatttcaggtgataaccagaacttcttgaaattttaaaggacggctaagtggttaaccagggaaaaa

SEQ ID NO: 677616 - DNA, 2146 bp, Homo sapiens
tggtaatctttaaaacaatttcattcattttcagggcaccagtccagagcaagaggttcatcaagggttcatttctgttttgttaggttttgttttgttttctctaggattcaagtctccccctgttctatgtgtggaacactttctcttggctgcctggcaactcttcaacaaggccccatacactctgacatcaaggagggtattatcccagagctttctcccaagatactcaaacctggtggtttgcaggcatgaggtggccaccaccaaactttagtcagtcaatagccagcaggctctgcatgggcatcagcccttggacacaaaagtgactaaaaggagctgctaaatgccccagtagggcttctgagaagaaagggcagcagagtaccaggaggagaagcctaaagaacaaaatgcatttgctgatcctgggggagcttgcagtttctatgcccttgatactgttaccaagctgagcaagagggagaggaagcagtgctcagcgagtaagtccttgaccaggccttctgtagcctgagatttgccacaagctgtttcagccccagctgttgcaagcaggatgagcaagccagaatattcacctggccatccactccagtagtgacaaggtgtgtcgaacagtgtctgcagcttgggtcatttcaggtacacgaggatagaagacacctcagagactagcccaaacttctcactttacatatgaagaaaactgaggtccacattcatagatttacagttcagtgcttactttactttgtttgtttgaaataagttacatgtcaaaaaaaagtgggggtgatgtggagagtattaaaatagtactgagcttcaraggaagaatttctagtatcttactctctcctattcccaagccttcccctttcttcctaatagaagggaaaattcgtcacttccatggtcttctttttcttgctttcgaactggagaaagcccaccgtattttacctttcttctctccctttagaaaaagagtatggtaagtaaagtacaatattcttcactcaccaaagataaaacccaggcatctttctcctcctctctcctctccagaatctaccccagcagctaggctggagaagctgtctaggtgatctcccttaacattatcataagcaaagattctttcttggtttgggtctctctgtgattattacctttgttctagtccttccttcacatcataagataaggtccaagttttaggtttgaatcgtcccagacaaatgcagaatgtctagtctctcctgtctatcgcaattcaacatttaaattgagctaccttaaaaataagtttactaggttgggcatggtgccacatgcctgtaatcccagcattttgggagggtacactgggaagatcacttgaagccaggagtttgagatcagcctaggcaacaaatgagactccgtctcttaaaaaaaaaaaaacaataaaagtaaagaaaaaagaaaaaaagaaaattagccaggcatgctgacacatgcctacaagcccagctacttgggagctgaggagagaacattgcttgagcccaggagttcaaggctgcactgagctgtgatcttcccactgtattccagcccatgtaatagaacgagaccgtctcaaaaaaaataaaaaaataaaaacaaggaagtttactaaatgttctagtccagtttataaaatacttttcattttatatttgatacctaagtcactgcttaaaaaatattttttggccaggcacagtggttcactcctataatctgagcactttgggaggttgaggcaaatggatttcttgagccaaggtgttcaagaatcccatctctccaaataaaagtatctaattcaagtatctattggtgtgtgtgtgtgtgtgtgtgtgtgtgtgtgtgtgagaaggtgtgcagggaaaatgcacctatcttcatagattaatgttacttagcatccctgggaaaatagtaactctgactacagagaaaaaaatctccaatttaaaaaagttttttatataacttcgaaggtcaatggttaccttatttaatttcaggtgataaccagaacttcttgaaattttaaaggacggctaagtggttaaccagggaaaaa

SEQ ID NO: 677617 - DNA, 1440 bp, Homo sapiens
tgcctcactttacaaggtaagcagtagattagtgaaaatgtgtgatctgtaatagtatctgcctttagtgaccttcatagcataaaacacatctactccttcactcatgccttccaaattccatgcacattgctcttgtggccaacgctaactcagagccacaaagcgaagggaattctgaaaatgtaatctcagcttagttaaattgatttgtatgaagccactgcagctccagagactctggctactgttagattcctttgaagagtggtttttgttctagaaggaaattgatgtgactgaactttaacttcatactctatctcctggtctgtgggctgccactaaaatctccacatagcttttctcaattgacctactggggtcttgctgacacctgtgttgctcagctgtccaatttgagcagattttatatacattccttctgtgttacccctttttcctggatttctccactaacttttgtctgccagcttttatcactgaactctgtcctgtgaaacctcaggccagtagctgccctgagccacatacattttcagaactgtcttaccaggtacaatcctgtcttgcagggatagtgctgtggattgaatgtttctactatttccgcaaaatatatatgttggagccccaaatcccaatgtgatgctatttgggggaaggggctttgggaagcaattatgtttagatgggctcatgaaagtggaacccttgtgaggtaatgagtgtctttataagaagaggcaacttttttatcagagctaactttcttctccaaagtgcacaaagaagagatcatgtgaacacacagcaagacggtggccatctacaagccaaaagaagaagcctcagaataaaatccaccttgaacttgggcttctcagcctccagcactgtgagaaataaaagtctatttttaagccactcagtctttgggattttrttatggtagctgaagcagactaagacaggtagtcttcactccagtttctaatacttgctattctccagtgcctgcaaaaatagtcctatgaatgttttgctacattatataattgttacctgcataagtcttagagtgatagagctattccactattattagaagtcagaggtttatttttcttgataagtgtattattaaccgaaaaaagttgtttcaaaaatatatgaaatatatgatattctttaaaattttctgaataaacacgtttatatatgcagagaaacaaacatctggaaagttctgcagcaaaacattaagagtgactttgttactgttctgagcctgtgagtattgtttttcttctgtttgcccatcatattttctgttttcttacattgatcatgaaatattgtgtaattatataagtgaaaactccatttcaaccccaaattttcttaagctgattagca

SEQ ID NO: 677618 - DNA, 612 bp, Homo sapiens
gcagctgtccatgtaggatgactggcaaggaatgatataaactgcatttcattctcttggttcaaattctataggcagcagaattatcattatttgaaaagtaaagtcatacccagaaagggttaaaactcttcttttcccaagttctagcctgccacccccactatttccccagtcctttaactaaattagctattccattgacaggccagcactggtccctcacagaacaacacatgctgtgctctctctgtgagtgcactcgtggtgaactttgagccacacatctgctgcagggaagaaactcttattcccaaatggctgacattagctgaggatgctgggttcatcgctaccatagcataytgttattagataagctgctggagaatcagaggagtaaatttagttattatgtctttacctcattatagtgcattcccaactattgttcatttcatcagcttgatattgttctatgtttctacaaagtgaatgcttggattaaaaccagtatctactctcctttacccctaagccattgctgtatctaggctaaggatgtattttcaccatgtcatttctccaagactctttctttgatttaaagca

SEQ ID NO: 677619 - DNA, 612 bp, Homo sapiens
  misc_feature 602: n = A,T,C or G
aaatggtcatgattcttttaaagaatctctctctctctctcatcatggataatactgtaaatagtattactgtctcctttacatggttctcttgcaactactattactagcatatatcaggcagtgctccaagtactctatatgtttaattcattcaaacctcagaatagtctttgaatttaggtaatattatctttgttttacaaactgggaaatatagagattaaataattggtttacagtcacatagagattaaaggtcagagacaggatttgaacccaatgattttggtaccccaggactttggcaggagagcccataytttttaaccacaatgctctaggtgccccaccagtctgctactgataggacatggtcttcagtctattcttaggtagaaatcaaagtatttgctatgtcttttaattattaaatccacatttggaggacggactctaagtataatccccagggtggaggtgaatcttccataaacagaaatggttgcttaaaaaaaacccctatgttttctttagaacagaacatccaagttacatgggaatgcaccacatgattgttgtgaattgaagtcaatttggcnccaacagaaa

SEQ ID NO: 677620 - DNA, 2404 bp, Homo sapiens
tggcaccttaggtttttttttcagtgtttaacaaaatagtgagtgtgaagaggaattgggagatgtttagtttattataaaaaatgttcaggttctatcactgagtttccttaggatgtaagaatattccatacagcatcaagcattaaaagaaaagtaatatggggcatattggtcattcagtattctgtccttgattgaacttgcataatgaaaatctattctaatgttgtgatcgctagaaacaaaactttactgttcctaaatttactctatacttttttcaaacttctaaagccacattcttctatgccttagttctagagtcagactctacctttgttcttatgattatgaagacttctttcatctcccttctcagtctttgccgttcttcaaagagacttttcatttcttttcctctttccctggaaaattccgtttaagacattcattttggaggtgcctctgcaggacccaccatttccacattgctagaaacttcactccagaggctgaaaatgctagaattcaattctcccttatggccatcatattaaaaaaaaaaaaagaacgaaagaaacttcagcaagctgggacaggaggatgtgtatagaagagttagaggcagacagtgacagcaacccaaatgtaggtaggagactgaggaaacaaattttttattttgtgtataatgggacatagtagttaataagaattcaccaatatacatgtactaccagcataaatctcaaaatttataatgaaataaaaaagagcaagttacaaaaggatatgaaccatttatgaaaattttgaaaacataaatgattgcatatatagtatatggataaataaatgtatggaaagactataaaaacatacacaaggccgggcacagtggctcacacctgtaatctcagtactttgggaggccaaggcgggtggatcacctgaggtcaggagttcaagaccagcctggccaacagrgtgaaatcccgtctctactaaaaatacaaaaattagttgggcatggtgatgcatgtctgtagtcccacatacttgggaagctgaggcaggagaatcacttgaactcgggaggtggcggttgcagtaagctgagattgtgctgctgcactccagcctgggtgacaaagcaagactccatctcagaaaatcaaacacacaaacaacaacaaaaaaatgcaaaaatgctatacacaactccaggatatctgaagacaggacagaggtgtgggtaaatgggttgcatttgactgtatttgtcaagcatataccccctacaccattttataataaaaatgttccaatatacacaaagaactgtatagacaacatctagcttctaccattaacattttacttataatatcacatatctatgtatccatccaacgtaagtttgacaaattttattaaaaagggaagcatgtaattgataaaagaaaaatttcagccgaattaaatttaaaggagtttaattgagcaataaacaattcccaaacagagcagcctcccagccagagtagactctttttctccagggcagccacgtagtggaagatgatttatggtagagaaaaaggaaaatgacttacagaaaatggaagtgaggttcagaaatagctggattggttacagctcggcgtttgccttatttgaacacagttggaacagttggccgcatttgattggccaaaactcggtgattggcacaagagtaggctacagtctgtttacacctccacttgtatagttcaggatttacagagaaacctttaggccaaatttaaatacgtaaggaggtagctttaggctaaacttgatttaacataatagatcaaaaggttaacacttatttaatctccatgggggatgcataagtatatttcatattaattattatgctagcctttgtttctgaaatgttgaataaaagccaaataaatgctattaagataatacacacaaaaatgaatggagggagttagtttaactaccatacttctctggcagtgtacataatgtatgaagttctgtatgtgtttgtatgtagtgaagtttgaaggacttttggggaaagaaaatgtagtagacaggatcttatccactgagaaaaatgtcgcctccaaatgcaagtattggcatatcatttctggttttgttttgttttgttttgttttgttttgtttttaagagggagtctggctctgtcactcaggctggagtgcagtggcgcgatcttggctcactgcaagctccacctaccgggttcgcgccattctcctgcctcagcctcctgagtagctgggactacaggcgcctgccaccacgcccggctaattttttgtatttttagtagagatgggatttcaccgtgtta

SEQ ID NO: 677621 - DNA, 1938 bp, Homo sapiens
caaggcagtaatagattttatgacctagccttgggaagcacacactgtcaccttcacagtattttattggtcacatgggtcagccccattcaatgggggagggcactctataagggcacaaatgccaggaggcctcagaaacataaatatttttgctatgggtatagattcatgggttttaggctggaagaaaccacaaaaataccctggttgacagtaagaatcagtcccattgatgataaaagatggaatttaaaagcttaatagggacaattttcttctgcaaagaggtagatggggtggcatgaatttcttgtgttagagacagttttaacagatgaaccctcaggtgccaagtcagttaaccagagctgggttgacaatcagggatttaggagggaaaaacccaaggcaaggaaagtccttgtgaatgtgaccaggtggagaaacaggtagatgacgatttgccaactccatgttcaggggctgagctgaggccagagtcggcagctggtatttcttctccaatgggctacttagggtggctttttgggctcagtggcactccagaacaagtctagcatattggctggtggtagcaggaccttactgacattccatatggaatggagctggaagcagtcctgtgaggtctgggtgacactcgcacatcctgtaaggatggagaagcaatggactagggagctgagacccccaagaccatcattcttgcccaggcttcagagacaactgaacttcttcttggtcattcacaccagactggagatggctgagtggttgttccgtaagagcaaggagagagaagccggctccgggaattaagggcgtgtggcatcgggtagaatgcaagccaagcattcagaaatggtccagtccagtgaaatggaggcttgtattgagtctggggcccaaggctgagagaaggctggctccgtcgaaccagaaacagcactgagaacctggctggtggcaccggcttcagctgcacagagagggggtcagcaggccacacagggtcatcctgaccagcagtcttttttgtggggtgtcgtgaagaaaagcaatgctcaagggtagataacgaattttctaagactgagcagccagcttagtggcagagtgaaaatgagaatagaagtggaagtacactggaatgaagatggctgcttagttttatctgcctcacccactagctagaacgtggctttagccataataccaatatgtatttttggaacattcctttgctcttttcctttgactttggatagcagatgtggtytattgcattgctgtgattttcagatgaaatcaagcacagtggtttacttttaaccaaaccccagtcatacttcctctctctgactcagcttccttgtcgtacgtaagattgatgacacacgccaccagctcacatttacaaaggcgttctaggtcttttgatgaacacctatatggcatttatattaatataattttctctgtgagaggagagatttaaatgagagttgtcttagtagctgaggaaacagatacatgattaggggaatagctaatttcttgcctgatgtaatgtatggaaactgagaaaagcctggaaaaggaggttggaaaactgaaagtgggtgggcaccacttttcacacccaaccctctttccatgcccaaaacaccgtggggcatcccctcctcacagggcctgtgtgctgggctgcactgacatgcattccggctcagagttggcttcacccttaacagcgggtactgggactctgtggacacatggacaactttacttaactctaaatcggggtgtccagtgttttggcttccctgggccacattggaagaagaaaaattgtcttggaccacacataaaatacattaacactaatgatagctgatgagctaaaaaaaa

SEQ ID NO: 677622 - DNA, 1051 bp, Homo sapiens
tggactagaaagtgctctcaggccacacctgaccataaagtcaccaagttcttggtcaaacacaatgcatactcgtgaggagtgagcctcgtggctctctccgtaccatgcgttcttctcattgaaccccgctccaggaccggcggcagcctcctttaatttatcaggagctggtatgcctttctctgctcactggagtctattttcacttcccttgctactttcttttgcacctcttggttactcctatagcyaacttccagccatccagtccctgctaaagaaacaagcacagaagcaaaaaacaatgaaacaccatgtttcagtcacggtagtggcagcattttgtcttaaaggaaggtaatatctccacattattgtgggaaaattggggcttaagaagattaagtaacttgccttccatgtggctgagttgagatttgaattcggatctgttgtcagaaatggcagtgtcaaacaacagataggcgcttggcttttgaagtcaacacacgtgggtgcgaacttgagctctggtgcttaactgtggaactgagcgaattgttaaacttctctaaagctcactttccccatctgtaaaatggagataatgacaatagtgtctccattgggttttgtgatcataaaaggattgtagagtacttggtttagtgactggcatgctagctttcatcatcatcattattatctactagatttcctatgtttcattccgtgacacaacttgaacaagaacactcttgtcttttgctattaggtttttaaacaaatgccctagttattccacattcagctgcaactaacaaaaacccagtgaagaattgcttaaaccatcaggatttttatcgtttactcaacaaacagtttgaaagtagatggtccaaaggtagatttggtaactgaatgatgccatcaaggaatcaggctctcatgtattatccctcatgatcatcagatggctgccacagctccagacagcacatcctcatatgacagaatggaagagaggagacaaaaagaacgttctcct

SEQ ID NO: 677623 - DNA, 650 bp, Homo sapiens
catatgtatggatttccatactcatttattcatcagctattttgggggaacccactatgtgccaggtactgttataagtaatggtgatgcaacagcgaacaaaacagatgaaaaatattctctgcctttgtggagctcactttttaggtagctgatagaatttgctataaaaaatatatatatatatagtgtatatcatatatattatatatatcatatataatatatatatcacatttgcatgcacacatatatgttatgtatatatttatattatttttatatgtatrtattttgtgtatatgtatttaaaaataaagctgtactcttcctttgccaaaaccaagtcaagagctgcaggccaacatcatagatatctgtcgttcttggctgctcagcattctttcctcttcctctgactttcctttggggaaccatctttcccacctctggggatgaggaggctcaatgatagtacctcacacccttgctctttgtgattggacaataattatgtgctttgttaagccagaaggagaccccaggactctttctggaataatttaggaaaaggaatttttcacactgggtttactaagctgatagaaggtaaactatactctctagtgaccatctcagacatagttcaa

SEQ ID NO: 677624 - DNA, 656 bp, Homo sapiens
tgaacccagggaccaaattctctttctttatcacagaccaactcattcatttagcagaaaaaatttctaagggaatgtttctggagactttcggacagatttctaaataaaatgcccaaatcctctggagtactatgtatctactaaggagaagcctcattttattcttcatctcatcaacagacaccayatggacagtctgcagcattttatcatctatctcctaattactccatgaagcaggcattatgttcctcatttactggtgaggaccccaggcgacaagaagctccataatttgcccaaagtcaaatggttgaagaatgctggaaccaggattcaaacccacatctgcttaaacccagagccccagctcttgactgcctctgtcatttgctttgatggcaatgtaactgtcaagcgattttgctccctctatgcatgatgagaagtgtccataatgaaaggattctagtgtacacaagtgactcctctgcataacagggcacacaattgttcacacaactgagtgtttgttcttaagaatttcttcttcaaattgaaagaccaccaccggcaacaaccaccaaaatacattatgaaagatttaatcaagacttaggaagtaggtgtttagagtccattgctattctttt

SEQ ID NO: 677625 - DNA, 1642 bp, Homo sapiens
ttgcagatatgcaaaatactagaacacgcttgaatattcatcggatgagccattagcatgggacagctggagaaacagaagatgaataatggaagaatcaaaatccaggaaatatgaagacagattggactttgctgatagcaggatccctgcagtaagtgctgatgctgagaggattttcaaattagtattgagaatgattaagagtcaaactctttggtcaggctgagtctgaatctgaatttcctgctttgcctcttagtagctgtgtaagcctgggaaagttacttacacctttctgtgtgtcaatttcctcattttattaaatagcaataaaaaatataacttgattaggtgagttgttaagaagaccaataaaatgtactttaaagagtttctagcaaaataagtgtttaatattggtggacaattattacaatcctttgttttccacaataaatggtaaggatataagttgaaagaaaaggtaaatgtctttaggagaattaagaaagcaagaagagtggctgaaggaaataataaagaataataataaggaaatatagtttgattgttggacagttccaagggtccaataaaggttgkcaattgagaatctatattttaacaaactgtcttggcattacattatcatacttatgcacagaaaaagatggttacaggtatccaggacatacttatatttagcattccctttgtaccagatcctgttgttaagtgcttcacaaatattacctcatttaacccttaaaaattgctatttgtaaaacaagtacttccaggttcaccttcctaacaaataaaacatatattgagtatctcccaaaaaaagtaggtaattaagcagagaatgtcatgaatagaccactgctatattttaatgtttgaatggataatgacccttataatataatgacccatttatccattcaaacactaaaatatagtcgcaacaattctttcaaagtttaaggagacttttttgtttgaaacccttccatgactcctcctagtattcaaaattccataccataataagccttacaaaccctacatgatctggcatcctgctaagtctctgacctcacccccctgccttcactcactgcattccagccatactagtgttgctacaccttgagtattgcaaagatatatgccatcctcagggactgaaaacacaatttctgttaatattctggcaacaagtttaatgcagttaaagcataagtgaactaaatggaaattaataaaaagaaatagagagcttattagaataattatgtctttaaggtaaattattctccattgtatttaaagtgtttattattttattgcactgcaaaatatataaactctgcagattaaagaatatctaactggaaattgcattaattctgcttctccagtcttgtagctggtgcacaaaaatatgcatcattgcatcactaaggagattcaataatttccaaaattatttgacctcagaacacatctcatagaataatatttctcagaaacatttttggaaatgcactaggagacgaagttcttctgccatctttgttccttactttgatttaaattataacactacataagccaaagacatagttctcat

SEQ ID NO: 677626 - DNA, 674 bp, Homo sapiens
ttgttagttaatgcagtttcttcctagtctcgatggtctttacattttggcatgattttgcagcggctggtattggttgttcctttccatgtttagcrcttccttcaggagctctttcagggcaggcctggtggtaacaaaatctctcagcatttgcttgtctgtaaagtacaatttttatttttaaatgtttccttgatgtgtctcttttactgagttctaatatgatgaatcgaccatatacagatgaatcatagcattcaatgaagagcagttaagtgagttaattaacaggtgtttataaagctagtggtgttatgctttcactaatctttccttgtggcaaatattgtggcacattataggagcaataatggcactatgcaaaactaaaaataagcagttcccaagtctccaagcacaagacacagatgtctataaatttaactgaacaacttttccagtttatgtcagcaataaagggatatctaaatggagaccagaatgagacagaatcgtttgtccttctcagctgattctctctggggctcactcttctccccagttggttaatccattgttttcttcacacaggttagacacagaggagaacctttggagatgagaaatttgaactttatatttttcttctttatttctacaggctacactga

SEQ ID NO: 677627 - DNA, 1402 bp, Homo sapiens
cataaaactgacataagtatcacaatttttatttttatttagtacttatatttattccttcattttagtaaataaaattgcctatatagtttgcataaatttatycacatcttcaatcttgctgacactttttttcctgttggcctcatattccttttctgcaaattttctcacagcaaaatctggaaatatagcccttaaagttaggtggtgccactttatcacacaaatgtacattaaatagttcaaaactatgttcctttaatctaatatacaaattgtatactgattgtaagagattctgagttaatttaaacattgcgattaatagtgtataaccactgatgagtaagactctttgttgaagtaaacaagtttgatttcagagattattgaattttacgaacatttgttcatgaatcaatatttggccattatgtaagttgtatttttttagaagattaattgagctgattaagccatcttgtttaaactgaatttggaggttaattctgaatctcttgtgtttcaaaatcacaacaatgttatccattattttgttataatccagactatattttaacacatctttcaacttaattgctaatttaatttgaattttaaatattaactttcccatcaaaaaaactttatctgcctttccaagatttaatcactagatgcataacatttttccccaagggttgatacaagctgtcttacaaattagcctacccttgtcccatgtggataatagtgtatttattagaaactatggtcagatcttgtatgctgcccaacaatactgctttaaatagatatataagctatctctttgctcaaaatgaagatgtgttccaataagattcctttgatgaatgctaacagaacatttaagaaatgagtgattgtatattagccaagtgctcaccatcacggaggatggaatgcaattacctgggaacctggaatgatagaaggtttgattttctaataagctagaaggctagtaaagcataaaatttctagcatggttggaaagcttaaagagagcttacacaaatcaaattaataacatttaaatacaaatacattaatgtgcaaggaattgactgcacactttgcaaatatttaacttcatttattctaaatatacagatagatttgactttttagcagttttcattgagtagtttatgaattctaagattatttccaactatgggattatttccaggcacttctttattcctaattggttttaaatacattacaaaaaatatttcataaaatcaactagatatagtaggcatctatcttccaataatagctagatttgactcagacttgatagtttacaaagtattttacaatataccattaaatttgtatttgagtgaac

SEQ ID NO: 677628 - DNA, 1214 bp, Homo sapiens
tgacctaccaaaaggtgacagtcaatgtctaacaatcagaaaaaatgccagaggtcacagagctggagttagatctagatcctcaggccaagcattaactctttggttggtggtttatgaggacttctaggaagtcttaagggagaatccagtgtggctcaggcaccagtggtgggtattttggggagcctgggagtatctatttttggcagttgtggctgtgtcctaattcagtattgtaacaagtataatatggccattctggtacattcagactaagtatcagtcagtcctgtttctactcaagggtctcactacctgttctgtgactcttcatctcagtcttgtttgccccctttggtacaactaccctttattttcgttattatttttgttgcttatttgtttttctgtatatatgtctgtcttccctactaaaatgtaggatccatgaaaacagggcagtatctatttgttcactaaagtgaaccaattgttcacctagaaaaaatgctgatacacaatggatatttaatacatatttgctaaataaatgaatgaaaatgacttcctctgattagttaggctacattttattttctataagaatatgcaactccaaaatttatagctgttttcaaacttttaaaagtcctaggtagatctttttgtagactgtcttatatttcttcccaagaacccctaacatgaagccatcacagtagcctttccaagaagtttatgtttctaagtcagatctctttctccacctcatgctcctctttagcttaaaatttttcctggttcctttttttccacttacagggagaatgttcagatctcttactatgccactcaaggtctgacacgatctgggtctaaattcctttctagttgcatttctgtcacaccttcctttatttccttagtatatcctgagacctgctactccaaaagaatgcctctgcaactttatccgctttgtggggcaaaatcctattcatttttctgggcccaacacaagtgtgactccttgtgagaaactttttgatatttattgaccaccttcttgtcacgctgtccactctggtcctgatcccttccactctgaggtcctgttgtgctrcattcataaacccagcagaatccatgttgcattttgcaatatagtaacttgcatcatcatatactgcattgtaatataatataatttc

SEQ ID NO: 677629 - DNA, 664 bp, Homo sapiens
tactttcaaaaacaataatattgaggccaagggcaccaaggaactggttgagaaacgagtcattcatcactgcaaatgggcaactgaagatagagaggagtggcaagctgagaaagaaggagctgaggcctggctgaagtgtgaagcaagtctctgaggtatattcttctgctccagtgaaattcagagaagagattctggcaaccagaaagccataggaactttcatgagcttgatttctcttaaggaatgaatgtgtgaagtgaaaaatcaagcattaaattcattaaattccagtgctgtgacttatttgcctgggattccgagcacttagtgcagtgcctagctcagtatgggttctcgataaatgttattttcttacccctttctcttattccattstcttatttgtctccattttttatcacccagtgcagatattggtgtgtattagtcacttagtgaatctttatggaatagtttcaaacctttggtttcaataccatgggtggtttgaagaagtaaatgtatagaaatgtatttgagaagaaatttagttacataccaataaccacagtagcccatgtgttgaatgttctgtaccgagcactttgcacacttaattaatttaattttcatgatagacctgcaaggcataactctt

SEQ ID NO: 677630 - DNA, 664 bp, Homo sapiens
tactttcaaaaacaataatattgaggccaagggcaccaaggaactggttgagaaacgagtcattcatcactgcaaatgggcaactgaagatagagaggagtggcaagctgagaaagaaggagctgaggcctggctgaagtgtgaagcaagtctctgaggtatattcttctgctccagtgaaattcagagaagagattctggcaaccagaaagccataggaactttcatgagcttgatttctcttaaggaatgaatgtgtgaagtgaaaaatcaagcattaaattcattaaattccagtgctgtgacttatttgcctgggattccgagcacttagtgcagtgcctagctcagtatgggttctcgataaatgttattttcttacccctttctcttattccattgtcttatttgtctccattttttatcacccagtgcasatattggtgtgtattagtcacttagtgaatctttatggaatagtttcaaacctttggtttcaataccatgggtggtttgaagaagtaaatgtatagaaatgtatttgagaagaaatttagttacataccaataaccacagtagcccatgtgttgaatgttctgtaccgagcactttgcacacttaattaatttaattttcatgatagacctgcaaggcataactctt

SEQ ID NO: 677631 - DNA, 1929 bp, Homo sapiens
gatagatagcaaaggaaaaggagtagctttgagggaaaaaaygaggagcctgggaaaacagcaactctaggtgtgagatgaagactgacagtgcttcagagtgtattaagaacatagggcacaaaaacatattaaaaacgtgaaataaaaagcacacatcttaggccgggcatggtggctcatgcccataatctcacactttgggaggccaaggcaggctgattacttgagattaggagctcgagaccagcctggccaacatggtgaaaccccatctctactaaaaatacaaaaattagccaggcatggtggtacacacctgtaatcccagctactcaggaggctgaggcacaagaatcacttgaacctgggaggcagaggttgcagtgacccaaaatcacgccaccgcaccccagcctgggtgacaaagcaagactcagtctcaaaaaaaaaacataataagatggggaggactaaagacaacgaggatcttaaaagtagtcagaggaaaacataccaggaataatcagttgcatttttaaataccagcaaaaagttacattaagtagatttttaaaaagatacttagaataacaaacacatgatcaatctattatatacatggcatgataaatttagactgttcaaaatatataacactttagtcagaggtattaaaagaaaaactgaataaagttatgatagatgatcatggatgggaagacagtaacataaagattttggttttcaaatatgatcatatatgcaatacaatttctgtcaaaataatgacagatttttatggaaattccaaaaatatcttaaattttatatgaaagataagagggccaaacatagccaagacaattttgaaggagaacaaggcaaaaattagcacagagagggcatgttttaagtttataataaatttgataggtgataatagagcaaagatagtggttgtataagagaagagaatacaggctaaggaacagaatcacaatcataaggaaattttatatatgaccaaagtggcattgaaaataatttggggctgggtgcggtggctcacacctgtaatctcagctctttgggaggctgaggcaggtggatcacttgaggtcaagagttcaagacaagcctggccaatatggtgaaaccctgtctctactaaaaatatacaaaaattagctgggtgtggtggcacgtgcctgtagtcccagctacttgggaggctgaggcaggagaatagcttgaacctgggaggcggaggttgcagtgagccaagattgcgccactgcacatccagcttgggtgacaaagcgagactctgtctcaaaaacagaaaaaaaagaaaataatttggcaaaagaatggatatggcagggcggctaaacactgggtttttcaagttgttttgattattctaggttacctgctttcctatataaattttagaatcatcttgtcaatcttgtcaatacatacaaaaaatccttctaaaagatttactgagattgttttgaatctgtagatcaatttggggagaattgatatcttaaaaatattgagtctttgaccatgaacatgtgtctctccatttatttaggtcttctttagttccttttatcactattttgtagtttcaacgtatatctcctgcatatacttaattggctttacatcttaatattttatatgttattggtaccttataaattgtacttaaacatttttaaattcagttttttggctaatgaatacaaatgcaattgatttttgtgaccttatgtcttgtgatcttcctaaactcagttattagttttggtagtttgttgttgaatctatagaattttctgcataaaaataaaacatgtaatcttcaaattaaagaattttacttcttccatttaaataagatcactttct

SEQ ID NO: 677632 - DNA, 1203 bp, Homo sapiens
agctgggacagtcacacagctgcaaggaagaggcaggttcgtgggcccaggatgaaaatctttcagagggaagggttagccttggtgcagtggttaacagctccaaagctatcacagctgacagcttacttcacgacccccgatctagacttctgcctctcctcagcaggaatgggagaatgggagagattatgctgcaccagctgcctgtctcctgggggtcaaatttgaagacatatatctccttcagaattacaaaccaaaaaggaaacatttattataacaagaagacccccattccctttgataaagttgtcrtatattttattgaaaattatcaaaattatagtttaatgcatttcaaggtgctagtagcaatatcacaagattcttggcatgaatgaacacatgagcgcagtcatctcatagctctatcaagataagctgtggtgtcagtcatgacacaggagcaaagagcttgctcaaataatgatcagagttcctgccacttcccagctctctatttgtctacaaagcttctttttttcattaaatttttaacattttgtacaaaacagttattccaggcacttttctttcaaaatgatttcattacccatttccttcttttaaaatatgccaaattgggggccaggcgtggtggctcatgcctgtaatctcagcactttgggaggccgagacaggccaatcacttgagctcaggggttcgagaccagcctgggcaacatggcgaagctccatcttcactaaaaatacaaaaaattagcctagcatggtgatttgtgcctgttgtcccagctactcgggaggctgaggtgagagaatcaatcacctgattgattatatattgattatatatatataatatatatataccaaattgagaaactacagctctctcattccttaaggtgtaatgctgagtgttttattagaaaatttgattacgttaggggaaaaataatcccactagacaaggctctgaccaaactgcattcaaggtgctaccttcagctccagatgctgggtcttcagtgggggctacatcaggtgcacccttggtagagagctgccctcaagcacaggaacctggagccaggatgtctcaatgtggtcaaaaagaccaaggctattaaggctagagaataaaagacttcaatatttgcttttcgttattcaaga

SEQ ID NO: 677633 - DNA, 1363 bp, Homo sapiens
caaaaattggccaactttactttaaatagcacttgtcttcctctctgagggggaaatgtgggggtttttttgtacatacacacagcaatagctatagtaaattgttcaacatgccctgttgtgtgtgtaagcaaaagtgtagagatttgaaacctattgctgaaagaattttagccaaaatttcagaaaattttggacttctaagtaatttgtgaatgatggaataggtaggggacagcaagtctaaaggggggtacatttaagtctccacttccttcttactcagaagcaagtgatgaccttaaccacagtgtccaagggaatcgcctctctgtggtgtggtcagtatctctgtagtgtaggcaggttggttactactgtgatgtccacttattgactcaggtgctggtctttttctctacatttcatccccaaagtgtggttccagatcagcagtgtcagcatggcctgggagcttgttagaaatgcagaacctcaggccccacctcagacctactgaattggaatgtgtattttattaggatccttctctaattcagtgcacattaaagtttgataatcactgtgttaaccgcattcaaacttcacaacatccctacggggttctcagctcttaacctcaggtttgaagtacacaagaaatgcctgataaaatctcttgcagtgtacacattcatgtgtgtaaagcatgatagttaaaagaggtgccccagattgtattcactggcattctctccccatcacatatgtgtaacgcacacacttcgagaagtaaatcaataaaaaacattttccccattaaaacttcttcccttcttttctgatccttccccaacatgcacacaagcacacgcgtgtgagcgcatgcacacacgcacacacaacttattgccaacttttaaatgacaattattaagccagtgggcagagaaagggacatctgtcaaagggatccatgatttgtcttggaaaaataaagaaaagttaaattactgtacacgagttattctgagtaaagaagccaagttagccctcactcttttattgttacttcttttttcttttaaatgttacctgaccaaaaggatgaaattgccaagctactgcttactacactgatcaaagtaagcagtgaccaggaaaggagcagcagccaccaaatacttcttccttaagcccaatggtacttggcttctaaactctatttagatagaaaaggtaatacagtatatatagaatgtaaagagcctaacccattagcagcaaatgttattccttccctgtctcaaaatctctcttcctgtctttaattcttaaagcactttatttatttattyattca

SEQ ID NO: 677634 - DNA, 625 bp, Homo sapiens
gattattgctattataaacagtcatcaatctagctttaccactgagtctagaaaaatttgcagccaaaaaagatttttatgccctcagtttgatactctggattctagttaataygatgatctaaaatcataaaatgccagatttcctgctttgctgagagtaaaactcataaaaatttacttttcttctccatatttgtagtataaatatataagataattagtcatgagaatcaataagaaaatataatacaaatatgcaaatttattcttattttgcatgtatattcatgcttaatttgttaaagtatgcattttaaaatcacaggacaccattaaaaaaacggtcaatgatagtagtttagcatctctggcaaaattttcagtcaaaaatggcaaacagaaaatataaaatagattcatataagataaaactaaattttggaaagttaagtccaaaattatttaacaacaaaatacatacatatgagatctatattaatcttaaattgtggatattgttttaaagtaaatttcttgtttgcctgtgaataaattagaaaaacatgagagtatttttaaactgtattttaaccaaaaacatactatgagactaacatttaat

SEQ ID NO: 677635 - DNA, 603 bp, Homo sapiens
tcacacattcactggctggggtctcagccctcctcacaaggacatttggggacactttatcagcagcaagtgaggccattggggtagccagcctttttcagtctttagtcctgctccactggtggggagaagtaggcagcctttgtcattgagacatccaggaagctgggacctagatgtgtgtgttgggagggagggaccaggccagctggacttgactggcaggggctagggcctctacccctacaacaacctctacaagcacttcagggccctgctgtcagaccaaggctttgatctcatgaacaagtaagtcccagtgcagcccgtgggtgggggatggagatcatgtctctgcagccacagaagccctgagccctagtgctggcttcccagtcccaggcctgcctgctggctcaccgccttccagaacctagtacagggccagaaaaacagagatgcttccttagagtttgtcagttacctgatggatcaataatgagggcgggaccactggstcatcccttctctcctaggccacggatggatgactattctttttggtgagagtaatgtgaatgtgagcagaaatacagattctca

SEQ ID NO: 677636 - DNA, 635 bp, Homo sapiens
ttgctattgttaattattttgatgccaattgtcctagatttctggtcatccctttgcctcaaaaacaagtttacatgaaccatatagtctccaagttgggttttcaaagaggtaatgggtccaaattgaaaaggtagaatttaggttactggaaggtagaaataactagtaggaaaatcactttgggcaattttcaataacaaaaacaccctatatactgaaatgtgttaaaataacaagaaaaatagcacagccactcagcagtgaatttcagtgtaaggaatgaggataggcgtatccttattagaaaaaagaaggaaaaatgctgcttgagctgctgagttgtttcagccctggagctgagggcrgggcaatgcatgaaggtagtgggagaaatgatggctaatcataaaatcaaaatgtcagcctaagataccattttaaaatatttcattccaggctgggcgcggtggctcaagcctgtaatcccagcactttgggaggctgaagcaggagggttgcttgagtccaggagtttgagaccacccggcaacatagcaaaacttcgtctctacaaaaattttttgaaaattagatggatgtaatggtatgtgcctgtagtcctagctactcgg

SEQ ID NO: 677637 - DNA, 596 bp, Homo sapiens
agggtgcgccctcagacatacttagaggtgaccagcccagctcaacgttggctcatactggctctgcctccttccctgctccactccccatgcccctcaccctggctcctgggcatggatttcctagtatattattggcccaagcctttggctcaggatctactttctggaaaagccaggctgaggtaattcctaatgtttgattttgggtacaggttctacatccagtttttctttttcactcccatatgtacacaacttaaccaccactcyattccttcttgaaaggaagcaactgttctagaaataatgaaataatcaacctatggcagggtaattttctgggatgttaatttgtgtgtgtgtgtttttcacaccatcaacccaaatctgcacacaaaattttctaccaaaagtagaaggtacttttctctcacttattttcaaaagtcaaaatgttttgaagagtttctaagcactcttagggcagttggaaaagaaaggaagtctttgagaatacttggcagaggagagggcaaactttgctgagatactaaagagagagggcagaggtcaggctaagagacaactgtggg

SEQ ID NO: 677638 - DNA, 596 bp, Homo sapiens
agggtgcgccctcagacatacttagaggtgaccagcccagctcaacgttggctcatactggctctgcctccttccctgctccactccccatgcccctcaccctggctcctgggcatggatttcctagtatattattggcccaagcctttggctcaggatctactttctggaaaagccaggctgaggtaattcctaatgtttgattttgggtacaggttctacatccagtttttctttttcactcccatatgtacacaacttaaccaccactccattccttcttgaaaggaagcaactgttctagaaataatgaaataatcaacctatggcagggtaattttckgggatgttaatttgtgtgtgtgtgtttttcacaccatcaacccaaatctgcacacaaaattttctaccaaaagtagaaggtacttttctctcacttattttcaaaagtcaaaatgttttgaagagtttctaagcactcttagggcagttggaaaagaaaggaagtctttgagaatacttggcagaggagagggcaaactttgctgagatactaaagagagagggcagaggtcaggctaagagacaactgtggg

SEQ ID NO: 677639 - DNA, 596 bp, Homo sapiens
agggtgcgccctcagacatacttagaggtgaccagcccagctcaacgttggctcatactggctctgcctccttccctgctccactccccatgcccctcaccctggctcctgggcatggatttcctagtatattattggcccaagcctttggctcaggatctactttctggaaaagccaggctgaggtaattcctaatgtttgattttgggtacaggttctacatccagtttttctttttcactcccatatgtacacaacttaaccaccactccattccttcttgaaaggaagcaactgttctagaaataatgaaataatcaacctatggcagggtaattttctgggatgttaatttgtgtgtgtgtgtttttcacaccatcaacccaaatctgcacacaaaattttctaccaaaagtagaaggtacttttctctcacttattttcaaaagtcaaaatgttttgaagagtttctaagcactcttagggcagttggaaaagaaaggaagtctttgagaatacttggcagaggagagggcaaactttgctgagatactaaagagagagggcagaggtcaggctaasagacaactgtggg

SEQ ID NO: 677640 - DNA, 1394 bp, Homo sapiens
tttcctatgatagcctggtcctaacaacctaaacaataatattcataacatttcaggttttcattaaaggaaaatgaaaagggaaaagtataattattaggaaatatataattattagaaaagaagtactcattacttatacaccacctaaaagtcatctcaagtaccatgattagcacatgtaccaatttgggggaaaaatggcctagattatcgtgaagagttattccaaagctataagcctatgaaagaaattcaagtaggtatgaaagaaacagaagagcagctgatgattcttgataaaatttggatttatggcatggcagagatgctataatttttttagattaatagtgttttcccttgtagatagatgcattaatgcctgacactgttaagccagaaaaagactggcaaaagcagcatgtaatggatattgatgggggaatgttgggagaaaatgtcctttaaaaaaattaacttaaacgacagatactcaaggcaggagaggaactcattccacaaagccaggatttgtgttgattgtcacccagaatgttatagaaaataaggatatatttagaaagaaagtgtttaagtcaaaatatttcattacttctatttagtggatgggtagatagtcctctatttgtttgttcatttaactagttatggttttgaaccattgacaatgttccaggccctgttctaggtactggtgatacatttatgaataaaatcctcattcttaaagccctcactctgtccgttttaggcggtgatatcaaggatgacctcaggagaccaccctgctatagtggggagacctctggacctgcagataaaagatctgtgttcaagaatcacctgtgtattcacagtcatgagatctataccaagtcattttacttttccaaatcttcattttctcaccttaaagtggggctaacgatatttcacagatatggttaaattgacaagatgtacatgaaatggtctggcatgacacaaatagcaaatgctactagactgttagttaaatttaaatctgagaatcatagcattagagaagaattcatacataatcttgcctctcccttctcagaaagagaagagctagaagccacaagaaatttaaactgagggacacactatggagatttgggttattgccctcttgttccaaagggagatttttattgtttgaccatacaatttaatttcaaataaggtgattytacactcagatggagctagaatccagtgtaacagtatatagctatctaaagatattcccaagtcaatctataaatggtttagcaataattactcatgttggctaaccattcccactactctagctttagggtgagaaaattctacattatctttta

SEQ ID NO: 677641 - DNA, 1219 bp, Homo sapiens
ccggccctgagtgtccaagcaaagctcctgtttggcaaatggtggggggccctcactccttcccttagggatggactaaaggactgagaaggaggggcagttgtttcagcaacttattatgacaaaaagtaaacacgctcaggtcctcttcctgrcatacgtggatagcagcacccactcacctactccaaggccaccctaatatcaccgagtccagagagcaaggtactgcaccccctgcacagatggctgcagcccccaccctggaaccctctcctcccaccacctccaaccctctaggggaaacactgctcatttgtgactccttgtccccctcagcgctgatcttcatgtcagtgttggcagaagatgtgaatgtggtgctgagatatgcagtgatgtggatgacgacagagtgctgccttcgctctcccatcaggtcaccagtctcaacttcatggcccctaaagcttcactgagaaatctctggcatgaggccgattgattaacaggaggaaagataaatgtatttaatgtgtatacacaggagcctccagaatgaaaacccaagggtactggggaagttgtctatgtctatgcttaggttcaacaaagtatggacagctgtgtagagaggggattggacaaaaagagcaggatggaatgctgatggactgagtggggaaccagggcctgctggcctggaagtgctggagaacgaatgcctcacaaaggagcagcccccacttaatatctgatgggcctttggtgtataaataaccccactccctccctttgggtggggaaagtttatggtacatgttctaccctggcttggccagaatccccatggggagtcaagcccaggtatccccccgggagcgttgctgggccatgcccctttcatcagggaccctcctttcccaccctcaccgtcactttccaggaccctggtgatgcctcccaggtaacacacccacactcaaatgcaggggctgctgccagcaaaccccaaactaaggcagaacttaggaaacttgtaaacactgcctgttccatcctgggatcaacatctgcttttattgttctaatatgtacatttttttcaatacacacacacatattttacaggtaagccttttgttttggcttactgaaatacacattataaagatgccggtgggatgctggcagagtgagcaaaacagccacttggaaa

SEQ ID NO: 677642 - DNA, 1219 bp, Homo sapiens
ccggccctgagtgtccaagcaaagctcctgtttggcaaatggtggggggccctcactccttcccttagggatggactaaaggactgagaaggaggggcagttgtttcagcaacttattatgacaaaaagtaaacacgctcaggtcctcttcctgacatacgtggatagcagcacccactcacctactccaaggccaccctaatatcaccgagtccagagagcaaggtactgcaccccctgcacagatggctgcagcccccaccctggaaccctctcctcccaccacctccaaccctctaggggaaacactgctcatttgtgactccttgtccccctcagcgctgatcttcatgtcagtgttggcagaagatgtgaatgtggtgctgagatatgcagtgatgtggatgacgacagagtgctgccttcgctctcccatcaggtcaccrgtctcaacttcatggcccctaaagcttcactgagaaatctctggcatgaggccgattgattaacaggaggaaagataaatgtatttaatgtgtatacacaggagcctccagaatgaaaacccaagggtactggggaagttgtctatgtctatgcttaggttcaacaaagtatggacagctgtgtagagaggggattggacaaaaagagcaggatggaatgctgatggactgagtggggaaccagggcctgctggcctggaagtgctggagaacgaatgcctcacaaaggagcagcccccacttaatatctgatgggcctttggtgtataaataaccccactccctccctttgggtggggaaagtttatggtacatgttctaccctggcttggccagaatccccatggggagtcaagcccaggtatccccccgggagcgttgctgggccatgcccctttcatcagggaccctcctttcccaccctcaccgtcactttccaggaccctggtgatgcctcccaggtaacacacccacactcaaatgcaggggctgctgccagcaaaccccaaactaaggcagaacttaggaaacttgtaaacactgcctgttccatcctgggatcaacatctgcttttattgttctaatatgtacatttttttcaatacacacacacatattttacaggtaagccttttgttttggcttactgaaatacacattataaagatgccggtgggatgctggcagagtgagcaaaacagccacttggaaa

SEQ ID NO: 677643 - DNA, 1219 bp, Homo sapiens
ccggccctgagtgtccaagcaaagctcctgtttggcaaatggtggggggccctcactccttcccttagggatggactaaaggactgagaaggaggggcagttgtttcagcaacttattatgacaaaaagtaaacacgctcaggtcctcttcctgacatacgtggatagcagcacccactcacctactccaaggccaccctaatatcaccgagtccagagagcaaggtactgcaccccctgcacagatggctgcagcccccaccctggaaccctctcctcccaccacctccaaccctctaggggaaacactgctcatttgtgactccttgtccccctcagcgctgatcttcatgtcagtgttggcagaagatgtgaatgtggtgctgagatatgcagtgatgtggatgacgacagagtgctgccttcgctctcccatcaggtcaccagtctcaacttcatggcccctaaagcttcactgagaaatctctggcatgaggccgattgattaacaggagraaagataaatgtatttaatgtgtatacacaggagcctccagaatgaaaacccaagggtactggggaagttgtctatgtctatgcttaggttcaacaaagtatggacagctgtgtagagaggggattggacaaaaagagcaggatggaatgctgatggactgagtggggaaccagggcctgctggcctggaagtgctggagaacgaatgcctcacaaaggagcagcccccacttaatatctgatgggcctttggtgtataaataaccccactccctccctttgggtggggaaagtttatggtacatgttctaccctggcttggccagaatccccatggggagtcaagcccaggtatccccccgggagcgttgctgggccatgcccctttcatcagggaccctcctttcccaccctcaccgtcactttccaggaccctggtgatgcctcccaggtaacacacccacactcaaatgcaggggctgctgccagcaaaccccaaactaaggcagaacttaggaaacttgtaaacactgcctgttccatcctgggatcaacatctgcttttattgttctaatatgtacatttttttcaatacacacacacatattttacaggtaagccttttgttttggcttactgaaatacacattataaagatgccggtgggatgctggcagagtgagcaaaacagccacttggaaa

SEQ ID NO: 677644 - DNA, 1448 bp, Homo sapiens
tactttcccccacccccaacttcctgccaacgctcaattttcctaagggtttcatggagagaggcatgggagagggttctgtatcttgcacaacagaattacctaaagtacctttaagcctctgttttctataatttcttctccctcaggcagcttgtcccatcccttctctttgtcataacagtccctttctcagcaccttctgactgttcttttatacaaatgtaaatagattaaaaaatctgttttggccaggcgcagtggctcaggcctgtaatcccagcactttgggaggccgaggagggtggatcatgagatcaggagttcaagaccagcctggccaacatggtgaaaccccgtctttactaaaaatacaaaaattcrctgggcatggtggcacacgctgtaatcccagctactcggcaggctgaggcaggaaaattgcttgaacccgggaggcagaggttgcagtgagccgagattgcgccactgcactccagcctgggtgccagagcaagactccgtctcaaaagaaaaaaaaaatgtttcttctcttggtaaccagggagagttagaggccccacgttaaagactcctttctactttgggggtagaaaggaggtgtgcagagcgaatgtgaatatgtgccaggactttgcagtgatgggcttgggttagccccatccaggtgaggaccaggctgacggatcatcctcaggctttggaactctgagtatgggtttgctgtccacatggagattgctttagagcatgaactgctccctacacaggatagagtcatttccttaaaaaaattgtgcttcgggaagagttgggaagtttgcatacatgtatgaaaaatggccaaatccttcttaagcagcatgtctttctctttttaagtttggtgtgatttttgctggtgcccagaagaatgttggctctgctggggtcaccgtggtgattgtccgtgatgacctgctggggtttgccctccgagagtgcccctcggtcctggaatacaaggtgcaggctggaaacagctccttgtacaacacgcctccatgtttcaggtaactctgggagtcagtcttgtggacccagggaggggtctcactatttttcatcaaagcggaggttacattttaaaataaaacatgtaagcctgggcgcggtggctcacacctgtaatcttagcaatttgggaggctgaggtggatggaccacttgaggtcaggagctagagactagcctgaccaacatggtgaaaccctgtctttaccaaaaatacaaaattatccaggcgtggtggcacatgcctataatcccagctactaaggaggctgaggcaggagaatctcttgaaccggggaggtggagattgcagtgagccgagatggcaccattgcactccagcctgggtgacagagggagactccatctcaaaa

SEQ ID NO: 677645 - DNA, 1448 bp, Homo sapiens
tactttcccccacccccaacttcctgccaacgctcaattttcctaagggtttcatggagagaggcatgggagagggttctgtatcttgcacaacagaattacctaaagtacctttaagcctctgttttctataatttcttctccctcaggcagcttgtcccatcccttctctttgtcataacagtccctttctcagcaccttctgactgttcttttatacaaatgtaaatagattaaaaaatctgttttggccaggcgcagtggctcaggcctgtaatcccagcactttgggaggccgaggagggtggatcatgagatcaggagttcaagaccagcctggccaacatggtgaaaccccgtctttactaaaaatacaaaaattcactgggcatggtggcacacgctgtaatcccagctactcggcaggctgaggcaggaaaattgcttgaacccgggaggcagaggttgcagtgagccgagattgcgccactgcactccagcctgggtgccagagcaagactccgtctcaaaagaaaaaaaaaatgtttcttctcttggtaaccagggagagttagaggccccacgttaaagactcctttctactttgggggtagaaaggaggtgtgcagagcgaatgtgaatatgtgccaggactttgcagtgatgggcttgggttagccccatccaggtgaggaccaggctgacggatcatcctcaggctttggaactctgagtatgggtttgctgtccacatggagattgctttagagcatgaactgctccctacacaggatagagtcatttccttaaaaaaattgtgcttcgggaagagttgggaagtttgcatacatgtatgaaaaatggccaaatccttcttaagcagcatgtctttctctttttaagtttggtgtgatttttgctggtgcccagaagaatgttggctctgctggggtcaccgtggtgattgtccgtgatgacctgctggggtttgccctccgagagtgcccctcggtcctggaatacaaggtgcaggctggaaacagctccttgtacaacacgcctccatgtttcaggtaactctgggagtcagtcttgtggacccagggaggggtctcactatttttcatcaaagcggaggttacattttaaaataaaacatgtaagcctgggcgcggtggctcayacctgtaatcttagcaatttgggaggctgaggtggatggaccacttgaggtcaggagctagagactagcctgaccaacatggtgaaaccctgtctttaccaaaaatacaaaattatccaggcgtggtggcacatgcctataatcccagctactaaggaggctgaggcaggagaatctcttgaaccggggaggtggagattgcagtgagccgagatggcaccattgcactccagcctgggtgacagagggagactccatctcaaaa

SEQ ID NO: 677646 - DNA, 1448 bp, Homo sapiens
tactttcccccacccccaacttcctgccaacgctcaattttcctaagggtttcatggagagaggcatgggagagggttctgtatcttgcacaacagaattacctaaagtacctttaagcctctgttttctataatttcttctccctcaggcagcttgtcccatcccttctctttgtcataacagtccctttctcagcaccttctgactgttcttttatacaaatgtaaatagattaaaaaatctgttttggccaggcgcagtggctcaggcctgtaatcccagcactttgggaggccgaggagggtggatcatgagatcaggagttcaagaccagcctggccaacatggtgaaaccccgtctttactaaaaatacaaaaattcactgggcatggtggcacacgctgtaatcccagctactcggcaggctgaggcaggaaaattgcttgaacccgggaggcagaggttgcagtgagccgagattgcgccactgcactccagcctgggtgccagagcaagactccgtctcaaaagaaaaaaaaaatgtttcttctcttggtaaccagggagagttagaggccccacgttaaagactcctttctactttgggggtagaaaggaggtgtgcagagcgaatgtgaatatgtgccaggactttgcagtgatgggcttgggttagccccatccaggtgaggaccaggctgacggatcatcctcaggctttggaactctgagtatgggtttgctgtccacatggagattgctttagagcatgaactgctccctacacaggatagagtcatttccttaaaaaaattgtgcttcgggaagagttgggaagtttgcatacatgtatgaaaaatggccaaatccttcttaagcagcatgtctttctctttttaagtttggtgtgatttttgctggtgcccagaagaatgttggctctgctggggtcaccgtggtgattgtccgtgatgacctgctggggtttgccctccgagagtgcccctcggtcctggaatacaaggtgcaggctggaaacagctccttgtacaacacgcctccatgtttcaggtaactctgggagtcagtcttgtggacccagggaggggtctcactatttttcatcaaagcggaggttacattttaaaataaaacatgtaagcctgggcgcggtggctcacrcctgtaatcttagcaatttgggaggctgaggtggatggaccacttgaggtcaggagctagagactagcctgaccaacatggtgaaaccctgtctttaccaaaaatacaaaattatccaggcgtggtggcacatgcctataatcccagctactaaggaggctgaggcaggagaatctcttgaaccggggaggtggagattgcagtgagccgagatggcaccattgcactccagcctgggtgacagagggagactccatctcaaaa

SEQ ID NO: 677647 - DNA, 1448 bp, Homo sapiens
tactttcccccacccccaacttcctgccaacgctcaattttcctaagggtttcatggagagaggcatgggagagggttctgtatcttgcacaacagaattacctaaagtacctttaagcctctgttttctataatttcttctccctcaggcagcttgtcccatcccttctctttgtcataacagtccctttctcagcaccttctgactgttcttttatacaaatgtaaatagattaaaaaatctgttttggccaggcgcagtggctcaggcctgtaatcccagcactttgggaggccgaggagggtggatcatgagatcaggagttcaagaccagcctggccaacatggtgaaaccccgtctttactaaaaatacaaaaattcactgggcatggtggcacacgctgtaatcccagctactcggcaggctgaggcaggaaaattgcttgaacccgggaggcagaggttgcagtgagccgagattgcgccactgcactccagcctgggtgccagagcaagactccgtctcaaaagaaaaaaaaaatgtttcttctcttggtaaccagggagagttagaggccccacgttaaagactcctttctactttgggggtagaaaggaggtgtgcagagcgaatgtgaatatgtgccaggactttgcagtgatgggcttgggttagccccatccaggtgaggaccaggctgacggatcatcctcaggctttggaactctgagtatgggtttgctgtccacatggagattgctttagagcatgaactgctccctacacaggatagagtcatttccttaaaaaaattgtgcttcgggaagagttgggaagtttgcatacatgtatgaaaaatggccaaatccttcttaagcagcatgtctttctctttttaagtttggtgtgatttttgctggtgcccagaagaatgttggctctgctggggtcaccgtggtgattgtccgtgatgacctgctggggtttgccctccgagagtgcccctcggtcctggaatacaaggtgcaggctggaaacagctccttgtacaacacgcctccatgtttcaggtaactctgggagtcagtcttgtggacccagggaggggtctcactatttttcatcaaagcggaggttacattttaaaataaaacatgtaagcctgggcgcggtggctcacacctgtaatcttagcaatttgggaggctgaggtggatggaccacttgaggtcaggagctagagacyagcctgaccaacatggtgaaaccctgtctttaccaaaaatacaaaattatccaggcgtggtggcacatgcctataatcccagctactaaggaggctgaggcaggagaatctcttgaaccggggaggtggagattgcagtgagccgagatggcaccattgcactccagcctgggtgacagagggagactccatctcaaaa

SEQ ID NO: 677648 - DNA, 1448 bp, Homo sapiens
tactttcccccacccccaacttcctgccaacgctcaattttcctaagggtttcatggagagaggcatgggagagggttctgtatcttgcacaacagaattacctaaagtacctttaagcctctgttttctataatttcttctccctcaggcagcttgtcccatcccttctctttgtcataacagtccctttctcagcaccttctgactgttcttttatacaaatgtaaatagattaaaaaatctgttttggccaggcgcagtggctcaggcctgtaatcccagcactttgggaggccgaggagggtggatcatgagatcaggagttcaagaccagcctggccaacatggtgaaaccccgtctttactaaaaatacaaaaattcactgggcatggtggcacacgctgtaatcccagctactcggcaggctgaggcaggaaaattgcttgaacccgggaggcagaggttgcagtgagccgagattgcgccactgcactccagcctgggtgccagagcaagactccgtctcaaaagaaaaaaaaaatgtttcttctcttggtaaccagggagagttagaggccccacgttaaagactcctttctactttgggggtagaaaggaggtgtgcagagcgaatgtgaatatgtgccaggactttgcagtgatgggcttgggttagccccatccaggtgaggaccaggctgacggatcatcctcaggctttggaactctgagtatgggtttgctgtccacatggagattgctttagagcatgaactgctccctacacaggatagagtcatttccttaaaaaaattgtgcttcgggaagagttgggaagtttgcatacatgtatgaaaaatggccaaatccttcttaagcagcatgtctttctctttttaagtttggtgtgatttttgctggtgcccagaagaatgttggctctgctggggtcaccgtggtgattgtccgtgatgacctgctggggtttgccctccgagagtgcccctcggtcctggaatacaaggtgcaggctggaaacagctccttgtacaacacgcctccatgtttcaggtaactctgggagtcagtcttgtggacccagggaggggtctcactatttttcatcaaagcggaggttacattttaaaataaaacatgtaagcctgggcgcggtggctcacacctgtaatcttagcaatttgggaggctgaggtggatggaccacttgaggtcaggagctagagactagcctgaccaacatggtgaaaccctgtctttaccaaaaatacaaaattatccaggcgtggtggcacatgcctataatcccagctactaaggaggctgaggcaggagaatctcttgaaccggggaggtggagattgcagtgagcygagatggcaccattgcactccagcctgggtgacagagggagactccatctcaaaa

SEQ ID NO: 677649 - DNA, 625 bp, Homo sapiens
tatacatatagtaaagtcgtggacttaacgataacggtcattcctaagaagggactatggtgtcaaactgtaattaaatagtagtcagtcaggcaaaaattatttctttccaaactttgcctgaccatatgggcaatcatatataatcaacaaagggaatttacaaattataaaaagagaaaccagtggtttcatttattttagaaatgagaaatrtagaagtgatcattttgtaggcatgtgctaatctacagtattgtgaccaccatttaggaaaactcattgatttacaaaattgaacagtggacatcataaatgggacaactgagaccctaaaattacattgtaacagatcctcccaagcttgcaagttaagtataaaaagtatgtgttgtgctcacaggccttttttatttgtgacaaggaattttaatgatcctagtttgattactgcctttgatgctcaactatcctacaaataactctcttgggaaataagatattggataactggaaacaacatcccctcacccatagacaattgcttgtgtgatcagtgactctgaaacactccagtttgacggattcctcagggttacgtggtgtacttacatcaagccctcct

SEQ ID NO: 677650 - DNA, 625 bp, Homo sapiens
tatacatatagtaaagtcgtggacttaacgataacggtcattcctaagaagggactatggtgtcaaactgtaattaaatagtagtcagtcaggcaaaaattatttctttccaaactttgcctgaccatatgggcaatcatatataatcaacaaagggaatttacaaattataaaaagagaaaccagtggtttcatttattttagaaatgagaaatatagaagtgatcattttgtaggcatgtgctamtctacagtattgtgaccaccatttaggaaaactcattgatttacaaaattgaacagtggacatcataaatgggacaactgagaccctaaaattacattgtaacagatcctcccaagcttgcaagttaagtataaaaagtatgtgttgtgctcacaggccttttttatttgtgacaaggaattttaatgatcctagtttgattactgcctttgatgctcaactatcctacaaataactctcttgggaaataagatattggataactggaaacaacatcccctcacccatagacaattgcttgtgtgatcagtgactctgaaacactccagtttgacggattcctcagggttacgtggtgtacttacatcaagccctcct

SEQ ID NO: 677651 - DNA, 1512 bp, Homo sapiens
ggaaaagtctgcaaatcactcacttttcctggactttgagttagaggcaggaagtagacaggactttgagttgtcttcttcatgggagtggggagtgtatttatttcatggttgaaaggcgaattaaaatctttgtgaccatgaggagacacatgaaaagacaaatccagagacttttatgggcacatgaaaaatttcattttcccatgcacagagattcttaaacttcctggtcactagatatggttatatgactcagttccaaccaatataatgtaagtagaaacattacggtcacccctaagactattccctataataaaaccctcctacaagtttcttcacactctctctccctgccacaaaatgtagagtattctacagaggacattgagactcttggggatggtgtaccatagatggaagaagcctagacccttgaatctacatagaaaaggagacccagcaaatatcattatcaaatggtttaaaatgagataaacaattttcttttctgttaagtatttgagatattctgagtcttttattttgacaatttgtctgttctaaataacaagctgcttgctctttcagagagtaacatctaaagcatatttttcaaagttaagaatgtaggctaatttgaggtagctttcttgattatgcagctatttaattttcatgtccctgtttcccagactgaaatgtggaactgtttgtgtgatctgtcttacggcatagttcctgagtatctttgggatagacatttttgatcctttttttcccacaatatttgttgccagtttcttttctgtagaatttttgtttttagaaactgtcttctttcctctctcatttttgacacatgtggagcaccgagtgagcaggaaggataccgatacctttctccagatgcacattttaggctccagcaacttctagactgcgtgcatctttcaaaggtctcactttcactaaaaaagcacaaggcctatttgctctctaagcgttgctgaccctcttgcctagacagtattcaatgatatgaaaaatttctttcactgtaatcataaaatataaactttaaaaatcaaatggctgtctttgaataagtacaatcatcatttttgttcacatttttatttggctaacaactaataaggttttcctgcaagatttaaatcacaacaataatatatcctgactttccttatcttatatgtctatgcccatttattcaatgaaacayactttgaactttttgccattcctcaaatatgttatgtccttctatgtctttgaaatttcttttttctaaatgagggtggtattgttaaattagctgagcaacattaagcattcttgatattgcagtattatacattcatgatgatctagttcaaactttaccaatttttcatcttttttaactacggtccaagaaattcttgtttataaatcttttattgtattaatgttattcctgtggatttgatttggattcctacggaa

SEQ ID NO: 677652 - DNA, 634 bp, Homo sapiens
atcccccaattttttcatctataggctaacatcccaatttatattaaggattccattttctttctcttttttttttttaatatatatgtggatcaatgtacactataattttcctttaagccttttcggatctgtttcagggaagcattctccactcaccatccagtttcatctgctctgggcaataatagtgaatcacagctaagagagcagcaccatcactgccgtctctcatcaaatcctccaacaacgggaagtagggtgactgcctagcagaaaggtgctctcgtcgatagcggacctgtagttgataaaaggaaaacggtctctgcatgtgatgtctcttcactaccatatatgttacaggcacactgttagatcgagaattaacataacgcctaacagacaacatggagaacaattgcaatmatctagaaagagttagaaacgtctggattacgtactttgcctggaacatatatgtcaagatccaaggagctgggcttcatggctacactgggtaacagcaactacttgctagcaataccagagccagtctactctaaactgacctggaagcagaggctgccactagtgcaggcacacacgggaaaggacacagaacacacaccta

SEQ ID NO: 677653 - DNA, 1517 bp, Homo sapiens
gcacagtaaaacaaatatcacatattctcactcatatgtgggagctaaaatagatttcatagagatagagaatagattggtgattactagaggctgagaagcaaaagcggaaggaggaatgaagagaaattggttaaggggtatgaaaatacagttagaggggatcagttctagtattcaatagtagagtagggaagttatagttaaagtagtgtgttgtatatttcaaaacaagtagaagagaattgcaatgattccaacataaagaaaagataaatgtttgaggtgatgaatatccctaccctgatttgatcattacacattgtgtacaggtatcaaaatatcacatgtgccccccaaaaatatatacaactatcatatagcaataataaaaaaactgagacataggtagttgaaatcctgagtgtgactcaaaacaactactaatattaattatgaaattcatcggaatattattaaaagaacttatgtaaacatttgtatagtaaagaataaactgaatctagctttcccaattctgaatgcgtcaatttacattcattcatgccaattttcttctgaatgatatctctaaggactgacattacttctctggaacaattctgtgtagaagaaaagattggtgtctccttgttttcaagagaaaagcacattaaatttccaactaacaccacaacacagacaaatgaaaacaaacttcgtgtaatgaaagagacacaggagcaaaatttaattcttcccataaaacaatgtgttgaaggagagcctaaaaaaatcgtaatgttaatgaaaatggagggattacactgttaaatcatttctatgtaaattaatagaagagatttctttttggaaataaagcccatcaacagaggaactgctaaaacctgtttttatctccagtaacataaaatttcaggtcacatcaacaaataaagttattaaatcaagcattttattatctgaccctaaataatgaacactaatcaaagataccatccatagctttgattattaaagccaggatttcttacggtttttcttaaagaaaaatagccctaatagatgtcactgcarcaattgatgggagttaaagaaacagattaattggactccatatttctttatttaaacatcttaaatacaattatgcatggccaacggtaagttaatcattttatttagatattaaatgacctgaaattgggttttttatgcctttactcagccaccaatagtcacactttcttcagtccaagaggagggtgtgggtactatctttgatttttattttataatatgaactacaactacctccttgaaatgccttcctatcttagctgtcatatacctgtactattcttgggaagcatctacatttctaatctctctctctctccccaacttcctccttacatctcccccggcctctctctcccttttgctttcactccacttccctcatatttctaccattattgctccatcttcagcta

SEQ ID NO: 677654 - DNA, 712 bp, Homo sapiens
ataaagatgttaagggatagagctgagatactacatagatctgtctgatgctaaagctcaagacatttctcctatgatagaccagagcagatgaataatacctgttaaatcaaaggcaaagaaatcttttttttttcttctggaaacactgtacctaaaaacttcccaaaatgtgactcttttatctgactataaaaagaaatagcaaaatcaattatattacacagtatctgcatcagctttatcatctcctaaatagggatataatattgagatgtggtgagagttaagtataattatttatatgacatgaaatagcttatgtacctgacacaaagaagttctcaatgactgttatgtacaattattattatcattattgagtactatttgcacttaaaagtcaaacatatcttgaatcagaggaagttcttacttttagaatagctctaccagaaattaagaaatatcacaaaatatgcttctgtaattattttaaaggtgacttgtgaccatttacccatttctttcacttttaataaatgccttaactttttaaaagtatagtgtgttcattgtgccaaggaaagatgacatctgtgtttgtgtggggagggaataaccayagttttaaggtacattctttaacttgattttacaaattgaacgttatgagcagtaatttaatttatgctacacattttaattcaga

SEQ ID NO: 677655 - DNA, 607 bp, Homo sapiens
ttctcaataactatatgtacttaaaggcaagttctgttartggaaaagaatacatttctcctgtgatttgcccctctgtctcttaatagtgcaatatgtataaatggcataaatatcagaatggtcaacaattttagaaatgaaacagcacttttcagcgaaaagcctgatttctaccaataaacccctgagctacacaggggtttcagtaatttgcagacatattcatgtacaaacagcttatgaatgacatttctaaatgtggaattaaagtcgattccttcaaggaaaggctgggcatttagaatttttatgaaggtcacataaataatccaggcagaagagcatccccctaaagtgagaacattgcaatgacatccagaagtaaggcagaaacagaaaggtaaatgactgcctgtttccaactgagaaatggtgacaatgaataggatagaaagaaatctgctctattcagaagcctactccatagtttataaacacattgctggttccagtcaatcctgactttattacacttctttactcgccttggtttataatgaatagttgagggtaaaaagcattctgaataattaagaaccattct

SEQ ID NO: 677656 - DNA, 587 bp, Homo sapiens
gggtgtattcagactgaaacttttgagwaacctgttgcttgtcccagctccaaagatgagagatcctaagtttccttctgacttccttctccagtatgtcttttctcctccttctccctaacgttctatcccagttttccagctggatagttaagtggtcttcccggcagaatgcaactgcacatctaactcatattcctgagtagagccaggaagagttttactgaatcctgtgccacaggctgcctcatgtgccggagagccttataccattcaccaggcgatcttggatgaagggccagtgaaacaggaaaggtccccttgtccccctcacagggggtgcaacagggggagtagctcacttcttccgtgcctagctgctcaaacctcttgggaagcatacaaggtgggcaggttgtggggctccaaccccacgacagcttctggggtgaatatttatagctcctgaagccccagtgggcgtgtgttacatacagagtgctcttttaattttactcttttagttttccatttataggcttgtgttaaccagctcaattacaccctctaccttgtcgcaaagacag

SEQ ID NO: 677657 - DNA, 865 bp, Homo sapiens
tgtctgcctgctagggtatagggccaggatgggggtgtggcgggccagggtagtcttggaaattgcaacatttgggcgagaagacaggactscctgtcctcatctaggcccttgggggtggagccctaaccggggaccacgccctcctctacccagcactcccctttccacttcggtatcatttaaagggaccatgctcttctctccccagcacttctgtatcaccaggatggggatcctttagatgggagagcttcgtaaatgcactctggactgaaaagcccaacagctttggggctcaaactgtcgatggcccagaggcgaattttctatccatagacatctccgtgagagtgaagagatcgagtccctcactgactgtgccctgtaaacaactgctgtatttggctggggccctgaattctgccataaggtgcccaggctcctgaccaagtcataaccaagacaggacatagcaagcctcaagaaaaggttaccttaagggaggcagggaggtggtcaccaagacacagagaacacgtgtggactgagaaaattaactttaatgggggcatttaaggcatatgggaaagcatttggaagaatcacaattttcatgctggcttcccaagtccctaagaaaaaaattcagaaaaggtctcttcaccatttgtgaattgtgaaataaacacatctcaaggggagtgtgtgggtgtgtgtacatattaatattccaggggtgggggaaatattgacacggatgattttggaagtacttgcaattcctgcccaactcagactcatctgaaatgggtgtgtttcaaaggctcaaaggctgccagattccttttgaaaggaaatgttt

SEQ ID NO: 677658 - DNA, 2121 bp, Homo sapiens
ggatgaggacaggtcagcagagagtcaccagcactggctaaaggtctcagaccaaattttatactcttgaccaggagaaacttctctgttattctaatcacattaaactcaagcattttctttttttctttcttttttttgagaaatcacatcgaacttccaaaattataaagttgaaaatatgtaataattgacaattggaaacaagaaagaggattagctataaaaataactcaggacaatgtatttatcatgaaaagatggtcttggtggaagaaagtttcatgcccagccagcccattcttcaatatctgctaaaaaaaaaaagagcaaagggaacttaaagacatcatagacttggaaatttcgtctcacagtgcattaatttcccaaatcacatgtggaagagaagaagctgctgcatattagactaactagttttactgaatgttgtctgttgatttaaaaattaatactcttatcaagagcaaattgaaatactgaaagttatttactaaacagcaaagaatattttcagtatataaaaagatttaaaaaaacgttgacaccttaactaaatctgacacaaatttaaaaggaaaagtaactagaaaatgaaagaagcgtcgtacaagtatgcgatgcaccctctgttgcaccaactgctcctgtttgttgagtcccctcttctattctgcctcctccatctccttgctgattcccctttttgtctattttaatttctctctctattcctttctcaggtcaccatgtcacattccttttgtgtcttttgatgtccaatctcaccgacaccaccttcattctctattttatctttacaaatggttaattaggcataaagagggaaaacactcctgggaagatacctgaatcctggtgcacactatcattatcactgtttttcatgttgatgctcatgtgtctctgctttctcgacagactatttaatcagyagacagatcaacaggccaaaatttccaccatagttgcaaatttgaatgcggatgaatggattaaaacacattcaagtcttgcaatgaacggcataatgtatggtggtataattcagagtggttacaggggagagttaaagatcattttatacaatatcactcgagaatcttttgctgtaaaactgcagatgtgggttcctcaatttttagtggtaccttgtcaacaattaacccctgaggatgtctctgccccaacagaggctacaaagaactgggagattcagacgcactggtacacgtagcttaaatcctggagccaaaatatgagtacagcgtccatcacatcctactcctatggctggtgaacttgtagctatgggagaagaaactgaaggcatagtacagtttcctaaagatgaaaaacaatattatgttcccctctgttttggttattacagagaataacctgtttactaatggtcagtacctgtgtctctgtgtctgatgccaagaataaattcatcatctgcatagccaccactgcaacagaagccaactgcagtcaatgttggctatgcgtggaattgccagaggccaccaaaaatgggctacgttggagaatcgtccctgtaccttactgcataccgaatgttgtgtgtatatccctgacaattctcacactacgactctccttgcacagccatggtgggtgtggttttcattaactgtgcttttaattctcctgtgcttaccctgaatctgtaatctgtatcaactatgctttccccaagtatctgtaagggtattttcctacaattgagtatcaaattgaagccaaatttggaagaaaagttaaatattcaattttatctcaattgaacatggacacaaacaatggtcaccaagtcccggaacaggttctgtgagtttcttcaggcgttcatccaccagtgtctcagagaaatttctattttaatctgttcctgtatgttagttattgaaaaacaacagacaatcgccaaaaatttgacatttttgtggtttttgagcccagtagtgaagagtcctcgttacccggccttatgccaaagaactccttacaaaaagagctagggtcccagatggcactagagcttcctgagac

SEQ ID NO: 677659 - DNA, 635 bp, Homo sapiens
tttaggtaatttattcctcaaaaagaattggttcacacctgtaattccagcactttggaaggccaaggcgggcagattattggaggtcaggagttcaagaccagcctgacaaacatagtgaaactaaaaatacaaaatttrctaaacatactaaacgtacaaaaattagctggacatgaagctgggtgcctgtaatctcagctacacagaagcctgaggcagcagaatctcttgaacccaggaggtggagatcgcagtgagccaagattgtaccaatgtactccagcctgggtgacacagcaagactctgttctcagaaagaaaaaattggataaagaattgccctaatgctgggaattttacctcataggtagtaaaaatatttacagaataaggcccaggtgtagccataaagtggcattacaattctttcattctagataagaaactaacttaaaaaaagaatagaaattctaaggtaagagacaaaactctgggaggatttacatctaaggtaaaggctcaatcacaggacaccagaagaagattgagaatgcagcttcctttctgccctgcatccattgtcaatagactttccctggccttctccttttgactttggtcattttatttta

SEQ ID NO: 677660 - DNA, 635 bp, Homo sapiens
tttaggtaatttattcctcaaaaagaattggttcacacctgtaattccagcactttggaaggccaaggcgggcagattattggaggtcaggagttcaagaccagcctgacaaacatagtgaaactaaaaatacaaaatttactaaacatactaaacgtacaaaaattagctggacatgaagctgggtgcctgtaatctcagctacacagaagcctgaggcagcagaatctcttgaacccaggaggtggagatcgcagtgagccaagattktaccaatgtactccagcctgggtgacacagcaagactctgttctcagaaagaaaaaattggataaagaattgccctaatgctgggaattttacctcataggtagtaaaaatatttacagaataaggcccaggtgtagccataaagtggcattacaattctttcattctagataagaaactaacttaaaaaaagaatagaaattctaaggtaagagacaaaactctgggaggatttacatctaaggtaaaggctcaatcacaggacaccagaagaagattgagaatgcagcttcctttctgccctgcatccattgtcaatagactttccctggccttctccttttgactttggtcattttatttta

SEQ ID NO: 677661 - DNA, 563 bp, Homo sapiens
cacacacacacacacacacacacacacacaccccgtagtgataaaactatgtaaatgatatttccataattaatacgtttatattatgttacttttaatggatgaatatgtatcgaagccccatttcatttacatacacgtgtatgtatatccttcctcccttccttcattcattatttattaataattttcgtttatttattttcttttcttttggggccggcccgcctggtcttctgtctctgsgctctggtgacctcagcctcccaaatagctgggactacagggatctcttaagcccgggagggagaggttaacgtgggctgtgatcgcacacttccactccagcttacgtgggctgcggtggggtggggtggggtggggtggggtggggtggggtggggtggggtgcagagaaaacgattgattgcgatctcaattgccttttagcttcattcataccctgttatttgctcgtttattctcatgggttcttctgtgtcattgtcacgttcatcgtttgcttgcctgcttgcctgtttatttccttccttccttccttc

SEQ ID NO: 677662 - DNA, 563 bp, Homo sapiens
cacacacacacacacacacacacacacacaccccgtagtgataaaactatgtaaatgatatttccataattaatacgtttatattatgttacttttaatggatgaatatgtatcgaagccccatttcatttacatacacgtgtatgtatatccttcctcccttccttcattcattatttattaataattttcgtttatttattttcttttcttttggggccggcccgcctggtcttctgtctctgcgctctggtgacctcagcctcccaaatagctgggactacagggatctcttaagcccgggagggagaggttaacgtgggctstgatcgcacacttccactccagcttacgtgggctgcggtggggtggggtggggtggggtggggtggggtggggtggggtggggtgcagagaaaacgattgattgcgatctcaattgccttttagcttcattcataccctgttatttgctcgtttattctcatgggttcttctgtgtcattgtcacgttcatcgtttgcttgcctgcttgcctgtttatttccttccttccttccttc

SEQ ID NO: 677663 - DNA, 1105 bp, Homo sapiens
tatggaaagtcatgagacatgcacagtcatctcctcttgyttcctcacaggtcacatgaatattcagggagagttaatatgaaacatgcaacggaaatttgggctctaacatcagcaaactcattctccatggacttcagttggccatattgcttccaacatatttcagccaattttttaaaatcttataagcagaggagatttaagtgtttcaacaagctgtttcttatctttcattctgaatatccaatttttaagtctttttttttttaacagtttgaaggcacaaattcagcttctgtcaaatggaatacagaatagtgtatgacttttgtattagttcaggctgctataccaaagaaccatgaactagacagcttatagacaacaggatttaatttctcacactcctagaggttggaaatttgagatcagggtatcagcatggttgagctctggtgatgactcttctgaatttcagactgcacacatcaaattttattctcatttggtagaaggagacagacatccctctggggtttcctgtataaagccagtaatctcaatcatgatggcctcaacctcaggagttaattacaacctatctccttatagcattacactgggggttacaattttaatacaaattattgtaactctcaagtttttttaaagctgtcattattcctcctactgggtttttcctatttgcttcctcagtctttccatttctttatgtctctttgtgtgaaactgtttgcctaattctgtctctcaattgtattcctcaaacagaggaagcaagctccaatgctatgagatgctctatgtacagacgcacataacaaagaacggagggagtgctcaggcagtagacagaagtaaagtcatgctctcagtctaccctgaaccctgccaattttcacaagcatgagcttaaaggttgatgcttttccggtccacattcagttgagaccacagccccaatctcataagagacctgaaggcagaggcagctaactaaactgtgtccagattctggtccacacaaattgtgagatactatatactattgaaaggtgctaagttttagggcaatgttgtc

SEQ ID NO: 677664 - DNA, 638 bp, Homo sapiens
tacaacattcactatttgggtgatgggttcactaggagcccaaactcaccattacacaatacatgcatgtaacaaacctgcacatgtatccccggatctaacataaaataagcacaaacaaytaagaatattgttttcttcccaccttcctaccctgggtggcctttctcaatctaccgctttcattccagcctctaaatatcataatgcctcacagtcctcagactttttttttatctctacagtaaccccctaggtgtctcatccagtggtcatggcttcacatagcattaacattctgatgactcccaagttcacctgggtcaacctgcctcaactccgaattcatctgcacttggatgtccactaagcatcactaccttcacatatcaaacttgggactcctgagcgagaccttccatcccaatctagcaaaggatcagtcctaatttaccacaatagacattccaacaactgctccactcatgttcattctatcattctcagtcatgtcctaagagcagcaggagcttgggtagaaaagacagaggatcaaactcaggcaagttgagcagcattcttggaattttaggtagaggcagacaggaaagggattgcaagagaaggttcagcctgaa

SEQ ID NO: 677665 - DNA, 291 bp, Homo sapiens
ggccaggaggaaagctcaatatttgcatgtacagtcaacctcaggcaaatctgccagttaaaaaagaagcggggatatgaatgcacaggtatttttctcctaaagagctaataaattaccactacaacctcctcctcacatttggctcaatttatttactgcatgtatgttctctcatttaatcstcacagtcttctaaaggtataaaaaatggtctgccagtataaatgtgtaaacggaggttcaaaaatacttgatctcttaatgagtaaatggaagttcagacatatt

SEQ ID NO: 677666 - DNA, 617 bp, Homo sapiens
ttctcaaaataatattctaaggaaaagaagccagtcacaaaataatacagtattctattccatttataggcagaagaatattaaacagaactgaattagactaataaaaataaaacaaggcttgctcatgaggagttgactgaaagagtcaaaaataaatttacatggtgatggagtacaatgtgttctatatattttgagtggagccttgtaatgcttttgtcaaatctcttcaaattgtattcattggtgcagtctgctttatatatatatttatcataatgtaaaaaaataaaatgcatattttgttatatcattatgtaaatatattacatatattatatttatatattatataatgtatgaagaagaatgatgggtgactgcagctgcattgcctctactccacctctacatacaaggactcagctaaccagaccaaaaaagccttgtttttaccattgttcrgggagaaactgctttgggaactatcccagtgtcctccttatttgatacaagtaataaaatcctcatgctaaatacttcttggttgaggtcattggattgtcaatcgccaagtgatcaaagcccacattgtgtaacaatttctgtacaat

SEQ ID NO: 677667 - DNA, 617 bp, Homo sapiens
ttctcaaaataatattctaaggaaaagaagccagtcacaaaataatacagtattctattccatttataggcagaagaatattaaacagaactgaattagactaataaaaataaaacaaggcttgctcatgaggagttgactgaaagagtcaaaaataaatttacatggtgatggagtacaatgtgttctatatattttgagtggagccttgtaatgcttttgtcaaatctcttcaaattgtattcattggtgcagtctgctttatatatatatttatcataatgtaaaaaaataaaatgcatattttgttatatcattatgtaaatatattacatatattatatttatatattatataatgtatgaagaagaatgatgggtgactgcagctgcattgcctctactccacctctacatacaaggactcagctaaccagaccaaaaaagccttgtttttaccattgttcagggagaaactgctttgggaactatcccagtgtcctccttatttgatacaagtaataaaatcctcatgctaaatacttcttggttgrggtcattggattgtcaatcgccaagtgatcaaagcccacattgtgtaacaatttctgtacaat

SEQ ID NO: 677668 - DNA, 617 bp, Homo sapiens
tctgaaaaatgaaatttgtgtgtcctgtgtacccgaggggtaatgattaaatgataaagataagaaaagcgcccatgtaacacaaactgccattcaacaggtatttcccttactacctaaggaattgtaaccattgctcagacattgtaggatttaactatgttgaaaactacaggagaggccgggcgcagtggctcacgcctgtaatcccagcactttgggaggccraggcgggcagatcacgaggtcaggagattgagaccatcctggctaacgtggtgaaaccccgcctctactaaaaatacaaaaaattagccaagcgtggtgctgggcgcctgtagtcccagtaactcaggaggctgaggcaggagaatggcgtgaacccgggaggcggaggttgcagtgagccgagattgtgccactgcactccagcctgggtgacagagcaagactccatctcaaaaaaaaaaaaaaaaaaacacaggagagataactggtttttgaatgaaatacatgggtactgccttgcttgacatcacatagtccttgatgaaagttcacatttaggtctgcttggtacaatacgcctcctaaaaaggtccttgatgaaagttcac

SEQ ID NO: 677669 - DNA, 808 bp, Homo sapiens
cactatcttactttcttaagacccttatttttttcactgaaaatattaattaagagcctgctatgtgccagacaaagttctaggcactttcagacacattactgaaccaaggagaagattgatgccttaaactctagcaagggagaaagacaatcggataatttaaagaataaattaaatagtatgttagagaataacaaatgctttgggaggaaatgtagagcaggacatagaggattgtgagcgctaggaagaaatggatgtttgcaattcaaatagggtaaccaggaaagccctcagtgaaagggtgacacttgagctaagatttaaaagcaataattaactctgcatttatgagacaaagatcctaagatggggcatatctggcatttatgagaatcagcaaggaggccagtgaggctagaatgagggaaccagggaaagagtagtaagagaccaaagcagacaggtgatgggagcttgtacgttattgattataaagactttgtcttttactctgagctatttgaagaatcattgcaagagttgagcagagaartgacatgacctgatttgctttcctgattttgtctttaaaagaatagctctggctgctgtgtcatgattattctataagaggcaaagatagaggcaagaaaacaagtgaagattttattacagaaacccagaaatctgcttcttgttctgtctacgaaaataaactttactaagtcttagtttttatgtctttcagtccattcatcatcctgacatcagttaattcctgaaataaaaatcggatcacgtg

SEQ ID NO: 677670 - DNA, 808 bp, Homo sapiens
cactatcttactttcttaagacccttatttttttcactgaaaatattaattaagagcctgctatgtgccagacaaagttctaggcactttcagacacattactgaaccaaggagaagattgatgccttaaactctagcaagggagaaagacaatcggataatttaaagaataaattaaatagtatgttagagaataacaaatgctttgggaggaaatgtagagcaggacatagaggattgtgagcgctaggaagaaatggatgtttgcaattcaaatagggtaaccaggaaagccctcagtgaaagggtgacacttgagctaagatttaaaagcaataattaactctgcatttatgagacaaagatcctaagatggggcatatctggcatttatgagaatcagcaaggaggccagtgaggctagaatgagggaaccagggaaagagtagtaagagaccaaagcagacaggtgatgggagcttgtacgttattgattataaagactttgtcttttactctgagctatttgaagaatcattgcaagagttgagcagagaagtgacatgacctgatttgytttcctgattttgtctttaaaagaatagctctggctgctgtgtcatgattattctataagaggcaaagatagaggcaagaaaacaagtgaagattttattacagaaacccagaaatctgcttcttgttctgtctacgaaaataaactttactaagtcttagtttttatgtctttcagtccattcatcatcctgacatcagttaattcctgaaataaaaatcggatcacgtg

SEQ ID NO: 677671 - DNA, 1016 bp, Homo sapiens
ccctatgccttgagctatactgcatcacagattagatattgaataatcaatatcttttgttaaatgaataaacaaaaataattttaacatgaagatcttatgtttaatagttgttcaaacataaattgaaaatgtaagcccctaagaaatttagagtggtatagtagataggaaaatagttcttatatttatatttgctttcaagaaatatttctaaaccaagtttgataaaawctcatgacccagtcatgtgcttttggagaattgtaccatttctgtcaagctccagttcaaatgacattccattttgaaagattttattgttaactggtccgtgctaattagtatggctacaaagataaagaagattttcttcccacagaaacttcataaacaaaacggtcagtcatatacaaaacaactacctgggtaaatgagaggtgacattggaaatcactggggaaaggacccttcaaagtggttaggaaaaccagctttttacatggaaaagaaataaaaagttagataaactccttacatattaatagcctaaatgaggaagaaaattcaaaactttcagtgtctgggagagaggagaaaaaacattcaacacttttatgaacacatcgacagtttgttttatgttttttacctcagaatagaaagaatatttaaaacaagatatagaaatatattttaaaaattgttaaactttacatggggataatgaaagtcaatctaacaaaaagatagaaataaataccataaactaatttaaaatacaagagactagaagaagattatgacacacttttgactaaaaatgattcatatttagaagatatgcagcagaggtcatacaaataagaaaaaaacaaacattcaaataggaaaagatataagaagactgtatagtcaataattgcatgttacacttagaactagaaaactcactctttaatataataataatgacaataaaataagaagaagaatgataaaaatcggtgctttga

SEQ ID NO: 677672 - DNA, 598 bp, Homo sapiens
tgcactacgaactgactgtagcagccatttgtggatgtgagatggcagcttaaagaagtggcaccagttcttcacctttctctggaccatgtgactgcagctcctcccacagtggcagagtgaacctcatggcctctgttttgttttgttcattttctttttctttttttgttttagatggagtcttactatgttgcccaggctggagcgcagtggcatgatcttagctcactgcaagctctgcctcccaggttcacaccattctcctgcctcagcctcctgagtagctgggactacaggcacctgccaccrtgcccggctaattttttgtatttttagtagagacggggtttcaccgtgttagccaggatagtctcgatctcctgacctcatgatccgcctgcctcggcctcccaaagtgctgggattacaggcgtgagccaccatgcccagcctgtttttttctttttcaactgttactttagaattgggggtatatgtgcagatttgttacaaagatatattgcctgatgctgaggtgtagggtatagcagaacctgtcaccactggttacttttaaggcctcttctcacttgat

SEQ ID NO: 677673 - DNA, 1386 bp, Homo sapiens
ttcctgctgccacgtgaagaaggacatgattgtaagtttcctgaggcctccccagccctgcagaactgtgagtcagttaaacctctttcctttacaaactacccagtcttgggcagttctttatagcagcgtgagaatggactaatacacgtatctttaagttttctgtggtgaagattaagcatggcagacacagagtatgtacccaataaataataggtataattgtgctcatcacactctcatcaattacctggcaaaaattctattcaagggctaggactctgctactccactccaatcctcttcagttccactatgtttacctcagttccccaaccaaatgggtaacagctggttttgcatgaaagtgagcaactatggaggcagaggattgtctcctcaygtactcgggatgaattctaccccgaggcaccacacccttgttgggccaactgcacagaattctgtgcatgcacgactatcaagtgtttatctattgccccagaagcaagcttctctaaacctggtgcttgtttctctcctatgcttccatctcctgttgacctcccttccaattctttccaatgtgcctcatggaattttcattctgttatgagtaaccctctgttgatctcctagttttcattaaacgttgtctgtgcttcaagaacactgaatatctttttgctgtgttaaatccaaagcttagtcattggtcctcatcttagttgaatcctcagtactttcgctactaccacccttgtacaagctgctaccttttttttttttttgcctgaaatgatacagtagtgtataaaccaagtatctctgcttgcatcgtcatctgcctgtcatgtatgctcaatgtagtaaccacagtgatccttataaaagtaaagtcaggtaaatgtcactccttggctacttcaggtcagggaccatgtcatttttttttttccctctgtatctccagggcttatcgctgaaacttagcaggcactcagtaaatattttgctaagcagttaaaactaagagaagaaagaggagggagaaatatggtaatcacttaccacatcctcttttaacctcttgaatatcttaccaatgtcttcttttgttcttactttcacatcatttgatttgataaaacaaaactattatctagagaggtaaggcagacttgtgaactggacccgtagaagttaagtgatgtccctgtttgcagtgtcaatgagattgagggcttgggcttgaacccaaccttctccctccaaatagcctgctctttctgttatgtcatgtttcatatacaagtttgggagcctccagccctgactatcccaacatatacaacataatgtatatgttgtctttggaaatat

SEQ ID NO: 677674 - DNA, 636 bp, Homo sapiens
tgctatgattcgtcttcaaagttcactctcccagttctgtgaggaaatggatcacagcaggtgggcaaaagtggaaacagggagatcatttaggaagctactgcaytgaactgacaaaaaaaaatgctgacttggaaaaaatgtttcctttcatgagggttaattagaataatgtaaattaactgctacattcagtgtctgatatataaacactcaacaatatattatactattattattagtttatacctacagaaaactcttcttattcaacacgatatgaacatcaaaacccttgagacagtaacttgggaggtatacaatgaccatacactcaaggtttaagaagtagaactctattatttatttaacaaaatgtgttgaggatctacactgtgcaaattataaactggtttgctgagccagcatagggaaactggattaatatatcaggcatcatagaatactagatctggaagggatctagaagagttcagcccctcactttacgacaaaagagcagcccagagaaagaaactgtggttctccctaaactaaaaactgagaggctcataccttaggttgccccaaggacacactctgaataactaaagattttcattaacaatataaaac

SEQ ID NO: 677675 - DNA, 595 bp, Homo sapiens
tcaatttccgaccttcagccaatcgttccgcttgagggaagatctcgcgacgtttcagtgtgagacgcgcacctttgaggcgggtcgaagatccttctgccgaattctattgatgggcccaagcgtaaccaggctcttctgattggccggtgtacttcagtttccgtccaaggtccgcctcctacctccttctgcttcgggtgagtacccttaagggcccacttgattttagttctcagtggaggaaatgagccttggagcgatgggaatctgcctctggcaaacctctggtcgctgcagggccsgagagggatgcgccctcctctaagttggcagtgaggtgtgggcaggccaggtcccatccgctctcaggacctcagttttcctgtctgcaccgggagaagggaggttccctgactctgagccttgcttgtccccgtcggagtggggatagggtgggtcgtccaaatcccagaggcgggagaggtccaggtttagggcccagaggcccaggcgccgaaccttcccctccctgggcctcagtttcacttgttgctacccattaaaccccgcctgctttccaaaagagatttta

SEQ ID NO: 677676 - DNA, 595 bp, Homo sapiens
tcaatttccgaccttcagccaatcgttccgcttgagggaagatctcgcgacgtttcagtgtgagacgcgcacctttgaggcgggtcgaagatccttctgccgaattctattgatgggcccaagcgtaaccaggctcttctgattggccggtgtacttcagtttccgtccaaggtccgcctcctacctccttctgcttcgggtgagtacccttaagggcccacttgattttagttctcagtggaggaaatgagccttggagcgatgggaatctgcctctggcaaacctctggtcgctgcagggcccgagagggatgcgccctcctctaagttggcagtgaggtgtgggcaggccaggtcccatccgctctcaggacctcagttttcctgtctgcaccgggagaagggaggttccctgactctgagccttgcttgtccccgtcsgagtggggatagggtgggtcgtccaaatcccagaggcgggagaggtccaggtttagggcccagaggcccaggcgccgaaccttcccctccctgggcctcagtttcacttgttgctacccattaaaccccgcctgctttccaaaagagatttta

SEQ ID NO: 677677 - DNA, 692 bp, Homo sapiens
ggaaggaaaaagggactttagggacttmtttccatatcaccactcaaaaggcctgtggcctgaggggctccaccatgagtaaactccccactcagtgccaaaaatagaagacaaacatgacacttggacagaaaatctaacagaatgtggtgtccatataagaaaacagtcttaaaataagttatgaatagccctagctcactgtcccccccataccttactattcttcagcacacatatggcaaagaaagagatgttcacatttaaaaatgagtggtaaccagtaagaaatcaacagagaacaacaaaaagtaagaagggtgaagagttacggagtgaaagaagaacacaagagttgatgaagggaattcacctggaaaacagaagtgtttagacaaatcattctacataaattcagacagtttaattattctgaaaagagctcaataagacacacaaaaaagaaaaacaaagaagatatagacaaccggagaaaagaaagtgcaagctggcagtgaaggtcagaaaagaaatgaaaaagatcttcacagagacctattagaagccgcaaaaagtggattaagtgtgactgagaatatagagatatagagacctcttcagaattccattttttaaagaggaacaaagagataaatgctattagagagaaaaggataaaaaggacaaagatt

SEQ ID NO: 677678 - DNA, 1981 bp, Homo sapiens
  misc_feature 1270, 1271, 1272, 1273, 1274, 1275, 1276, 1277, 1278, 1279,1280, 1281, 1282, 1283, 1284, 1285, 1286, 1287, 1288, 1289,1290, 1291, 1292, 1293, 1294, 1295, 1296, 1297, 1298, 1299,1300, 1301, 1302, 1303, 1304, 1305, 1306, 1307, 1308: n = A,T,C or G
  misc_feature 1309, 1310, 1311, 1312, 1313, 1314, 1315, 1316, 1317, 1318,1319, 1320, 1321, 1322, 1323, 1324, 1325, 1326, 1327, 1328,1329, 1330, 1331, 1332, 1333, 1334, 1335, 1336, 1337, 1338,1339, 1340, 1341, 1342, 1343, 1344, 1345, 1346, 1347: n = A,T,C or G
  misc_feature 1348, 1349, 1350, 1351, 1352, 1353, 1354, 1355, 1356, 1357,1358, 1359, 1360, 1361, 1362, 1363, 1364, 1365, 1366, 1367,1368, 1369: n = A,T,C or G
gccaagctaaagcatctgaatggtttcctttaggcaattgcaagacagtggagcttgctgagaaggggaatgacatgacttagaaagattaatgcccctgcattgtgcaaagtgcaggtaggtgaattacaagatgggcaaccagtgtaagtctactgaaatagatcaggcacaagccaggttggcgagggagggaataaaggagttatatgtgagagatgctgaaaacagaatgtcctggcttagaggctaattggatgggggaacagagagagaaagcagactctatatttttaggcccctatgactagggtcattaatcaaaataatacaaattcaagtggaggaagtatgatgattgcagattttagatgtgttcaatggaaggtaaaatatccaagaaaaatgttcaacaattaaatagtcacatttattcagaactcaccactgagacaacattctaagtcatgtatatatgcatattaactcatgaaattgccatggaagctccatgagacagatacattattccccttttacagatggaagaactgaggcctgcatcgtatagggagtgagtggcagaatcaagacatgaacccagaccacggttctgcattccactttcaagtgtctaagaagaggcttgtgacatgggtctgaggcctaagaaaataatcagagtttgagacagaaattttggagtaataatggcagcctgagaggggataaactgagagctaagggcagaattcaggaacgcatctttggccctcagtttcggtttcagtagcagatttcaatttaataaaagtgactgttggtattctgtgataaatgacctgaaagcagaaatagtgacttccttgagaaataaagacactgattaggttttcctcccattccatgctgttgtcatttttctctttccttttcaaattccccaggatccatattgcaatgatcagagattaattgtctaactgggagaatttccaaaccaatctgagcataaccaggagagagaaaccacacagaaatttgaacagtaaaaggttaatataaagagtattaactaaaaaaggagatttgatttacaaggaactagctagcatgtagtaaaatgaattttaaataaaggaatagcttctctaggagaagccactactcctagagctaagattcggtgtgttagaaaaagcccagctgtggctcattggatggcagggaagacattggtggtgtcttctagttgctgggaaacccgttnnnnnnnnnnnnnnnnnnnnnnnnnnnnnnnnnnnnnnnnnnnnnnnnnnnnnnnnnnnnnnnnnnnnnnnnnnnnnnnnnnnnnnnnnnnnnnnnnnnncagggaagttgatggctgctgtgtactccagagctgagtgtgcagaggctgtgggcatggcaggagctgggtggtgctggagaaagccattcttgctacaagaggctgctgagcaagcacacccagatccaggaggcaaaytctttcctcctacagtgtctcaccagcaccctctactggcaaaacatcagtggaaaattatgtaaaggacccagatccatttccacagagcaggcaaaaaggatgaatttggagctgagagaccattagtccataacctactcaagccggttcacttctctggtaatacttagaaagccattccatttgtttggcagaaggtggtgttggtgttggtgttaacaaagagtcatattaaaaacctcgagctatcccatttccttccaaacctaatagccaagcataatcagactgctataaagcactaagtacaaaactaagaactcagctagagaggggacaacccttgaaacttgatagtctttcatgaaaggagctttgtgtgttcccagcattcattctgttccttaagaataagagttcaagcattaaaacagctgatgtcccaacaagacccataagaaagcattt

SEQ ID NO: 677679 - DNA, 3243 bp, Homo sapiens
  misc_feature 1960, 1961, 1962, 1963, 1964, 1965, 1966, 1967, 1968, 1969,1970, 1971, 1972, 1973, 1974, 1975, 1976, 1977, 1978, 1979,1980, 1981, 1982, 1983, 1984, 1985, 1986, 1987, 1988, 1989,1990, 1991, 1992, 1993, 1994, 1995, 1996, 1997, 1998: n = A,T,C or G
  misc_feature 1999, 2000, 2001, 2002, 2003, 2004, 2005, 2006, 2007, 2008,2009, 2010, 2011, 2012, 2013, 2014, 2015, 2016, 2017, 2018,2019, 2020, 2021, 2022, 2023, 2024, 2025, 2026, 2027, 2028,2029, 2030, 2031, 2032, 2033, 2034, 2035, 2036, 2037: n = A,T,C or G
  misc_feature 2038, 2039, 2040, 2041, 2042, 2043, 2044, 2045, 2046, 2047,2048, 2049, 2050, 2051, 2052, 2053, 2054, 2055, 2056, 2057,2058, 2059, 2137: n = A,T,C or G
ttctggtttcatggttttgtgccttcaaggaaccccaaattcccacccagccaatggaaatggcaagcagttgtactttcaccatttgcaaggcaactatctgaaacatccttctctcctctaattggatctgtttccttctctgtctccaggacttatgtcttaactcataacccctgaacatctgaatggagtgagacactccaagccaagtgtaagttttaacatagcaaacaccatccctcgatttccagagaggagcccctgagtgcccctcctgtttgatgagaagcaggtgcagaataggctgctttaatcagtgctaaacgcacacgtcttactgaaacctgaatgtgctgtgcttcacaataccgtggtttgatggcaaatgcagatgatgaagagaacactacgcactccattaacaagtgtgttgtagctcagtcataactaatgataatgaagcgctgactgaacgctcagtgctaatactcgattgaactggagagcctccagctgtcaatgtgatattctggatgcaataaaaaatagattagattctcaccaggccgtgctagggctccatcctaagaaccctctgttgagacgtatgcaagaatatccctaaaatggcatgaataacatcttggcttgaaatgttaatattgaaaatgtgcctgactgttaattttgataatgttttctgaggtctgaatgttatggggatttcccatttttcctataaaaccattccttggcgactttttgtgattattccgaaaatgattagagaagcagtagagatcagaggtcgagatcaaagttatagaaatcaggattacctggttttcaatcgaagtcctatcattttttttggttgtgtgatcttgggccttagtttccacttttgtaaaattgggaaaacaacagaactttcctcctccagctgttgtgaggatttgacaatgctctgttcctgtaatgacggaaattgccagatgaattgcacctccagagttggagtattctggtctatttaaatatggctttagaaaaataatccagaaacttctgcataggacatttaaatctgggatgagtttgcaaatggtgtcagtgtcccaaatgargttaagtccaggtcaaggcaatcataatacttcaaattcaacaagttctctaggctgcagacaccactatttttttgtgcaagtttacattattaggacttaacacagtacttggcatatagtaggcataaaagaacaataaaaatgacccaacaactggtctccctgcctccagttttgccttcttcctagtcttgttttactgccaatgttttctttctaaatgcaaatctaaacctgtttccagcttgcttaccgcaatcaagaaagaggtgctctttgtttaccaggagcaccagctgtctgaatgatctaagtctagaacctccaggctctacccactggtggagctggtgtcaagggagggccattagccggctcccagtgggaagtggatggcatactcaatgtgggtcacttaagcatcataaatagattatttgccaagatataggaaaggatttagagacaccaataagggataatccagtaccttggctgctcttacctccctaggcctgccggagcaaggagggggcagttactggaacctaggaggcttcctgacaggagctgtggccttcggcagtggaagagaaggaggtgggaaataaaccctaaacctcactttcctcctgtctttggttctcctactggtgactcccattggacaatcctagctggaaaccagaatgccgaggagctgtgaacacaggccagactgtgggttccaggcatcagagcagggtgaggaagggtgatgattgggtttggagggccaaacatagatagcctcaaaggttcacctcacttgaaccccatggaaggannnnnnnnnnnnnnnnnnnnnnnnnnnnnnnnnnnnnnnnnnnnnnnnnnnnnnnnnnnnnnnnnnnnnnnnnnnnnnnnnnnnnnnnnnnnnnnnnnnngcgaggataacaaaaaaccattcagaaaagaaccaacaaaaactttttgcccgagcttgaactggctttcgtatatcngactcggtaccctactgggagaagtactggcatcagcatctcttgatgtgagtccaatgttcttcaactacacagttgcctgatgttcagaacttgtcctgtgactactgatgtcatatcttatgagactccttggaaattgcacctgaaattttatttatgcctggcttttaaatacctataatttaacttctttaatttggaccttccttataaacctcagagtatatttttagttgcttttcacatgtcttccatctcccataggtaatttatactacttagtatttagaagttacctattggatagcatggttcttagatcaatcttagacaattctctgggtggaatctgacatatctggtggtagatttatacttttcccattggatccttgtgtgccctcttctataaagttttcaggtcacaattgatgggctttttttttgaatagatatctaattcactcaatcagtttcaccttatgtagagagaatcaatctgctgagttttctagacattagcaatacataaaaatcctataataaagtatgctatcatctctttttgaaaatgagaaatgaggcatgacaatttctttctaaagcaataatcaagaaagagagccctgcgtttaattcattatgtgagtccacagaaagagcaagggaaaaataaataatttcacccatctgagtcaacttcaagcctaaaattataggttcttgcaactttgacttaattgctatcacaaagaagcacaagttgctgtgatcagatatctcacagaatacaaaagcactaatccttgacatttcagaaagtcatatcattatatttgccccaacctgtactgattttcttttacagtgaatttatatatatatgtatatatacacatatatatacacatacatatatatatatacacatatatatacatatatgtatatatcagaattgaagaaaaagccaaaacttgggatatttaaatgaaagtcctgttaccaaaacacagcctgtaacagatgataagaactcagctcatggcatttcccagtatctacatttacaatgaataatgaatattcttattaacatcagg

SEQ ID NO: 677680 - DNA, 3243 bp, Homo sapiens
  misc_feature 1960, 1961, 1962, 1963, 1964, 1965, 1966, 1967, 1968, 1969,1970, 1971, 1972, 1973, 1974, 1975, 1976, 1977, 1978, 1979,1980, 1981, 1982, 1983, 1984, 1985, 1986, 1987, 1988, 1989,1990, 1991, 1992, 1993, 1994, 1995, 1996, 1997, 1998: n = A,T,C or G
  misc_feature 1999, 2000, 2001, 2002, 2003, 2004, 2005, 2006, 2007, 2008,2009, 2010, 2011, 2012, 2013, 2014, 2015, 2016, 2017, 2018,2019, 2020, 2021, 2022, 2023, 2024, 2025, 2026, 2027, 2028,2029, 2030, 2031, 2032, 2033, 2034, 2035, 2036, 2037: n = A,T,C or G
  misc_feature 2038, 2039, 2040, 2041, 2042, 2043, 2044, 2045, 2046, 2047,2048, 2049, 2050, 2051, 2052, 2053, 2054, 2055, 2056, 2057,2058, 2059, 2137: n = A,T,C or G
ttctggtttcatggttttgtgccttcaaggaaccccaaattcccacccagccaatggaaatggcaagcagttgtactttcaccatttgcaaggcaactatctgaaacatccttctctcctctaattggatctgtttccttctctgtctccaggacttatgtcttaactcataacccctgaacatctgaatggagtgagacactccaagccaagtgtaagttttaacatagcaaacaccatccctcgatttccagagaggagcccctgagtgcccctcctgtttgatgagaagcaggtgcagaataggctgctttaatcagtgctaaacgcacacgtcttactgaaacctgaatgtgctgtgcttcacaataccgtggtttgatggcaaatgcagatgatgaagagaacactacgcactccattaacaagtgtgttgtagctcagtcataactaatgataatgaagcgctgactgaacgctcagtgctaatactcgattgaactggagagcctccagctgtcaatgtgatattctggatgcaataaaaaatagattagattctcaccaggccgtgctagggctccatcctaagaaccctctgttgagacgtatgcaagaatatccctaaaatggcatgaataacatcttggcttgaaatgttaatattgaaaatgtgcctgactgttaattttgataatgttttctgaggtctgaatgttatggggatttcccatttttcctataaaaccattccttggcgactttttgtgattattccgaaaatgattagagaagcagtagagatcagaggtcgagatcaaagttatagaaatcaggattacctggttttcaatcgaagtcctatcattttttttggttgtgtgatcttgggccttagtttccacttttgtaaaattgggaaaacaacagaactttcctcctccagctgttgtgaggatttgacaatgctctgttcctgtaatgacggaaattgccagatgaattgcacctccagagttggagtattctggtctatttaaatatggctttagaaaaataatccagaaacttctgcataggacatttaaatctgggatgagtttgcaaatggtgtcagtgtcccaaatgaagttaagtccaggtcaaggcaatcataatacttcaaattcaacaagttctctaggctgcagacaccactatttttttgtgcaagtttacattattaggacttaacacagtacttggcatatagtaggcataaaagaacaataaaaatgacccaacaactggtctccctgcctccagttttgccttcttcctartcttgttttactgccaatgttttctttctaaatgcaaatctaaacctgtttccagcttgcttaccgcaatcaagaaagaggtgctctttgtttaccaggagcaccagctgtctgaatgatctaagtctagaacctccaggctctacccactggtggagctggtgtcaagggagggccattagccggctcccagtgggaagtggatggcatactcaatgtgggtcacttaagcatcataaatagattatttgccaagatataggaaaggatttagagacaccaataagggataatccagtaccttggctgctcttacctccctaggcctgccggagcaaggagggggcagttactggaacctaggaggcttcctgacaggagctgtggccttcggcagtggaagagaaggaggtgggaaataaaccctaaacctcactttcctcctgtctttggttctcctactggtgactcccattggacaatcctagctggaaaccagaatgccgaggagctgtgaacacaggccagactgtgggttccaggcatcagagcagggtgaggaagggtgatgattgggtttggagggccaaacatagatagcctcaaaggttcacctcacttgaaccccatggaaggannnnnnnnnnnnnnnnnnnnnnnnnnnnnnnnnnnnnnnnnnnnnnnnnnnnnnnnnnnnnnnnnnnnnnnnnnnnnnnnnnnnnnnnnnnnnnnnnnnngcgaggataacaaaaaaccattcagaaaagaaccaacaaaaactttttgcccgagcttgaactggctttcgtatatcngactcggtaccctactgggagaagtactggcatcagcatctcttgatgtgagtccaatgttcttcaactacacagttgcctgatgttcagaacttgtcctgtgactactgatgtcatatcttatgagactccttggaaattgcacctgaaattttatttatgcctggcttttaaatacctataatttaacttctttaatttggaccttccttataaacctcagagtatatttttagttgcttttcacatgtcttccatctcccataggtaatttatactacttagtatttagaagttacctattggatagcatggttcttagatcaatcttagacaattctctgggtggaatctgacatatctggtggtagatttatacttttcccattggatccttgtgtgccctcttctataaagttttcaggtcacaattgatgggctttttttttgaatagatatctaattcactcaatcagtttcaccttatgtagagagaatcaatctgctgagttttctagacattagcaatacataaaaatcctataataaagtatgctatcatctctttttgaaaatgagaaatgaggcatgacaatttctttctaaagcaataatcaagaaagagagccctgcgtttaattcattatgtgagtccacagaaagagcaagggaaaaataaataatttcacccatctgagtcaacttcaagcctaaaattataggttcttgcaactttgacttaattgctatcacaaagaagcacaagttgctgtgatcagatatctcacagaatacaaaagcactaatccttgacatttcagaaagtcatatcattatatttgccccaacctgtactgattttcttttacagtgaatttatatatatatgtatatatacacatatatatacacatacatatatatatatacacatatatatacatatatgtatatatcagaattgaagaaaaagccaaaacttgggatatttaaatgaaagtcctgttaccaaaacacagcctgtaacagatgataagaactcagctcatggcatttcccagtatctacatttacaatgaataatgaatattcttattaacatcagg

SEQ ID NO: 677681 - DNA, 1660 bp, Homo sapiens
  misc_feature 877, 878, 879, 880, 881, 882, 883, 884, 885, 886, 887, 888,889, 890, 891, 892, 893, 894, 895, 896, 897, 898, 899, 900,901, 902, 903, 904, 905, 906, 907, 908, 909, 910, 911, 912,913, 914, 915, 916, 917, 918, 919, 920, 921, 922, 923: n = A,T,C or G
  misc_feature 924, 925, 926, 927, 928, 929, 930, 931, 932, 933, 934, 935,936, 937, 938, 939, 940, 941, 942, 943, 944, 945, 946, 947,948, 949, 950, 951, 952, 953, 954, 955, 956, 957, 958, 959,960, 961, 962, 963, 964, 965, 966, 967, 968, 969, 970: n = A,T,C or G
  misc_feature 971, 972, 973, 974, 975, 976: n = A,T,C or G
ttactttatatgttattataggtctaatgaccttaaatatatcctaagacacaaatcagaatatcaaaataaattcaacaaccaaagtttactaaaataagtcagagattgattggttacaaaaggtaacaaaataaactcatcaataagagctcatgaaataagttraagctcaaatctttgttgagacagacatacctggcagcaacacaaaagaaggacaaataaaatgggggcacaggtggtctaataaacatgtctgttagcccaaagaacccatagaatactaccaagcaagggtcttcaaatgatttttaatctgtgaattccaccaaaatcattctcaatgaatgagaccatcactcagaagctgaaactaaaagattgaatttattacctacttaagtaagggagagccatgctggtcatacgagacttaagtgagcaaagagatcattgagacaaacccctttgagcagatttgctacagagtttgggagaaggggcaagagtgggaaaatgtcagcctcagaagtgccttttgtgctggttgcagacactggagcagattggcatcagcttagaagtgtgctcactggagtaagtacatcaccaattaactgactttcaaagcgtaaggttggcactgattggttggcttttggagatatgctcaatgaagcaagttgttgttgactgatttacagccgtttctggtttttactgcttaccatggctataaaattggcagtatttttttgagagggtggggacttttccttcttggtctctgccagaaccacttgatttagactcacgaaaaattaaagggaaacagcattgtcaactccggtaaatcacggcccatctcatcccnnnnnnnnnnnnnnnnnnnnnnnnnnnnnnnnnnnnnnnnnnnnnnnnnnnnnnnnnnnnnnnnnnnnnnnnnnnnnnnnnnnnnnnnnnnnnnnnnnnncagcattgtcaactccagggtagatcacgcccctcttcatcccggtgctctttgactagccactgtctagcaagaaaatgaatagacttgggttgggcttgctttccacagacccatgcggcttctttatggcttctgcgctctccaggtgactgaggattgactaataaatctttctgctttttgctatggtctcaggaacaactgatgataaaataggtatttttcattttccttttttaaaggaaaagtttctaacttttttggtcctcttaaacttcagctgctcttcttggcttcttcttagttgtggtctgtgcctctgcatttggggccaaatgaatgaatatataagtcaacaaattctgttgatgtaaatatgcccaacttttcaaaacttggacttgctggatgggagacaggatgtatccaggcaaaaatacccaaaaatgcacagctatgttatcaataccaagggagttatagagatattaagtactaaaagaattcagaagtgagagcaacactgagtgattaggcaggcttcacggaggagatgaaacttaatctggctgtaaaataccatttctaatttcaataggccaagaaaaggaagcataaaacatggatgacaaaacattttaagtcaaggtggggatttattttatgtatttaaagataatg

SEQ ID NO: 677682 - DNA, 1660 bp, Homo sapiens
  misc_feature 877, 878, 879, 880, 881, 882, 883, 884, 885, 886, 887, 888,889, 890, 891, 892, 893, 894, 895, 896, 897, 898, 899, 900,901, 902, 903, 904, 905, 906, 907, 908, 909, 910, 911, 912,913, 914, 915, 916, 917, 918, 919, 920, 921, 922, 923: n = A,T,C or G
  misc_feature 924, 925, 926, 927, 928, 929, 930, 931, 932, 933, 934, 935,936, 937, 938, 939, 940, 941, 942, 943, 944, 945, 946, 947,948, 949, 950, 951, 952, 953, 954, 955, 956, 957, 958, 959,960, 961, 962, 963, 964, 965, 966, 967, 968, 969, 970: n = A,T,C or G
  misc_feature 971, 972, 973, 974, 975, 976: n = A,T,C or G
ttactttatatgttattataggtctaatgaccttaaatatatcctaagacacaaatcagaatatcaaaataaattcaacaaccaaagtttactaaaataagtcagagattgattggttacaaaaggtaacaaaataaactcatcaataagagctcatgaaataagttgaagctcaaatctttgttgagacagacatacctggcagcaacacaaaagaaggacaaataaaatgggggcacaggtggtctaataaacatgtctgttagcccaaagaacccatagaatactaccaagcaagggtcttcaaatgatttttaatctgtgaattccaccaaaatcattctcaatgaatgagaccatcactcagaagctgaaactaaaagattgaatttattacctacttaagtaagggagagccatgctggtcatacgagacttaagtgagcaaagagatcattgagacaaacccctttgagcagatttgctacagagtttgggagaaggggcaagagtgggaaaatgtcagcctcagaagygccttttgtgctggttgcagacactggagcagattggcatcagcttagaagtgtgctcactggagtaagtacatcaccaattaactgactttcaaagcgtaaggttggcactgattggttggcttttggagatatgctcaatgaagcaagttgttgttgactgatttacagccgtttctggtttttactgcttaccatggctataaaattggcagtatttttttgagagggtggggacttttccttcttggtctctgccagaaccacttgatttagactcacgaaaaattaaagggaaacagcattgtcaactccggtaaatcacggcccatctcatcccnnnnnnnnnnnnnnnnnnnnnnnnnnnnnnnnnnnnnnnnnnnnnnnnnnnnnnnnnnnnnnnnnnnnnnnnnnnnnnnnnnnnnnnnnnnnnnnnnnnncagcattgtcaactccagggtagatcacgcccctcttcatcccggtgctctttgactagccactgtctagcaagaaaatgaatagacttgggttgggcttgctttccacagacccatgcggcttctttatggcttctgcgctctccaggtgactgaggattgactaataaatctttctgctttttgctatggtctcaggaacaactgatgataaaataggtatttttcattttccttttttaaaggaaaagtttctaacttttttggtcctcttaaacttcagctgctcttcttggcttcttcttagttgtggtctgtgcctctgcatttggggccaaatgaatgaatatataagtcaacaaattctgttgatgtaaatatgcccaacttttcaaaacttggacttgctggatgggagacaggatgtatccaggcaaaaatacccaaaaatgcacagctatgttatcaataccaagggagttatagagatattaagtactaaaagaattcagaagtgagagcaacactgagtgattaggcaggcttcacggaggagatgaaacttaatctggctgtaaaataccatttctaatttcaataggccaagaaaaggaagcataaaacatggatgacaaaacattttaagtcaaggtggggatttattttatgtatttaaagataatg

SEQ ID NO: 677683 - DNA, 1093 bp, Homo sapiens
accctggggcctataagaccataaatgtgtattcttctcttctaagtgaacatgaactgtttctgatctctttatggataagatggaaaagaagcattcatttgttcaatggccacataccatgttcctgaggccatgttaatctgttctagtaaaagtattatattttgttagtactgagtttatgatagtccattgatttacagtagtctactgttttccttcagagttcatctagattttaaatgagccatactggaaaaataaatgggaatatgaggggttccactacccatgtatccttttgttttatagctttatgtccttaggataaaatattgtatgatttcccattcctctggctgggatgagagcctctttacatgctactaagcagggcttctggcttttatgctcagtatttaattgctgattaaacactccctgctttttatagctttttccaaaacattaatcatgcttaacaccagccacmcaatttcactcttcttatagttattattatccattccctgccccctcacatccacagatttcccaaatacttgatagattgccccttgcatggtagctagatatcaaagcggtctcccagcaaaacacatatctcagtattcacacccttgtgtagtccttttccctggaatctggattggtcccatgacttgcttttgaccaataaaatacaatgggagtgttgctacatagctttagatgtaaggctataagaagctttttatcttctgcctgggtgtctcagaatacttgctcttagatcattctctgatcctggatttcacgtcacaagaagcccaaaccacaagcagagaccacattccctcagaaaccacttcaaagccccaactgagctcccagccaacagagcgtatcaactgccagccaggtgagtgagccaccttaaacatctagcccaactgaactgtcagatgtttgcagttgcaatcaacaccagagagcgacagtatgggagctcctaaattataactgtccagctaagcccaggtaaccaaacaaccctgttttaaaacataaaatttggggtagtttgtta

SEQ ID NO: 677684 - DNA, 1120 bp, Homo sapiens
ctaaatctactcttaatacattcagacacataagatactaatttcatcttcctgagtaaacattccctggagacttccaacctctttcaatctggacagattgtccttactgctcaattgtcctttcaagagctgtctttaccattacccagtggattctattttccctcaatcctgtatgaatcttctgtttcctaatcttgtgttcattttggtggagtacatctttgattaattttctgagaaaaagggcgggtaggtacatattttgagaccttgaatgtctaaaaatatttttaacctaacctcatatttgattcatagtttgagagggcaaataatttacaggttatttaaatattttttcaaatatttatggcatttttcctttgtgttcaattcctataaatgctcatatatttttgtctcattcttactcctaaggagtaacactttgggttccgacagaaaatctggagtgattactgcaatctcttatctttggtgaactataacttttgtctcttgtgaccacatgaaactgctaaaaactctgcacagcttctcagcctctcagctacttatctgtacttaggttttcaacttttagctaccattttcttttttttttttttttaattacactttaagttctgggatacatgtacagaatgtgcaggtttgttacataggtatacatgtgccatggtggtttgctgcacccataaacccgtcatctacattaagtatttatcctaatgttatycctcccttagcccctcaccctctgacaggccccagtgtgtgattttcctctccctatgtacatatgttctcattgttcaactcccacttatgagtgagaacaggtagtgtttggttttctgttcttgtgttagtttgctgagaatgatggtttccagcttcatccatgtccctgcaaaggacatgaaatcatccttttttatggttgcatagtattccatggcatatgtgtgccacattttctttatccatctaacattgatgggcatttggattggttccaagtgtttgctattgtgaatagtactgcaataaacatgcatgtgcatgtgtctttatagtagaatgatttata

SEQ ID NO: 677685 - DNA, 1155 bp, Homo sapiens
tgtcttgaggacacattgacaacatgctctgatgactgccagagagaagtgtacgcaggtggtaagaccacaggggaagggacaacagggtctatgtgggattagttatggctttgcaaaagatagagtgatgggcctccctctctcaggggcatgattcatgactcccagttttgtttttgatggtcaaaatgttttacaatgggattatctcactaatcctcctaacctgctgggactgcaggaaaaacacaggtgctatattactctgcctgatagatagccaaatgggaatcctacaacataaagcaggagttcccctaaagactactctagtgcctaacaagatctcaaggtaggggtataatccagtctatggcaacaattggattactcagctctgctgagccagagagaggacctgatttgaaatcatactattattattattactatttttggagatggagtcttgctctgttgcccaggctggaatgcagcggcacaatctcggctaactgcaacctccatctcctgggttgaagtgattcttcctggctcagcctcctgagtcactgggactacaggcacccaccaccatgcccagctaagttttgtatgaaatcatattacttatggcatttacacattgatattttgggattrgctatctacattattatcatcgatgtggctagtaaaacaaacaattataacaaccttatactttgtctttgtatagtgttttaaaaacttctcacttgatagcagcatagaagtctgagtttagaaagaaaatgcatcctattctttcatcaagccttaagtggcctgaattcaaagtttttagagaaatcaatgaaatattattgaagtgccaagtccaggttaaagacagagtttttatgtaggatgtacaattatttaatattaggtctaagagattcacatttttttcttacaatatgctattacaaaaagtaagaaagcagtgatttttaccctttaccttacccaaactgtccataattcagttgtttctttgcaaagctgtactttgccattagatacctggatatttccaaaaagagcatttgtgtatcaaaaattacagaggaaactacttcagttccccaccttagtttaggtctatca

SEQ ID NO: 677686 - DNA, 1155 bp, Homo sapiens
tgtcttgaggacacattgacaacatgctctgatgactgccagagagaagtgtacgcaggtggtaagaccacaggggaagggacaacagggtctatgtgggattagttatggctttgcaaaagatagagtgatgggcctccctctctcaggggcatgattcatgactcccagttttgtttttgatggtcaaaatgttttacaatgggattatctcactaatcctcctaacctgctgggactgcaggaaaaacacaggtgctatattactctgcctgatagatagccaaatgggaatcctacaacataaagcaggagttcccctaaagactactctagtgcctaacaagatctcaaggtaggggtataatccagtctatggcaacaattggattactcagctctgctgagccagagagaggacctgatttgaaatcatactattattattattactatttttggagatggagtcttgctctgttgcccaggctggaatgcagcggcacaatctcggctaactgcaacctccatctcctgggttgaagtgattcttcctggctcagcctcctgagtcactgggactacaggcacccaccaccatgcccagctaagttttgtatgaaatcatattacttatggcatttacacattgatattttgggattagctatctacattattatcatcgatgtggctagtaaaacaaacaattataacaaccttatactttgtctttgtatagtgttttaaaaacttctcacttgatagcagcatagaagtctgagtttagaaagaaaatgcatcctattctttcatcaagscttaagtggcctgaattcaaagtttttagagaaatcaatgaaatattattgaagtgccaagtccaggttaaagacagagtttttatgtaggatgtacaattatttaatattaggtctaagagattcacatttttttcttacaatatgctattacaaaaagtaagaaagcagtgatttttaccctttaccttacccaaactgtccataattcagttgtttctttgcaaagctgtactttgccattagatacctggatatttccaaaaagagcatttgtgtatcaaaaattacagaggaaactacttcagttccccaccttagtttaggtctatca

SEQ ID NO: 677687 - DNA, 614 bp, Homo sapiens
gcattttgttaccttcttttgacatttcttcattttaatcttcagaagcatcaaaatgtgaaattggtcttttatgacatctgaaggtcttgcctagccttaattttttaggaggcctagtcccaagaaaagagtattgtttcataagccactgatgtgttcagggtctagattttatttaacgtcttcaaaccacatcaagaaattacttaataagctgtgtctaccaccgcagagtgactttgaagagtttgaggcagttgcctgagttattatagtcctaaaagctgttcatctcaaatatgcaggtagtagacacaaggatgacttcacctttatctgggtaattgtatcaattgccctgtaaatcacagtaaatcaatgtattatataggtgtgtatgtataacactataaaatatataacatggcctggctcagtggctcacacctgtaatcctagtactttgggagyctgaggcgggaaatcacttgaggtcaggagttcgagaccagcctggccaacatggtgaaaccccatctctactaaaaatacaaaaaaattagctgggcgtggtggcggatgcctgtaatcccatctactcaagaggctga

SEQ ID NO: 677688 - DNA, 658 bp, Homo sapiens
gtgatgtgtcacagtttctacatctaggtccctgtgatggtccttggtgctgttcaccagctatttccaggcatttcctgtttgccttgtgttggggaggccatgtgactttctctggctgaattttaagtggaagcacatgttcctaggccagaccatttaactcctgacataatacctctggagctttctttgccatttctggggtaaccaggaatcttgcagactatggctgctccatcagcttaagtgttggagttaagatgatctggaacataaaagagaaataaacttttgttgtattaagcatctgagatcctttttttccccataacatagcctactccatcttgaccagtagagaatgtactacatttcttttaattttttaaaaaacatttttattttgtggatacatagtaggtgtacgtatttagggggtacatgcgatattttggcacaggcatgcaatgtgaaataatggtattatggaaaatgggtatccatcccctcaagcatttatcctttgtgttacaaacaatccarttatacacttttagttgttttaaaatgtgcaataacattattattgttattatagtctctctgttgtgctatcaaatagtaggccttatttattcattctagctattttttt

SEQ ID NO: 677689 - DNA, 658 bp, Homo sapiens
gtgatgtgtcacagtttctacatctaggtccctgtgatggtccttggtgctgttcaccagctatttccaggcatttcctgtttgccttgtgttggggaggccatgtgactttctctggctgaattttaagtggaagcacatgttcctaggccagaccatttaactcctgacataatacctctggagctttctttgccatttctggggtaaccaggaatcttgcagactatggctgctccatcagcttaagtgttggagttaagatgatctggaacataaaagagaaataaacttttgttgtattaagcatctgagatcctttttttccccataacatagcctactccatcttgaccagtagagaatgtactacatttcttttaattttttaaaaaacatttttattttgtggatacatagtaggtgtacgtatttagggggtacatgcgatattttggcacaggcatgcaatgtgaaataatggtattatggaaaatgggtatccatcccctcaagcatttatcctttgtgttacaaacaatccaattatacactttkagttgttttaaaatgtgcaataacattattattgttattatagtctctctgttgtgctatcaaatagtaggccttatttattcattctagctattttttt

SEQ ID NO: 677690 - DNA, 664 bp, Homo sapiens
tttttttttttttttgtcttttctagggattctgcaatggactaacagagtggccatggtagcaggaatggaagctttgtatggacccaatgggctcccttcttcaaggattgtgtagctagtgccaccaataaaggccaatcaaccaccagcagtgatcaacacagagcccgcartatgacaccgtccttggaaagaccaccaagatactttgtggcatattcattattttagatcttttccactctggagagggtaatgatttacctttgaagtgactattcctggtgtggatttatccacagtgccttcaaccatctgagggcttatagaatgtctagtctattggcatcagatcctatacaacactgcctcagaccaacatgcataatttatggcaaaggagatgacaaatggactcaatcataggcttcactgattttatcacgtacaccatcatcctgaaatttctagatctccccactacttcttaatttggatgaagaattaccctataggacaggggtcagcaaactgtgacctgtgccttgaatccagtctgctgcttgttttggtagataaagtttgattggaacacagtcatgcccatttatttatgtattgtatatatttgctttcacagtataatgtcagaattgagaag

SEQ ID NO: 677691 - DNA, 739 bp, Homo sapiens
agttgccaaaatcctaaacaaaatactagcaaactgaatctagtaatatataaaaaagataatgcattaggaccaaattgggtttattccagaaaagcaaggtaagtttaaagattggtttggaattaatgtaattagccaccttaagatattaattttaaaaatcaaataatcatatcaatgaataaagaaaaagcttatgataaaatgcaatatcacttgtgattttttaaaaaatcttttaacaaatgagtagtaagaaaggaactacctaattcagaaagagtatatagaacactgttcagcagataccatgcttaattgtaaaatgttatatttccctttgaaatcagaagcaagaaagtaactgttatgactactgttatttcaaattgtactgaagatcgtagtcagtgcactaagtcagaaaaagaaagttttaacagttgaaaacaaatctcccaccattgtgggtgttataatctttatctctaaaataaaaagatacatagaaaatttccagaattaacttgagactctggcaagtgtctagatacacaatttaatacagaatcatttatagtcctataaatcagcatccaagataaatttttaaaaaataaaccrgaataacaaaacacacatagcacctataatgagaaaggaattaagctttattgaaaaattttaaagatgataataaatatagacatactatgatcatggagtgaatgactca

SEQ ID NO: 677692 - DNA, 739 bp, Homo sapiens
agttgccaaaatcctaaacaaaatactagcaaactgaatctagtaatatataaaaaagataatgcattaggaccaaattgggtttattccagaaaagcaaggtaagtttaaagattggtttggaattaatgtaattagccaccttaagatattaattttaaaaatcaaataatcatatcaatgaataaagaaaaagcttatgataaaatgcaatatcacttgtgattttttaaaaaatcttttaacaaatgagtagtaagaaaggaactacctaattcagaaagagtatatagaacactgttcagcagataccatgcttaattgtaaaatgttatatttccctttgaaatcagaagcaagaaagtaactgttatgactactgttatttcaaattgtactgaagatcgtagtcagtgcactaagtcagaaaaagaaagttttaacagttgaaaacaaatctcccaccattgtgggtgttataatctttatctctaaaataaaaagatacatagaaaatttccagaattaacttgagactctggcaagtgtctagatacacaatttaatacagaatcatttatagtcctataaatcagcatccaagataaatttttaaaaaataaaccagaataacaaaacacacatagcacctataatgagaaasgaattaagctttattgaaaaattttaaagatgataataaatatagacatactatgatcatggagtgaatgactca

SEQ ID NO: 677693 - DNA, 619 bp, Homo sapiens
ttttgtatttttagtagagacagggtttcaccatgttggccagggtggtctggaactcctgacctcaagtgatccgcctgcctcagcctcccaaagtgctgggattataagtgtaagccaccgtgccttgcctagttctgttgttattgttctattttcttaactttagtacttaacacattmgtttcagcctttctgtttttccaacataaagatttaaggctacaaatttctccttgtgtactatgtttactatattccacaaatttccatagattacaaatttcaaataatattcaatattttattacaattcaattttaaggattttctgatttcttatggtatcttctttgaccaatttaaaagtgttttacattttcaattattttttatataccctttaattatgttgtagacatacaatgtggtgtgtatgttactggctcttttgtatttgagacttttttttctctttttttttgagacagagtctcactctgtcgcccaggctggagtgcagtggcatgctgatggcccactgcagcctcaacctcctgggctcaagcgatcctcccacctcagtctcccaagcagctggaactacaggcatgtgcca

SEQ ID NO: 677694 - DNA, 525 bp, Homo sapiens
cctgaagggaagtgtttctcctcagcctgaaggctggcagaacctgccccatctctgttaacaaaggcatcgacagatgattcattgctgaacttatcccccttcctcttgccactgccccaagcaaaccccttctcctgttccacacgagtacctccttgggatttcctcaggtcctataatgaacccctgttctcctggtcccccaagatcccaacacaccgcatcccacatcaaaacagtcatggagtccttcacaagggcatcccctcctaggaccctaatttctcattgctaccatcactgtccgaggccagggccttcagacaacccccagacctcaaatggcctcttgtctcctgaagacyctctccaattcatcacatatgctcccccgaccacataccacaccaactccctttgagtgaggttttgaaccctttactgcttctggaaactttcaggacatcgctttgccagcaggataaggccagcccccagagccccctccagccctgggcccac

SEQ ID NO: 677695 - DNA, 525 bp, Homo sapiens
cctgaagggaagtgtttctcctcagcctgaaggctggcagaacctgccccatctctgttaacaaaggcatcgacagatgattcattgctgaacttatcccccttcctcttgccactgccccaagcaaaccccttctcctgttccacacgagtacctccttgggatttcctcaggtcctataatgaacccctgttctcctggtcccccaagatcccaacacaccgcatcccacatcaaaacagtcatggagtccttcacaagggcatcccctcctaggaccctaatttctcattgctaccatcactgtccgaggccagggccttcagacaacccccagacctcaaatggcctcttgtctcctgaagaccctctccaattcatcacatatgctcccccgaccacataccacaccaactccctttgagtgaggttttgaacsctttactgcttctggaaactttcaggacatcgctttgccagcaggataaggccagcccccagagccccctccagccctgggcccac

SEQ ID NO: 677696 - DNA, 578 bp, Homo sapiens
ccacgcctggctaatttttgtatttttagtagagaaggggtttcaccattttggccaggctggtctcaaactcctggcctccgcccaccttggcctctcaaagttctgggattacaggtgtgagccaccttgcctggcagaagacgtactttagatagaagagaaattgaaaagatcgtaagagtctggscatggtgcctcacgcctataattccagcactttgggaacccaaggcagaaggactgcttgagcccaggagtttgagaccagcctgggcaacagcacaagactctgtctctacagataattataaaaattagctggacatggtggtgtttgttttttttttttaatttatagcaagttaggaataaaaagagtaaatatgttcagctgggtgcgggtggctcatgcctgtattcccagcactttgggaggccaaggtgggaggatcacttgagcccaggagtttgggatgagaccagcctgggcaacatagggagaccctgtctctacaaaataaaaaaattagccaggcatggtggtcccagttacttcgggggttgaactgggagga

SEQ ID NO: 677697 - DNA, 578 bp, Homo sapiens
ccacgcctggctaatttttgtatttttagtagagaaggggtttcaccattttggccaggctggtctcaaactcctggcctccgcccaccttggcctctcaaagttctgggattacaggtgtgagccaccttgcctggcagaagacgtactttagatagaagagaaattgaaaagatcgtaagagtctgggcatggtgcctcacgcctataattccagcactttgggaacccaaggcagaaggactgcttgagcccaggagtttgagaccagcctgggcaacagcacaagactctgtctctacagataattataaaaattagctggacatggtggtgtttgttttttttttttaatttatagcaagttaggaataaaaagagtaaatatgttcagctgggtgcgggtggctcatgcctgtattcccagcactttgggaggccaaggtgggaggatcacttgagcccaggagtttgggatgagaccagcctgggcaacatagggagaccctgtctctacaaaataaaaaaattagccaggcayggtggtcccagttacttcgggggttgaactgggagga

SEQ ID NO: 677698 - DNA, 575 bp, Homo sapiens
cacgttccttcctgggcaccatggtgcctggtaaggcacattccacactagtccatatcacagtcagccatactgcaaacagcaccrggcctggccccaggcaaaggctgcaagaatggttcgaaggccattttctttcttttttttttttttttgagacagagtctcactctgtggcccaggctggagtgcagtggtgcgatctcagctcactgcaagctctgcctcctgggttcacgccattctcctacttcagcctcctgagtagctgggactacaggcgcctgccaccacacccggctaatttttgtatttttagtagagacagggtttcaccgtgttagccaggatggtctcgatctcctgacctcgtaatccacctgcctcggcctcccaaagtgctgggattacaagcgtgagccactgcgcccggcctcaagggccatttacaaatcccaactcacaggtcccaccattcctgaccaagccaagaatttcctcctcagtgttgaatgaaacaccaccaccacatttagttctgaacgtcattttggtaccagtaccactttgcattt

SEQ ID NO: 677699 - DNA, 575 bp, Homo sapiens
cacgttccttcctgggcaccatggtgcctggtaaggcacattccacactagtccatatcacagtcagccatactgcaaacagcaccgggcctggccccaggcaaaggctgcaagaatggttcgaaggccattttctttcttttttttttttttttgagacagagtctcactctgtggcccaggctggagtgcagtggtgcgatctcagctcactgcaagctctgcctcctgggttcacgccattctcctacttcagcctcctgagtagctgggactacaggcgcctgccaccacrcccggctaatttttgtatttttagtagagacagggtttcaccgtgttagccaggatggtctcgatctcctgacctcgtaatccacctgcctcggcctcccaaagtgctgggattacaagcgtgagccactgcgcccggcctcaagggccatttacaaatcccaactcacaggtcccaccattcctgaccaagccaagaatttcctcctcagtgttgaatgaaacaccaccaccacatttagttctgaacgtcattttggtaccagtaccactttgcattt

SEQ ID NO: 677700 - DNA, 616 bp, Homo sapiens
ttttagattcctttatattttcaaaaagaaataaagctatacaatagaattaatattcagagaatatttaactatcactcaaaatatgtagataatagccaggcgtggtggctcacacctgttaataccaccacttttggaggctgagttgggcagatcacctgaggtcaggagttatacaccagcctggccaacatagcgaaaccctttctccagtaaaaatacaaaaatcagctggtcgtgttggcaygcgcctgtaatcccagctactgtggaggctgcagcagaagagtcacttgagcctgggagatggaggttgcagtgagctgagatcatgccactgcactccagcctgggtgacagagtgagactctgcctcaattaaaaaaaatgtagataatagtgtaatttagtaagaaaagtactgaactgaaaatcaagaaatctgactctggatctttgctagccctgagaatttagtctaggcacaaaatgactatgactaaatttttagtacctttgaaaggaagtccgtggaccaaatgagctctggagtcctttcagctgtaaaattatatgaaggtataatgataaatgagttcaggcgaataaatga

SEQ ID NO: 677701 - DNA, 616 bp, Homo sapiens
ttttagattcctttatattttcaaaaagaaataaagctatacaatagaattaatattcagagaatatttaactatcactcaaaatatgtagataatagccaggcgtggtggctcacacctgttaataccaccacttttggaggctgagttgggcagatcacctgaggtcaggagttatacaccagcctggccaacatagcgaaaccctttctccagtaaaaatacaaaaatcagctggtcgtgttggcacgcgcctgtaatcccagctactgtggaggctgcagcagaagagtcacttgagcctgggagatggaggttgcagtgagctgagatcaygccactgcactccagcctgggtgacagagtgagactctgcctcaattaaaaaaaatgtagataatagtgtaatttagtaagaaaagtactgaactgaaaatcaagaaatctgactctggatctttgctagccctgagaatttagtctaggcacaaaatgactatgactaaatttttagtacctttgaaaggaagtccgtggaccaaatgagctctggagtcctttcagctgtaaaattatatgaaggtataatgataaatgagttcaggcgaataaatga

SEQ ID NO: 677702 - DNA, 616 bp, Homo sapiens
ttttagattcctttatattttcaaaaagaaataaagctatacaatagaattaatattcagagaatatttaactatcactcaaaatatgtagataatagccaggcgtggtggctcacacctgttaataccaccacttttggaggctgagttgggcagatcacctgaggtcaggagttatacaccagcctggccaacatagcgaaaccctttctccagtaaaaatacaaaaatcagctggtcgtgttggcacgcgcctgtaatcccagctactgtggaggctgcagcagaagagtcacttgagcctgggagatggaggttgcagtgagctgagatcatgccactgcactccagcctgggtgacagagtgagactctgcctcarttaaaaaaaatgtagataatagtgtaatttagtaagaaaagtactgaactgaaaatcaagaaatctgactctggatctttgctagccctgagaatttagtctaggcacaaaatgactatgactaaatttttagtacctttgaaaggaagtccgtggaccaaatgagctctggagtcctttcagctgtaaaattatatgaaggtataatgataaatgagttcaggcgaataaatga

SEQ ID NO: 677703 - DNA, 1827 bp, Homo sapiens
aaatacaaaaattagccaggcgtggtggcacatgcttgtaatcccagctgctcaggaggctgagacaggagaatctcttgaacctgggaggacgttgcagtgacccaagatcgaaccactgcattccagcctgggtgacagagatgagactccgtctaaaaaaaaaaaaaaaaaatcatatgttgaaatcctaacccctaatgtagtggtatcagaaggtggggacactgagaggtaattaagtcatgagggttaaacctcatgaatgggattagtacacatatgaaagggactccagagagctctyacacccttcttctaccatttgaagatataaggagaagatgacagtctacaactgagaagacagccctcgtcagaacctgtctatgctcataccctgatcttggacttccatcctccagaactgtaagaaataagttcctgttgtttataagccacccaatctgtggtacttttttatagaagcccaaactaactaagataccttataatacaaatgactgagaattcacaatatattcttgactggagaagtgaacagtgattcttctactttttaaaactcggccaggtgcagtggctcacacctgtaatcccagcactttgggaggccaaggcaggcagatcacctgaggtcgggagtttgagaccagcctggccaacatggtgaaaccctgtctctactaaaaatacaaaaattagccgggcatggtggtgggtgcctgtaatcccagctacccagaaggctgaggcaggagaatcgctggaacccgggaggcagaggctgcagtgagccaagatcgtgccactgcactctcgcctgagtgacagcaaggctatctcaaaaataaacaaataaataaataaaagcccactggtgacatggctctgtggccctagatttctccaaaagaaagaaagagtgagatagagagagcaggagagaaaaaaagggggagaaatgtgagaggagggaagaaaatgaagaggagaggtttttcaaaaagaaagaaaggaaagacaaataaataaaagaaaccccatagctccatgtctaacatgaagaatggtgggataataaaggaagtaatgttgatgaatataaagtgatcaagtaagcactattttttgaagatgagacaaaacaggatttagaattctatttccagcaacatggcagactaatccctccgggcataactaaaatgctgtataaaatatttaaaatgtcattggaatgcatggcttggctggcaggaaaatatatggatggataggaggccagagatgaaaagtgtgaatctagaaagataagcaagcagtagagaaggcattgaagagccctcaagtggcctgtagctcatattttactgggctacatccagtacaagttggggctctagcaaagaaacaggtcggattaaagagctttggcataaaactggttcctccaaatatatacattctcagagtgtaggggaaaattattccacacactgcagagggtaatgtttggcatttatgcttctgttgacgttggctttggatttgagtgaagtaaaaaaataaaaaaaaattatactgtcccattaaggatttctaaacacaagccttatttgtgtgagtttgatgtcagaattttcgttgtctgcatgactccaaaaaaaaaaacacacatactaaaaaacaatgttttctttaagtggtccagccgtcacatccacatgctatgaagttgtacacaccaattctggccagaacttagtcacatgaccatgcttagctatgaaggatgctggaaaa

SEQ ID NO: 677704 - DNA, 628 bp, Homo sapiens
gtacatgttgtactatcaggttgtattcctgagaagaaagaccttccatttactaggcttcaatgggaaccaaattttctacttagagctgacaattggacaaattttccatgtttgctactgactctgtgtgtttccctccatcacttactcatttacaatgttgggctctaaaagacacgttcatagtgcaagaaaattcttccccatatcttcatggcacaatgctgggtcaattaacacaacaggcaataggagtatttctagaaaccattcccatatgaggatacctagcctaattatcattctaaataaacattcactgcgtacttccagaaagtgactgggaaccacataaacacatcctgttaacctcaaactacctgcattcccaattcaacttcctctaacttggattcccaacactmatggccattccaatgccatcctatatgagagaaggagtagtaaaagggaagttggaatggaaagagactgtgatcttaaacaatatgttttcactgtgatcttaaactatatgtcatacttttgcaaattttacagaaacatatgactttgcaaatggatggccctaaaatttaaccatcattcattccatgataaaact

SEQ ID NO: 677705 - DNA, 3189 bp, Homo sapiens
ttaataaatttgctaattgaacgagtaggtaaatgaactattaattttttgttaaatttactaagattcttcaaaacattatgattgaattaaatagagatgtgattgttaaaaaaggttgaccctggaaatattcataaaatgattttgtgcttcattatggccttaaaatgcctcagtatttacttctttttttttttctttttttgtattttaggagagatggggtttcaccgtgttagccaggatagtctcgatctcctgacctcatgatccactcgccttggccttctgaaatgctgggattacaggcgtgagccaccgcgcccagcctttacttctattttaagtgtgtagtttttcttttcatgatttttatattggcatataaatactagaaaaacatttcctgaaaacaaaaatattgacaattaaatacaagattaggtctcattatcaactcagaatttcagctaatgtgaatatgaacaaagttttcctgtgtgtttttaaaggaaaaaatgatatctgcgtctgtgtagtagaatggttaacagaacaggcttttgatttgacagtctagatatgaaatactggaaatattaattatttatttgatcactttattttttcacatataaaatgcaaatattgctcagaaaataatcgtaagaatctgtaaaataacattgatgattataactggaacataatgcttcttgtattaaacttattgtaagtttattattgagcttactgtaaataagccataagtagtagatattattatcaagttaatgaagaatgcaaacactattgcaagagaaagttttaagaaaatgaaatgtgttcaaataatacatttgctgattttaatttactaaaattaacatattacaagctcattcatatttcaaaagtcctcaatttgactgttatattattatgaggggttggcaaacaacagcccacaggccaaatctggcccaccatctggttttatatggcctgccaactaaaaataggttttacctttttaaatggttgaaaagatcaaaaaaagaatattttgtaacatgtgaaaattatacaaaattcaaatgtcagtgtacataaatgaagttttattggaatacagtcatgcttattcatttacatataatctatggctgtttttgcactacagctgcagaattgagtagttataacaaagactgtatgtcctaaaatatttggtatctgactctttacagaaaaattttgccaacacttgttattattagggcttcgtaacatgtctatcacagattttgatccttactggaatctctctttccttaatcctgcatttttgtgtgttgacctgttctgacattagaacatatccttgctctactaattttagacaaataaagttgcctaaatcctttgctgtttttcattagtcacctaagtgatctcctggttcctaggcctcctctaccacacaactaaccccagtctgcctgggtgtctggtcttaagtcttagataaggtaatctgagagcgcttctcatggattgcccaaccacttcacttaagtgtgtaagtgaaaattgcactataaatcaaattattacagagcaaatcatagcctccctgaggaaactgctataatataaatgagctttgtttttctgaacaagaatctagcatggagggaagtaatgatccagtacaaaaacatagtaaatttgtgtgaacggttaaaagtatcaaaaacatatgtcacattataagctttcagaactggaaatatctttggaaatgattcaattatgatttttagatgacaaaactgagggccatatgccttctttcccaaggtcagatagttagtgggtatcatagactgcaccaaatctcacatcttctattcccagcccaggccactagcttctttaacaacatggtaatgagtgtattctcttattatagaaaaattatgtattatgtaaggagcatagaagatacgaaatgctattatattttattggaagtttaatgggtccmaaattaatcttaacttaaaagtcattaattaaaattaatttatttttctttgcctaccttcgagaaatgtcgaattctgttctaagctgtgtttgtgaaggtgggattggagagggttagccaggagtggggaaattgatttaaatagctgaatagaatcagatttattccaccaaaattttaatttatgccattttataggatttttttctaagtttccctgtctgaggcagagactttcacagatatattaccaaattctctttcaaaaataaaacataaatgaccaaagacttttgcaatttagttttatgaatgagtagtctctacaatcaattcttcttgtttgcattttatctattctctgataacagccagaaatatcaagagagtgtaatttaattttgcatttttaagtacaaaagaaacacaaagggaaatgtcatgaatgtatatggaagaggaaaagattgtggacatagtcatatttttgcttatatttgttgttgtaagaattatttatggttaactgtatataataacacagttatacatattttaaaatagtccagcattaaaaccatcactccttcctcttctattttttttttttagagacagtgtctcactctgtcacccaggcagtggtgtgatcatagctcactgtggcctcaaatacctgggctcaaatgattcttctgccttggcctcccaagtagtgggaactgcaggcatgcactatcatacctggacatatttttaaaaattttttgtagacactgggtcttatccaggctggtctttaactcctgccctcagtcaattctcctaccttgacctcccaaagtgctgggattacaggtgtgagacacatgcctggcctccctcttttttaaccttggcaagttcccagagtaaccaaggaatgaccatgggaaaagtgatgattattggaaacagtaattagacaaatgtaaaatgaggaaaatgtaggaagagtgaggtgcagtgtgttggctacctgtagcagagagtaagttttcttggtaatgaattattattttcaaagtattaatttttcaccaagatgaacatttaatttcatagctgatttaagttctggggccttccattca

SEQ ID NO: 677706 - DNA, 1767 bp, Homo sapiens
tcatctgttggtttgcctccacgtttttaagctaacttgctctcatgtaaaaatggcaagatagagaatcatccccaaaaccagctaactktgtacaaatatattgattctagacactttggggtcaaagtaaatgaagtttaagtaagaggcagggtggtggaggaagaaaagacatactttagcaaaccacattgtggaatttggtgtaaagatgtattgttttatttagttaagcacagtccagacaagtgagactgataaaggaaaaaaaattctggacaaaaaaatagaattcaattcaacactcattttttggagaaatgagcttttgtcttccttgaggaatgaatggatggttagtgaagttcaaggaaacccaacaattgtacctgattcatattctaagtcttttcttgatgaatttagcaggaactggataaaagttgattataatttaaattcccactgctattttggaaactaatcagaggaaagaaggccaaaatattctttcaagacttgtaaagaaaaaaaaaacgagagagacttggctaaactgagtcctccaggcagatgtttctattggcaaccagtgaggcaaaggaaaaaatgtttattgaagaaaatattcataggtggaagctttgagctctgaagaactcactacggtctaatcacaccagatgtagggtttctggaaaaaataactgcctttattcttctttaatcaatttcattttattaatttattcatatatttaatacatattctccccatatttttagtcacatcacacaaagatttacatttgggaattttccctctctatagcaatattcctgtgctccagctccagcactctgaaatatgatctgttgctcagtttgtactggaacttagtatttactgtgattggataggtaccctggcttaccatcacttcaccttatcactgaataaattaatcttaagagaggggcacaatatgacttcttttaagttcacagagtcagtaaaagttcaaactgaagtaagccctggatgttatgttgctgtagtaaagctcagacaagatgccttgtcaccaacactgtgcaacagttgtctctttgatttaaaacacaaccaccaatgcattttcacaaatataaggtaaacttagctggtctacagatttcagaacccaagcccttttatcatttgtgttaaacaaatacttcctcagcattacagataattattatcttcttcttaactacctcgtatagacaggctttttaaagttattttcttgtttgaattctgccattcaaaagcacttaatataagctgacaaccaagtctctgatgctctatataataaaatatctgcaagaaaacttaaaattgcaattttaaagcataaatgttatcaagagtttcagagtaatttttgaagctttatttctagccatctattattgctgttttacttgctgacttgagatgaatctgagttttgtggtctaaattgagaactgggaaatgacaggtaaagtaacaaatatttcaaacttttcattttctttttagaaggtccctggagtaatagcccttagtgactctcatgttctggctcagtagttctcaaattggcagttaccaatcagctccaactttatgggtgttagatctgtgcaatctcatagggcttcacatatataacagccccacacttgttttaatgttcctctatagccttattaaaattctaaatttttatc

SEQ ID NO: 677707 - DNA, 561 bp, Homo sapiens
tgccagaactaactcacccaaactgaacaatcgatcacaaaatgtgccttcaggtctcaaggttcttgctaaatcttactcaaccgacattttcyagcatgggaacatttttctgaatgtcttagggagaggaagtccgcaagagaacaaaaggtcctcaggccaccctagcttcttttcctccattccacaggctgtcttttgtctgggtatgcactggaccagggggctctacttcttcctacctgggcatgggtctccacacaactccaaggtaaagggccacaggcaagataaaggggagaaaagaaagctacgatttcctgggccaccaatcgcaaatggcagccagtctctgaagtaacccttgaccagagatccaaggaaccaagaaatgtaggtgatctgaacagaggggatggtggttaaacaccatgaaggaaagacccattctcaaagaaaaggaagcaaaaagaaaccgtggggagctgggtaccacccgcagcaaagaccccgcacgcgttactgacgccagcctggcctgggagagcagtgagtgtg

SEQ ID NO: 677708 - DNA, 610 bp, Homo sapiens
caaaaattagccaggcgtgctggcacatgtctgtaatcccagctactcaggaagttgaggcaggagaatcgcttgaacccgggaggcggaggttgcagtgagtcgagatcgtgccactgcactccagcctgggtgacggggcaagactctgtctcaaaaaaacaaacaaacaaacaaaaactaaaaaagattaagacaaaaacttcccaggaggagttttgtgcaggataaatgtgggtcatttccccctcccaaatgacttggcaacayggtcataggcaggttggggatggggtgcagtcactgggctactcccctaagacagagcagccaaaactcaggtgcagtggctcacacctgtaatcccagcaatttgggaggccgaggcaggcggatcacttgaggtcagaagttcgaggccagcctgaccaacatggtgaaaccccgtctctactaaaaatacaaaaattagccaggtgtggaggtgcacgcctgtaatcccagctacttgggtggctgaggcaggagaatctcttgaacccaggaggtggaggttgcagcaagctgagatcgtgccactgcacttcagcctgggtgacagagtgagact

SEQ ID NO: 677709 - DNA, 1119 bp, Homo sapiens
cccccacatttccaaccccagcatgaaattctctgctgactgctaaactcacatttccaacagtcctgtggatattctgacatatatgttccttggrtatcttaaactcaatatatccaaaattgaagtcattagttttacaacttctgaactagaagaccagatagacgctctcatccagatctctcaggacaatactgtttgcttaatatcacccctgcccttacccctgttgctcttctctcagttactgggttcctcagtcttctggttatctaggatagatcctcagcactgctggccatcctcccaccctactcacactaccacaatcaatcgctcaattacattgggttttcactccaaactatcccctgaaatctgtcccctccctttcatttccacttactttgtctaactcagccctttattacttctcactcaaggttccgtgacctatattctttctcctactgacacaaaaattttttcactacaaaaagatcagatcacagtcacacaactgacatcatcacaaaattcagagctgagaaggaccttcacagtttaattattttataaatgaaactgaggcccatgtgactgccttactcaaaaacttttggtggttttccactatctatggaaataaaagccagtccccttatgatagcactcaatactgctcatgatttagctccatcttatcttcccagtcttaactactagcacacctgaaaatcctatactgcaaaaggctattcgtcattccctggacattctggcctctgtgctgctttttctgtgcctttgtatatagtgttccctccatgcaggtggccttccctcagcctccactctgcaaaaaaaaaaaagcctactctcatccaaggcccaggtaaatactttaccttccatgaagcaagaatggctcccattcaactttgcaagctaagttggctgccagtccccatattgccacagctctctgtttaaaccagatgttctcaatgatgggcaatttccaccctgccccacacatctggtaatgtctggagacacttttgattgtcacaactggaagggggagggttgttactgacatctggtataggcaag

SEQ ID NO: 677710 - DNA, 629 bp, Homo sapiens
ggttcaagcgattctcctgcctcagcctcccgagtagctgggattacaggtgtgtgccaccacgccyggataatttttgtatttttagtagggacagggtttcaccacattggtcaggctggtctcgaactccccacctcaggtgatccgcccgcctcggcctcccaaagtgctgggattacaggtgtgagccaccacgtgcccagcctagtttatttttcttttcttttttttttttgagatggagtcttgctctgtgccctagctggagtgtggcagtgtgatcttggctcactgcaacctccgcctccgaggttcaagcagttctctgcctcagcatcctcagtagctgggattacaggcacccgccactatgcccagctactttttttgcatttttagtagagacaggatttcaccatcttggccaagcttgtcttgaactcctgaccttgtgatccacctgcctcggcctcccaaaatgctgggattacaggcgtgagccaccgcgcctggcctagtttatttttctatgtatgcctatagacagatgcccaggctgtgtccccacccccaccatggtgtggttctaggcatgccctgggaggaccagaatctaagacgtctga

SEQ ID NO: 677711 - DNA, 1183 bp, Homo sapiens
tgcatgtgtgcctagtggggaagggtgggaggttctgtgcatgggagattcttctaattgcacaatgtgtttcatgcgtyttcctcctcctatgttaggatgatgtccacagccactcaaaacctgggcctggccacaatggaaggtagcatttaccactcacaaggcattttgccattttcccgggttaaggatgctacctttctgtgcagtgaaggatggcctaggcctggtctttcacagttgaattaagacattgggtttgcatattgaactttttgcaagaaacaagtggacttcgggataagtttcattttctagatgcttttgattaaaaagaaaccaaaactaacaaaaaagaatatggtgtgaggcttagcattgtgaaatgagaatcaagagatgtgagtttgattctcaattctgctgcaaagctgggagattctggccctcaggattagtatcttgaatgtaccatttcttcacctgtacttaaaaggtgaaatattggacccaaaggctatacaaactccaaattctaatttcaggctttttggaaattataggaaagatgtgtgtatgatgatgatggctcccagagcttaggctggcttggagacgcaggggaatcaccccagtggaaaacaagaatccacacgctattgggcttatccttgcccaggagttcatttctctgtccctctctgacccaagcttctccctccagcctgctgtcagaagttgggatgagctggaaggaccatgaggcagagcagtccttgagcaaagtgacccttttgccactttgaaactatctattgagctcccattctgtttcatgatgattctaggtgcttgtccattagggaacaaacaaagatgcttccttccgtggagagacataaaattaacaagaaatgtcaaatcatacctcacatagtgaagtagctggtaactgctatgggaaaatgtagaaaaatgaaatggagtaaggcaaattggcattcagggtgtcagggcaggctgcccatcaacagatcctcagggtagccaccatgagaatgggacttctggtcaaggatttgatagacacgttggctgagccatgagattatctgcaggaagtgtgttctagcagagctcatggccactgccaaggtcctgaggccgagcctgcctggga

SEQ ID NO: 677712 - DNA, 1183 bp, Homo sapiens
tgcatgtgtgcctagtggggaagggtgggaggttctgtgcatgggagattcttctaattgcacaatgtgtttcatgcgtcttcctcctcctatgttaggatgatgtccacagccactcaaaacctgggcctggccacaatggaaggtagcatttaccactcacaaggcattttgccattttcccgggttaaggatgctacctttctgtgcagtgaaggatggcctaggcctggtctttcacagttgaattaagacattgggtytgcatattgaactttttgcaagaaacaagtggacttcgggataagtttcattttctagatgcttttgattaaaaagaaaccaaaactaacaaaaaagaatatggtgtgaggcttagcattgtgaaatgagaatcaagagatgtgagtttgattctcaattctgctgcaaagctgggagattctggccctcaggattagtatcttgaatgtaccatttcttcacctgtacttaaaaggtgaaatattggacccaaaggctatacaaactccaaattctaatttcaggctttttggaaattataggaaagatgtgtgtatgatgatgatggctcccagagcttaggctggcttggagacgcaggggaatcaccccagtggaaaacaagaatccacacgctattgggcttatccttgcccaggagttcatttctctgtccctctctgacccaagcttctccctccagcctgctgtcagaagttgggatgagctggaaggaccatgaggcagagcagtccttgagcaaagtgacccttttgccactttgaaactatctattgagctcccattctgtttcatgatgattctaggtgcttgtccattagggaacaaacaaagatgcttccttccgtggagagacataaaattaacaagaaatgtcaaatcatacctcacatagtgaagtagctggtaactgctatgggaaaatgtagaaaaatgaaatggagtaaggcaaattggcattcagggtgtcagggcaggctgcccatcaacagatcctcagggtagccaccatgagaatgggacttctggtcaaggatttgatagacacgttggctgagccatgagattatctgcaggaagtgtgttctagcagagctcatggccactgccaaggtcctgaggccgagcctgcctggga

SEQ ID NO: 677713 - DNA, 649 bp, Homo sapiens
cagagaggggcgtatccacatctgggagaaccaattaactccctgttagcaaccatccaccatccacctccccttcttcaaacagtaaaatccatacacctggcccctgcccaggagtaaacgattgagctaaatgttaaaaacctggcttacacatgctgtggtggggaatcccagcccccacagcaaccactaaccatccgcaggcaggcctggcccaggggactccagcccctaccctcgagagaaggccctgmgctcagcaccctgggtctgcagccagcctcagagttctagaacaccaagagagaaggatgtgagcggctgtcgcactaccatcccaaaacttggctggagtggacctcgtcccagctagaggtatccacccgcactgtagggctttccaagaggggcagggccacgggggagccagacagcctttaccagtatcctggcggctactctgaggtcttcctggtcaccaagacctatcatgacctgccagcccaggaagcagcctggcctggcgtgggctgaaagccagggaggcaggggtaggtgtggccaatcccaactctgcttaagcactagggacttgactgagaagccccaggggcccgcctgtcctcggctctaggagcagcaaaca

SEQ ID NO: 677714 - DNA, 646 bp, Homo sapiens
ggccccggggagaggagcccacagaagaaggtctaggactcacctccacggctcggggaggtggagggtcgaggaggccaggaggtggcaggctcagcggagacgttaaaggcactagacagggaggggaagacaggactagccccttccagattcacactggctgcctggcagagaactggccagagggagccaggacagctgcccaggccaggcaggaagttttggagacaccagcaagattctgtacttgatcatcagtaaccaaaactaagcagtcttgttcaagtcattacatgctcccattaaagctgcgaaagtgttcttgtccatcatcacaattcatacatttgacacatatggcatatttaaaaatcagcaaatcttgcatgtttatctgactttcaatcacctgcttccaattaagctgaccaacgacattggctcaatctcctcacagaacattctggaaacctttatgtgatgccactgtcacaggtttaccaggacaggcactcaaaagcttytcccacgtagaatttcatcagctactcgggcctgtcatagaactgtagcatcacatcaagatgcaaatcgcttagaaagaatctggttcctccagcaagttctaggaggatggcatttg

SEQ ID NO: 677715 - DNA, 574 bp, Homo sapiens
agccagaacccagccactgtcagctttggaatggcccagtggcttcagggaactgcacccctagcacatgctcctctgtgctgaaggagtgtccccttgttcctgtactttcaagaccttgctctacggaggggcagggagaggacaaaccccctatgcctacaggagcctggccaccaatattcagtgtgagccctgggtctgtgcacctgagctcctgagggtgggtatgggggcttgggtgtacgtactgaaataaaatggcagcgctgagtaattgtgggcttctcggtaagcgatcaggttgatttcatgttgccgctgctgggcctgaaggcggtgcttggctcggcggtggtggcaaacacagcagcagctcaggatgatgatgatggtccacaccagccagaaccctggggggtgggcaaggcaagacagagaggcacacagtgagtaccagccagaggggcagcttgcggaacagggaggtccctgkacggtgcccacgtggttgaagctggcatggctgggcctcacccagttaatttacattgaagccatgtgatcaatttcc

SEQ ID NO: 677716 - DNA, 634 bp, Homo sapiens
tgaatacatattaactgagggttagctagcacacccgtaagtacttagaagttaataaaaatatacacaatcctggatcttaaagggattagcacttagtgagctaatagagacatttacactcaatgctgtaaacaaatttttattttcttccacatccctttaattcactttttaaaaaagcaaatacaaaattgatttctaaatcctttcagtgaagcataattgatatgaaaggcattattttggggctcaaatggaagttctatacatcacctataccaactactagttttggtcttgggcaaattagttactatagaattaatataaatcgttaattaaaccatgtacataaaattgttggcacatagcagatactccataaatatgttcattwtcctctaatgataattagaggaatactaaataagatccaacaccctatgcaagttatttcccataataaacttccattctcgaggtggaagagaagaaattaatttccaaaattctctctatagaacatgtagatagtaagtcaattcaacactccctttataatatttcttcacacataaatttttttcccttagactgaaggtaaatgtcatctactaatctctttgaattg

SEQ ID NO: 677717 - DNA, 771 bp, Homo sapiens
tcacctacctgctaaatttcagtgctctcttagaagctctagtcaatgtgtggttacctactcttccttgattcttccttgtgccttcatttgcgtttgtatcttccagactcctgacaaagcacattgttcttggatcttagattgatatttctgtttccttacagataaaagtgaaagctaattttaacaaacatatgggtatgctaattatgtgaatttaattaattgtaatgaagaatctctagcaaaatgaaatacagtttttatatattaatgcatagsaatataagcatttattaatgttatttgactttactggttcttatcttcaattttgcaaggcatagaatttgtgaaatggtacttgtgatcttcagatgtctttggtatattttttaagggactactaacaagagaaaataagtcatattggttttgcttccccaaaattaatttgatcttctgttttaccttacagaaaaatacactattttatttatgtgataattcagtttatccctcataaattatgtgacaactcaatatatatatatatataatatatctctctctctatatatatataatatatctctggctcaccagagatctgaaattgcccactcaaacagaaaccaccatgtactggcccaggaaaagagcaactacatcttgcttctctcaaccttttggcctcaatttcattcttccttacttttggtcttcttctgatattaagaatgctcatttatttgttttcagtatggt

SEQ ID NO: 677718 - DNA, 617 bp, Homo sapiens
agtagggaaagtcactctgtagtaacccaaaattgaaaaggggcagaaatcatctctaatccatcacaaaaggacactgaaaaatgtttcctacaaagtttgaaggaatctaaaagtgtaaaagagagccaaataaaagaagaataaagtagataaccactatctatagataaaataaatggctctttaaatatttttgagaataagtccttgtgaaaatattttaatgaggttttagcagataattcttctgaaacattcctagcattaaattttgcccagtaaatgtcctatggagaattaaaatataattatacataaaataaaagtataaataatgtttcacaacacaattctgttttgtttgatgatatatttgatttatgtatacttaaaattatattcaaatttaaaaatttyaatatctatatttcatatatcatcccataatatatacaaatcaaattatatcatattccacttataagctcttaattatatgtaatctacttaaatttcaatagatgtatgcttctttattaaaattttttctcacaaacctctttatttaaaaaatatttacctaaatgcattttgtttcatttattacagaactc

SEQ ID NO: 677719 - DNA, 684 bp, Homo sapiens
tagcctgctatagtcatctttgagtccatgtttttcttttatcatagggagtattctgtatgctttgtcctagcagttggttatttactagtttttattgatctaatctataaaatggccctttaaaatgtttcttttgtctactttgttccttctcatttccattgttaccattcaagtccaagactttattacctcttaactaaatattccagtagcctaaatgttttcatctatagcttctttgtcaccatcatccattctgaatattgttgctacatcagtgccattttcttgcatgaaaagtttccagtggttcctcccagcaaacagaatcaagtccatattctttagcttggcattcagtgtaataatccaagatttagttacaactttgttttaactcatctatkatgaaaaccttcctctgtagcaaaaccggttgtcttattgttccattgaacaagctttgctcattcttggctctatacgagtaattctcaaccttaactgaacatcgtaatttcctttaaaacttaaaaatacacagaatctctgagtcttagtcctggacatcaatgtttttctttttttttttaaagctccacaatgaatgtaatgaagagtcaaggctgggaaccccttctctgttccttggtggtgttccttcttacctgaaatacc

SEQ ID NO: 677720 - DNA, 590 bp, Homo sapiens
catcagtaggttttaaaagccgaaagggttctaggaagcagcaagggctgagaacccctgttttggcagagttctagcaagcattagtattcccagaaagaagaaaagattgcttacttccaaccccaggcagcagcttatactctcagcaattccatctcaaccctgtggtcactgatcgtgaatttagaggtaaatgaaaagtaagcttcttgtattgaagaaggattggagtctgattttatgacatggaaattgggactaaattgatcccaattatgttgtttttaagacattttatttatyggaaataatctgagtaataaaactctagtgagaggccaatatccatgcttacaatgtgtgattggagataaagagtcctatttctccagattcatccattgatatcccgtcatacactttaagtgattactgtgtgtgtgtatattgcttgtacaaaaataaatgtagttcttaaaattgaagttttttgggggaaagtatacattttaactaggggtggtcatatttttaatatttctaaaatggctccgtagaattaagttacagagtagatttttagtagg

SEQ ID NO: 677721 - DNA, 590 bp, Homo sapiens
catcagtaggttttaaaagccgaaagggttctaggaagcagcaagggctgagaacccctgttttggcagagttctagcaagcattagtattcccagaaagaagaaaagattgcttacttccaaccccaggcagcagcttatactctcagcaattccatctcaaccctgtggtcactgatcgtgaatttagaggtaaatgaaaagtaagcttcttgtattgaagaaggattggagtctgattttatgacatggaaattgggactaaattgatcccaattatgttgtttttaagacattttatttattggaaataatctgagtaataaaactctagtgagaggccaatatccatgcttacaatgtgtgattggagataaagagtcctatttctccagattcatccattgatatcccgtcatacactttaagtgattactgtgtgtgtgtrtattgcttgtacaaaaataaatgtagttcttaaaattgaagttttttgggggaaagtatacattttaactaggggtggtcatatttttaatatttctaaaatggctccgtagaattaagttacagagtagatttttagtagg

SEQ ID NO: 677722 - DNA, 2361 bp, Homo sapiens
agaagattatggctccttgggggagatctgggccttaaaggacaagtagtctttagtccttgcacagaaaggttcttgaggtaaaggaggcaacagttgatgtttcagagaaagcatcatcaataaacacacacacacacaagtgctagctgtattaagggaatactaaatcacttactttatctggagttcagattccttcacactatatttagagcaacagtgggataagattggaaaggtatattgggggcttattcaagaggaacttagaatatggaactgggtatttgtaattcaaaggacattgttaatgtagagatgttcacattagtttaccagagctatcactattctagggaatatacgctaaccaaatgcccccaatctctcttcacatataattttgtcatctataatggatatatatcatttaattatatggctgtaccaacatatatgtaatcattcacctgtcgttgaacctataggttgtttctaatattctgctttgcaataatattataacactcttcttttgctaatttttttgcattgcttctataggctagaatcttagatattaaactgataggataagatataaaataatttaagattgctgatatatgttttaaaattaattatttgctcaagcatttgtgacaatttacagttctaattgaggttttaaatttagtagtttstaggtattttaagttttgcccctgaattctttataggtgctgataagcctttggtaagttttactccatgaaagactattactgaaaaaaacgtaatctcaataaaagaactttaataagcttgactaaatatttagaaagcacattgtgttcagtgaaactttgtatataatgaatagaataataaaagattatgttggatgactagtctgtaattgcctcaaggaaagcatacaatgaataagttattttggtacttcctcaaaatagccaacacaatagggaaatggagaaaatgtactctgaacaccatgaaaagggaacctgaaaatctaatgtgtaaacttggagaaatgacattagaaaacgaaagcaacaaaagagaacactctccaaaataatctgagatgcatgaaaggcaaacattcactagagctggaatttccctaagtctatgcagggataagtagcatatttgaccttcaccatgattatcaagcacttctttggaactgtgttggtgctgctggcctctaccactatcttctctctagatttgaaactgattatcttccagcaaagacaagtgaatcaagaaagtttaaaactcttgaataagttgcaaaccttgtcaattcagcagtgtctaccacacaggaaaaactttctgcttcctcagaagtctttgagtcctcagcagtaccaaaaaggacacactctggccattctccatgagatgcttcagcagatcttcagcctcttcagggcaaatatttctctggatggttgggaggaaaaccacacggagaaattcctcattcaacttcatcaacagctagaatacctagaagcactcatgggactggaagcagagaagctaagtggtactttgggtagtgataaccttagattacaagttaaaatgtacttccgaaggatccatgattacctggaaaaccaggactacagcacctgtgcctgggccattgtccaagtagaaatcagccgatgtctgttctttgtgttcagtctcacagaaaaactgagcaaacaaggaagacccttgaacgacatgaagcaagagcttactacagagtttagaagcccgaggtaggtggagggactagaggacttctccagacatgattcttcatagagtggtaatacaatttatagtacaatcacattgctttgattttgtgtatatatatatttatctgtgttttaagattgtgcatattgaccacaattgtttttattttgtaatgtggctttatatattctatccattttaaattgtttgtatgtcaaaataaattcattaatatggttgattcttcaaatgggtgtattttcatacaggctggctgggtagatacaataaaatatgccactaatgtaaaaatactttccttaacatagaactccattgcaatgatttgcttatttgccagaaattgctagagacaatgagaaatattgggaataatttgcattttaagatttgaaaatattattacacagtgaatatttacattacaggagacacaatagaaatatggtgaaaggacatgaacagtttgcagagaaaaaaaactacattaaaagaggttcaatctcactcatgataatagaaatacaaattaaatagcat

SEQ ID NO: 677723 - DNA, 2361 bp, Homo sapiens
agaagattatggctccttgggggagatctgggccttaaaggacaagtagtctttagtccttgcacagaaaggttcttgaggtaaaggaggcaacagttgatgtttcagagaaagcatcatcaataaacacacacacacacaagtgctagctgtattaagggaatactaaatcacttactttatctggagttcagattccttcacactatatttagagcaacagtgggataagattggaaaggtatattgggggcttattcaagaggaacttagaatatggaactgggtatttgtaattcaaaggacattgttaatgtagagatgttcacattagtttaccagagctatcactattctagggaatatacgctaaccaaatgcccccaatctctcttcacatataattttgtcatctataatggatatatatcatttaattatatggctgtaccaacatatatgtaatcattcacctgtcgttgaacctataggttgtttctaatattctgctttgcaataatattataacactcttcttttgctaatttttttgcattgcttctataggctagaatcttagatattaaactgataggataagatataaaataatttaagattgctgatatatgttttaaaattaattatttgctcaagcatttgtgacaatttacagttctaattgaggttttaaatttagtagtttgtaggtattttaagttttgcccctgaattctttataggtgctgataagcctttggtaagttttactccatgaaagactattactgaaaaaaacgtaatctcaataaaagaactttaataagcttgactaaatatttagaaagcacattgtgttcagtgaaactttgtatataatgaatagaataataaaagattatgttggatgactagtctgtaattgcctcaaggaaagcatacaatgaataagttattttggtacttcctcaaaatagccaacacaatagggaaatggagaaaatgtactctgaacaccatgaaaagggaacctgaaaatctaatgtgtaaacttggagaaatgacattagaaaacgaaagcaacaaaagagaacactctccaaaataatctgagatgcatgaaaggcaaacattcactagagctggaatttccctaagtctatgcagggataagtagcatatttgaccttcaccatgattatcaagcacttctttggaactgtgttggtgctgctggcctctaccactatcttctctctagatttgaaactgattatcttccagcaaagacaagtgaatcaagaaagtttaaaactcttgaataagttgcaaaccttgtcaattcagcagtgtctaccacacaggaaaaactttctgcttcctcagaagtctttgagtcctcagyagtaccaaaaaggacacactctggccattctccatgagatgcttcagcagatcttcagcctcttcagggcaaatatttctctggatggttgggaggaaaaccacacggagaaattcctcattcaacttcatcaacagctagaatacctagaagcactcatgggactggaagcagagaagctaagtggtactttgggtagtgataaccttagattacaagttaaaatgtacttccgaaggatccatgattacctggaaaaccaggactacagcacctgtgcctgggccattgtccaagtagaaatcagccgatgtctgttctttgtgttcagtctcacagaaaaactgagcaaacaaggaagacccttgaacgacatgaagcaagagcttactacagagtttagaagcccgaggtaggtggagggactagaggacttctccagacatgattcttcatagagtggtaatacaatttatagtacaatcacattgctttgattttgtgtatatatatatttatctgtgttttaagattgtgcatattgaccacaattgtttttattttgtaatgtggctttatatattctatccattttaaattgtttgtatgtcaaaataaattcattaatatggttgattcttcaaatgggtgtattttcatacaggctggctgggtagatacaataaaatatgccactaatgtaaaaatactttccttaacatagaactccattgcaatgatttgcttatttgccagaaattgctagagacaatgagaaatattgggaataatttgcattttaagatttgaaaatattattacacagtgaatatttacattacaggagacacaatagaaatatggtgaaaggacatgaacagtttgcagagaaaaaaaactacattaaaagaggttcaatctcactcatgataatagaaatacaaattaaatagcat

SEQ ID NO: 677724 - DNA, 641 bp, Homo sapiens
tatacccagcccacagtatattgcctgctaaatagtatttgctcaataaatatttgtacattaatgaatgggataatgcatgaaaaatggtgaaatgcaggtggaaaatggagaacttacataatatcttcaatttatccttactttgagcctcacacaacattatttaggaatatttaactttttctaaccaaggacatatgtgatacaagcaaaytgcattgcatcctgtagtcacaaaatgagcaacaccaacaaaaatcaaaaatattttgggaataaactgaaagaataagcttacttattcggctgactctttgcagatgcatttcatagttctctttgaattatagcccaatttaaaggagacattagctttctgcaatgtctgcaaaattgtctttctgccataaaacattaaaacatcccacattttcctgggggaaatattatttctcaatttattattgcaataacagagaccatagctatgagtgataatctcagaatggggaataaaattactgatactttttctaaatttcctgtgatgataaatgccttgccagtagagtggttttatcccctttcaacagaagcatcaactcgttgcactgcttatctttgtcagaaatattcaa

SEQ ID NO: 677725 - DNA, 600 bp, Homo sapiens
ctgagagctgcaattgaacaaaattaatcacaatatacaactaaaatcttctggaagttgaaagcctttaatagttctaaatatttacatcaaacagattcttccactgtaatttttatgtaggtgagtagatggattcctggtgcttcctactctaccatcttctcataatcctttctctggatatcattctttatgatgacacttatttagtgatttascttttcaagtcaccaaagtcctgtatctctcatgtagttttcataggtaagaaagagaaactaacaacaatattaacgaaaacactaaaaagaataataatagaaaactcttcaccaagagcttattgtgttctaggcattgtgatacacactttacataatagagatgctctttgacttatgatggacttatgtcctgataaatccactgtaaagttgaaaaattgtaagtcaaaacatggtatgtcagagaccaactgtactgaaaacaacctataagatgaatagcaccaggagactcattttacacatgaaaaagtgagaagtagagaaaataaaggaatatcacaaggacatagagctagcaaatggtggacca

SEQ ID NO: 677726 - DNA, 600 bp, Homo sapiens
ctgagagctgcaattgaacaaaattaatcacaatatacaactaaaatcttctggaagttgaaagcctttaatagttctaaatatttacatcaaacagattcttccactgtaatttttatgtaggtgagtagatggattcctggtgcttcctactctaccatcttctcataatcctttctctggatatcattctttatgatgacacttatttagtgatttagcttttcaagtcaccaaagtcctgtatctctcatgtagttttcataggtaagaaagagaaactaacaacaatattaacgaaaacactaaaaagaataataatagaaaactcttcaccaagagcttattgtgttctaggcattgtgatacacactttacataatagagatgctctttgacttatgatggacttatgtcctgataaatccactgtaaagttgaaaaattgtaagtcaaaacatggtawgtcagagaccaactgtactgaaaacaacctataagatgaatagcaccaggagactcattttacacatgaaaaagtgagaagtagagaaaataaaggaatatcacaaggacatagagctagcaaatggtggacca

SEQ ID NO: 677727 - DNA, 664 bp, Homo sapiens
ctgtgagataaagtcaactacacagatgcccaggaaagcaataatagtctggatctaaaaaggcaaaacatgaattagagtatgacatatctactttgttgaggagcaggctgaaaacatgagaataaagcagaaacaagataaatattgagatatgaaggtatttcataataggctataaatttatatgtttttgtttgtacatttttgatgaatttgcagttttagagcttttgaaattgagatataaattttttatcttttagccatagtaatttcttatatattattacgatgattttatactttcattaatccatgcatcataaataatttaatacctattcaaatcattttgcttattctataaagcagaactgctgtttactgctgattccmaagatagacttatggtcagtgagtacatgagccattgaagttatatggcaggatttattcatggagctgctgtggttatcatctcctctttggtataattacaattactgatatgggtagtggaatgcttctgcatgtcttagcagcccttgactttgcacaaggatagagaaacctgatattgggagccaacaatgtccccattaggacacactgttttttctcattaagccatggggaacctgtgaagttgatcacttcacct

SEQ ID NO: 677728 - DNA, 585 bp, Homo sapiens
  misc_feature 463, 464, 465, 466, 467, 468, 469, 470, 471, 472, 473, 474,475, 476, 477, 478, 479, 480, 481, 482, 483, 484, 485, 486,487, 488, 489, 490, 491, 492, 493, 494, 495, 496, 497, 498,499, 500, 501, 502, 503, 504, 505, 506, 507, 508, 509: n = A,T,C or G
  misc_feature 510, 511, 512, 513, 514, 515, 516, 517, 518, 519, 520, 521,522, 523, 524, 525, 526, 527, 528, 529, 530, 531, 532, 533,534, 535, 536, 537, 538, 539, 540, 541, 542, 543, 544, 545,546, 547, 548, 549, 550, 551, 552, 553, 554, 555, 556: n = A,T,C or G
  misc_feature 557, 558, 559, 560, 561, 562: n = A,T,C or G
tgaggacctggtatagaccccctgctctgttctgaccctgtcttcatgctagactctcagagtccaagctcwcttgtcttgaagcaattgattattcccagcatttgcctttacagcccctatcagtcctctgactgacagggttcacaaaggtgaacaaaatacaagatccctaaactcacagagcttataggatagactggagacagaagtaatagaatattcataatactaaatgtacatttgttaccgttatgagtgtgttaaaggagagaagcacagcattaacggatttcacataggctggggggtcagggaagactcacaatcgatctggatgcaggtttagctttaaacatgtcagttgggtgcatgttagtgtcttacactaacataaaaagcctgctgctaccagctcttgtctttctttgggagctgagcaatgcaaatcatgcagaaaggnnnnnnnnnnnnnnnnnnnnnnnnnnnnnnnnnnnnnnnnnnnnnnnnnnnnnnnnnnnnnnnnnnnnnnnnnnnnnnnnnnnnnnnnnnnnnnnnnnnntgtgtgtgtgtgtgtgtttgtgt

SEQ ID NO: 677729 - DNA, 621 bp, Homo sapiens
taaaatcaagtgtccatttactcaatactagattgtaacatccgtggctgcactcaaagggtggcatatttttatgtgggagctctccactagtcaatggcacagacccaccactgacctggctccattgtccagtcccactcttagaggagaaaggctctggccaagactgttccagaaggataataccttttttttggtctctttcccagatataagaaacctggtgacatttctgcctccaaatttttgtgtaatttaagaacagtttcctcctctgagcttaggttctctgatctaaaatatgagaggtgagagtctttaaagcatcatccactactagtatcttataattctatttcagcataaacatctttaattcccaatcttttctcatgaagacaccatcatgacctcttattcttatttatatcttttggactccaaatacttcattttagagatctagtgctctgaagggtcaaaggggcaccttgtgaaaagccatatttgtctctttacattcaccatgacttatactaaattataataagtgtgaaatgtctccacggacagatacaaaataattttgtatcttctggccagggtscggtggctcaa

SEQ ID NO: 677730 - DNA, 654 bp, Homo sapiens
gtgggagtaatgcaaactcatagacattttcatctctccatgcgagggggcaaagcagcatcaataccacaaaggcaatccttacaagagctacaaatgctggattttgaaagaacatggaagatagtggtggtatgggtgtgtggcacatatggaaatagtatcaaataatccaatataaagaaatccaagggaatttggrcagagcaccaatattgtctactacaccaggattccttcatctttccctcctgccttttttttttttttgagatagactcttgctttgtcacccaggctagagtacagtggcgtgatctcagctaaatgcagcctctgcctcccaggttgaagcaattctcctgcctcagcctcccgagtagctgggattacaggagtgcgccaccatactcagtaatttttgtatttttagtatagatggggtttcatcatgttggccaggctggtcttgaactcctgatctcaagtgatctgcccaccttggcatcccaaagtgctaggattacaggcgtgagcctggccgggcccctcctgccacttctaatctgtaggcctttgtccccatgctcatcaccttgtggtcagaagttagctgctctgcattcagcatcctatctatggctcaggcaggaa

SEQ ID NO: 677731 - DNA, 654 bp, Homo sapiens
gtgggagtaatgcaaactcatagacattttcatctctccatgcgagggggcaaagcagcatcaataccacaaaggcaatccttacaagagctacaaatgctggattttgaaagaacatggaagatagtggtggtatgggtgtgtggcacatatggaaatagtatcaaataatccaatataaagaaatccaagggaatttggacagagcaccaatattgtctactacaccaggattccttcatctttccctcctgccttttttttttttttgagatagactcttgctttgtcacccaggctagagtacagtggcgtgatctcagctaaatgcagcctctgcctcccaggttgaagcaattctcctgcctcagcctcccgagtagctgggattacaggagtgcgccaccatactcagtaatttttgtatttttagtatagatggggtttcatcatgttggccaggctggtcttgaactcctgatctcaagtgatctgcccaccttggcatcccaaagtgctaggattacaggcgtgagcctggccgggcccctcctgccacttctaatstgtaggcctttgtccccatgctcatcaccttgtggtcagaagttagctgctctgcattcagcatcctatctatggctcaggcaggaa

SEQ ID NO: 677732 - DNA, 1433 bp, Homo sapiens
gcctaagaaatcttctttttaaataagaatgaagaaatatgactcatgaaaaaaaagagcagaactcatccaatcgttttcagtctgtgtagtctctgaatggaactattttgagtttggattttctcacttgtaacactgtgatcacattaccttcctgatagggttttgtggatttaaattaaataagacagcaactagaagctgctggcacagggaaaaccctcaataaatagtataattgattgtgactcacattaattgagcatctgctttgtgggagctgcctgtcatctcatttagtgtctctgcagcattagctgattaattcatctcactggaaatctggttgcagaaactccctgatgtcacagacacaaacgtaaaaaccaatcaataatttaaatttttacctttcgacaagctcttttgatggcactgacaccttcctttttcacgtgtctccagacacttacattttctgaaattaactcacattgccttatatacaacataaataaaactgcaaaaaatcaatccatcctatatttcaaaggtgattccataaataacatagaaagttatggtcttgtcttgaaggaaattccatatatcagagagatcttttaaaaagtgaataatttacggttaaaataggtcttgagtcacattttgaaagcatatccacagcctaattatcacagtaatctggagaagatccagattcgtgcttagaagtgtcttccaaaaggtttctgaaaactgctttattaatgatgccgcacaaatgcaaagcattatcctaactgttaagtcacagccttactttgtagatgttctattgtcctttctacaggaggcaaattaatcactcttttttcctcctcaaacatatttttcccatgtgttctctcttgctgccatgctaagaattttatgagaaagctgaataaatactctaggtcattataattttacttaaataatacattttcatttttagaataatatatgatcatttactataagctgggctttatgctaatgacttgtatttatttacttgaatttgcagtgtgctattacatatattttctcgtttaatccccacagcacctctatgtagtaggtaatgcttttatcatcatattccaggaaaagatctacaccctagagaaytgaagtcacttacccaagttcttatgatgatgaagccacaactcacccccgagtagtcagatagcagaagccatgcttttaaccccagttctgtattgtaccctggctatccataatatatgaagggaaaaaagcaaatttcaaaacagcagatatagaaggatctctattatgacatatttccttggtgtgtgcttatagatatatgatacgtaacgtatcatatatgtgtatgtatacatgcatatgttttt

SEQ ID NO: 677733 - DNA, 1122 bp, Homo sapiens
tgtatttttagtagagacggggtttcaccatgttggctaggctggtttcgaactcttgacctcaggtgatctgcccacctcggcctcccaaagtgtgggattacaggtgtcagccatggcgcccagccaacagttacattttctagactagaggtctagaaygtcccttaaattgctaatcctttaggaaggcagcctactaccttcactttctcaggaccaaaatatgcaagttttcttgccatactattgacaccactcacactctctgctacgtcacaaagctccacatggaagaacataaaatgacccacttgcctttagaaatcactcccgcaatcttgatagttatttcttttgagcacacattaagagaatgagattctgttggaattgataaagcagctagctttacttagattgtgaggaccaatgttataaatccataccagaaactgaattagtgatgcaatgtcaaaaaaatctttttttttttttttttgagacagagccttgctctgttggccaggctggagtgcagtggtgtgatctcagctcactgcaacctccatctcccgggctcaagcaattctcctgcctcagcctcccgagtagctgggattacaggtgtgtgccaccacatctggctattttttttgtatatttagtagagacggggtttcaccatgttggccaggctggtctcaaactcctgacctcagtaatccgcccgcctgggactcccaaagtgctgggattacaggtgtgagccaccgcaccaggccggaatgtccaaaaattcaaggtgaattttaacatctggaaatttctccctttagaaacacaatcaactttttaaacttttccaaagaccaactatttcaggttatatttgaaagaaaaagactgattaaatacatcacgtatctaaggcctaaaggtagaaacaaatacaatgatggttacttttctgtagtattcaacagataaactttactgggcacaactgtccgttttaaaagaatgcagcttaactctctgcaggaatacattctgaaagcagacctgctgtttaagtcactactcatctagccatgagcttagactgcaaactccagcacc

SEQ ID NO: 677734 - DNA, 419 bp, Homo sapiens
tcgctctgtcacccaggctggagtgcagtggtgcaatttcagcttcagctcgctgcaagatccgcctcccgggttcgagtgattctcctgcctcagcctcccgagtagctgggattacaggcataagtcaccacgcccggctaatttttgtatttttagtagagacagggtttcaccatgttggccaggctggtctcgaactcctgacctcaagtgattcgcctgcctcggcctgccgaagtattgggattacrggcatgagtcaccgcacctcacccaaaaaacacatttttaaatttaaaaataaccaaggttacccacaaattataatatgcagagatgacaggataattcactatctgcaaagcttatactttgcaatttacaatagggaggaagaattaatactgatgtgtgaa

SEQ ID NO: 677735 - DNA, 923 bp, Homo sapiens
gagaggctataccttgtaaaaagtcataataggggccattttttrttttatacttgacatctatatgatcttccttgagtatcatttttgagcaaagaatggagtaaaatacatatctggatgtgctgtattagttctttactttgtgaaccatagtttcagtagcagtacttttctattgtatttcagatttaattttcttgttggggtgtcaaagaaaggcagtcacacacagtcacaattatgctgctacgtgatagctgtaattgaaatgatgggttatgatttggtggatttggtgggaaaagtcaaccccagaatgcctcaagttggacacctgtgttaactcctttaccagaagtgtcgagtgcagtccctttgtctgttgagcacacagtgcttctacctgaccaatgacaattttgagcttttcacgatagttgttataatagactcttaggcaagttttcaggacagttaatgtaatgaagttgggcactcagccgttaatgtatttcaaatgggtagacatggctacaaactaagtggagccaggcaggtagttaagaagtgatttgggatgatttctacctggcaggcttatggtatattgattggacttttggaagctgtgtcctgtcattcttgcttgttaccatttttttgtgagaatggattacttctacattgaaaacaatttgtgtgtttttccttttgtctctaaagaaaacaagcatgtaaatatatatatatatgacttgaattttattatattggagaatcaaatagcagtaaagctaaataagagaagtaaggacaaagtgtctttacacttccttttgaagtgtcctatagttatcttgaatgtaagctgtcttcaaagggaatttttagtagatacaattagatttagaattcatgaa

SEQ ID NO: 677736 - DNA, 923 bp, Homo sapiens
gagaggctataccttgtaaaaagtcataataggggccattttttattttatacttgacatctatatgatcttccttgagtatcatttttgagcaaagaatggagtaaaatacatatctggatgtgctgtattagttctttactttgtgaaccatagtttcagtagcagtacttttctattgtatttcagatttaattttcttgttggggtgtcaaagaaaggcagtcacacacagtcacaattatgctgctacgtgatagctgtaattgaaatgatgggttatgatttggtggatttggtgggaaaagtcaaccccagaatgcctcaagttggacacctgtgttaactcctttaccagaagtgtcgagtgcagtccctttgtctgttgagcacacagtgcttctacctgaccaatgacaattttgagcttttcacgatagwtgttataatagactcttaggcaagttttcaggacagttaatgtaatgaagttgggcactcagccgttaatgtatttcaaatgggtagacatggctacaaactaagtggagccaggcaggtagttaagaagtgatttgggatgatttctacctggcaggcttatggtatattgattggacttttggaagctgtgtcctgtcattcttgcttgttaccatttttttgtgagaatggattacttctacattgaaaacaatttgtgtgtttttccttttgtctctaaagaaaacaagcatgtaaatatatatatatatgacttgaattttattatattggagaatcaaatagcagtaaagctaaataagagaagtaaggacaaagtgtctttacacttccttttgaagtgtcctatagttatcttgaatgtaagctgtcttcaaagggaatttttagtagatacaattagatttagaattcatgaa

SEQ ID NO: 677737 - DNA, 1363 bp, Homo sapiens
tcatgattgataaataaactaaaaatgcccaacagctcttggtttttcccatgagagctaatcctgaaaaagatgaatttgcactacggaaatgaaaaaaacatccaaaagttcaaccacacatttgaaatagaaattaattcttttgtggatcaaaacttataagggagaaagagtcaaacggtcataaaattacttcatctatgcctcactttggcacaagctttcatctaagcactaatccaactgctagtgacaagtgtgaagcctaggtgaacttttttcaagaagtatagaaaagacctagaagttcacacattaaaacagactgtttcctaaaggaggaacaagcaaacaattagcaccaacttttaatatttatatctcacttatcattcctactgggctcacaagaaaagaaaagtgaaagagagaaagagagaggaaggaaggaaggaaggaaggaaggaaggaaggaaggaaggaaggaaggaaggaaggaaggaaggcaggcaggcaggcaggcaggcaggcaggcaagcatgcaaaaggatggggaaggcaggtggtaaagcaggaccatggaactaataagaggatttcctaaggatcccaatttatcccatttccatgaagcactgaacctaccaattacattattttgaaaaacagggccctctaggtcacctacttttacaatataattaaaattaaaatttatgtcaataaacagccctagattaacttataacaagcagaaaaaccaagttcccttgatctcaaaaaacaaagcatattgtaatgaactagcagccttttctaactgcaggttgagcaaccctaatctgaaaatacaaaattcaaaatgttacaaaatctgaaactttttgagcactgacgtgacactcaaaggaaatgctcattggagcactttggattttcagattggattttcaaccggtttaaagtatatgcaaatagtccaaaaaaaaattttttttttaaatccaaatccaaaacacttctggtcccgagcatttcagataaagaatactcaatctgtactttccacccttttatccaaagctaaactccctgaatgggtaatttatcctggtatttttcttcracatctatgtccaactttcctccccgaatttgacattccacaacactaaaacaacttgttctaagattgcaaactattttcctatctaaatctactttattagcttaagcaggtcaaaaatttttaacttcccaattgtgtcaatcacaactttcttgtagttttctcctcctttgaattccataatactcacaacagagtctcctaaagtgtgtccctgggaaacacaggaaa

SEQ ID NO: 677738 - DNA, 2448 bp, Homo sapiens
ctttctcttataactccacatgcattgcttcattcagttttgttgtttgtagacaagaatgctgatgccaaattagaaatgatgcaagcctagttgtttttattttatgaatttttttgttttataaaatttaagaggttataggattttttttatcctttgagaaatgtcagcaattattttatttcagaaatcttgcttagtacttggaagctttttcaatttgaagatgtaagtgcagtgaaattttytttgacttttgcttctccagtggttatgttttcttctaattcactattttgagttttagcatgattcaaattactgtaacctctttatgaaatcatacagaattcaacaataattttcattttgcaggagtagatctcagatccagaataacaaagacttgaaaacaagaaaagcagattttgagctaagagatggaaaatactagagatttttaggagttaggatgagtttgtagttagttttaggcaaattccaggcctcagcgttcattaactctgatgcctgtgcttacacagcgtcatctgaaagaggaagaacaatattatctttatgttataggatgagctttgaattatcccagctttttgaaaaagcatgtaattgactgacatactattctttattttttaaaacaacgtaagagatgggcttattatgatttttgattatcaagacgaggatgttgagacccctaggcattaagtgacttgcctaagattccctagttaattcaaattgaagtaggggtttaaataaatattaacctgaaagtatccctctcaacccattcgaaatatgtaaatcataatatttattaaacataatatttattaatataaataatatctatttcaagtgggttgagggggatagtttcaattaaatttaaggcaaatgtataaccatttgaatggcgctatgtgtaacttgattgatgccatcatctttcaaaaattataatctactcatgctacactcttgctgaaaatacagcattgactccgttatctacacaataaaatctggatccacagataagagtaagtgagacctaacttaaagtttaaaaaattggagttcatttatcagcattggtggttttgtgaatcccttggaattaaaagtaaatgtgatgtctattcttttctcttggattccactgctttcataaaaaggtaggacaccataaaaaccatagatctgttatctgttatctctagaactctagtcatatgacaaataaataattaaggaaaaccaatatagtttcacatgcaaaaaaggattatttaatgaatttgtattttttggaagaaattcagtcagaaattcatcaacactggtcatttcaactaatcattaggctcagagtgcagtcttacgaggttactaggtgaagcctggcctttcttcagtggtatataaatagcttaaatacgacttgaaagctgattttcagttgtatagacattgaaggctagaagataagaatgcttctaaacatgtagtgactctttctccaggacagaccaaagtagactccctatgataggctttagtcagatactggattctcagaatggctcacccaattagtgatgatgagattgtatatttcatggtatcatttaacatctaggcacaggcctgggtcagagctgcaggactgcatccctgagacctggtaagttagcttacaaaattcatatatttggaggagtcagatcccatagaccttcagaggaggctgtgtgaactctaccctgtgacttagtcgagacatttatacctaggtataggttcttgataaattggtgatagagcagttatgttgagggatctccaggtctttgtaaaggaaggtgttgtgaagagttgtgaagaactggaggatatagtgggagacaccagtccttatagtccagagttctcagttacaaaaagttctgattctgaaaaagtaaatggtgtgaagaattgcaaagaaggagtttattttaaaagtttggatgttgaggtatctttttcctaagctctggcataagaggagtctagaaattcagtgtcaatagagaagtttctcagaagaatgtgaacagttccaaaggaagaagacaaggcaataccttggttacccaaggaggtcctcaaggagatgccatgcagtcagactttcttgaggcaattacacttcattctagtttacaaaaagatttccattttaattttcactgagttacagtgagattcactggccattttgtgggccaaagtaccatagaattgacacagtaccaatgtgtagcatgtgagcaagccaaatcttgatttgacatccattggagaacacacacaggagagagaatctttatggagaaggcttcatgaagtgttgggacctctgtgttcaccaga

SEQ ID NO: 677739 - DNA, 2448 bp, Homo sapiens
ctttctcttataactccacatgcattgcttcattcagttttgttgtttgtagacaagaatgctgatgccaaattagaaatgatgcaagcctagttgtttttattttatgaatttttttgttttataaaatttaagaggttataggattttttttatcctttgagaaatgtcagcaattattttatttcagaaatcttgcttagtacttggaagctttttcaatttgaagatgtaagtgcagtgaaattttctttgacttttgcttctccagtggttatgttttcttctaattcactattttgagttttagcatgattcaaattactgtaacctctttatgaaatcatacagaattcaacaataattttcattttgcaggagtagatctcagatccagaataacaaagacttgaaaacaagaaaagcagattttgagytaagagatggaaaatactagagatttttaggagttaggatgagtttgtagttagttttaggcaaattccaggcctcagcgttcattaactctgatgcctgtgcttacacagcgtcatctgaaagaggaagaacaatattatctttatgttataggatgagctttgaattatcccagctttttgaaaaagcatgtaattgactgacatactattctttattttttaaaacaacgtaagagatgggcttattatgatttttgattatcaagacgaggatgttgagacccctaggcattaagtgacttgcctaagattccctagttaattcaaattgaagtaggggtttaaataaatattaacctgaaagtatccctctcaacccattcgaaatatgtaaatcataatatttattaaacataatatttattaatataaataatatctatttcaagtgggttgagggggatagtttcaattaaatttaaggcaaatgtataaccatttgaatggcgctatgtgtaacttgattgatgccatcatctttcaaaaattataatctactcatgctacactcttgctgaaaatacagcattgactccgttatctacacaataaaatctggatccacagataagagtaagtgagacctaacttaaagtttaaaaaattggagttcatttatcagcattggtggttttgtgaatcccttggaattaaaagtaaatgtgatgtctattcttttctcttggattccactgctttcataaaaaggtaggacaccataaaaaccatagatctgttatctgttatctctagaactctagtcatatgacaaataaataattaaggaaaaccaatatagtttcacatgcaaaaaaggattatttaatgaatttgtattttttggaagaaattcagtcagaaattcatcaacactggtcatttcaactaatcattaggctcagagtgcagtcttacgaggttactaggtgaagcctggcctttcttcagtggtatataaatagcttaaatacgacttgaaagctgattttcagttgtatagacattgaaggctagaagataagaatgcttctaaacatgtagtgactctttctccaggacagaccaaagtagactccctatgataggctttagtcagatactggattctcagaatggctcacccaattagtgatgatgagattgtatatttcatggtatcatttaacatctaggcacaggcctgggtcagagctgcaggactgcatccctgagacctggtaagttagcttacaaaattcatatatttggaggagtcagatcccatagaccttcagaggaggctgtgtgaactctaccctgtgacttagtcgagacatttatacctaggtataggttcttgataaattggtgatagagcagttatgttgagggatctccaggtctttgtaaaggaaggtgttgtgaagagttgtgaagaactggaggatatagtgggagacaccagtccttatagtccagagttctcagttacaaaaagttctgattctgaaaaagtaaatggtgtgaagaattgcaaagaaggagtttattttaaaagtttggatgttgaggtatctttttcctaagctctggcataagaggagtctagaaattcagtgtcaatagagaagtttctcagaagaatgtgaacagttccaaaggaagaagacaaggcaataccttggttacccaaggaggtcctcaaggagatgccatgcagtcagactttcttgaggcaattacacttcattctagtttacaaaaagatttccattttaattttcactgagttacagtgagattcactggccattttgtgggccaaagtaccatagaattgacacagtaccaatgtgtagcatgtgagcaagccaaatcttgatttgacatccattggagaacacacacaggagagagaatctttatggagaaggcttcatgaagtgttgggacctctgtgttcaccaga

SEQ ID NO: 677740 - DNA, 2448 bp, Homo sapiens
ctttctcttataactccacatgcattgcttcattcagttttgttgtttgtagacaagaatgctgatgccaaattagaaatgatgcaagcctagttgtttttattttatgaatttttttgttttataaaatttaagaggttataggattttttttatcctttgagaaatgtcagcaattattttatttcagaaatcttgcttagtacttggaagctttttcaatttgaagatgtaagtgcagtgaaattttctttgacttttgcttctccagtggttatgttttcttctaattcactattttgagttttagcatgattcaaattactgtaacctctttatgaaatcatacagaattcaacaataattttcattttgcaggagtagatctcagatccagaataacaaagacttgaaaacaagaaaagcagattttgagctaagagatggaaaatactagagatttttaggagttaggatgagtttgtagttagttttaggcaaattccaggcytcagcgttcattaactctgatgcctgtgcttacacagcgtcatctgaaagaggaagaacaatattatctttatgttataggatgagctttgaattatcccagctttttgaaaaagcatgtaattgactgacatactattctttattttttaaaacaacgtaagagatgggcttattatgatttttgattatcaagacgaggatgttgagacccctaggcattaagtgacttgcctaagattccctagttaattcaaattgaagtaggggtttaaataaatattaacctgaaagtatccctctcaacccattcgaaatatgtaaatcataatatttattaaacataatatttattaatataaataatatctatttcaagtgggttgagggggatagtttcaattaaatttaaggcaaatgtataaccatttgaatggcgctatgtgtaacttgattgatgccatcatctttcaaaaattataatctactcatgctacactcttgctgaaaatacagcattgactccgttatctacacaataaaatctggatccacagataagagtaagtgagacctaacttaaagtttaaaaaattggagttcatttatcagcattggtggttttgtgaatcccttggaattaaaagtaaatgtgatgtctattcttttctcttggattccactgctttcataaaaaggtaggacaccataaaaaccatagatctgttatctgttatctctagaactctagtcatatgacaaataaataattaaggaaaaccaatatagtttcacatgcaaaaaaggattatttaatgaatttgtattttttggaagaaattcagtcagaaattcatcaacactggtcatttcaactaatcattaggctcagagtgcagtcttacgaggttactaggtgaagcctggcctttcttcagtggtatataaatagcttaaatacgacttgaaagctgattttcagttgtatagacattgaaggctagaagataagaatgcttctaaacatgtagtgactctttctccaggacagaccaaagtagactccctatgataggctttagtcagatactggattctcagaatggctcacccaattagtgatgatgagattgtatatttcatggtatcatttaacatctaggcacaggcctgggtcagagctgcaggactgcatccctgagacctggtaagttagcttacaaaattcatatatttggaggagtcagatcccatagaccttcagaggaggctgtgtgaactctaccctgtgacttagtcgagacatttatacctaggtataggttcttgataaattggtgatagagcagttatgttgagggatctccaggtctttgtaaaggaaggtgttgtgaagagttgtgaagaactggaggatatagtgggagacaccagtccttatagtccagagttctcagttacaaaaagttctgattctgaaaaagtaaatggtgtgaagaattgcaaagaaggagtttattttaaaagtttggatgttgaggtatctttttcctaagctctggcataagaggagtctagaaattcagtgtcaatagagaagtttctcagaagaatgtgaacagttccaaaggaagaagacaaggcaataccttggttacccaaggaggtcctcaaggagatgccatgcagtcagactttcttgaggcaattacacttcattctagtttacaaaaagatttccattttaattttcactgagttacagtgagattcactggccattttgtgggccaaagtaccatagaattgacacagtaccaatgtgtagcatgtgagcaagccaaatcttgatttgacatccattggagaacacacacaggagagagaatctttatggagaaggcttcatgaagtgttgggacctctgtgttcaccaga

SEQ ID NO: 677741 - DNA, 2448 bp, Homo sapiens
ctttctcttataactccacatgcattgcttcattcagttttgttgtttgtagacaagaatgctgatgccaaattagaaatgatgcaagcctagttgtttttattttatgaatttttttgttttataaaatttaagaggttataggattttttttatcctttgagaaatgtcagcaattattttatttcagaaatcttgcttagtacttggaagctttttcaatttgaagatgtaagtgcagtgaaattttctttgacttttgcttctccagtggttatgttttcttctaattcactattttgagttttagcatgattcaaattactgtaacctctttatgaaatcatacagaattcaacaataattttcattttgcaggagtagatctcagatccagaataacaaagacttgaaaacaagaaaagcagattttgagctaagagatggaaaatactagagatttttaggagttaggatgagtttgtagttagttttaggcaaattccaggcctcagcrttcattaactctgatgcctgtgcttacacagcgtcatctgaaagaggaagaacaatattatctttatgttataggatgagctttgaattatcccagctttttgaaaaagcatgtaattgactgacatactattctttattttttaaaacaacgtaagagatgggcttattatgatttttgattatcaagacgaggatgttgagacccctaggcattaagtgacttgcctaagattccctagttaattcaaattgaagtaggggtttaaataaatattaacctgaaagtatccctctcaacccattcgaaatatgtaaatcataatatttattaaacataatatttattaatataaataatatctatttcaagtgggttgagggggatagtttcaattaaatttaaggcaaatgtataaccatttgaatggcgctatgtgtaacttgattgatgccatcatctttcaaaaattataatctactcatgctacactcttgctgaaaatacagcattgactccgttatctacacaataaaatctggatccacagataagagtaagtgagacctaacttaaagtttaaaaaattggagttcatttatcagcattggtggttttgtgaatcccttggaattaaaagtaaatgtgatgtctattcttttctcttggattccactgctttcataaaaaggtaggacaccataaaaaccatagatctgttatctgttatctctagaactctagtcatatgacaaataaataattaaggaaaaccaatatagtttcacatgcaaaaaaggattatttaatgaatttgtattttttggaagaaattcagtcagaaattcatcaacactggtcatttcaactaatcattaggctcagagtgcagtcttacgaggttactaggtgaagcctggcctttcttcagtggtatataaatagcttaaatacgacttgaaagctgattttcagttgtatagacattgaaggctagaagataagaatgcttctaaacatgtagtgactctttctccaggacagaccaaagtagactccctatgataggctttagtcagatactggattctcagaatggctcacccaattagtgatgatgagattgtatatttcatggtatcatttaacatctaggcacaggcctgggtcagagctgcaggactgcatccctgagacctggtaagttagcttacaaaattcatatatttggaggagtcagatcccatagaccttcagaggaggctgtgtgaactctaccctgtgacttagtcgagacatttatacctaggtataggttcttgataaattggtgatagagcagttatgttgagggatctccaggtctttgtaaaggaaggtgttgtgaagagttgtgaagaactggaggatatagtgggagacaccagtccttatagtccagagttctcagttacaaaaagttctgattctgaaaaagtaaatggtgtgaagaattgcaaagaaggagtttattttaaaagtttggatgttgaggtatctttttcctaagctctggcataagaggagtctagaaattcagtgtcaatagagaagtttctcagaagaatgtgaacagttccaaaggaagaagacaaggcaataccttggttacccaaggaggtcctcaaggagatgccatgcagtcagactttcttgaggcaattacacttcattctagtttacaaaaagatttccattttaattttcactgagttacagtgagattcactggccattttgtgggccaaagtaccatagaattgacacagtaccaatgtgtagcatgtgagcaagccaaatcttgatttgacatccattggagaacacacacaggagagagaatctttatggagaaggcttcatgaagtgttgggacctctgtgttcaccaga

SEQ ID NO: 677742 - DNA, 631 bp, Homo sapiens
gggaactcataagtgggttttgttttcagctgctaagtttggagtaacttgttacatagcaacagaaaacaaatacatattcattaaatatctttgagcacctactatatgccaggccgtgttaggtgctggagacatagccatgagcaagacagacaagactccttctacatggagcttacattcaaattaggaaaatggacaatgggcaagaaatacacaatggacacaataattcacaagataatgtgagagggaggtaatgccaggacaatggcctaacaggctgtttctttttccttttagggtcttgctctgtcacccaggctggagtgcagtggcgtgatcatagctccctgcagccttgaactccaggctcacgtgatccttccacctcaaactcccaagtagctgggactataggtgtatgtcaccactccccmctaattttttttattttttgcagagacagggttttgccatcttgcccgggctggtctggaactcctgggttcaagtgatctgcccacctcagcctcccaaagtgctgggattacaggtatgagccaccatgcctggccaatgggttaagtttcaatggcccaagccaacaaaccagccccagcagaca

SEQ ID NO: 677743 - DNA, 2838 bp, Homo sapiens
  misc_feature 1769, 1770, 1771, 1772, 1773, 1774, 1775, 1776, 1777, 1778,1779, 1780, 1781, 1782, 1783, 1784, 1785, 1786, 1787, 1788,1789, 1790, 1791, 1792, 1793, 1794, 1795, 1796, 1797, 1798,1799, 1800, 1801, 1802, 1803, 1804, 1805, 1806, 1807: n = A,T,C or G
  misc_feature 1808, 1809, 1810, 1811, 1812, 1813, 1814, 1815, 1816, 1817,1818, 1819, 1820, 1821, 1822, 1823, 1824, 1825, 1826, 1827,1828, 1829, 1830, 1831, 1832, 1833, 1834, 1835, 1836, 1837,1838, 1839, 1840, 1841, 1842, 1843, 1844, 1845, 1846: n = A,T,C or G
  misc_feature 1847, 1848, 1849, 1850, 1851, 1852, 1853, 1854, 1855, 1856,1857, 1858, 1859, 1860, 1861, 1862, 1863, 1864, 1865, 1866,1867, 1868: n = A,T,C or G
ggatgcaggttctttaatgctcctaatctaaagatagtttagatttgagtcaatttttcccccaggtcttaagctaggaaactatgcaggtaactaatgggattatgacaaaactcttcaggaatctttttattttaacccttaaagtaaaagtgattctttaaatcttcctgaaccttgaagaattgagctaactcagatattaasagtttagagttgctttttctttttcttttctttcttttttttttttttttagacggagtcttgctctgttgcccgggctggagtgcagtggcatgatctcggctcgctgcaaccttcgcctcccgggttcaagcgattctcctgcctcagcctcctgagtagctgggactacaagtgcccgccaccacgcccagctaatttttgtaattttaatagagacggggtttcaccatattggtcaggctggtcttgaactcctgacgatcaggtgatccacccgccttggcctcccaaagtgctgggattacaggcgtgaaccaccatgaccagcttagagtttctctttctacatcatttaccttgtatgtctatatctaacccagggctcaagacagtgatcttagactcaacaacttggaattatttttccattcacacaatttctcccagagctgtttaaattcacaaggtagctgcttctgatgggtttatgagtcagatttagacttagctccctcaaattttacagagatctcttttttccaacttgtttccaacaagagtgtcacaaacactaggtgctagaaaaccctccactcagaatagtgacctgcatgtgtagcatctacaagacccccagcaaagacttgacctcattccctgagactctatttaaagctgggacttgtccaactctggatgagcttgccttctcaagtttctaactcctaggggtgagcaagaagctctacagttaaaatttaatggaattttcagcccggcatggtggctcacgcctgtaatcccagaactttgggaggccgaggcaaccagatcacaaggtcaagagatcgagaccattctggtcaacatggtgaaatgccgtctctactaaaaaaatacaacagagcaagactccgtctcaaaaaaaaaatggaattttctcacattttttcaacatttccagaaagatggttgactttgctgggttttctttccttttcttaacctataagagcaatatctgtaacctgcatcctttgcccacaaatgaactctgacttcctgaaactctaagtgagcaacttggttgttacttctggaggtatcagccttctgctaattgcatttaagatgccattgtagaaagttttggccataggacctggctggaaaacactggccccactggactgtactctgtactcaaactttccttaagtataaagatttgatagagaatggcttttatataggaagatcctggggatagttaagcacatgagaaatgattatttggggttctctgagaaagaaaattgtcagaagaggcaattgaatcaccgagatctacaaactaatgtagaataagtcactgcaagagtcagcttaatttctctccaaatgagaaagcagtcgtcaaactccttcacatatccttgaaacatacgaacaatctgggcatctgttgtctacacaggggttgcttctcttgaattctttaaacataatttggtacaatagagtattagtcttttgcatttgtgtgtgtgtgtgtctgnnnnnnnnnnnnnnnnnnnnnnnnnnnnnnnnnnnnnnnnnnnnnnnnnnnnnnnnnnnnnnnnnnnnnnnnnnnnnnnnnnnnnnnnnnnnnnnnnnnncagacatacacacatatgccatacaatattttttgaagttttattaagtttaataattgaatgactaatactgcagctatgtctagcatattgtgttagaaaacatgcttagcctctctgtaagagagagccccagagacctgggaacgtttatctatgtagaaccatatatctagtagaaccatagaacatttatctatgtaggctgaatgtgcgatttatcatattctcaacaataatcctacgcttggtgaaatgtataagggacctttgcgtacctttttttctttttgcaacttcatgtgaatctacaattatttcaaaataaaaaattttaaaaagtacatgtgtcaaaagaaatctcttgataaacataaaacaataaaaaaggaacctttgtcagaaacacatggataggctctctgtgcttgtctctcatggctgttgcttaacttgaataaaaactcacatcatgtcaaatattacaagcaacatatctgtgacatagtctattgaagcagtcacattggcattggggagatacacaaacaaagtgaaccatagccatctggtattctcagcttgtttacaaaatcacttaatgaggctaagttgaagatgtggaaatagaggtgcatctgggagtgaatggtctcacctgtccccgacttacttttctctctctccatttccctcagggctcaatgaagagggagtcatgaagaatttggaagagcaagtgccccagtcctatgtatttatgtctccccactgatgtacagtgctccatctgccataaatgtctattgactcaattctgagtcatttactggacttctattttttttcctttgggctatttcatttatcaggagatttgccccatgctgtcttgaaggctaacattatggattttgattggtgtacggcagttccttacatcttattattattatttttattctacaga

SEQ ID NO: 677744 - DNA, 673 bp, Homo sapiens
gtgtccctcaagtctcaggatcaggacataccaagcccggtactagatgcattgtgtacctcagtatacaatctgcacagaaccatgcaaggtaggtggaactaaacccattttaacaatgtacctcagaaaagtttggaagtcacgcctttatcaagaagttgaaaagggattcattcacagaactgagctctgcaaaaccacctttaacataccagaattaacctgaagactggaagtcttcgtggcaacactgtttggcccttatttcatttgtccctattaccaaattttcatctcacccacacctctagttaccttagtcttaaaaaamaaaacaaaacaaaaaaaaagctgggggtcggtgggtgggtgggtgggagggaataaggcctaaaaagaaggccatgatactcacctggcctcttttaatacaaaaatggttttcattaattaagcaagcacactttgtgagcttttcctacaattttattactagctggtactagacacgaaagtaaatggtacaggacattcagaaaaattaactcccttcctcctccactcctgtgggttctatttagccattaaccacctgatagatcttcaacagtctactgtcaacttcatgccatattatctatcgctttgtattagtcacattaatgctttc

SEQ ID NO: 677745 - DNA, 673 bp, Homo sapiens
gtgtccctcaagtctcaggatcaggacataccaagcccggtactagatgcattgtgtacctcagtatacaatctgcacagaaccatgcaaggtaggtggaactaaacccattttaacaatgtacctcagaaaagtttggaagtcacgcctttatcaagaagttgaaaagggattcattcacagaactgagctctgcaaaaccacctttaacataccagaattaacctgaagactggaagtcttcgtggcaacactgtttggcccttatttcatttgtccctattaccaaattttcatctcacccacacctctagttaccttagtcttaaaaaacaaaamaaaacaaaaaaaaagctgggggtcggtgggtgggtgggtgggagggaataaggcctaaaaagaaggccatgatactcacctggcctcttttaatacaaaaatggttttcattaattaagcaagcacactttgtgagcttttcctacaattttattactagctggtactagacacgaaagtaaatggtacaggacattcagaaaaattaactcccttcctcctccactcctgtgggttctatttagccattaaccacctgatagatcttcaacagtctactgtcaacttcatgccatattatctatcgctttgtattagtcacattaatgctttc

SEQ ID NO: 677746 - DNA, 673 bp, Homo sapiens
gtgtccctcaagtctcaggatcaggacataccaagcccggtactagatgcattgtgtacctcagtatacaatctgcacagaaccatgcaaggtaggtggaactaaacccattttaacaatgtacctcagaaaagtttggaagtcacgcctttatcaagaagttgaaaagggattcattcacagaactgagctctgcaaaaccacctttaacataccagaattaacctgaagactggaagtcttcgtggcaacactgtttggcccttatttcatttgtccctattaccaaattttcatctcacccacacctctagttaccttagtcttaaaaaacaaaacaaaamaaaaaaaaagctgggggtcggtgggtgggtgggtgggagggaataaggcctaaaaagaaggccatgatactcacctggcctcttttaatacaaaaatggttttcattaattaagcaagcacactttgtgagcttttcctacaattttattactagctggtactagacacgaaagtaaatggtacaggacattcagaaaaattaactcccttcctcctccactcctgtgggttctatttagccattaaccacctgatagatcttcaacagtctactgtcaacttcatgccatattatctatcgctttgtattagtcacattaatgctttc

SEQ ID NO: 677747 - DNA, 623 bp, Homo sapiens
ttgctaaaaatttccatttctctggagtaacatacatttaaaattacttatctttatatatacgttttttttttgtttgtttttttgagatggagtctcactctgtcgcccaggctggagtgcagtggcatgatctcggctcactgcaacctctgcctcccaggttcaagcaattctcctgcctcagcctctggagtagctgggattacaagcacctgccaccatacctggctaattttcttatttttttagtagagatggggtttcaccatgttgggcaggttggtctcgagctcctgaccttaagtgatccasctgcctcagcgtcccaaagtactgggattacaggcatgagccactgcacccagcctctttatacaatattttaatatctgataaagcaaaccccatccattcattctttgcaaaagtctctggactactctttttttggggattgttggggtcatgctctgttacccaggctggagtgcagtggtgtgaacacagctcaccgagacctccacttcctgggctcaagcaatcctcccacctcagcctcccaagtagctgggactacaggcatccaccaccatgcccagctaatttttgtatttttgata

SEQ ID NO: 677748 - DNA, 623 bp, Homo sapiens
ttgctaaaaatttccatttctctggagtaacatacatttaaaattacttatctttatatatacgttttttttttgtttgtttttttgagatggagtctcactctgtcgcccaggctggagtgcagtggcatgatctcggctcactgcaacctctgcctcccaggttcaagcaattctcctgcctcagcctctggagtagctgggattacaagcacctgccaccatacctggctaattttcttatttttttagtagagatggggtttcaccatgttgggcaggttggtctcgagctcctgaccttaagtgatccagctgcctcagcgtcccaaagtactgggattacaggcatgagccactgcacccrgcctctttatacaatattttaatatctgataaagcaaaccccatccattcattctttgcaaaagtctctggactactctttttttggggattgttggggtcatgctctgttacccaggctggagtgcagtggtgtgaacacagctcaccgagacctccacttcctgggctcaagcaatcctcccacctcagcctcccaagtagctgggactacaggcatccaccaccatgcccagctaatttttgtatttttgata

SEQ ID NO: 677749 - DNA, 635 bp, Homo sapiens
taaaaataaaaaacccttgggaggccgaggcaggtggaacatttgaggtcaggagttcaagaccagcctgaccaacatgctgaaaccccggctctactaaaatacaaaacttagctgggtatggtggtgggtgcctggaatctcagctactcaggaggctgaggcaggaggagaatcacttgaacccgggagatgcaggttgcagtgagccaagactgcaccactgcattctagcctgggcaacacagtgagactccttctcaaaaaaaaaaaagaaaaagaaaaagaaaaagaaaaagaaaaaaaggccgggggcagtagctcaaatctcaaattcaaaacayttttgttcccaaacattttcgtaaacaaaacaaaacaaaacaaaaaaactggctgggtgcagtggatcatgcctgtaatcccagcactttgggagactgaggcgggtggatcacaaggtcaggagtttgagaccagcctggccaacatagtgaaatcctgtctctactaaaaacacaaaaaattagtcaggtgtggtggcgagcatctgtaatcccagctactcaggaggctgaagcaggagaatcacttgaatccgggaggcggaagttgcagtgagctgagatcacacc

SEQ ID NO: 677750 - DNA, 526 bp, Homo sapiens
tgcaagtataatgcacgttgattaaggtttgggattaaccaaaatacctttcccagtatgttttctttgagatctartgttggccatgttggagttattatacacaatttaatcagtatatttctgctaatgtggtgacattagggacaaggaacaagctcgtgtaccagactttgctctgggtttggaaatatggagaaaattaggcaattaacttagattattgatttcaaatctttcttattttctactgcatgtgtttaatgttataaatgtccatctatgaagagtttttgttgcatcttacacattttaagttgtatttttatttagtttgaaatgtttttaaattttgagattttttaatccaggtgttatttatatgtgttttgtataattcccaaatagttttaaattttacagttatgtttcagtttttcattcctggcttaattccactgtggtctgagaacatatattgcatgattccaattcttttgactttgttgtgttttatattctggaa

SEQ ID NO: 677751 - DNA, 594 bp, Homo sapiens
ccatctatgtttgtgtaaatacactctgatcttcgcgtgacaatgcacttgcctaacaccacattgctcagaaggtgtacctgttattgagtgacattactatattgagtgacattactacatggcatgacagcrtcaaagatgttgcttcaaggccaggcgcagtgactcaaacctgtaatcccagcattttgggaagccggggcgggtggatcacctgaggtcaggagttcaagaccggcctggccaacatggtaaaactctgtatctactaaaaatacaaaaatcagccgggtgtggtggcgggcacctgtaatcctggctacttggggggctgaggcaggagaattgcttgaatccggaagatgaaggttgcagtgagcagagattgtgccactgtgctccagcctgggatacagactgagacaccgtctcaaaaaaaaaaattaaaaaaataaagacgttgcttcactgaattcttacttacttttcttttaagaaaacttctttgcccatatctttgttcctgtgtgcacagtatgtcttttttcctctggttggtttgaaggttttttttttctttatcactgattt

SEQ ID NO: 677752 - DNA, 3383 bp, Homo sapiens
atttctctccagtttgatgataatataacaataataatttataatatctatcatgtgctgaatagttcctattatgtgctgggtatagttctataagtgcgataaataaatacactatatttgtatggatagctcttagaactatacctgtagcacttatatagaactatggcatgcatacatatgataatagagagagagaaaatgtattgaatatagcaatcaggactgtacctgacacatagaaactgctcaatacatgacagatgatagaaataatatatgcacagacacacagatacatgtgctcacacatatgtgtaaactcatatagcttcaccacaaccttacaggcagaggatatttttattcccatcatatagatgaggcaactgaggcaagagatgttgagtgacttcccccaaccacggaggtgacaagacaggcggcaggctcagtttcaggtggtctagaccctgatggagtgtgctctctaaaacttgcacccaccacaccttcccagaacaataataccaattatgctcaaataactaacaagataaaagacaaatgactttctcttgagggcctctaggcagctcagagtgggccacaaagtgtgaaggggagttgaagagagggtctgtcagtgctgagaggctgagggagttgggaatggagagggactgggtgagcaccaactaagaggaatggctactcaccgcacagagggagagcgggccttcaggaggctcagggctggccccacagcgcaggcacaagggaagagccccatgccagtcttccacaactgaacactttcctctttccacagtggcctctgaccccaggcatctcaggaacaaggtgagtctccccttctgcatgccctcccccacccccaggcccaccctggtcctcacgcatgtgctcttgcctcctagggttcccctatcatctactctgaagttaaggtggcgtcaaccccggtttccggatccctgttcttggcttcctcagctcctcacagatgagtccacacgtctctccaactgctgtttcagcctctgcaccccaaagttccccttgggggagaagcagcattgaagtgggaagatttaggctgccccagaccatatctactggcctttgtttcacatgtcctcattctcagtctgaccagaatgcagggccctgctggactgtcacctgtttcccagttaaagccctgactggcaggttttttaatccagtggcaaggtgctcccactccagggcccagcacatctcctggattccttagtgggcttcagctgtggttgctgttctgagtactgctctcatcacacccccacagagggggtcttaccacacaaagggagagtgggccttcaggagatgccgggctggcctaacagctcaggtgctcctaaactccgacacagagttcctgctttgggtggatgcatttctcaattgtcatcagcctggtggggctactgcagtgtgctgccaaatgggacagcacacagcctgtgcacatgggacatgtgatgggtctccccacgggggctgcatttcacactcctccacctgtctcaaactctaaggtcggcacttgacaccaaggtaacttctctcctgctcatgtgtcagtgtctacctgcccaagtaagtggctttcatacaccaagtcccaagttcttcccatcctaacagaagtaacccagcaagtcaaggccaggaggaccaggggtgcagacagaacacatactggaacacaggaggtgctcaattactatttgactgactgactgaatgaatgaatgaatgaggaagaaaactgtgggtaatcaaactggcataaaatccagtgcactccctaggaaatccgggaggtattctggcttccctaagaaacaatggaagagaaggagcttggatgaggaaactgttcagcaagaggaagggcttctcacactttcatgtgcttgtggatcacctgaggatcctgtgaaaatacagatactgattcagtgggtctgcgtagagcctgagactgccattctaacatgttcccaggggatgctgatgctgctggccctgggactgcactgcatgcatgtgaagccctataggtctcagcagaggcccatggagagggaatgtgtggctctggctgcccagggcccaactcggttcacacggatcgtgctgctccctggccagcctttggccacagcaccaccagctgctgttgctgagagagcttcttctctgtgacatgttggctttcatcagccaccctgggaagcggaaagtagctgccactatctttgtttccccacctcaggcctcacactttcccatgaaaagggtgaatgtatataacctgagccctctccattcagagttgttctcccatctctgagcaatgggatgttctgttccgcttttatgatatccatcacatcttatcttgatctttgctcccagtggattgtacagtgatgacttttaagccccacggccctgaaataaaatccttccaagggcattggaagctcactccacctgaaccatggcttttcatgcttccaagtgtcagggccttgcccagatagacagggctgrctctgctgccccaacctttcaaggaggaaaccagacacctgagacaggagcctgtatgcagcccagtgcagccttgcagaggacaaggctggaggcatttgtcatcactacagatatgcaactaaaatagacgtggagcaagagaaatgcattcccaccgaggccgcttttttaggcctagttgaaagtcaagaaggacagcagcaagcataggctcaggattaaagaaaaaaatctgctcacagtctgttctggaggtcacatcaccaacaaagctcacgccctatgcagttctgagaaggtggaggcaccaggctcaaaagaggaaatttagaatttctcattgggagagtaaggtacccccatcccagaatgataactgcacagtggcagaacaaactccaccctaatgtgggtggaccccgtccagtctgttgaaggcctgaatgtaacaaaagggcttattcttcctcaagtaagggggaactcctgctttgggctgggacataagtttttctgctttcagacgcaaactgaaaaatggctcttcttgggtcttgagcttgctggcatatggactgaaagaaactatgctattggatctcctggatctccagcttgctgactgcagatcttgagatatgtcagcctctacagtcacaagagctaattcattctaataaaccaatctttctgtatgtgtgcatgtgtatgtgtgtgtataaatgtatatgcatttgtgtacacag

SEQ ID NO: 677753 - DNA, 3383 bp, Homo sapiens
atttctctccagtttgatgataatataacaataataatttataatatctatcatgtgctgaatagttcctattatgtgctgggtatagttctataagtgcgataaataaatacactatatttgtatggatagctcttagaactatacctgtagcacttatatagaactatggcatgcatacatatgataatagagagagagaaaatgtattgaatatagcaatcaggactgtacctgacacatagaaactgctcaatacatgacagatgatagaaataatatatgcacagacacacagatacatgtgctcacacatatgtgtaaactcatatagcttcaccacaaccttacaggcagaggatatttttattcccatcatatagatgaggcaactgaggcaagagatgttgagtgacttcccccaaccacggaggtgacaagacaggcggcaggctcagtttcaggtggtctagaccctgatggagtgtgctctctaaaacttgcacccaccacaccttcccagaacaataataccaattatgctcaaataactaacaagataaaagacaaatgactttctcttgagggcctctaggcagctcagagtgggccacaaagtgtgaaggggagttgaagagagggtctgtcagtgctgagaggctgagggagttgggaatggagagggactgggtgagcaccaactaagaggaatggctactcaccgcacagagggagagcgggccttcaggaggctcagggctggccccacagcgcaggcacaagggaagagccccatgccagtcttccacaactgaacactttcctctttccacagtggcctctgaccccaggcatctcaggaacaaggtgagtctccccttctgcatgccctcccccacccccaggcccaccctggtcctcacgcatgtgctcttgcctcctagggttcccctatcatctactctgaagttaaggtggcgtcaaccccggtttccggatccctgttcttggcttcctcagctcctcacagatgagtccacacgtctctccaactgctgtttcagcctctgcaccccaaagttccccttgggggagaagcagcattgaagtgggaagatttaggctgccccagaccatatctactggcctttgtttcacatgtcctcattctcagtctgaccagaatgcagggccctgctggactgtcacctgtttcccagttaaagccctgactggcaggttttttaatccagtggcaaggtgctcccactccagggcccagcacatctcctggattccttagtgggcttcagctgtggttgctgttctgagtactgctctcatcacacccccacagagggggtcttaccacacaaagggagagtgggccttcaggagatgccgggctggcctaacagctcaggtgctcctaaactccgacacagagttcctgctttgggtggatgcatttctcaattgtcatcagcctggtggggctactgcagtgtgctgccaaatgggacagcacacagcctgtgcacatgggacatgtgatgggtctccccacgggggctgcatttcacactcctccacctgtctcaaactctaaggtcggcacttgacaccaaggtaacttctctcctgctcatgtgtcagtgtctacctgcccaagtaagtggctttcatacaccaagtcccaagttcttcccatcctaacagaagtaacccagcaagtcaaggccaggaggaccaggggtgcagacagaacacatactggaacacaggaggtgctcaattactatttgactgactgactgaatgaatgaatgaatgaggaagaaaactgtgggtaatcaaactggcataaaatccagtgcactccctaggaaatccgggaggtattctggcttccctaagaaacaatggaagagaaggagcttggatgaggaaactgttcagcaagaggaagggcttctcacactttcatgtgcttgtggatcacctgaggatcctgtgaaaatacagatactgattcagtgggtctgcgtagagcctgagactgccattctaacatgttcccaggggatgctgatgctgctggccctgggactgcactgcatgcatgtgaagccctataggtctcagcagaggcccatggagagggaatgtgtggctctggctgcccagggcccaactcggttcacacggatcgtgctgctccctggccagcctttggccacagcaccaccagctgctgttgctgagagagcttcttctctgtgacatgttggctttcatcagccaccctgggaagcggaaagtagctgccactatctttgtttccccacctcaggcctcacactttcccatgaaaagggtgaatgtatataacctgagccctctccattcagagttgttctcccatctctgagcaatgggatgttctgttccgcttttatgatatccatcacatcttatcttgatctttgctcccagtggattgtacagtgatgacttttaagccccacggccctgaaataaaatccttccaagggcattggaagctcactccacctgaaccatggcttttcatgcttccaagtgtcagggccttgcccagatagacagggctggctctgctgccccaacctttcaaggaggaaaccagacacctgagacaggagcctgtatgcagcccagtgcagccttgcagaggacaaggctggaggcatttgtcatcactacagatatgcaactaaaatagacgtggagcaagagaaatgcattcccaccgaggccgcttttttaggcctagttgaaagtcaagaaggacagcagcaagcataggctcaggattaaagaaaaaaatctgctcacagtctgttctggaggtcacatcaccaacaaagctcacgccctatgcagttctgagaaggtggaggcaccaggctcaaaagaggaaatttagaatttctcattgggagagtaaggtacccccatcccagaatgataactgcacagtggcagaacaaactccaccctaatgtgggtggaccccrtccagtctgttgaaggcctgaatgtaacaaaagggcttattcttcctcaagtaagggggaactcctgctttgggctgggacataagtttttctgctttcagacgcaaactgaaaaatggctcttcttgggtcttgagcttgctggcatatggactgaaagaaactatgctattggatctcctggatctccagcttgctgactgcagatcttgagatatgtcagcctctacagtcacaagagctaattcattctaataaaccaatctttctgtatgtgtgcatgtgtatgtgtgtgtataaatgtatatgcatttgtgtacacag

SEQ ID NO: 677754 - DNA, 598 bp, Homo sapiens
ttcactgaaggacacaaagaaaatattaatagctactacaatagtttgtgtttatatataactcctttagggaaatatttcaaaggtaattaacattacaatgaatcaatacagcaagggattgtggaaaatggggtataagtgaattgaattattggagttgtattattcaatgtattgccatattaaaaggatgggttgatgatttttaaaatagctaatttttaagtaggagttttaaaaattactcaaatgatgatccatcatgtgtacagtaaatagacttaagtacatgaccagtagaccaaaaagatgtgaatgcacattagtgatgttaaaaagtccaaattacccatttagttccagtaaaataacattacctagtacattatattaacttgaattttattgctttgtttctatttctatacttttaattttatagttttgagaatacgttatatagattttgtgtttgtatgcctttgagtaatgtgataataaaacaatttaagtcaaaattgggsttcaaagggcatgatgtttcacttttaacaggggactcattctcagccctcacgctagtgtcagccacgca

SEQ ID NO: 677755 - DNA, 606 bp, Homo sapiens
ttttaaaaagaacagtctcactctatatagacctattgaaactctgattaaaccattcaggctttccagttccctactggctgctgactttctccaaatcctctttctcctctgccgctctccctgggtatctcactctcccgcatgttacagtgttccagggtttattatgtgtttctgtgtctcacaggctccctcccgctccaggcccaggagagtcctcccattccatctgccctgcccaggtggagcttcagtcgttgtatgttgatggtgaggattcccttctaggaagctgttcctggcctcagccatggaaagataatgcgctttcagccctgggaaatgcccctggactccctaaagtgtcccaaatccagatattcccagataattgttccattatgtgtccaagaagagtggagatgatgcttaggaagaggcatctgtagcactttaatactaacaggaacagccttgaaaatgtcttttctttccagtacaccccaraaagggagatttggtatactctgagatccagactactcagctgggagaagaagaggaaggtacgtctttgggaagagattctggctgcaaactata

SEQ ID NO: 677756 - DNA, 611 bp, Homo sapiens
gccaagactgagccactgmactccagccttggtgacagagcaagactctgtctcaaaaacaaaaacaaacaaacaaaaaacctaattgttcccatataagtctatgttcatacaagatctgaagagtacacaacaccgtgagacaggacagacatatattttaaaagttatattcctgatttctgtaaaaataaaatagttgaatttaagctttcaagacaagtcaacgaaacgagcaaaaaatgcaaaagtgaaactcgaaaggtcatttccccatcaagggctcatgatcactggacattcacaaactatactgttcaaaacattagatctgaattttgatccgagtatccctttagtagcagtttcattcaaggatgtccaagaggtaaaataagacaatatcatttgctattttcagttttcttttctgagaacagcccagcattcttcttcagagaaatgaattgtcctaacttcataggctaaaggctcatgagtcatagttctaagggcattaataaaatatggtggtgcatgcttgtattctgaacttttcaggtttaaactctcatatagtaaatgctaatagatacaaactgattaaagaa

SEQ ID NO: 677757 - DNA, 611 bp, Homo sapiens
gccaagactgagccactgcactccagccttggtgacagagcaagactctgyctcaaaaacaaaaacaaacaaacaaaaaacctaattgttcccatataagtctatgttcatacaagatctgaagagtacacaacaccgtgagacaggacagacatatattttaaaagttatattcctgatttctgtaaaaataaaatagttgaatttaagctttcaagacaagtcaacgaaacgagcaaaaaatgcaaaagtgaaactcgaaaggtcatttccccatcaagggctcatgatcactggacattcacaaactatactgttcaaaacattagatctgaattttgatccgagtatccctttagtagcagtttcattcaaggatgtccaagaggtaaaataagacaatatcatttgctattttcagttttcttttctgagaacagcccagcattcttcttcagagaaatgaattgtcctaacttcataggctaaaggctcatgagtcatagttctaagggcattaataaaatatggtggtgcatgcttgtattctgaacttttcaggtttaaactctcatatagtaaatgctaatagatacaaactgattaaagaa

SEQ ID NO: 677758 - DNA, 611 bp, Homo sapiens
gccaagactgagccactgcactccagccttggtgacagagcaagactctgtctcaaaaacamaaacaaacaaacaaaaaacctaattgttcccatataagtctatgttcatacaagatctgaagagtacacaacaccgtgagacaggacagacatatattttaaaagttatattcctgatttctgtaaaaataaaatagttgaatttaagctttcaagacaagtcaacgaaacgagcaaaaaatgcaaaagtgaaactcgaaaggtcatttccccatcaagggctcatgatcactggacattcacaaactatactgttcaaaacattagatctgaattttgatccgagtatccctttagtagcagtttcattcaaggatgtccaagaggtaaaataagacaatatcatttgctattttcagttttcttttctgagaacagcccagcattcttcttcagagaaatgaattgtcctaacttcataggctaaaggctcatgagtcatagttctaagggcattaataaaatatggtggtgcatgcttgtattctgaacttttcaggtttaaactctcatatagtaaatgctaatagatacaaactgattaaagaa

SEQ ID NO: 677759 - DNA, 611 bp, Homo sapiens
gccaagactgagccactgcactccagccttggtgacagagcaagactctgtctcaaaaacaaaaacaaacaaacaaaaaacctaattgttcccatataagtctatgttcatacaagatctgaagagtacacaacaccgtgagacaggacagacatatattttaaaagttatattcctgrtttctgtaaaaataaaatagttgaatttaagctttcaagacaagtcaacgaaacgagcaaaaaatgcaaaagtgaaactcgaaaggtcatttccccatcaagggctcatgatcactggacattcacaaactatactgttcaaaacattagatctgaattttgatccgagtatccctttagtagcagtttcattcaaggatgtccaagaggtaaaataagacaatatcatttgctattttcagttttcttttctgagaacagcccagcattcttcttcagagaaatgaattgtcctaacttcataggctaaaggctcatgagtcatagttctaagggcattaataaaatatggtggtgcatgcttgtattctgaacttttcaggtttaaactctcatatagtaaatgctaatagatacaaactgattaaagaa

SEQ ID NO: 677760 - DNA, 611 bp, Homo sapiens
gccaagactgagccactgcactccagccttggtgacagagcaagactctgtctcaaaaacaaaaacaaacaaacaaaaaacctaattgttcccatataagtctatgttcatacaagatctgaagagtacacaacaccgtgagacaggacagacatatattttaaaagttatattcctgatttctgtaaaaataaaatagttgaatttaagctttcaagacaagtcaacgaaamgagcaaaaaatgcaaaagtgaaactcgaaaggtcatttccccatcaagggctcatgatcactggacattcacaaactatactgttcaaaacattagatctgaattttgatccgagtatccctttagtagcagtttcattcaaggatgtccaagaggtaaaataagacaatatcatttgctattttcagttttcttttctgagaacagcccagcattcttcttcagagaaatgaattgtcctaacttcataggctaaaggctcatgagtcatagttctaagggcattaataaaatatggtggtgcatgcttgtattctgaacttttcaggtttaaactctcatatagtaaatgctaatagatacaaactgattaaagaa

SEQ ID NO: 677761 - DNA, 611 bp, Homo sapiens
gccaagactgagccactgcactccagccttggtgacagagcaagactctgtctcaaaaacaaaaacaaacaaacaaaaaacctaattgttcccatataagtctatgttcatacaagatctgaagagtacacaacaccgtgagacaggacagacatatattttaaaagttatattcctgatttctgtaaaaataaaatagttgaatttaagctttcaagacaagtcaacgaaacgagcaaaaaatgcaaaagtgaaactcgaaaggtcatttccccatcaagggctcatgatcactggacattcacaaactatactgttcaaaacattagatctgaattttgatccgagtatccctttagtagcagtttcattcaaggatgtccaagaggtaaaataagacaatatcatttgctattttcagttttcttttctgagaacagcycagcattcttcttcagagaaatgaattgtcctaacttcataggctaaaggctcatgagtcatagttctaagggcattaataaaatatggtggtgcatgcttgtattctgaacttttcaggtttaaactctcatatagtaaatgctaatagatacaaactgattaaagaa

SEQ ID NO: 677762 - DNA, 611 bp, Homo sapiens
catttttaaggctttatttatgtggaagaagcccaggmacaaaaggacagaaacgatataattccacttatgtaagatacctaaagtagttaaactcatagaaacagaaagaagactaaactgtgtcggggttaagtggagaagaaaatgagtaactgttgtttcatggacaacctgttagaatgcaaaacaacccccccaccctttttttttaaactttaagatcagagtatatgtgcaggtttcttatactggcaaacttctgtcatggaggtttgttgtacagattatttggtcatcaaagtattgagcgtagttctcatcatacaacactgaattatacaacacatcctttcataccacctgtaataaaactggaaatcaaaagcagaagcaaaattgccaaatccaaaaacctgtgaaactcaacacactcttgaacatattcttatctgtgtcagttgatttgatattgttaaatgaccatactacacagtgatattcaaattcaacgtaagcctaatgaaaataaaaataatactttgtgaaaaagtattttttacaattcttaacttttacatggaatttcaaaggaccactgatagcccaaa

SEQ ID NO: 677763 - DNA, 611 bp, Homo sapiens
catttttaaggctttatttatgtggaagaagcccaggaacaaaaggacagaaacgatataattccacttatgtaagatacctaaagtagttaaactcatagaaacagaaagaagactaaactgtgtcggggttaagtggagaagaaaatgagtaactgttgtttcatggacaacctgttagaatgcaaaacaacccccccaccctttttttttaaactttaagatcagagtatatgtgcaggtttcttatactggcaaacttctgtcatggaggtttgttgtacagattatttggtcatcaawgtattgagcgtagttctcatcatacaacactgaattatacaacacatcctttcataccacctgtaataaaactggaaatcaaaagcagaagcaaaattgccaaatccaaaaacctgtgaaactcaacacactcttgaacatattcttatctgtgtcagttgatttgatattgttaaatgaccatactacacagtgatattcaaattcaacgtaagcctaatgaaaataaaaataatactttgtgaaaaagtattttttacaattcttaacttttacatggaatttcaaaggaccactgatagcccaaa

SEQ ID NO: 677764 - DNA, 1418 bp, Homo sapiens
aagtcatggaaaaagcaacaagagtaaaaaatgtattatggaagtaagcagaaatacttgcctaaatggaaaaccaaactgggaagtcaaataatttgtctctaagacttgcctaaacttgctttggtaaaacttacagtcctatggccaaagctaagtcagatctgccctagagcctttgaaggtaaaaataagatactggttaccactgaaatcgtcaaatttattaggactaaccacattctaacaataaacttaaatgagagttcaaggtatttaaactctcattaatttagaagttaatcaaattaatgaatccgattgatctgattcagacctatactttgatccaagggctgcacagatatctatcaatctatgctgaggagcaagagaaaggatttggaaggcaggtaggctgatggtcaaactgcaggccagctactttgttaactatgggatcatgaggcaattaatcagctctaatccatagttgtttatttaacagtaggttataggaacacagatgttatgatggctttatgagatgataaatgcatagaacatattaggatgtctagcccagaatacaacactcaacagatattagtttcttccatctatattttcttagttaacataattttttaaatctatgaaatcttacctgactgcagattcatcaggaattccaacatctattaaagaaaaaggtaaaatgcattttaaatcaataataaatgtacagaatattaaaatcataagaatgcacagtgatgcatgcctctaatccaaactacttgggaggatgaggcaggaggatcacttgaggagcccagaagtttgagaccagcttgggaaacatagtaagactctaccttcataaaaaaattgtgcacacttgtgtgtatgctttasatcctgtttttgttgttgttgttgttgttgttttggtttggtttggttttttaaagcataagactgacgctttgttacaaagcattcctttgggagcatgcctgcgaccttattagaattaacattcattatacgtattggtaggtaattaatgcagtaagaactcttccctctgtatttattagatgcaaagaagaataaatttattaaaatttggtatctacaagtgaactgcagtatacaagtcatcctagccaaagcctatgagattgagtaaaaatggtattgttagcagaacaggtgtgatgagtcaacagtgtcaaagagcatgatttctggaccaaaatatgaggggccattacaacagagtatacactagtaccccttatccactatatgcgcagaaagacatacttgacacgtttttctctgctgtcacaccacagcaacaatcatcaacaaagaaggcttctgtgaccaaatgtgtggagagtttttcc

SEQ ID NO: 677765 - DNA, 1418 bp, Homo sapiens
aagtcatggaaaaagcaacaagagtaaaaaatgtattatggaagtaagcagaaatacttgcctaaatggaaaaccaaactgggaagtcaaataatttgtctctaagacttgcctaaacttgctttggtaaaacttacagtcctatggccaaagctaagtcagatctgccctagagcctttgaaggtaaaaataagatactggttaccactgaaatcgtcaaatttattaggactaaccacattctaacaataaacttaaatgagagttcaaggtatttaaactctcattaatttagaagttaatcaaattaatgaatccgattgatctgattcagacctatactttgatccaagggctgcacagatatctatcaatctatgctgaggagcaagagaaaggatttggaaggcaggtaggctgatggtcaaactgcaggccagctactttgttaactatgggatcatgaggcaattaatcagctctaatccatagttgtttatttaacagtaggttataggaacacagatgttatgatggctttatgagatgataaatgcatagaacatattaggatgtctagcccagaatacaacactcaacagatattagtttcttccatctatattttcttagttaacataattttttaaatctatgaaatcttacctgactgcagattcatcaggaattccaacatctattaaagaaaaaggtaaaatgcattttaaatcaataataaatgtacagaatattaaaatcataagaatgcacagtgatgcatgcctctaatccaaactacttgggaggatgaggcaggaggatcacttgaggagcccagaagtttgagaccagcttgggaaacatagtaagactctaccttcataaaaaaattgtgcacacttgtgtgtatgctttagatcctgtttttgttgttgttgttgttgttgttttggtttggtttggttttttaaagcataagactgacgctttgttacaaagcattcctttgggagcatgcctgsgaccttattagaattaacattcattatacgtattggtaggtaattaatgcagtaagaactcttccctctgtatttattagatgcaaagaagaataaatttattaaaatttggtatctacaagtgaactgcagtatacaagtcatcctagccaaagcctatgagattgagtaaaaatggtattgttagcagaacaggtgtgatgagtcaacagtgtcaaagagcatgatttctggaccaaaatatgaggggccattacaacagagtatacactagtaccccttatccactatatgcgcagaaagacatacttgacacgtttttctctgctgtcacaccacagcaacaatcatcaacaaagaaggcttctgtgaccaaatgtgtggagagtttttcc

SEQ ID NO: 677766 - DNA, 1418 bp, Homo sapiens
aagtcatggaaaaagcaacaagagtaaaaaatgtattatggaagtaagcagaaatacttgcctaaatggaaaaccaaactgggaagtcaaataatttgtctctaagacttgcctaaacttgctttggtaaaacttacagtcctatggccaaagctaagtcagatctgccctagagcctttgaaggtaaaaataagatactggttaccactgaaatcgtcaaatttattaggactaaccacattctaacaataaacttaaatgagagttcaaggtatttaaactctcattaatttagaagttaatcaaattaatgaatccgattgatctgattcagacctatactttgatccaagggctgcacagatatctatcaatctatgctgaggagcaagagaaaggatttggaaggcaggtaggctgatggtcaaactgcaggccagctactttgttaactatgggatcatgaggcaattaatcagctctaatccatagttgtttatttaacagtaggttataggaacacagatgttatgatggctttatgagatgataaatgcatagaacatattaggatgtctagcccagaatacaacactcaacagatattagtttcttccatctatattttcttagttaacataattttttaaatctatgaaatcttacctgactgcagattcatcaggaattccaacatctattaaagaaaaaggtaaaatgcattttaaatcaataataaatgtacagaatattaaaatcataagaatgcacagtgatgcatgcctctaatccaaactacttgggaggatgaggcaggaggatcacttgaggagcccagaagtttgagaccagcttgggaaacatagtaagactctaccttcataaaaaaattgtgcacacttgtgtgtatgctttagatcctgtttttgttgttgttgttgttgttgttttggtttggtttggttttttaaagcataagactgacgctttgttacaaagcattcctttgggagcatgcctgcgaycttattagaattaacattcattatacgtattggtaggtaattaatgcagtaagaactcttccctctgtatttattagatgcaaagaagaataaatttattaaaatttggtatctacaagtgaactgcagtatacaagtcatcctagccaaagcctatgagattgagtaaaaatggtattgttagcagaacaggtgtgatgagtcaacagtgtcaaagagcatgatttctggaccaaaatatgaggggccattacaacagagtatacactagtaccccttatccactatatgcgcagaaagacatacttgacacgtttttctctgctgtcacaccacagcaacaatcatcaacaaagaaggcttctgtgaccaaatgtgtggagagtttttcc

SEQ ID NO: 677767 - DNA, 606 bp, Homo sapiens
gagttacattaatcagggatcaaaacaaaaatctttattttcccaagagtcccttggcctctgccagatgctttttaggaggaagagatttcacttttcagggatgatccccatagaaatgggggtgaaattcagttgaaaaggtaaataaaaataaaagagttaaaagaacaccatcaaaaggcacatagaactcccaagtcagagttctaattggtcaggcaaaataggattgtgaatagagcagaaggctgcactgcaaaagaccctcaaactgccaacagaaatctgaaatccygaacaatgaacaccaggcaggtttggaagaaaatgctacttcaaagattcctagtaagacctttttacccatctggagagaccacacacacacacacacacacactcacgcttatgcacataactgatgagaatgttcccaggccttggtaaccttccaacaaccattgttgccaactgctgtgccctttggtcccaaaccacctgcctggtgcaacacaagccagaaattccagctgagcatcccaggaccatcaaagtttaccctagccaggtgacttccaagcctgagggaacagccagctcaaa

SEQ ID NO: 677768 - DNA, 1504 bp, Homo sapiens
gaaatcaccttagacctctggttttaagttttaaccatggctatatactacattcataacagtgacaagaaaaaaatgtaagagataaatgtatatggaaaggaatccaagagacaagatagaaaggtaaaatataccataaaaagtagaccatgatcctacttttatttaaaataatgattaatatatcagtatgtacacrgtagaatcatatgcatcaagaaaaaatgtgttgttattttctttcagggtagaatttcattttttatattattaatttctatcatatatcaaattttataagtatgtgttttcattccttttgaaagcagaaaagttaagtaaaaatatatatatttaaaatccacagcaaaaataaaagccttaacactaatctacagaatcataattatagaacagagaactagacaagtcatcacagaccaacttcactaagtctctcatattataaataatccaacaaagccagacaaaagggacctgtcccttagaagttaacagcaaaaataaaaaaacacaagtatatcctaatttccagttcaggattccatgacctgcttaaattagcattttctaaactatgatccacagaacataattgagaaattcaggcttaaagagcatagttgtggcactaactcttagatattctaggattagtgtaaatgctaaaagtcttttaaaaagtttaaaataggatatcagtttctcattaaaatgtgtttattagggaaacaagtagagatgaaaagggaaaacatgagctttctcagcttagacatagtctgttgtcacttcctattttatgacacaacttttctatacgaatattctattttattatatgtatcccacttgctcttttgtattagaatacatgatagatgctacggttaacaaagagagttctagaattctgttactagaacaagtgactacatagctcttagatcaactcataaaaatctttaaaaatagaactcatttatattaaccagaagatgacatctttcaaaagtacaaagtccttgtttatacaaagctaaataattaataacaaaacatcctcttcccatttcctatcactggagcacatatgcttcccaatgaaacacttcctgcagtgaaaactacctttcttctaagtatcagaagtgaaaggcacacctgacatgtacacaaccgcttctcatttaagagacaaagatacgtctagaagggccaaataaagattttttaagtgttggaataaaagatttatttaaataagaaatcatttttaaacaaaaacaaaaactcctaaaaccataatgaacacctttaaatattaaaaaaaaaaaaaaaattctagttttcccctaacctctgatcacacttctgactggttcaatcagaggttcaatattttctatctagtctctaagtgttgggagactttgaaagctggatccttgacatcctctgtccatattctcaccatgca

SEQ ID NO: 677769 - DNA, 650 bp, Homo sapiens
ggaggttgcagtgagccaagatcatgccactgcactccagcctaggtgacagaatgagactgtctcagaaaacaaacagacaaacaaacaaacaaaaccccacaactgtatccagctgaagcaagctacatargaatactcaaaatacatacatctcaactaccagctgcctgagttctccacatgttaaagccatacctgcccacctgtggtgttacagcattacttgctgtacacttcaggtaaccctccttctaccacctcagaaaaaatcaaaagctgcaaccattctgatgcctactttcacaagcaaacttccagtttaaaaaaaaaaaacaccctatttatttttgtatttatgtgtttcttagccatttaaaatggtgctacagtttagcgtcttgtcttacatgtcgttgtctaagtttctgaatgttattcccctaactccatcttccctgtaagccctgtggttttagggtgcagttttgcttagtgcagggaattttaaagaattcatgttacattatggcagaattgactgtagatcataagactctcaaaagacattgcctccatcctttacactttatactttgtaaaaatccccttactacacacttccctaacaccttacattttccccttcc

SEQ ID NO: 677770 - DNA, 660 bp, Homo sapiens
ttccagtgtttgcccattcaataagcattcaataagcatctatttctgcatcccattcaatgaatctttaagcaatttgaaactctctaataaaactcattggtatatctaagccagagcagattctgttctttccaaatgaaccctgactaaataacaraattattgcagctacatgtgtctgggatatgaggagtcagtgaattgtatgtgttataaaactgcgaagaagattgaaaatatagtgtagaaaacaaaagaaacttcaactttttctgtaatatatattttgtcatttaaatctctaaaacagaagtgtcaagattttatgcctattactcattgattgtgagaatacagttttttattattactgtcatttttttctacaatctaaaacattaaaagttattttaaaagatctatatactgcagtataaaatattttttccttgtgaaattataaataaactaagagtctattaattcacttagagttcatgctcattatgatttcatagacttttccaacatggttgttatatttgcaagtaataccccaagctcagttctaaaaagacagttcaggtatggtacttagaaaggtcttaaatgaaaacattgattacaaatgatctttgctattcaagatgatgttag

SEQ ID NO: 677771 - DNA, 2062 bp, Homo sapiens
tggaggtcataatcctaagcaaattgatgtataaacagaaacccaaataacccatgttctcacttataagtagggccaaacatcgagcactcagggacgtaaacatgggaataatagccactgcagactactggatatgggaggggtgggaaattggtcaaaaaactacctgttggttattatactcactaccaaggtatagtatacccatttaacaaacctgtacatgtaccccaaaatccaaaatccaaatcccacaaattccaaatttatgggaaacatctaaagcaatacacaaactataacattaaatgcttatattagaagatagggaatattgaaaattataaaactaaatattttacataagtgttttagaattataaatatttatccaaataatatagaagacaaatattaagaaagactaacatattaatcaataaacaaatataaagttaattcctaaaggcaaaaaatgatcatattaaaaaatattaataagctattttctggggaaaacaaaagcaaaatacaggaactaattatactggaagtaaaactcataaaacaatgatgtgtaaaaacattttatcaatgcatgtaaaaatttaggtgaataaaaacattcatagaaagatacactttacctatgctgccacagaaaagtgtgaataatcctacatttatgattcaaattaatttgctagatacaaatcttttaaaaagaaaatattttatcctattttgtgatacttaccaaattttcaagaaatacaaagtgccaaatatgtacagttttttgataaataaaattgttctgcagttatttgaggctgatataaaccattaatgtgtgtgtctatatgtatacatgtaaaatgccaaaaatctaggataaattacaggtccattttacttaccaactttagtataaatattcaaaatataacaatcgccaactaactccaaaacaaataaattattatttaaaaaaaagtaatacaaatataataacaatggtgatagtaattgctaactactagtttaaataatgcttactatagttcaaatactgttctaaataatttgcatataccaactaatttaattatcacaatgaccttgtatcatatgtgctattattactatcatttcttgaggaaactgaggcactgcacgttcagacagaaaggaagtggcaaagctttcttagacttatatccagaaaatcagattgaagtgtatattgacattcaaaacaaagaaaactaaaaataaatatttaaagataaatatatgaacatgataaacctgtatgtatatattcatactttgtatatagagtcatgcattatttaatgatgagaatgccatctgagacatgcatcattaggtgattttgtccttgtgcaagcatcataaggtatacttacacaaacctagatggtatggcctaaaacacacttatgctatatgatataacctattgctcctaggctacaaactagtacatgttactgtactgaatactgcagggaattgtaacacaatggtaagaatttgtatatctaaacatagaagggcaatgtgttgttctaatacattataatctctacaacatcactaggtaacagaaatttttcagctgcattataatcttatgggaccaaaataatatatgtatttcttcattgattgaaaagttgttatgtggcacatgactgcaaaataaaaattcttaatagatattttgattgaagttgttgaagggattaatcattaagagagatttatatgaagattaaaaattattggtatgacctgaggatttttctttattttattaaataaccctttatatacatgtatacagaagtgtatataaatttatacatatgtgcatattgtattagttctgtaggtacatgtatatttatatctatttctattctaakctctgcatttatattagaaaaagtatcaatatttgacctaataaattattctgtaagttagaaggcgattttggagcagtaattagcatctataataagaggca

SEQ ID NO: 677772 - DNA, 977 bp, Homo sapiens
tgcagatcctcgacaacatgcataccctttgacaaagaaatttaacttctaagaattatcctaaagaaataattgaataagtaagtatgcaaacgtggaattagaagatgataaattttatttacaataacaaaaattggaagcagcctaattgtccagtattattagttgtatctatataataaaagagtatagagccaataacayaggattatatttattgacatgtaaaatagttattggcaaagcaagccacaaaactgtatattcaatataatttcatcttattaagaaaaatacgtatgtatatgcatggggaaaaaaaaaaacagaaaaaacctaccaaaacatggattaattctagatgaattgtgcctgttacaggggtaacaaaaagaagggggttcctctagggggcaccaactcccaaatactgtggaagtttcagcccagaaaggagaggtacttggtacccattttaggaatagctgaactcaccggttcactggttatttttcctacaccccaaaggcctcctggatgcttccacgatgtgaatttagactgggtgtcttttctaatgagaacatgcagccacagcccttgggtgtatgcttttaacaatgatttttctggttctttggccgctggttcattgccaggttcatgtttactttctgaataagcctcttaatgtcacaactttgttccattacagaatgcaactgccctgcctggtacttggcgaagaacagacgtgcacttagagaacccagaataccacaccagatggtatttcaaatattttttaggacaaggtaattatgctattgtggtggtagggaagaaagggtattcaaaatggaagttagtgttcatataacttctggtatcctatatgagtgaaactagccattttaggaacactaacatcagggcatttcacttcaaggtcagtagtaagctttgtaggctaa

SEQ ID NO: 677773 - DNA, 1692 bp, Homo sapiens
tgctctgtgatttacataaaatttattttaatttagcctagtacagtgcttgtcataaaatagacattcattaataaatatttgttgaataaaagagtatccatctttctactgatttatacaagttatttatgtattaaatatgtaaacaatttgtcagttttatatgttgtgaatatttctccaactcgtcacttgccttattgtgtttttaacactttaatttgctcaaatctatcatattttctattttaaaatataactttatgcttaaaaagaccttccctactactctgcattgaaatttctgaccatctgcagggaaaatgttttaaggcgatgtttttcctatttatctcaagactaatcatgcctttagccctcaccaagattattggtaaagtgagagttaactcctgtgaactgttttctctggaggaggaattctcagtttctggcagcctatccatggctaaactagtagacgttttctcgcttccagtactggtacagcctttttccatgttttattcctttgtttgttgcagtgcctaactcgtgaagcagagggagtggagttaggaggaagaggtaaagggaaaggagaaagagaagctaagtgattaaatcaaatcaatatttatttggaaggtactataggtattatcagaacaattttaaggtggttacaattactctttttttatataatcaaggaaattagcaaaaaggagtgwcagaactgctccagtgcacatagtcattgtgagagctgaaattctaattagggaggctaattctatgacctgcatcttaaccctgccttatatgcagctcaaatttaacatgtgaaaacgaaacattttacttctgcctcaaaatctgcttcttcctggttcttccctatctctctatcattaatttccctactacttattgcacttggaaaaaaatccaaataccccataccatggcctagaaggccctgcaagattatacatctttgacctcatcttgaaaatttcttttcctttgtttaatcatttactcaacattggccttattgctggtcttcaaacacaacaagcttatatctgtctttcgacttttgcactagctatgtttcatattttaatacttatccttgaaattgtgactttttgccatctaccatttatctcaaaggtcacctctgcagtgaagctttccctgattaaccagtttaaaatagccatctaatcatttgtctatttttatctcatatcagttggtactttaagctactgtatagcaatttcttatttgtttactttttgtctctccattcacgtaaacatagtaaaatataagctctgtgagagcagcgatttcactatctttactcactgcagtgtcaccactgctcagaaaagagtttgaaacaccagatatgctcaatcaatatttgtttagcatataaagggtatattgaaaagagaaatgcataatcaaaactgggtgtaggaaaatgtatctaattgtatgcaggatggactgcaatgggaaaaagtattagtcgaggagactagttaggaagctgcgtaatacagaggatgatgctagaaataagaagaaatgtgagaagtataagtcagttaaaaccagtagaattctgaaactgagctgaagggactctaggtcccttggaataaa

SEQ ID NO: 677774 - DNA, 2211 bp, Homo sapiens
  misc_feature 1112, 1113, 1114, 1115, 1116, 1117, 1118, 1119, 1120, 1121,1122, 1123, 1124, 1125, 1126, 1127, 1128, 1129, 1130, 1131,1132, 1133, 1134, 1135, 1136, 1137, 1138, 1139, 1140, 1141,1142, 1143, 1144, 1145, 1146, 1147, 1148, 1149, 1150: n = A,T,C or G
  misc_feature 1151, 1152, 1153, 1154, 1155, 1156, 1157, 1158, 1159, 1160,1161, 1162, 1163, 1164, 1165, 1166, 1167, 1168, 1169, 1170,1171, 1172, 1173, 1174, 1175, 1176, 1177, 1178, 1179, 1180,1181, 1182, 1183, 1184, 1185, 1186, 1187, 1188, 1189: n = A,T,C or G
  misc_feature 1190, 1191, 1192, 1193, 1194, 1195, 1196, 1197, 1198, 1199,1200, 1201, 1202, 1203, 1204, 1205, 1206, 1207, 1208, 1209,1210, 1211: n = A,T,C or G
cttgaagagtatgatgccacactcctgttgatacaattccacattacgttaaatataaggtagattaattttaagaaactggcagttcttaaaaaattagctcacagaagtttaaaagtaaaatccctctcttcaaaatgcataaattaaaaagaactatgttcactaagtgttgctgagttcctcgttataaataggcaggcactaaaatactcctgttcccctggcttaaacactttttcctcatcttgtttactttgtctaactcccattcatcacaaagtgcaaacagacttcacctgctccaagatcttctcctgataccactaccattttggctaagttaggtgtcaccataaccctcatatttatctcctcagaacgcttagtatgctgaagggtactagtctcttcttgctctccctaactaaactatcaacagccaacttgacagtaagggcaggtcctaatggtctttgtatccagtgtctatcacagtgcctcatgtgcaagacacatccactctcacaggacttctgtggggattaaatgaaacaacatttataaagtgcctacccacagtatggaacatggtatatgctcaattaatttttttatagacagatagatagcaaatgttaaccaagcaaataaggcttaattaaatagaattcttaaataaacaaacttgaaaaaataaaatgaaacttttgcttcattttgtaayattaagatatcttagctcagttgataaaagactgattgttaatgaaaataatagaaaatactattattttccactttattgatggaaacttctaaaataatattgtttattatattatttagaactttgtagaaaggagggggctacataattttttttttttttgagatagggtctcactcagggtcacccaggctgaagtgcagtggcacaatcatggttcactgcagcctcgacctcacaggctcaagcaatctccccatctcagcctcccaagtagcagggaccacaggcacgtgccaccacaccaggatgagggctacatagttttagaaatgactccttatatctgttccataatctttcaagaaaagacaataaaatnnnnnnnnnnnnnnnnnnnnnnnnnnnnnnnnnnnnnnnnnnnnnnnnnnnnnnnnnnnnnnnnnnnnnnnnnnnnnnnnnnnnnnnnnnnnnnnnnnnnatttttatataccgatgcctacactttggcagaactatttttttttattgtgcacatacttttcctcagtgttttttttttatttttgatttttaatttttttttttttttttgagatgaagtctcactctgtcgcctaggctggagtacaatggcacgatctcggctcactgcaacctccgcctcctgggttcaagtgattctcctgtctcagcctccatagtagctgggattacaggcgtgtgccaccacacccagataatttttttgtatttttgtagagacagggtttcaccatttggccaggctgttctcaaactcctgacctcaagtgatccacctgcctcagcttcccaaggtgctgcgattacaggcgtgagccattgcggccggccttcctcatagtatttatgtaatattcacattaatgtaatagggcaaaagagtacatgactgtcttttttttttttttttaagatggagtcttgttctgtctcccagacgagtgcagtggtgtgatctcggctcactgcagcctctgcctcccaggttccagtgattaccctgcttcagcctcttgagtagctgggattacaggcacccaccaccacacctggctaatttctgtattttcagtagatacggggtttcaccatattggccaggctggtctcaaactcctgacctcagatgatctgccctcctgggcctcccaaagtgctaggattacaggcatgagtcactgtgcccagccatgactgccatttttaaaatgacctgctataatgttatcccttgcattttatcaatcaaataattttaatgtgagttttgttgtttttttttttccagacagcatcttgctctgtcacccaggctggagtactgtggcatgataatggctcactgcagccttgatgtcccaagctcaagcaatcttcccacttcagcctcccaagcagctgggactacaagcatgtactaccgcatccagctaatg

SEQ ID NO: 677775 - DNA, 2211 bp, Homo sapiens
  misc_feature 1112, 1113, 1114, 1115, 1116, 1117, 1118, 1119, 1120, 1121,1122, 1123, 1124, 1125, 1126, 1127, 1128, 1129, 1130, 1131,1132, 1133, 1134, 1135, 1136, 1137, 1138, 1139, 1140, 1141,1142, 1143, 1144, 1145, 1146, 1147, 1148, 1149, 1150: n = A,T,C or G
  misc_feature 1151, 1152, 1153, 1154, 1155, 1156, 1157, 1158, 1159, 1160,1161, 1162, 1163, 1164, 1165, 1166, 1167, 1168, 1169, 1170,1171, 1172, 1173, 1174, 1175, 1176, 1177, 1178, 1179, 1180,1181, 1182, 1183, 1184, 1185, 1186, 1187, 1188, 1189: n = A,T,C or G
  misc_feature 1190, 1191, 1192, 1193, 1194, 1195, 1196, 1197, 1198, 1199,1200, 1201, 1202, 1203, 1204, 1205, 1206, 1207, 1208, 1209,1210, 1211: n = A,T,C or G
cttgaagagtatgatgccacactcctgttgatacaattccacattacgttaaatataaggtagattaattttaagaaactggcagttcttaaaaaattagctcacagaagtttaaaagtaaaatccctctcttcaaaatgcataaattaaaaagaactatgttcactaagtgttgctgagttcctcgttataaataggcaggcactaaaatactcctgttcccctggcttaaacactttttcctcatcttgtttactttgtctaactcccattcatcacaaagtgcaaacagacttcacctgctccaagatcttctcctgataccactaccattttggctaagttaggtgtcaccataaccctcatatttatctcctcagaacgcttagtatgctgaagggtactagtctcttcttgctctccctaactaaactatcaacagccaacttgacagtaagggcaggtcctaatggtctttgtatccagtgtctatcacagtgcctcatgtgcaagacacatccactctcacaggacttctgtggggattaaatgaaacaacatttataaagtgcctacccacagtatggaacatggtatatgctcaattaatttttttatagacagatagatagcaaatgttaaccaagcaaataaggcttaattaaatagaattcttaaataaacaaacttgaaaaaataaaatgaaacttttgcttcattttgtaatattaagatatcttagctcagttgataaaagactgattrttaatgaaaataatagaaaatactattattttccactttattgatggaaacttctaaaataatattgtttattatattatttagaactttgtagaaaggagggggctacataattttttttttttttgagatagggtctcactcagggtcacccaggctgaagtgcagtggcacaatcatggttcactgcagcctcgacctcacaggctcaagcaatctccccatctcagcctcccaagtagcagggaccacaggcacgtgccaccacaccaggatgagggctacatagttttagaaatgactccttatatctgttccataatctttcaagaaaagacaataaaatnnnnnnnnnnnnnnnnnnnnnnnnnnnnnnnnnnnnnnnnnnnnnnnnnnnnnnnnnnnnnnnnnnnnnnnnnnnnnnnnnnnnnnnnnnnnnnnnnnnnatttttatataccgatgcctacactttggcagaactatttttttttattgtgcacatacttttcctcagtgttttttttttatttttgatttttaatttttttttttttttttgagatgaagtctcactctgtcgcctaggctggagtacaatggcacgatctcggctcactgcaacctccgcctcctgggttcaagtgattctcctgtctcagcctccatagtagctgggattacaggcgtgtgccaccacacccagataatttttttgtatttttgtagagacagggtttcaccatttggccaggctgttctcaaactcctgacctcaagtgatccacctgcctcagcttcccaaggtgctgcgattacaggcgtgagccattgcggccggccttcctcatagtatttatgtaatattcacattaatgtaatagggcaaaagagtacatgactgtcttttttttttttttttaagatggagtcttgttctgtctcccagacgagtgcagtggtgtgatctcggctcactgcagcctctgcctcccaggttccagtgattaccctgcttcagcctcttgagtagctgggattacaggcacccaccaccacacctggctaatttctgtattttcagtagatacggggtttcaccatattggccaggctggtctcaaactcctgacctcagatgatctgccctcctgggcctcccaaagtgctaggattacaggcatgagtcactgtgcccagccatgactgccatttttaaaatgacctgctataatgttatcccttgcattttatcaatcaaataattttaatgtgagttttgttgtttttttttttccagacagcatcttgctctgtcacccaggctggagtactgtggcatgataatggctcactgcagccttgatgtcccaagctcaagcaatcttcccacttcagcctcccaagcagctgggactacaagcatgtactaccgcatccagctaatg

SEQ ID NO: 677776 - DNA, 2211 bp, Homo sapiens
  misc_feature 1112, 1113, 1114, 1115, 1116, 1117, 1118, 1119, 1120, 1121,1122, 1123, 1124, 1125, 1126, 1127, 1128, 1129, 1130, 1131,1132, 1133, 1134, 1135, 1136, 1137, 1138, 1139, 1140, 1141,1142, 1143, 1144, 1145, 1146, 1147, 1148, 1149, 1150: n = A,T,C or G
  misc_feature 1151, 1152, 1153, 1154, 1155, 1156, 1157, 1158, 1159, 1160,1161, 1162, 1163, 1164, 1165, 1166, 1167, 1168, 1169, 1170,1171, 1172, 1173, 1174, 1175, 1176, 1177, 1178, 1179, 1180,1181, 1182, 1183, 1184, 1185, 1186, 1187, 1188, 1189: n = A,T,C or G
  misc_feature 1190, 1191, 1192, 1193, 1194, 1195, 1196, 1197, 1198, 1199,1200, 1201, 1202, 1203, 1204, 1205, 1206, 1207, 1208, 1209,1210, 1211: n = A,T,C or G
cttgaagagtatgatgccacactcctgttgatacaattccacattacgttaaatataaggtagattaattttaagaaactggcagttcttaaaaaattagctcacagaagtttaaaagtaaaatccctctcttcaaaatgcataaattaaaaagaactatgttcactaagtgttgctgagttcctcgttataaataggcaggcactaaaatactcctgttcccctggcttaaacactttttcctcatcttgtttactttgtctaactcccattcatcacaaagtgcaaacagacttcacctgctccaagatcttctcctgataccactaccattttggctaagttaggtgtcaccataaccctcatatttatctcctcagaacgcttagtatgctgaagggtactagtctcttcttgctctccctaactaaactatcaacagccaacttgacagtaagggcaggtcctaatggtctttgtatccagtgtctatcacagtgcctcatgtgcaagacacatccactctcacaggacttctgtggggattaaatgaaacaacatttataaagtgcctacccacagtatggaacatggtatatgctcaattaatttttttatagacagatagatagcaaatgttaaccaagcaaataaggcttaattaaatagaattcttaaataaacaaacttgaaaaaataaaatgaaacttttgcttcattttgtaatattaagatatcttagctcagttgataaaagactgattgttaatgaaaataatagaaaatactattattttccactttattgatggaaacttctaaaataatattgtttattatattatttagaactttgtagaaaggagggggctacataattttttttttttttgagatagggtctcactcasggtcacccaggctgaagtgcagtggcacaatcatggttcactgcagcctcgacctcacaggctcaagcaatctccccatctcagcctcccaagtagcagggaccacaggcacgtgccaccacaccaggatgagggctacatagttttagaaatgactccttatatctgttccataatctttcaagaaaagacaataaaatnnnnnnnnnnnnnnnnnnnnnnnnnnnnnnnnnnnnnnnnnnnnnnnnnnnnnnnnnnnnnnnnnnnnnnnnnnnnnnnnnnnnnnnnnnnnnnnnnnnnatttttatataccgatgcctacactttggcagaactatttttttttattgtgcacatacttttcctcagtgttttttttttatttttgatttttaatttttttttttttttttgagatgaagtctcactctgtcgcctaggctggagtacaatggcacgatctcggctcactgcaacctccgcctcctgggttcaagtgattctcctgtctcagcctccatagtagctgggattacaggcgtgtgccaccacacccagataatttttttgtatttttgtagagacagggtttcaccatttggccaggctgttctcaaactcctgacctcaagtgatccacctgcctcagcttcccaaggtgctgcgattacaggcgtgagccattgcggccggccttcctcatagtatttatgtaatattcacattaatgtaatagggcaaaagagtacatgactgtcttttttttttttttttaagatggagtcttgttctgtctcccagacgagtgcagtggtgtgatctcggctcactgcagcctctgcctcccaggttccagtgattaccctgcttcagcctcttgagtagctgggattacaggcacccaccaccacacctggctaatttctgtattttcagtagatacggggtttcaccatattggccaggctggtctcaaactcctgacctcagatgatctgccctcctgggcctcccaaagtgctaggattacaggcatgagtcactgtgcccagccatgactgccatttttaaaatgacctgctataatgttatcccttgcattttatcaatcaaataattttaatgtgagttttgttgtttttttttttccagacagcatcttgctctgtcacccaggctggagtactgtggcatgataatggctcactgcagccttgatgtcccaagctcaagcaatcttcccacttcagcctcccaagcagctgggactacaagcatgtactaccgcatccagctaatg

SEQ ID NO: 677777 - DNA, 2211 bp, Homo sapiens
  misc_feature 1112, 1113, 1114, 1115, 1116, 1117, 1118, 1119, 1120, 1121,1122, 1123, 1124, 1125, 1126, 1127, 1128, 1129, 1130, 1131,1132, 1133, 1134, 1135, 1136, 1137, 1138, 1139, 1140, 1141,1142, 1143, 1144, 1145, 1146, 1147, 1148, 1149, 1150: n = A,T,C or G
  misc_feature 1151, 1152, 1153, 1154, 1155, 1156, 1157, 1158, 1159, 1160,1161, 1162, 1163, 1164, 1165, 1166, 1167, 1168, 1169, 1170,1171, 1172, 1173, 1174, 1175, 1176, 1177, 1178, 1179, 1180,1181, 1182, 1183, 1184, 1185, 1186, 1187, 1188, 1189: n = A,T,C or G
  misc_feature 1190, 1191, 1192, 1193, 1194, 1195, 1196, 1197, 1198, 1199,1200, 1201, 1202, 1203, 1204, 1205, 1206, 1207, 1208, 1209,1210, 1211: n = A,T,C or G
cttgaagagtatgatgccacactcctgttgatacaattccacattacgttaaatataaggtagattaattttaagaaactggcagttcttaaaaaattagctcacagaagtttaaaagtaaaatccctctcttcaaaatgcataaattaaaaagaactatgttcactaagtgttgctgagttcctcgttataaataggcaggcactaaaatactcctgttcccctggcttaaacactttttcctcatcttgtttactttgtctaactcccattcatcacaaagtgcaaacagacttcacctgctccaagatcttctcctgataccactaccattttggctaagttaggtgtcaccataaccctcatatttatctcctcagaacgcttagtatgctgaagggtactagtctcttcttgctctccctaactaaactatcaacagccaacttgacagtaagggcaggtcctaatggtctttgtatccagtgtctatcacagtgcctcatgtgcaagacacatccactctcacaggacttctgtggggattaaatgaaacaacatttataaagtgcctacccacagtatggaacatggtatatgctcaattaatttttttatagacagatagatagcaaatgttaaccaagcaaataaggcttaattaaatagaattcttaaataaacaaacttgaaaaaataaaatgaaacttttgcttcattttgtaatattaagatatcttagctcagttgataaaagactgattgttaatgaaaataatagaaaatactattattttccactttattgatggaaacttctaaaataatattgtttattatattatttagaactttgtagaaaggagggggctacataattttttttttttttgagatagggtctcactcagkgtcacccaggctgaagtgcagtggcacaatcatggttcactgcagcctcgacctcacaggctcaagcaatctccccatctcagcctcccaagtagcagggaccacaggcacgtgccaccacaccaggatgagggctacatagttttagaaatgactccttatatctgttccataatctttcaagaaaagacaataaaatnnnnnnnnnnnnnnnnnnnnnnnnnnnnnnnnnnnnnnnnnnnnnnnnnnnnnnnnnnnnnnnnnnnnnnnnnnnnnnnnnnnnnnnnnnnnnnnnnnnnatttttatataccgatgcctacactttggcagaactatttttttttattgtgcacatacttttcctcagtgttttttttttatttttgatttttaatttttttttttttttttgagatgaagtctcactctgtcgcctaggctggagtacaatggcacgatctcggctcactgcaacctccgcctcctgggttcaagtgattctcctgtctcagcctccatagtagctgggattacaggcgtgtgccaccacacccagataatttttttgtatttttgtagagacagggtttcaccatttggccaggctgttctcaaactcctgacctcaagtgatccacctgcctcagcttcccaaggtgctgcgattacaggcgtgagccattgcggccggccttcctcatagtatttatgtaatattcacattaatgtaatagggcaaaagagtacatgactgtcttttttttttttttttaagatggagtcttgttctgtctcccagacgagtgcagtggtgtgatctcggctcactgcagcctctgcctcccaggttccagtgattaccctgcttcagcctcttgagtagctgggattacaggcacccaccaccacacctggctaatttctgtattttcagtagatacggggtttcaccatattggccaggctggtctcaaactcctgacctcagatgatctgccctcctgggcctcccaaagtgctaggattacaggcatgagtcactgtgcccagccatgactgccatttttaaaatgacctgctataatgttatcccttgcattttatcaatcaaataattttaatgtgagttttgttgtttttttttttccagacagcatcttgctctgtcacccaggctggagtactgtggcatgataatggctcactgcagccttgatgtcccaagctcaagcaatcttcccacttcagcctcccaagcagctgggactacaagcatgtactaccgcatccagctaatg

SEQ ID NO: 677778 - DNA, 2211 bp, Homo sapiens
  misc_feature 1112, 1113, 1114, 1115, 1116, 1117, 1118, 1119, 1120, 1121,1122, 1123, 1124, 1125, 1126, 1127, 1128, 1129, 1130, 1131,1132, 1133, 1134, 1135, 1136, 1137, 1138, 1139, 1140, 1141,1142, 1143, 1144, 1145, 1146, 1147, 1148, 1149, 1150: n = A,T,C or G
  misc_feature 1151, 1152, 1153, 1154, 1155, 1156, 1157, 1158, 1159, 1160,1161, 1162, 1163, 1164, 1165, 1166, 1167, 1168, 1169, 1170,1171, 1172, 1173, 1174, 1175, 1176, 1177, 1178, 1179, 1180,1181, 1182, 1183, 1184, 1185, 1186, 1187, 1188, 1189: n = A,T,C or G
  misc_feature 1190, 1191, 1192, 1193, 1194, 1195, 1196, 1197, 1198, 1199,1200, 1201, 1202, 1203, 1204, 1205, 1206, 1207, 1208, 1209,1210, 1211: n = A,T,C or G
cttgaagagtatgatgccacactcctgttgatacaattccacattacgttaaatataaggtagattaattttaagaaactggcagttcttaaaaaattagctcacagaagtttaaaagtaaaatccctctcttcaaaatgcataaattaaaaagaactatgttcactaagtgttgctgagttcctcgttataaataggcaggcactaaaatactcctgttcccctggcttaaacactttttcctcatcttgtttactttgtctaactcccattcatcacaaagtgcaaacagacttcacctgctccaagatcttctcctgataccactaccattttggctaagttaggtgtcaccataaccctcatatttatctcctcagaacgcttagtatgctgaagggtactagtctcttcttgctctccctaactaaactatcaacagccaacttgacagtaagggcaggtcctaatggtctttgtatccagtgtctatcacagtgcctcatgtgcaagacacatccactctcacaggacttctgtggggattaaatgaaacaacatttataaagtgcctacccacagtatggaacatggtatatgctcaattaatttttttatagacagatagatagcaaatgttaaccaagcaaataaggcttaattaaatagaattcttaaataaacaaacttgaaaaaataaaatgaaacttttgcttcattttgtaatattaagatatcttagctcagttgataaaagactgattgttaatgaaaataatagaaaatactattattttccactttattgatggaaacttctaaaataatattgtttattatattatttagaactttgtagaaaggagggggctacataattttttttttttttgagatagggtctcactcagggtcacccaggctgaagtgcagtggcacaatcatggttcactgcagcctcgacctcacaggctcaagcaatctccccatctcagcctcccaagtagcwgggaccacaggcacgtgccaccacaccaggatgagggctacatagttttagaaatgactccttatatctgttccataatctttcaagaaaagacaataaaatnnnnnnnnnnnnnnnnnnnnnnnnnnnnnnnnnnnnnnnnnnnnnnnnnnnnnnnnnnnnnnnnnnnnnnnnnnnnnnnnnnnnnnnnnnnnnnnnnnnnatttttatataccgatgcctacactttggcagaactatttttttttattgtgcacatacttttcctcagtgttttttttttatttttgatttttaatttttttttttttttttgagatgaagtctcactctgtcgcctaggctggagtacaatggcacgatctcggctcactgcaacctccgcctcctgggttcaagtgattctcctgtctcagcctccatagtagctgggattacaggcgtgtgccaccacacccagataatttttttgtatttttgtagagacagggtttcaccatttggccaggctgttctcaaactcctgacctcaagtgatccacctgcctcagcttcccaaggtgctgcgattacaggcgtgagccattgcggccggccttcctcatagtatttatgtaatattcacattaatgtaatagggcaaaagagtacatgactgtcttttttttttttttttaagatggagtcttgttctgtctcccagacgagtgcagtggtgtgatctcggctcactgcagcctctgcctcccaggttccagtgattaccctgcttcagcctcttgagtagctgggattacaggcacccaccaccacacctggctaatttctgtattttcagtagatacggggtttcaccatattggccaggctggtctcaaactcctgacctcagatgatctgccctcctgggcctcccaaagtgctaggattacaggcatgagtcactgtgcccagccatgactgccatttttaaaatgacctgctataatgttatcccttgcattttatcaatcaaataattttaatgtgagttttgttgtttttttttttccagacagcatcttgctctgtcacccaggctggagtactgtggcatgataatggctcactgcagccttgatgtcccaagctcaagcaatcttcccacttcagcctcccaagcagctgggactacaagcatgtactaccgcatccagctaatg

SEQ ID NO: 677779 - DNA, 599 bp, Homo sapiens
tcatatacacaattatattaaggataaaatttaccattttttaagagtctcaaaagagagagtgacagagatttacttatagtcgataccctataactagaattttttgatttctgacaccttcctatacatttctagtctctgagaatactattaactaaactaaatggtagttgtacattcaaagcatagttctctgggaaacagaaaatcacaatacttgtaaagaatgactatcttctaaaacaaatatagcttttaaacaaatatagctttataaagcaaaggaggaaaagggaaaggaaggaacaaaggtctgaagagactgtataawcaggctgacaccagtcaatttatattataaataaggggaaattgattggacactgatttacattttttaaaaggtcacaaataaaatacatggtattcatagaaaaacataaataattaaacagacaaatctatatctgtgagaatcacaaattaaacaaaaatagaaaactataaatggggatgaagctactatttgctgtcccccagagccagatgcaggctgaggtggaaaggagcttgacttctggggttaatagggaata

SEQ ID NO: 677780 - DNA, 599 bp, Homo sapiens
tcatatacacaattatattaaggataaaatttaccattttttaagagtctcaaaagagagagtgacagagatttacttatagtcgataccctataactagaattttttgatttctgacaccttcctatacatttctagtctctgagaatactattaactaaactaaatggtagttgtacattcaaagcatagttctctgggaaacagaaaatcacaatacttgtaaagaatgactatcttctaaaacaaatatagcttttaaacaaatatagctttataaagcaaaggaggaaaagggaaaggaaggaacaaaggtctgaagagactgtataatcaggctgacaccagtcaatttatattataaataaggggaaattgattggacactgatttacattttttaaaaggtcacaaataaaatacatggtattcatagaaaaacataaataattaaacagacaaatctatatctgtgagaatcacaaattaaacaaaaatagaaaactataaatggggatgaagctactatttgctgtcccccagagccagatgcaggctgargtggaaaggagcttgacttctggggttaatagggaata

SEQ ID NO: 677781 - DNA, 609 bp, Homo sapiens
ttcctttgggaacacagggattaggaaatggtttgaccatcaagatgatggtaaatgaccatcttaaatataatggaaaccagaaattaatttactttttctaagccacataggtaggaatttgcctgatttcaaagtcagtgtttttcccacttaatttaaattctcctttgtctggtacccccattctgggtgtatactatactccatacagtctgtgcatagctctgtattttacaaccatcttgttttatacttatgtaattatgactctgtttatcttattagattgtgagttccttgaaggtagggccacatcagattctaatcaaatcaaaattatatggggtcgatatcagcctggccaacaaggtgaaaccccatctctgctaaaaatacaaaaaaaaaaaaaaaaaataggcgggagtggtggtgcatacctgtatttccagctactctggaggctgaggcaggagaatcgcttgaacctgggaggcagaagttgcagtgagccgagatcatgccactgmactccagcctgggcgacagagcaagactccatctcaaaaaaaaaaaaaaaattatatggaggttccaaggtacatgtta

SEQ ID NO: 677782 - DNA, 590 bp, Homo sapiens
aacacagttaataaacagtgcttttgcaaagatgaagtaagaagatatttcgaaacagccttttctttaaaaaaaaaatttttagacgtgaagaaaaatataaattttaaaatgtcattgttattcttgttgtagagaggaaaactgtggagagaacattctccaggcacaaagcagaccatgtagttcccatggaaatcccacagccaaggccacaggagtgggcagtggctggaaggtgacacagttcttgccacagccccctcagggccacacaaaagcacagagcctggacccaggacatgcctcaagcaataccytcactgccacaggccagattccgccagagaccagaaatcggcactcagtctacatgcaagccagccgctgtgcatctcaaggacatgctctgtgtcctgggagagaccaggatcccggaagtcatccagctgaaggaactgctgtccctagcagcgtgactcacctgtactccatcctctggtggtcgctatgagaaacagcaggaagctgagttggttcattgtaatctaaagaaagcaagatgaaggtcaccatcttggccatcattt

SEQ ID NO: 677783 - DNA, 641 bp, Homo sapiens
ctggtgactggcacttcctagttctacctggaactaggaaacgagtggcagtggaatttcagtgtcctttagtctttgccttctggctccagatcactttttttttttttgagacggagtctcattctgttacccaggctggaatgcagtagcatgatcttggctcactgcaacctccacctcccggcttcaagcgattctcctgccttagcctccccagcagctgggactacaggcacgcrccaccacgcccggctaattttttgtattatttatttatttatttgtttttgagacagagtctctctctgtcgccaggctggagtacagtggcacgatctcggctcactgcaaactccacctcccgggttcatgccattctcctgcctcagcctcctgagtagctgggactacaggcgcccgccaccatgcctggctaattttttctatttttagttgagacgaggtttcactgtgttagccaggatggtcttgatctcctgacctcatgatctgcccgccacggcctccaaaagtgctgggattacaggcgtgagccaccgcgcccggcccctaattttttgtatttttagtagagacgggttttcaccatgttggccaggctggtctcgaactcctga

SEQ ID NO: 677784 - DNA, 1197 bp, Homo sapiens
ttcctattcatattctgtattttatgtctgtcattccagccagttcagccttattaagtcttgttggagaatgggtgtggttgtttggaggacatacagcactctggccatttgagttactggagttcttgcattgattctttctcatctctgggtgtgggtattcctttaactgccatgtagattgagtacagtcaataggcttcttttctggatgttttcaccaggctgagactttgtgcagggtctttatttgaagctgacattttttctctggttttagaggggggtatgttacaagtaaagattttggagttacaagtaaagaaagaacagagagcagagtaagtgctaatagggggtagggcattcttttcaagaagtgggtgctaaaggatagagaacaattatttcttgagatgagatctaaggcagcattgcccttagacttcgaaaacagaaacctctgccctgggcccctcaactgttctgagtacaaggatacagtggtaaacacagttgataaagccttggtatcctgaaaccagtctgcctttttcagaattggtagcaacagcacagcttctctcaatgagatacatagtcaggatagaaatcaaaacaacttggtaaataatcacactatgtaaacattacttttcagtaacagtgtcataagtgactaaacactgcttagcaatagccaggtatagtcattatttatagtctctttttgagaagaattttactcaagccatctttcagaatcttgcttttcacaattttcctcttttctctttctggattgacagagagacaagttaaagaaaatcctcccacacagtttccactattggcgtaatgactaacactcttatcaaaatctggctgtctcagtgctggaatgtgctgcactatgctgtgtttgctcatgtgtaaaatggcacacttataactggcctgttttcccttttggtattaagaactcacattccaaatgcaagtgtgagagaagctggagggcrtggaattccctggtgttattggccttccctccgccatggtctgactggggtggtttgtcttgacttgctggtgccagggtgacagtgttgagatagcacagttcagggattccttaggtggggcttttccagcggagagtgtactgtcaagtaaaattgaatcaaagagtga

SEQ ID NO: 677785 - DNA, 611 bp, Homo sapiens
tttcccacattctcattttgtaccttgtcctagaataaacctcttgcaatagaaacaaaatttcagtgaatacaagatgttattactatctgtcatggatatggctgtttaaaagtgcttctttttatactrtgtgctttgctacttatattttcatgtacttcttgcaaatttctctgaaaacatttgtagatttatcatttagtgtcttgggttgtgccacaaacgtaaattttttaagaaaaaaatggaaaaaaattactggaacaaaggtcaaataactgtttccatttcggttgttttagacactatgggaagcatatttaatactttgattgcttatcaagaaaaacagactagaacagggaatattccaaaagaagtagcagaattgaaggaatctgctagaggcagatttaatttacattcttgttgtttacatatgggatttcttttttaatctttttgcttctactcaatataaatgagtctgtgattactgtttaataatttaccaagaatttcagtagatggagtattttctgcccaggaatctatatatgattgttcttgctaaactacagaacagctgcatgttttaaaatcaattg

SEQ ID NO: 677786 - DNA, 611 bp, Homo sapiens
tttcccacattctcattttgtaccttgtcctagaataaacctcttgcaatagaaacaaaatttcagtgaatacaagatgttattactatctgtcatggatatggctgtttaaaagtgcttctttttatactatgtgctttgctacttatattttcatgtacttcttgcaaatttctctgaaaacatttgtagatttatcatttagtgtcttgggttgtgccacaaacgtaaattttttaagaaaaaaatggaaaaaaattactggaacaaaggtcaaataactgtttccatttcggttgttttagacactatgggaagcatatttaatactttgattgcttatcaagaaaaayagactagaacagggaatattccaaaagaagtagcagaattgaaggaatctgctagaggcagatttaatttacattcttgttgtttacatatgggatttcttttttaatctttttgcttctactcaatataaatgagtctgtgattactgtttaataatttaccaagaatttcagtagatggagtattttctgcccaggaatctatatatgattgttcttgctaaactacagaacagctgcatgttttaaaatcaattg

SEQ ID NO: 677787 - DNA, 1677 bp, Homo sapiens
gtttcagatctcctagtatgagattttgttcttcaggtataagggatatgatgccagcttgtatatgaggatttctaaatctgggtccattacaactatctagaatgttaagacttgttatgattctgagaggcattttagatgccttttggggtgttgatcagtaattgctcttgtggccttatcattccctattttgaatgacaaaaacaagaaacaaccaaaaaaagatatgtcatatccagttctaatgtgaccacaagtacagttaaaaaaaaaaaaaaaaaaagcacaaaatagtactgatttcctgataattattcttcctttgttagcacagttccagaactctcaaggaaaagggtaataaactgggagattaatagtatttaataaactggagctgcctcctgttaattagataactccttaaacatttgataaaaggatttacaagaatctacgttccaccactgaccactctttacaccaataagaaaggttttcttacacttaattattctatctrttcttttcttttaaaagtgaattctccatagaaatgtatagctgatttatgctatcactttcaaaaggcaataggttaagcctgctaactatcaacacatttgctattctatcaaggaaatcctagttaatagacttcaaaagtattatagattttaaagaaacaatggatagttattctattggcaggctgtgagcacgtattggccccttgagagtcaactaaaaattgttcttaggggtaagtgaatttcaagaacagagagtatgcccttttttattcatctgggacagatatatcttttagaaatgaagttatacaagacacattagttgatgtttttctgacaatgttgacaatgaagtaccacaagggaccccattcttgctctcatacatttcatccttgaactgtatcatccttgaattgtagatatcacactgtgttgtagtttttagttggttgatattttaaaatgttgtttttttcccttaacaaagtatgaggcaaaaccttacgtatgtttcctaggatcccaatacttatttgtgttttatatgcctatatatttatttataataaagggagaatctgctactatttctcaaaaagtcataaatacggaagcttttgaggaaatactatagaaatactgtatgaatgtataatatatacttacttcccaaccacatatttgccatcccttgcgatgccctccctgtgttactgacttgtgatataaaagaggaatggttttccaagtgggaattaacaatattatagaagtttaattccactcgatctttttttaagtcaacatttgaacaagtgccatgttttccactaaactctctctgattggactcaagaatgactaacgttggctcttccaaaaggagtttatgaattattatggtaaatatccaacatatatgagaaaaaccccaggaggctagggggtttctatccttgtttattcctgtatgcccatttctagaagttttctcattcatggtaggccctgataaatagttgtataatatttaattgaatagtagttactatcaaaaagctaccaagggagaaatctaatcttccatgtggacatgagaaagatagtatgcttaatcttgagactgaaagatcaa

SEQ ID NO: 677788 - DNA, 1677 bp, Homo sapiens
gtttcagatctcctagtatgagattttgttcttcaggtataagggatatgatgccagcttgtatatgaggatttctaaatctgggtccattacaactatctagaatgttaagacttgttatgattctgagaggcattttagatgccttttggggtgttgatcagtaattgctcttgtggccttatcattccctattttgaatgacaaaaacaagaaacaaccaaaaaaagatatgtcatatccagttctaatgtgaccacaagtacagttaaaaaaaaaaaaaaaaaaagcacaaaatagtactgatttcctgataattattcttcctttgttagcacagttccagaactctcaaggaaaagggtaataaactgggagattaatagtatttaataaactggagctgcctcctgttaattagataactccttaaacatttgataaaaggatttacaagaatctacgttccaccactgaccactctttacaccaataagaaaggttttcttacacttaattattctatctattcttttcttttaaaagtgaattctccatagaaatgtatagctgatttatgctatcactttcaaaaggcaataggttargcctgctaactatcaacacatttgctattctatcaaggaaatcctagttaatagacttcaaaagtattatagattttaaagaaacaatggatagttattctattggcaggctgtgagcacgtattggccccttgagagtcaactaaaaattgttcttaggggtaagtgaatttcaagaacagagagtatgcccttttttattcatctgggacagatatatcttttagaaatgaagttatacaagacacattagttgatgtttttctgacaatgttgacaatgaagtaccacaagggaccccattcttgctctcatacatttcatccttgaactgtatcatccttgaattgtagatatcacactgtgttgtagtttttagttggttgatattttaaaatgttgtttttttcccttaacaaagtatgaggcaaaaccttacgtatgtttcctaggatcccaatacttatttgtgttttatatgcctatatatttatttataataaagggagaatctgctactatttctcaaaaagtcataaatacggaagcttttgaggaaatactatagaaatactgtatgaatgtataatatatacttacttcccaaccacatatttgccatcccttgcgatgccctccctgtgttactgacttgtgatataaaagaggaatggttttccaagtgggaattaacaatattatagaagtttaattccactcgatctttttttaagtcaacatttgaacaagtgccatgttttccactaaactctctctgattggactcaagaatgactaacgttggctcttccaaaaggagtttatgaattattatggtaaatatccaacatatatgagaaaaaccccaggaggctagggggtttctatccttgtttattcctgtatgcccatttctagaagttttctcattcatggtaggccctgataaatagttgtataatatttaattgaatagtagttactatcaaaaagctaccaagggagaaatctaatcttccatgtggacatgagaaagatagtatgcttaatcttgagactgaaagatcaa

SEQ ID NO: 677789 - DNA, 1383 bp, Homo sapiens
tttgatgggatggaaattttatattaccagagtacaaaagtgggcttatatcttttcacaaatagaaggcctatctcaatggtaaagctactggttggaggtagtgatacatggcgtactctattctgttaaggtctagaagtcttcataggaaggataagtccacatgaggttaatcgcatacttcagattcaatattgagcttggttccatgcagtagaagaaggctgatgtagtgaaaagagaacagggtttagggtcaagccagcctgagttcacaaatcatctctgtcattctttaattgtgtgactgaaatcacataattagccagtacaagataagccttagtttcttcatttgccaactgagatactaatacagaccttgtgaggattaagagcaggcatgggatgcaggtgagcacttactcattctacagacatttattgagtactgctctgttccaggcatatttcaggacaggacgttaaaatcaaatatgggctggacacagtggctcaagcctgtaatcccagcactttgggaggctgaggcaggaggatcacttgaggccaggaatttgagaccagcatgggcagcatggtaaaacctcgtctctattaaaaaatacaaaaattagccatgtgttttggctcatgcttgtaatcccatctactcaggaggctgagatatgagaactgcttgaacccaggaggtggagtttgcagtgagctgagattgctccactgtactccagcctgggtgacagaatgggactctgtctaaaaaaaagaaaaaaaaaaatacagcacagtgcctgactctgaagagtttacagtccattggggaaagcagatgtgtacatcaatgattccagaaaagaaacccagaggaggaggcgagagatagtgatgatgatgatggcatagtgatggagaaggttttctactgatggcatctgagatgtgtttcaaaggacgagtaggacaaggagaagtgaggggaagtgcagttaaggctgaagaaaaaacatccacaaaagctactagggtttaccagagcatgagcaattatcactggggctgtgtggctgaattgaatgaagtgatggaggcagtgataggtggtggtgaaataaaaaaaattgtcagggctgggcacggtggcttatgcctgtaatsccagcattttgggaggctgaggtgggtggatcatgaggtcaaaagattgagaccatcctggccaacatggtgaaaccccgtctctactaaaaatacaaaaattagctgggtgtggtggcgtgcgcctgtagtcccagctacttgggaggctgaggcaggagaatcacttgaaaccgggaggtggaggttgcagtgagccaa

SEQ ID NO: 677790 - DNA, 1296 bp, Homo sapiens
caatttatttatccattcccttgttaatggacactttggttgtttccaacttcttaatattataaacaagactattaacaactttcttgactatgttcctcaatgcccatacaggggtctccagagtactactgtccttatttttcctggcaaccaactccatcttcctaaattattcaataaatttttaaagatagagaacagctagaaatggctttaaaattaaagggccaaatcctctaattttacaaataaggaatccaaggagaaaagatttagaggaagagctggaagttctatatgccaatcactgtgtttagctacgggtatacaaggaggttaagatattttccgtcctcgaggtggtcacggactagcgatttggtttccacactacagtgggccttgaagttcaggtcctcaccatcctctatctacccccggttgcaaagatatttcaaaatatacttctacataatgaatatgttgtttaatttagatttttatattaagtcatctttaccctggaaaatgcgcctctgctaacacacaaactttgtgaaatcttcccaagctccatccaatccccggcagagtgaggttcctcttgtctctgaagcaagttcttgcaatatctactatcacataactttgtggtttgtctcctcatgagtctactggagtcagaccagaggccagggcacttgtaccctgtatatcaaagtatgtgaatggatgttgaaaacacaaagcaaaagaatttgagtatatcaagcaacacagagtcagttaactacayagcttagcctaacctttatgatagagtttttaaagtcccctggaccagtcaaaatgtccccagtcgatataatctacattggccctatcttactaatttacttcttttcccacttgtctgccctagattattctcatatttatgctaaaaatgcacaagctaccagagcaacatccaatttccccacaaacgctaacaaaaggtttacttcatttgctaccaaaataaagtatttgaattaaggtaccaagagtgatgtacacttcttacagaaattgtgtgtactaccacgataaccatacagatcactgcgaaatttcaaccacaagcaaagtgcaattaatattactaagttttccaccaacaatcagcaaacttaattccttccacaacaacaaaaaaattgtacaagcccattcaatgattactctataaagccagagagagaagcacaaggttagcttactccaaagtcagtaagactgtatgtatataaa

SEQ ID NO: 677791 - DNA, 1296 bp, Homo sapiens
caatttatttatccattcccttgttaatggacactttggttgtttccaacttcttaatattataaacaagactattaacaactttcttgactatgttcctcaatgcccatacaggggtctccagagtactactgtccttatttttcctggcaaccaactccatcttcctaaattattcaataaatttttaaagatagagaacagctagaaatggctttaaaattaaagggccaaatcctctaattttacaaataaggaatccaaggagaaaagatttagaggaagagctggaagttctatatgccaatcactgtgtttagctacgggtatacaaggaggttaagatattttccgtcctcgaggtggtcacggactagcgatttggtttccacactacagtgggccttgaagttcaggtcctcaccatcctctatctacccccggttgcaaagatatttcaaaatatacttctacataatgaatatgttgtttaatttagatttttatattaagtcatctttaccctggaaaatgcgcctctgctaacacacaaactttgtgaaatcttcccaagctccatccaatccccggcagagtgaggttcctcttgtctctgaagcaagttcttgcaatatctactatcacataactttgtggtttgtctcctcatgagtctactggagtcagaccagaggccagggcacttgtaccctgtatatcaaagtatgtgaatggatgttgaaaacacaaagcaaaagaatttgagtatatcaagcaacacagagtcagttaactacatagcttagcctaacctttatgatagagtttttaaagtcccctggaccagtcaaaatgtccccagtcgatataatctacattggccctatcttactaatttacttcttttcccacttgtctgccctagattattctcatatttatgctaaaaatgcacaagctaccagagcaacatccaatttccccacaaacgctaayaaaaggtttacttcatttgctaccaaaataaagtatttgaattaaggtaccaagagtgatgtacacttcttacagaaattgtgtgtactaccacgataaccatacagatcactgcgaaatttcaaccacaagcaaagtgcaattaatattactaagttttccaccaacaatcagcaaacttaattccttccacaacaacaaaaaaattgtacaagcccattcaatgattactctataaagccagagagagaagcacaaggttagcttactccaaagtcagtaagactgtatgtatataaa

SEQ ID NO: 677792 - DNA, 1875 bp, Homo sapiens
cttactctgtttttgtcaaaagggcaagtcccagcaaagtttcaactattattccattttgtagatgaggaaactgaggcaccaagagattaagttagttgtccaagctttcacagcttgttagtcatagagctagaattcaaatattagctcttgaatacttgagcagtataacttcagaatttacaattttaactactactatctactttcatattacttctaagcttgctaagaactgggcaaacatttcattaaatgtttatgtagctcatatgagcagaatgtggatgactaatggtccttaactccacatccccatgatatttgcattttcaaaagaatatgcttatttattcagtatgcttgtttatcacatactattaaatatatgatagaaatatgtattctaacaaagaaaaatgagaaatatttatgaagtgtagcagaagctgtttttagttattaactcttccagtttccctctaccttggaattttctggcttggttttcctaagttattcttaatttttgccaatttctcttaatccattctcagactattaccaatggattaaaagtttcccttttttaaacctttgtatccattcatcaaagactgggaaaatggtggttatttgtatgtaaatcacttaaaaatgaagagctacaagtaatttaacagcttgcattttcctttgggaagcattcagagatcttttccaatagctttcggattccaatttgttcttttttgttagaacttttgtctgtccctgagtgcataactattaggtaggcaggagagatatgtgggaaagtacttttttttttttttttttttttactgctgcattacaggtaactagaaacagtgctggagatggtggctgaatattgttgaatgaatgagtggatggatggatgaatcaagctggtggccagctagaggagcctaagggagactagactagactgggcaaacatacgctgtagacagcatattcagactgaagtgaatacccagcacccaggcaattgagtcttgactatattgtgttctggctttgggatatggttatgttctacttacatttgaatacagttgcattttgatttcatctaaaataaggaaatcatactgatgactcagaagatacaagaaaattgagtttctcctgtcttttacttatgctgtcttcactggaacattttaaatatgtatttcaatgaagaggcaattccatttaagtgaactagtatttcaagcatttttaaaaaacaaaaacacataaaaagcattaactagaactgccaggcaaaatagccctcctgtttaatagtttccatcagtcctcagtttaattaccacattattctgccagctttctgcagaaataattgactgaatgaagtcatttcatttgatatttacaaacactagacttgtaaagggggtatctgtcaattcccccttggcttggaaatgactaaggctgacctggcagtacacaactgctattttgggctcagcatattttcatagtcaccaactcagtaagatgatgggaaagaaagagaggcaggtaaaacttttggcatttgtgctcagttttctaattttgtaatttttgctgtgaaaaaatgagggagtaaaaccctgatttgctctaagacacaaacaggttggaagtgatgtttttgtgtgtggttgttagaatatcctgttaaattctgratagtctagaaggaatctgcaaagctttgggtagctatagtgaaagcttaaactggcttatcaatcatgataaaaatgaattacaaaggtcagtctgttaatgttattgatttaatgttctggaatcaagtgttct

SEQ ID NO: 677793 - DNA, 982 bp, Homo sapiens
aaaattccacacaagtttttctaaataattcaataatcctatatgatcttaaaaaatacttttcatatctttcttttggagaaaaaatgaaatttatcctgattcagaaatgaaacaataatagagtataagtagaacttaagaaaattccaaaagagattattctctcttaaataattcagtgtggaaatgaattgggtttagtgtgataatctctttgagagatctctaaaatgataaagtataatttaaagcatctgtggcctacttattaaattattaatgtcaagtgagaaagtgttattgctggtgctgaaccaaaaaatwtgtctgtgcgtgcaaaagggttctttttaaaatttttccctaacaagtgtgagcaggactttggtttggttgtgtgctttcttcatatatcacaaataccatttgatatgcaaaatcattgggaaagcatcaattatgcagaggcagttaagtgaagtatactaatatgcaatgattctaaactaccacagggtggtaggagattcactttccacaacatttatctaattagcagaactaactgctttgctatacttctaccacaatcaaatcccttattaaaaactatatcattgttactgctcaataagagtgaataaaatctccaaggcaaaaattatactttgggatatgctatacttaaagttcaattcaactagaaacaacaagtatccatgtattaatttggttgatttgcatgtttacatattttacttctttttcataaaagacaatttacttttaatgattaatgtaggggaagttcacaggacattgtaacaaatgtatcatattatatgttgtagagccacctaaatgactatttcaatacaaaattccaaatatgaaaatatacatatatgtattattgaatcaaaactttagagttagaaacaattctcaaatatatagggccccactttcttattttaca

SEQ ID NO: 677794 - DNA, 601 bp, Homo sapiens
aatcaggactgctgagtcgccagcacgacccacctgaggcaggaggctgaggtgaccaaaagcttctggtcaraagaactacctggcagggctctggtcctggctctactgctgatctgctgtgtgaccttggccaagtcaccaccctctctgggcctccaggtccttgtctacatacttgcagaggctagcccaggcctcaccatgtgtgactgcctcatcacaccagcaatcccagcagctctcgctcaggctccatgctgccttgtccaccagagtttctgagttcctgaatcagcctaacagtgttttgacatcttcactcacatcttgaaaaacgctggggttcctccagttccttctgggagaagcagctacagccatgttgccaaggcgcctttataaaaagccatcacacaatgacaaccccacagactgattccctctccagtggcatctcccttacctgtaacccaatacctaccgggaccttaaagaagctgagaaggggccactaccccaaccttggaaatgaagctctggccacaggcactgcatcaggaacgcaccaggccctacttcctccacatgacggtggaac

SEQ ID NO: 677795 - DNA, 659 bp, Homo sapiens
acagatgcttgtgggatgctgtctgtgatcacactcggaaaaaatcaagtggttaaccagagggaaaggattctgagacctgccaggatggtgggtttttgtgtttttttaagattacgcctaaggtttgtcatttggacaagtaaagtaaacaatgacaamagcagcagcaacaaaacagaaacaaagaacaatttactgattttttttaaagccttttgttaaaagaaagctccacagtggcctggaagtagcccccaccacctccctggccaggggcagactgtgtcgcgcctacgaagctggcatgaagaaagcaaactccagcagaagtgcaggcaatgcaggaggtttctgctttcccatctttttctccctctcagcttttagaaggactgttgaaagggatgggaagggaaggatttgaaccagcataaagcaactgtatttagaccatggcaaactgagctacttacttctctcccgccctcccacctgcccagggcctcggcctggaatacaaggtggagcacaagacccacgggccccgcacgtacctgaaagaaacctggcgggatggggcctcccggcatcccatcgttggggggaatgttgccaagcacggggctcggggcagctgctgcactctgtggagacaa

SEQ ID NO: 677796 - DNA, 662 bp, Homo sapiens
tctcaacactggattctgagagaagttgtgttaaatacgtagaattatataggaaaaattaagattctggcagaattacattttctcatcaagggatatgataagtttctacatttgtctttattttatgtccttcacttaagtttcatagtgttctttatgtattttttgtacctttatgttgttagagattctcaggattatttctagatattttatagctgttrttgataatggcaacttttctccttattacatttcctacttggttattgctagtatgtagaaatgttgatgttcattgattgaatttatctctctttattttccctttttgtattgtattacttacagctttcagaatactgttggctaatagagtgaaaaggaaacatgtttctcttgctcttgcttttattagaaatgaattttgtgttttaactttaaatatatttgtacttgagttcacataaatgctatttataaaataaagaaaatttactttttggaattccacagttaccatttttttcaagtcagggagatactcaattttattaaattttttttgtcatctatcagaataaacatatatatataaaaattcctttttgacatattaatgtgttaaattactttatttgtatgttgacttatccttt

SEQ ID NO: 677797 - DNA, 992 bp, Homo sapiens
aggaaaacttaatgtatgctaaaggtggcttgtctttctggtaaggaaaatatcattaagtaaatgatttgggggcaattaggtgtccatctggggcaatattccatttggattagattccatttgaagtaagagctaatattaaagatggacccataaagctatcaagagaaaatatgggagaatacatgtataacatcaggttagggggagctctctttcataatccatcttccaaaaaggaaaaattgcaagatagtaaatttataatccataaaggaaaaattggcagatttgactgtgtaaaaatttaaaatgtctatgacaagacacaataaataaaggcaaaagaagaataatacttgcaacctctaggacagagctaatgtttaaaatactaagaggtctcacaaattgtttataaaagaaagataaaacagcccagtataaaaatagtcaaagggcatgaactggaattgtaaatcaccaataaacctgtgaaaagaatcagccccgttagtagtgagagaaggcgaattaaaaccagagatgcctatcaggtgagcaaacacttttaaagatggcgaacaccagtgctgatcagtgtgtcaataagcagrcactcaccatgcacatttgggctgattgcttcaacctttgcaccggaaagaaatgtagcaatagtcattcaaatagttaacatgcttattatgtttggccccacagttattccacttctaggattctttcccacaaaaataaaagtactagaacattaaagatgtttgaataagactgtttattcctgctctggttaaggtagccaaatttggaaacagtctgcatgttcatccacagaagagtgattggttaaacaatggtatgtccatcttgtgaatatatgcagttatttttaaatgagatagatatatagatttttaaaatattttgataagagcaagtggcagaaataaatgtgtgtgtgaaaaagc

SEQ ID NO: 677798 - DNA, 992 bp, Homo sapiens
aggaaaacttaatgtatgctaaaggtggcttgtctttctggtaaggaaaatatcattaagtaaatgatttgggggcaattaggtgtccatctggggcaatattccatttggattagattccatttgaagtaagagctaatattaaagatggacccataaagctatcaagagaaaatatgggagaatacatgtataacatcaggttagggggagctctctttcataatccatcttccaaaaaggaaaaattgcaagatagtaaatttataatccataaaggaaaaattggcagatttgactgtgtaaaaatttaaaatgtctatgacaagacacaataaataaaggcaaaagaagaataatacttgcaacctctaggacagagctaatgtttaaaatactaagaggtctcacaaattgtttataaaagaaagataaaacagcccagtataaaaatagtcaaagggcatgaactggaattgtaaatcaccaataaacctgtgaaaagaatcagccccgttagtagtgagagaaggcgaattaaaaccagagatgcctatcaggtgagcaaacacttttaaagatggcgaacaccagtgctgatcagtgtgtcaataagcaggcactcaccatgcacatttgggctgattgcttcaacctttgcaccggaaagaaatgtagcaatagtcattcaaatagttaacatgcttattatgtttggccccacagttattccacttctaggattctttcccacaaaaataaaagtactagaacattaaagatgtttgaataagactgtttattcctgctctggttaaggtagccaaatttggaaacagtctgcatgttcatccacagaagagtgattggttaaacaatggtatgtccatcttgtgaatatatgcagttatttttaaatgagrtagatatatagatttttaaaatattttgataagagcaagtggcagaaataaatgtgtgtgtgaaaaagc

SEQ ID NO: 677799 - DNA, 328 bp, Homo sapiens
tgggctcaatacactgtttgaaacttggattgaagcgttgaaaatgtggatagtttaatatgatcctgaagaagggtgatctgaaggaacttgcagattaaaagaaaggggccccttctcagagagggcctgaaagggtctgtttaagctagaaatatgtggaagggtccatttaaaagtctagaaatttggccaaactcgccaaggaacatgagaatcaagttgtactgcctsatatcacatgacagccggaatggagcaaagtgactaacttcaccccaccccttgtcatctccagctttcagatgagaatacgcagatccaagga

SEQ ID NO: 677800 - DNA, 1659 bp, Homo sapiens
taaggcctcgggcatctagatgggttatcgtcagtgcctaattaattattcagtcatttatttcactttgggcagtgaggttaggattgacttagaaatgtaggaattggcccaattcctagcaggtttgaaccaggctagaattaaaatggtgtaaaaccaattagaaaagtcatcatttatgagcttttaatgacatcaacaccacatcagaaagaccccagaaagcaatttaagtaatgactttattattaaataacttctcttattatttttctaggagtgtttcattagctcttaattgctcttgacagtttggagtgaattataaagtgctgatcgggcctgtctctgagttgaattcaaagacaccaattgctatgatgaagacaacctgagaacataaattcagatttttttttactgagaagaaggtaaagacaaaaacatgtgacttgaataacttttattatatatatacagctcccctcaccccccacaccccctgaccaccccacactctttttttctaattgtaatctgatacacagattaaaattatgactacaacaataagtcttccccccatatctgttttgcagtcatatttcccacttaattatgctctgatagaatagattttgttatacaactttcttagtattatttcactgtgatttatcgacctgtctaagaccgagctcatctttccccttccaaacccactccttctccagttatccttgtgtcccttcaagacggccttgtttaaaagaccctcttcctctccacgtccattgctactgactctcgttaaaggacttattgcttctcacctggatggctaccctggcctaccctgcttccagccagtcttcttgctaaaccatcctatgccctggaggcagaataatttctctaatagtcagatcatctcactactctggcatacacattcactggctgtccgtaacctacagaataaaaatcatactccttcacaggatatacaagattctacatgatctagcctcaatctactttccagccattcctacaagtactcccagcttgtcacataaccctcataacctagattccagctgaaccataccacttgcgatgctttacatataccttgccacttcccaactccatgaccctgttgatagtctccttctcactgatatgctcttttccctcaccacatcgtcaagtcaggctcaaacaccaacccaatcataaaactgtcactaacccctaatccttacctactgactcctaatgggaagagtcttcttctgctgttggttaacccattctgccatcttactgtaatttagtcctaagaaaactcaagtcatcacaggtcatgttttcaagaggttatcagctaaaaagatctaaatttcacatggcaaagttattctgcctgtagaaatttcagtaaggagttttataaaacctcagtgagtaaatgcagtatttgatgctatacagcttcagctccagaataatggctttccttctctaattaccagaagtgccttctttatattcattattacccactattaccacaagaagacaacacagtgacactctaaagagcatctaagtatcacctgccttcagtttcctgccacaatacrtaatgca

SEQ ID NO: 677801 - DNA, 672 bp, Homo sapiens
tgaaacatcagccaacactgaccaaagctgggccagaaacagctaaaataagttttaaatgattgaaatcattcagaataggttttcttactataagatatttaagctgaaaactcataaccatcacaacaaaaataaaactggaacatatccaaatgtttggaaattaagtaataacacttcaaatgggtcaaagaagaaatgacaattaagttagaaaatattgtraagtatatgataattttaaaaatgcaatattaaaacttatgggatgtggctaaagctatgctcacaggcaaatttatagccttaaaacagatgtataagaaaaacggcagaaaaatcaatcacgtaaggcactgtagtggatgctatgatgttctgcccaaatgtccactctaagactgaagtgcccatgttcccagctgctagccatgttgccaagctgagcacttctccaggaattgcctctcctgaaggggctacctcccccaggtttaagcctgcttcctataactggatgatatgggagcacagagttccttgctttaactggggactccagaatctagaatgggtctggccttgggaccagccacaacggcaggtccctgaaagagaaatgaggaagtgaagaattgtgtctggtgggtatatgcactcagtcctgtg

SEQ ID NO: 677802 - DNA, 672 bp, Homo sapiens
tgaaacatcagccaacactgaccaaagctgggccagaaacagctaaaataagttttaaatgattgaaatcattcagaataggttttcttactataagatatttaagctgaaaactcataaccatcacaacaaaaataaaactggaacatatccaaatgtttggaaattaagtaataacacttcaaatgggtcaaagaagaaatgacaattaagttagaaaatattgtgaagtatatgataattttaaaaatgcaatattaaaacttatgggatgtggctaaagctatgctcacaggcaaatttatagccttaaaacagatgtataagaaaaamggcagaaaaatcaatcacgtaaggcactgtagtggatgctatgatgttctgcccaaatgtccactctaagactgaagtgcccatgttcccagctgctagccatgttgccaagctgagcacttctccaggaattgcctctcctgaaggggctacctcccccaggtttaagcctgcttcctataactggatgatatgggagcacagagttccttgctttaactggggactccagaatctagaatgggtctggccttgggaccagccacaacggcaggtccctgaaagagaaatgaggaagtgaagaattgtgtctggtgggtatatgcactcagtcctgtg

SEQ ID NO: 677803 - DNA, 672 bp, Homo sapiens
tgaaacatcagccaacactgaccaaagctgggccagaaacagctaaaataagttttaaatgattgaaatcattcagaataggttttcttactataagatatttaagctgaaaactcataaccatcacaacaaaaataaaactggaacatatccaaatgtttggaaattaagtaataacacttcaaatgggtcaaagaagaaatgacaattaagttagaaaatattgtgaagtatatgataattttaaaaatgcaatattaaaacttatgggatgtggctaaagctatgctcacaggcaaatttatagccttaaaacagatgtataagaaaaacggcagaaaaatcaatcacgtaaggcactgtagtggatgctatgatgttcygcccaaatgtccactctaagactgaagtgcccatgttcccagctgctagccatgttgccaagctgagcacttctccaggaattgcctctcctgaaggggctacctcccccaggtttaagcctgcttcctataactggatgatatgggagcacagagttccttgctttaactggggactccagaatctagaatgggtctggccttgggaccagccacaacggcaggtccctgaaagagaaatgaggaagtgaagaattgtgtctggtgggtatatgcactcagtcctgtg

SEQ ID NO: 677804 - DNA, 624 bp, Homo sapiens
tatgccccaggtccaagcccttccctgaagggctatgagtaggggcaggcactggagtctggaagatcgtccctcaccacacccttactgttcaataacccttgctattattgacttccacgtggagatgagaggagggtggtcgtgaagcccatccttggggacacagcaaaactgtccctaggccgggcgcgatggctcacacctataatcccagcactttgggaggctgaggtgggtggatcacctgaggtcaggagttcgagaccagcctggccaacatggtgaaaccctgtctctacgaaaagtacaaaaattagcctggcatggtggtacatgcctgtagtcccagctactcaggaggctgaggcaggagaatcgcttgaacccagaaggcggaggttgcagtgagccgagatcgcaccattgcactccagcctgggtgacagagtgagactccgtctcaaaaacaaaaacaaaaacaaaaacaaaaactgtccccaggagcatggcaaggcacagggcagacccatcctccctctccaagtttctaaaagaggccatttatggcattgtcactttttaawtaggcttagcaattaaagaaccaggaagattccatgg

SEQ ID NO: 677805 - DNA, 452 bp, Homo sapiens
tgttggccaggctggtcttgaactccttacctcaggtgatccacccaccgcagccccccaaagtgttgggattacaggcgtgagccaccacacccagctgacaccagttatttaactcacatttctctgttttccttttaaaggtagtagtgacacctttgaaatcttttggcattttctttgcctgttctcccttatgtgttaaggataagcttacgtgcagaatggcttgttaagttttttctcctccgtacttggaaatctcatctggtgggacattagggtcagaattttgtatattatatattatatatctatcatgatatatataatgtattttatatattatataaatatcatgatagatatataatatataattatatrttatatattttatatttataaaataaaaataaaaaattgcaattattttcaaatagtaaaaccac

SEQ ID NO: 677806 - DNA, 551 bp, Homo sapiens
ttgaggtataatttacatatacacaaaatttacctgttgggattgtattttatgtgactttacatcctcagcctgcaaaatcatcctgatccaacacagaatatgccagaacaaaccatttttgatgaattattttayaacaaagaaaaatacatgtgtgaatttgtaaaactgtattcctagtaagaaattctaaatccagcttaattgaacatatgtgtttaattcttttaaaaaatacatattatctaaagaaagatcatattttatataacagtagttatttttagaagtaaaaaatagccaaattaattgcatcttataaaacatgtttagactgaaggctacattagaaaattctaactgtatgatgttcaaaaacttctttttttagttatcataaaataaatacatttgaaactatgtctcttaattgtgtttatctgaacagttacagaattctggagatagtttctttggaaacctcatggtatatactgatgggacacccagtctatgaggaagagcagaaaaatcatgtatcaaagcag

SEQ ID NO: 677807 - DNA, 551 bp, Homo sapiens
ttgaggtataatttacatatacacaaaatttacctgttgggattgtattttatgtgactttacatcctcagcctgcaaaatcatcctgatccaacacagaatatgccagaacaaaccatttttgatgaattattttataacaaagaaaaatacatgtgtgaatttgtaaaactgtattcctagtaagaaattctaaatccagcttaattgaacatatgtgtttaattmttttaaaaaatacatattatctaaagaaagatcatattttatataacagtagttatttttagaagtaaaaaatagccaaattaattgcatcttataaaacatgtttagactgaaggctacattagaaaattctaactgtatgatgttcaaaaacttctttttttagttatcataaaataaatacatttgaaactatgtctcttaattgtgtttatctgaacagttacagaattctggagatagtttctttggaaacctcatggtatatactgatgggacacccagtctatgaggaagagcagaaaaatcatgtatcaaagcag

SEQ ID NO: 677808 - DNA, 551 bp, Homo sapiens
ttgaggtataatttacatatacacaaaatttacctgttgggattgtattttatgtgactttacatcctcagcctgcaaaatcatcctgatccaacacagaatatgccagaacaaaccatttttgatgaattattttataacaaagaaaaatacatgtgtgaatttgtaaaactgtattcctagtaagaaattctaaatccagcttaattgaacatatgtgtttaattcttttaaaaaatacatattatctaaagaaagatcatattttatataacagtagttatttttagaagtaaaaaatagccaaattaattgcatcktataaaacatgtttagactgaaggctacattagaaaattctaactgtatgatgttcaaaaacttctttttttagttatcataaaataaatacatttgaaactatgtctcttaattgtgtttatctgaacagttacagaattctggagatagtttctttggaaacctcatggtatatactgatgggacacccagtctatgaggaagagcagaaaaatcatgtatcaaagcag

SEQ ID NO: 677809 - DNA, 551 bp, Homo sapiens
ttgaggtataatttacatatacacaaaatttacctgttgggattgtattttatgtgactttacatcctcagcctgcaaaatcatcctgatccaacacagaatatgccagaacaaaccatttttgatgaattattttataacaaagaaaaatacatgtgtgaatttgtaaaactgtattcctagtaagaaattctaaatccagcttaattgaacatatgtgtttaattcttttaaaaaatacatattatctaaagaaagatcatattttatataacagtagttatttttagaagtaaaaaatagccaaattaattgcatcttataaaacatgtttagwctgaaggctacattagaaaattctaactgtatgatgttcaaaaacttctttttttagttatcataaaataaatacatttgaaactatgtctcttaattgtgtttatctgaacagttacagaattctggagatagtttctttggaaacctcatggtatatactgatgggacacccagtctatgaggaagagcagaaaaatcatgtatcaaagcag

SEQ ID NO: 677810 - DNA, 551 bp, Homo sapiens
ttgaggtataatttacatatacacaaaatttacctgttgggattgtattttatgtgactttacatcctcagcctgcaaaatcatcctgatccaacacagaatatgccagaacaaaccatttttgatgaattattttataacaaagaaaaatacatgtgtgaatttgtaaaactgtattcctagtaagaaattctaaatccagcttaattgaacatatgtgtttaattcttttaaaaaatacatattatctaaagaaagatcatattttatataacagtagttatttttagaagtaaaaaatagccaaattaattgcatcttataaaacatgtttagactgaaggctacmttagaaaattctaactgtatgatgttcaaaaacttctttttttagttatcataaaataaatacatttgaaactatgtctcttaattgtgtttatctgaacagttacagaattctggagatagtttctttggaaacctcatggtatatactgatgggacacccagtctatgaggaagagcagaaaaatcatgtatcaaagcag

SEQ ID NO: 677811 - DNA, 563 bp, Homo sapiens
tctgaatagagaaagagaaggaaaaaatcatgataaagggaaataatcagagttaatcccatagaataatatacaggttcycttagggatattttaggaaggatgttttcaccaaagacagagcattgaaattcagtattgtcaatgtaagtgtgggatcgatgttcacctgttgtcctatctttttttaataaatgaggtaaagcagatagcttcctttgaccacagttaaggaaaagactgccacctggtgaatatttgaggctttcaaaaatatatgtatagtttcaaacatctggctggcaaaaacttaaaagtaataaaaaatattttaaattatttttctttacttttcagtggattatagttttttcactatgcaacactagcagaggtttcgttaaaatgctatcaataaaattacaagtttccatgaatttttgcaccattttattaactgcatcttttataggtcacttatttcatattaaaagttacccaaaaaatgtgaaccaccatgatctatatttctttggttttctttttgcttaattgtctagcaa

SEQ ID NO: 677812 - DNA, 563 bp, Homo sapiens
tctgaatagagaaagagaaggaaaaaatcatgataaagggaaataatcagagttaatcccatagaataatatacaggttcccttagggatattttagraaggatgttttcaccaaagacagagcattgaaattcagtattgtcaatgtaagtgtgggatcgatgttcacctgttgtcctatctttttttaataaatgaggtaaagcagatagcttcctttgaccacagttaaggaaaagactgccacctggtgaatatttgaggctttcaaaaatatatgtatagtttcaaacatctggctggcaaaaacttaaaagtaataaaaaatattttaaattatttttctttacttttcagtggattatagttttttcactatgcaacactagcagaggtttcgttaaaatgctatcaataaaattacaagtttccatgaatttttgcaccattttattaactgcatcttttataggtcacttatttcatattaaaagttacccaaaaaatgtgaaccaccatgatctatatttctttggttttctttttgcttaattgtctagcaa

SEQ ID NO: 677813 - DNA, 618 bp, Homo sapiens
tcacctcctactatggccatacttggattcggtgttatcattaactgttctacctccaacgtcaaaatttcttccctgctcactctatctagcacccacgcatactccaatatgttctgaccctcatcctttgtgatgttacttccctgatttaaaattcaatggttcatccttgtggtttcccacctgaagacaagtttgcctcactcattttgtaatattatctggtaaaattacatttttggtttagtccaatctctgcctattgtatgcttgtactcaggtggccagagagggctgaggaaagcatataaccatttcagctagttttactctaaaggcatgaccactaatttcaagtgggtgctcagtggtgcccagcaatcttactacatttcctgggtacccttccacttgcmtaggggattcattcattttttttctatctatcttttcttcaacaagctccccaattcttttctcctcttcctcaggtgatgcctcgttttctattttactaagaaaatagaaccaatcaggggaaaactcccatatgcttccaccaccatagctaccaacctgcctcaatatatgccttagtacttccggatttcacac

SEQ ID NO: 677814 - DNA, 618 bp, Homo sapiens
tcacctcctactatggccatacttggattcggtgttatcattaactgttctacctccaacgtcaaaatttcttccctgctcactctatctagcacccacgcatactccaatatgttctgaccctcatcctttgtgatgttacttccctgatttaaaattcaatggttcatccttgtggtttcccacctgaagacaagtttgcctcactcattttgtaatattatctggtaaaattacatttttggtttagtccaatctctgcctattgtatgcttgtactcaggtggccagagagggctgaggaaagcatataaccatttcagctagttttactctaaaggcatgaccactaatttcaagtgggtgctcagtggtgcccagcaatcttactacatttcctgggtacccttccacttgcctaggggattcattcattttttttctatctatcttttcttcaacaagctccccaattcttttctcctcttcctcaggtgatgcctygttttctattttactaagaaaatagaaccaatcaggggaaaactcccatatgcttccaccaccatagctaccaacctgcctcaatatatgccttagtacttccggatttcacac

SEQ ID NO: 677815 - DNA, 2487 bp, Homo sapiens
tttctccctccacacacacacacacgcacacacacacacacacagtataatactatagaaatgattttaatgtaagaactcagtaaatgctctaagaagagtatgaataaaacaaaggggaaattaatttagagatttttttaatcagaaaaggatttgaggaggtgtttatatttacactggttggaactagcaatgtaaaacagttataagaaaatgacagcatcaaagagaagacatgagagatacatttataaaaatactttctttagagtatagtataagtcaagaaagctaaataattttaaaatgcttcaatgtagattagggcaagattagagatgcttttgaatagcattattttataaatattggtgacattatagaagaatttagccaggagaataatggaataatttctaagtagtaacattattctagtatattttgaagaatacattaaaattgaaatggttggaggcaggtaaagaaggctgatagctattacattttggattagacttgtagccatggaaaaggaaaggatatgattgcaccctgccagacaggaaagatgagagacagagacagaaagagagagagagagaaagagagagagagagagagagagagagagagagaragaaagaaagagaacacagcaacatgaggtagaattaatttaaagcaaacatatcagagaagaagagatctcatccagatgatgccctgagagtcctctgaattcagatttctgtttccctaatgttcacttgtctgggatggaaaggtgaacacaagtgcattgcagaagctgctaatgcaaatttgcacgttctagcactggaaaggcactttcagagaacccttgcatccaattagggccaatggcccttccctctctcttctgtctttcagctgactatgagtaagggttgataaagaggcttttcttactggttttccagggaagccgagcctgccacctcaaagcacccccgctatggagaatgggcgatactgaagctatggagagggcagcgaaaagctatgactcagggactctggttgactgcagctgaggcaattatcagttaattatcaactttactacctgtttcaataatttaaggaagtctaaaatataagtcatttgacctcacaaacatttagaaaacccagaaaatgggcttgctgccccttttcacgcttcgttctcaacgcagtctattttatatctcaatccctctcctttgctttattcaatgtctcccatacgcaactcttcctccttccttttgtggttccattgttacaagtgaagaggacattttcctaacacataaaataaataggtcattgtaggcactcaataactactacttttccattaacttttcttctcaaatttataaagttttccatctagcatatttaaggacataaccctgcagatgaaaatcacactgtgttttacttattttgctcaagtaaaatctatagacataaaggcattacacccaggaaaacatattggcattaaattatatactcacattgctaagaagcaaaccacatactccaaacaaactactttttaaaaataaattccaagttattgaatcacaaatttcactcagcaatccaaaacaaaagtagaagaggcaattaaaagaagaccctgaaattaaaccaaataaatccccctgttttttgtattgtgtaactaaccataaggttgctttggcttttattctgtccaaactttataaatgtatctcttcaatatttttctcaattttactgcaagattagttacattaataactgaattattttgataacacacagcattaaatgttattgacatatacaagcaaccattaacttataactgattgctattcttaaaatgtatctacatatttcaccttgaagtgactcagcaccaatgtgaagcacctattttaaaatccagagcctgatgttttacccaaatgtattaagttagtgcaaaagtaattgtgttttttgccgttaaaagtaatggcaaaaacctcatagaaatttatctctgtcactaaaatatacatgtttgaaccattattaatactgaagtcaaattttttggagagaaatacattctgaagtgacattcatacaatttaagggtattcattctattaaattcagtttttataaaatagttatattgagtaaaaacaatttactgacataatactgtttggcatacactagattttaagaataaatggatacatgtcctaacctggctctttaaaaaaaaaaaaagaagaaatagggtctcactctgtggcctaggctgaactaaagtgacatgaacaccaatcacctccttcctgggctcaaacaatcctctccctcagcctcccaaataattgggactacaggcatagcaccaccatacctggataatttttttattttttatttttttatttttag

SEQ ID NO: 677816 - DNA, 2647 bp, Homo sapiens
taagccttagagaaatcccattgggatttgaatcttggatctgctgcttcctgattgtgtgagtattaataaattattaaattcttattgtgtctttttcccaatttgtaaaatggggatagtagaaatacttatctcatagggttattgaaaaattagatgaattaatatrtgaaaagtatgagttcctaggtcatagtatatgttcaataaatattaggtatcaccattattgcatataaacacaggtttacacacacaaggatatatgtatatacacgtatgtgcatatacatatacaatcacttatagacatatatacacaagtatgtaatatgtgttcactttcagcataataataataattaaaagatttatgcaaggaaattacattcagaagataataataactgaagcataagggaataccaataagataactagttgcccaattaagtttttcagccttgttaaaaggcaaaaaatcaatagagatttaatcaaatctgagaaacattggctaaaatgcttgagaataatgaagaagactaattgataaactacagattctattctctgcagactctcttgcccaacaagtgtcaagttcaaaaatttcgtacccagtcataaaatcacctaagtgttttcttaaatatacatgttaaattcagatttgcagatcaggattcaaggaagagctaaatgcatattacaggggcatgacatttgatgtcacataaccagaagggaagacaataactaaatttcatatgatgatagtgttggtgaggcagaggctgattaaacttctgaaaccattcctgagtctacatttaaaattggtttggcaactgatctgagacaatgagtgagcagtaatggaaagctgaaaatgagaaaggcaaaggaaataaagcatgtgtgtgggtgatgaacccaacgttgaacttagcaaacaaaacagcaagcaaacaaaacccaatttaggtggtaggaaggtcgagtcaataaataatgttcgttctttgaaaatcacaaagggtagcagttggtacaaagtctacctctattcaccaatacccttctcagagcacatatacattgttccaaactattatggaaaatagattaaaaatgctagttatttctaggtagctacctagatgctttcttaaaacttgaatagaggtgtggaggcagaaaattatacagtattgaagaaagcaccatttgacttttgaatcatgtaggtgagtaatagatgaaaatggtggatggaaagcagtgaggaaggctcagatcctggccttccatgaatgggctggttctccagtctctaatgagccactgacattttccacacagaggagtggcatgttcagaatgggtgtttcacttttaatcaaagtctcctggagagactcctactgaagaatgaacactgctctactatctcccagtaggtcaagaattcagaaaggaaaaaagagacagaatgggaatgaatattagttgttcttatgaaataaaatgatataagcgcactttgcttttcccttctctattccttttaacataatatcaagacctatagttttagaaaaaattaaattgttccagaccttagaaaataggaaactcatttcatagcttctttccagaatcaaaagttgatatcacagaatggagttgtttctctacccatctaatttatacatataaataatatatgtgaagggttatatttgtttcaaatgtgttaggtcctataagcagaatttttaaactgtagccttaaggttgagaataagatcacttccttttatgctctctaatctcttttctgtctccctgacaaaagctctgctgactatcttggctgacagattttctgggcttaaaaaagataacaataataatactctgttttttaatgatctgttaattgaggttggaattaaattagtctataatatacagagaaaaagttatgtgttttggaaacagcagaggcaacacagtcaccgacctctcaggttgtgctatttgctccaacttgtatggcaacagagctggcaactgcacaaaaacaacacataaaagagccaaaaaagagaaaaagggacaaaaagagttatagttccctataattctgtcagtctttgatatcattttcacaaagcagacaggaataaagagtaaagtatctgttgaatggaaattattctttggcgtaattttattttttattctttattggctcatctaattgtcaatgattcctgctgatcaaacatctgggatgttcctccccggctgcaccatctctccagctcctctgccatctctctcatctaggtcttttattttttacaaggattattgagtaatcagcttccctctctcattctttttttaaacagcctaagttatgttcctaaaaatgaggcatgtatcatttcctctccgtcatcattgtcatttccagcatttccacttgccacacgtgcaagtgttgcttgttcccatcctggtctctgtggcccttcatgctagcttcctgagaaaatgcacatcccagtaagtaaggacaaatcatgaggcagggtgaaggatgacctgaaaataaggaacaaactactgt

SEQ ID NO: 677817 - DNA, 565 bp, Homo sapiens
ctttcatttccccatttgtaagtggagatagcaataggacctactttcataggataatataaagattaagtgagataaarcaagtaaaattctaatcacagttactggcatggtgacaaactcagtgaatatcatctagtattaatattgttgttattttttgtcatacaatttttattattatccagactatatcaaggttggttgctagctattaatttataggtcttttcagtctggccaacccactgcacaattgagtcccctttcctgtccctcctttgtaaaatgaggtgattgattaggttgatctccaagaatcctcccaattataaaataccctgcattatttttagtagaactttaaaaccaaaatttcttcagctaatcactctggaatcttcactgtttataatgtatagcaaagtctttttttccaaagtgggaatacataataaggatgttactgaaattgggaaactctcatatattaaataccacttaacagctagtacttaagggaatgagtcaaaatttcctgaaaaccaggttagcatagtatagt

SEQ ID NO: 677818 - DNA, 601 bp, Homo sapiens
tatatgcaatgagagagccttgtaaatcctttctatttgtattttcttttgcctatttgtgtgttcaaatcaattaaaaattttgtgtccactgatgagaactgcttttagagatctgaatttgctaatagactttaaaaagtttaatrctttatagggcaataaaatataatgtttaaaattgtcttttcttcaaggcagacataaattgtatttctacagaacaaagtttttgtatttctatgtacaataaccacttgcattactgtcagctttctacaatttaaagagttataaagtaatctagtcaaggcactcagcagttgctatagaatgagacatctctaaagggccagctagagaatgccagcattccattgaaggctattcagtaattttattttttccattttaaagtctttcacagtttttcctaacaaaccctgaagaggaagcaaactgctgacccagaaaaacaaggtattaatagcaaaggtgatgagaatacattaaaacaccaagggggaaatgacgtcagaaaggtagatttgtatacaatgtaatgtcacaaaacagtgtaaggtattcagggaatattgaa

SEQ ID NO: 677819 - DNA, 593 bp, Homo sapiens
aaatcttacaagatacaattgatttataaggagcagagacaggaaaaatagacatatatcacaatgatggtaaaaaataaaatggtaatagaaaaaggaagacatggattataacaaatttcagcatgactccaatagctaagtttactgtagtaggcacccatttgtcttaattaatggagctaaaactaactggaatccaagttgttatgcttaatgcagaatccaaacttaaaatgcgccttatatcaattattagttcttatcttattttcttaaacagggttaagcrcttttcagtttctgtctgtaatgggttgaattcatatggtgatgccctaactccttgcgcttaagaatgtgattttatgtgtagacagggtctttacagaggtcaggttaaaataaggtcatgagtgtagactttaatccaatatgactggtgttttcataaaaagagaaatttggacacagagatatacattgaagggagacctgatgaggagaaggaggagaaaatgactatgtgtaaaccaacaagccaagcctggaatggatgctgccctcacagccttcagaagaaaccatgtaat

SEQ ID NO: 677820 - DNA, 842 bp, Homo sapiens
attttcttttctatagtgtttattaaaatcttttaactatttgaaaattgtgtttttcttagcaatttgtgagatttccttcatattctagatattagttatttttcattaaaatatatggcaaagcacttttcccagttgttctgtcttttcactctctatgggatgtcttaatttaaatgttggccaaatttatcaatgctttccattatagtttttgtttttatgtgtctcatggcataatcacttccactcctaaaataactttttaccttttcatccacagattgtatgattctgtattttatatttaggtctttagacaccaaaattcattttgctgtatgtcaggtttctttccccctttttctacttccttctttcagtttatttatttaatgtaaatttagtcctttcctcattgatctacaataacatctctgccattatatcaagtgttcatatatttagagttttttcctgggcttctattcttttttatggtttaattgtttacccctaaaacttcacattatcaaacttgctatagctttataacatatactactgctctgttatgagactatcctgttttttacttttttacttccatataaatttagaatcaattttacatgcttcacaaaaaattacttattggcattttaatggaatgcattgaatctatagatctgttggccaaaaaatgacattttctatttattcccttgttctatatttatttttaaatataaataattagataaaatagatttcttatgtcaatagtattytgtctttcattttttggtaaacaatgatttctgctataaattgctttc

SEQ ID NO: 677821 - DNA, 1565 bp, Homo sapiens
gggtaatttgcaaacaccattttaaatttattcatcttataggacaacatgtgccttatctcttgttttcaggaaaaaggaaactgaaattaaatgtacttatatttgctatatttatgtccaataaaaatctagttcacaagggaaatactaaaacggtcagacttggttagtatgtgatcacatgcttgaatttccacaagtattgcttatgtctttcacaccttacttttttcagatcaggaagacagtttctgtctgtcacttctttatcctattacctgaaaccaaagtacatggtgttactttcacaagctacaaaraaaactcttactactaaattggttagttttaggttcaaagtggaaatgatcttaaccttttattcaggacttgccagataacattatccactagcatctataaatgtagaaattttataatcatttaggtcaacttcgttttaataagtcatcccaataaaatatgtgtgttaaatacttcaaactaccttccttttgggttggggaaaaaacagacatttgaccttatttttcattttttttttcagtttttgataaggtatgagcattaagaattagtccataagtcaaatgagtataaaattaaaaaggaaaagccactaattttagtgaattttcactttggtttactttcagtttaatgtcctagttttttttttttttaatacactcacaaaacattgactctgtatttagttttccgcactcatcttccaattcaattgttagttctgctgcttatctgatatagcaatccttcaccttcataacatttggagagttgcagaattctctactttgaaacgctctcaatgaaagtgactccactacctctttccatatgtaaacacaccacataaaagacatttacctaaatgattctgcagaatttaagagcagtgaagctcaaagtttgtatttatgcataacttctaatattctaattaggaataaagggaagataaatctgaaaaggatgccttattgagtctgcaaagttctgctttaattccccaccatttgccaccccttgtgactgaatttccaagagttacatggagtaggacataattctacatgttagaaaaaagaatgctatatctccatgcttttgaggtaccagttgactcaagagcagcttgacccaaccaagttaaattcaagtcagttcatagttataaatatgcaaaacactctactaggcatatggagaaaataagcacaagctgggcctgaggagtttctagggaaaataatacacttcataaaatcttcttgtgacacaaaaatccatttgtgctaaaagtaattagtctcccctctcattttgtgttttataacttctcttccaaatagggttctgagaatggaatattattgctattaatcaatccaagacaaatgaattatctctagcctctgactgtataaaggattctcccacagtagctacttttgccttatatgtaaattctacatattattagaacattctggtgggaattgaaaacccacaatcag

SEQ ID NO: 677822 - DNA, 1565 bp, Homo sapiens
gggtaatttgcaaacaccattttaaatttattcatcttataggacaacatgtgccttatctcttgttttcaggaaaaaggaaactgaaattaaatgtacttatatttgctatatttatgtccaataaaaatctagttcacaagggaaatactaaaacggtcagacttggttagtatgtgatcacatgcttgaatttccacaagtattgcttatgtctttcacaccttacttttttcagatcaggaagacagtttctgtctgtcacttctttatcctattacctgaaaccaaagtacatggtgttactttcacaagctacaaagaaaactcttactactaaattggttagttttaggttcaaagtggaaatgatcttaaccttttattcaggacttgccagataacattatccactagcatctataaatgtaraaattttataatcatttaggtcaacttcgttttaataagtcatcccaataaaatatgtgtgttaaatacttcaaactaccttccttttgggttggggaaaaaacagacatttgaccttatttttcattttttttttcagtttttgataaggtatgagcattaagaattagtccataagtcaaatgagtataaaattaaaaaggaaaagccactaattttagtgaattttcactttggtttactttcagtttaatgtcctagttttttttttttttaatacactcacaaaacattgactctgtatttagttttccgcactcatcttccaattcaattgttagttctgctgcttatctgatatagcaatccttcaccttcataacatttggagagttgcagaattctctactttgaaacgctctcaatgaaagtgactccactacctctttccatatgtaaacacaccacataaaagacatttacctaaatgattctgcagaatttaagagcagtgaagctcaaagtttgtatttatgcataacttctaatattctaattaggaataaagggaagataaatctgaaaaggatgccttattgagtctgcaaagttctgctttaattccccaccatttgccaccccttgtgactgaatttccaagagttacatggagtaggacataattctacatgttagaaaaaagaatgctatatctccatgcttttgaggtaccagttgactcaagagcagcttgacccaaccaagttaaattcaagtcagttcatagttataaatatgcaaaacactctactaggcatatggagaaaataagcacaagctgggcctgaggagtttctagggaaaataatacacttcataaaatcttcttgtgacacaaaaatccatttgtgctaaaagtaattagtctcccctctcattttgtgttttataacttctcttccaaatagggttctgagaatggaatattattgctattaatcaatccaagacaaatgaattatctctagcctctgactgtataaaggattctcccacagtagctacttttgccttatatgtaaattctacatattattagaacattctggtgggaattgaaaacccacaatcag

SEQ ID NO: 677823 - DNA, 738 bp, Homo sapiens
ttcccccacccagattccgttttagccacagtaaccagaagagtttaacatccgcctttacctttctctttctttggtcttcaagccaggtaggacctataaattgaggcaggctttacagctgggtcaataaagggcggggagaaaaatgaaatgggtttcctatcatttttcacaaagtttgaaaaacagagttggcaaggaagaaaaaaataaaacaggaagctggattgcacatataaattaaatattttcaccctaaccctttttagatagcccaggggtattaaaaacgtgtgtgttttggatggcctcagcaagcattccaacagtaaatggcttcctgttcagcatgttcgaagtcaggctgttttttggggttggtttaaaaatatgtgtgaaatatgtacttttattttaagccaagtcaaatgttttcaatcatccccccttacttgctgcttctgtcttcccatcctattatttcttgcccctcagacagtaaaatatacccccaaacatgtttttttttccaaaaggaagtttagtgattaattgtgagttacatgtaaacrtatattattgccctcaaaggtattcaccaagaacctggccagtgtcattcctggctggccttctagagtgttagatcttggcgagtagaagttagagaagcatgcaaagaaaccaagtatttggcttaggcacaacagggaaccaatggataattgagggtga

SEQ ID NO: 677824 - DNA, 612 bp, Homo sapiens
taatggaagtgtgagactcccaggtcggatttaagcatttaaaaaatataatggtttgcatactgtgcagtgatttgtaaaatgtgaatgcctacaaaagccgtggttacccagcataacattatcttatttttagttayacaaccagtaaaacagctggaggtctaaaatcatggcctagcactaaatgcattactacattttatccatgcagtaagggcctgtcctttttgctagacgataggagaaagtggagtgattactggcaaattaacacttccaattttaatagggaagcaaggcctacataaaagcatcggaattagaatctatgccagttagctattgtaccacatataatatgcgccaagatcacactaatatactactgcattttataatcaaatgaacctttattcattagtcaagagataatatctactcgagttgactaaagaagtaaccagcaaaatattttactttatagcttcttaacatagttaatagaatcatattggcaatagtagcaaaatataattgccacttagccgtgcttgtttttgtttttttttctgtaaaaacataaagtagtgtggtaacaccccatcccct

SEQ ID NO: 677825 - DNA, 720 bp, Homo sapiens
  misc_feature 116, 117, 118, 119, 120, 121, 122, 123, 124, 125, 126, 127,128, 129, 130, 131, 132, 133, 134, 135, 136, 137, 138, 139,140, 141, 142, 143, 144, 145, 146, 147, 148, 149, 150, 151,152, 153, 154, 155, 156, 157, 158, 159, 160, 161, 162: n = A,T,C or G
  misc_feature 163, 164, 165, 166, 167, 168, 169, 170, 171, 172, 173, 174,175, 176, 177, 178, 179, 180, 181, 182, 183, 184, 185, 186,187, 188, 189, 190, 191, 192, 193, 194, 195, 196, 197, 198,199, 200, 201, 202, 203, 204, 205, 206, 207, 208, 209: n = A,T,C or G
  misc_feature 210, 211, 212, 213, 214, 215: n = A,T,C or G
tgtaaactatggatattcattagtaataataaatatcagtttatctgttgtaacaaatgtaccacaccaatgcaagatgttaataataggggaaactgggggaaaaggggggaaannnnnnnnnnnnnnnnnnnnnnnnnnnnnnnnnnnnnnnnnnnnnnnnnnnnnnnnnnnnnnnnnnnnnnnnnnnnnnnnnnnnnnnnnnnnnnnnnnnnatcctttctgttcaacttttctataaacttaaaactgctttaaatatgaagtctatcgactttttacttctaaaaatattttatcaaatcacaattatattagtaaataaagtggaaagtctcctggttggatttatttagtaaaattataaaattaagtagtgaatattctacagagagaataccatgtaaaatctaatgctaattgaacagaytaacccttttccatgcccccactaccccaccatgacccatgcacagagtccatattgttgagttaaggcttaatgaagacacttaggaaagaagatttcacaaacagtgggggagagagattatttcagtaacctgttaaggcaaaataacaacgaaaagtcatttttttaaatgtttgatagctgtgttagtccatttgctttgctataaaggaatacctgaaactgggtaatttataaagaagaggcttattttggctcacagttctgcaggctgtataagcatggca

SEQ ID NO: 677826 - DNA, 1026 bp, Homo sapiens
ttttgtttctgtcttgatttttcttatcttagtggcacctagaggctctggccagggcctctaggacaatgttgaatagtaggactgatagaaggtagctaccttatccygactttcatgaggttactttaaatgtcactgtcaagttatgatgttttctggcaaatatctttaagttaaggaaaatgccttctatttttagtttactaagagttttcttttttaaagattaagcattaaatgttagtgcttttttttgcttctattggtattgcctaatttttctaccaggttaatatacccaggtaagtaaaacaccattctgcccaggtaagtaaatcgctatttctagctattctaatcatttgaattgaatttatctggtggcaaacaatgactaataggcatttaatagcaataaaagaggagtgtgttgaaaatacagtggggatattttgaagaaacaaagagctgaacaatgaaagctcaaggagaaccaagactgcttggaggagccaagcaacagaagctagcagatcgcattgctcctacgacaccatcgtatcatttacccccaattacctttattaccttatgatttttttttttacttttaaaatggtttcattttatgtccaaataatgaacagatgttgtacccataaattctactttccaaaaacaattaggagctttttaaaagaaaaccacataataaatttttaaaaggcactgggattcctctgcttctagatcattgttaggctagaaaaataaagtttgttctaccaggaatcacaggttagaaccgaatattctccaaagtggaaattctagagtgtaatgccatttcaggcaaagattattcagttctcatccccagcatccacatctacctatcagaagggttaaaccaggtcaaaacagtccagcataattaggcctcatcaaacaatgtcattatgctcttctaagatgcaaataaaccaaaacaggaaatactaaaatcacaataatatttgacgc

SEQ ID NO: 677827 - DNA, 1026 bp, Homo sapiens
ttttgtttctgtcttgatttttcttatcttagtggcacctagaggctctggccagggcctctaggacaatgttgaatagtaggactgatagaaggtagctaccttatcccgactttcatgaggttactttaaatgtcactgtcaagttatgatgttttctggcaaatatctttaagttaaggaaaatgccttctatttttagtttactaagagttttcttttttaaagattaagcattaaatgttagtgcttttttttgcttctattggtattgcctaatttttctaccaggttaatatacccaggtaagtaaaacaccattctgcccaggtaagtaaatcgctatttctagctattctaatcatttgaattgaatttatctggtggcaaacaatgactaataggcatttaatakcaataaaagaggagtgtgttgaaaatacagtggggatattttgaagaaacaaagagctgaacaatgaaagctcaaggagaaccaagactgcttggaggagccaagcaacagaagctagcagatcgcattgctcctacgacaccatcgtatcatttacccccaattacctttattaccttatgatttttttttttacttttaaaatggtttcattttatgtccaaataatgaacagatgttgtacccataaattctactttccaaaaacaattaggagctttttaaaagaaaaccacataataaatttttaaaaggcactgggattcctctgcttctagatcattgttaggctagaaaaataaagtttgttctaccaggaatcacaggttagaaccgaatattctccaaagtggaaattctagagtgtaatgccatttcaggcaaagattattcagttctcatccccagcatccacatctacctatcagaagggttaaaccaggtcaaaacagtccagcataattaggcctcatcaaacaatgtcattatgctcttctaagatgcaaataaaccaaaacaggaaatactaaaatcacaataatatttgacgc

SEQ ID NO: 677828 - DNA, 1026 bp, Homo sapiens
ttttgtttctgtcttgatttttcttatcttagtggcacctagaggctctggccagggcctctaggacaatgttgaatagtaggactgatagaaggtagctaccttatcccgactttcatgaggttactttaaatgtcactgtcaagttatgatgttttctggcaaatatctttaagttaaggaaaatgccttctatttttagtttactaagagttttcttttttaaagattaagcattaaatgttagtgcttttttttgcttctattggtattgcctaatttttctaccaggttaatatacccaggtaagtaaaacaccattctgcccaggtaagtaaatcgctatttctagctattctaatcatttgaattgaatttatctggtggcaaacaatgactaataggcatttaatagcaataaaagaggagtgtgttgaaaatacagtggggatattttgaagaaacaaagagctgaacaatgaaagctcaaggagaaccaagactgcttggaggagccaagcaacagaagctagcagatsgcattgctcctacgacaccatcgtatcatttacccccaattacctttattaccttatgatttttttttttacttttaaaatggtttcattttatgtccaaataatgaacagatgttgtacccataaattctactttccaaaaacaattaggagctttttaaaagaaaaccacataataaatttttaaaaggcactgggattcctctgcttctagatcattgttaggctagaaaaataaagtttgttctaccaggaatcacaggttagaaccgaatattctccaaagtggaaattctagagtgtaatgccatttcaggcaaagattattcagttctcatccccagcatccacatctacctatcagaagggttaaaccaggtcaaaacagtccagcataattaggcctcatcaaacaatgtcattatgctcttctaagatgcaaataaaccaaaacaggaaatactaaaatcacaataatatttgacgc

SEQ ID NO: 677829 - DNA, 1026 bp, Homo sapiens
ttttgtttctgtcttgatttttcttatcttagtggcacctagaggctctggccagggcctctaggacaatgttgaatagtaggactgatagaaggtagctaccttatcccgactttcatgaggttactttaaatgtcactgtcaagttatgatgttttctggcaaatatctttaagttaaggaaaatgccttctatttttagtttactaagagttttcttttttaaagattaagcattaaatgttagtgcttttttttgcttctattggtattgcctaatttttctaccaggttaatatacccaggtaagtaaaacaccattctgcccaggtaagtaaatcgctatttctagctattctaatcatttgaattgaatttatctggtggcaaacaatgactaataggcatttaatagcaataaaagaggagtgtgttgaaaatacagtggggatattttgaagaaacaaagagctgaacaatgaaagctcaaggagaaccaagactgcttggaggagccaagcaacagaagctagcagatcgcattgctcctacgacaccatcgtatcatttacccccaattacctttattaccttatgatttttttttttacttttaaaatggtttcattttatgtccaaataatgaacagatgttgtacccataaattctactttccaaaaacaattaggagctttttaaaagaaaaccacataataaatttttaaaaggcactgggattcctctgcttctagatcattgttaggctagaaaaataaagtttgttctaccaggaatcacaggttagaaccgaatattctccaaagtggaaattctagagtgtaatgccattycaggcaaagattattcagttctcatccccagcatccacatctacctatcagaagggttaaaccaggtcaaaacagtccagcataattaggcctcatcaaacaatgtcattatgctcttctaagatgcaaataaaccaaaacaggaaatactaaaatcacaataatatttgacgc

SEQ ID NO: 677830 - DNA, 615 bp, Homo sapiens
ggcagaaagacaaatatcagaaagaaggtaggttttctaaacaagctgtactactaacaagataagcaattcttaaaataaccaacctatcccctcagagttgttctgagggttaaaggtgggataagtaaagyagggatcaggctgtacggcatcataaatggctacttcatcatcataaaacgagttgatcgaacctttttaaaacagctttgagatataatttacatattataaaattcaccaatttttaagtgtacaattcaacagattctagtgtatttactcagttgtacaaccatcatcacaatccaagtggattagatctgtgatttaacttaatttctatgatttaacttgtcatttaaaatcaggcaagcaaaaactgccaatgtcctcaagttcaaaggatgaaagggactttggtttcccaccttctgagggcaacaggctaactttaagacaactctcacttgaaaggagaaaaaaaagcttgtgttgttgagagcctcgtccttttcacaacttgggaacttgactaagccacaaagcaacactcagcttctcacttcaactcagcaccacgcatgggagggcagtcacggcagcagaagg

SEQ ID NO: 677831 - DNA, 615 bp, Homo sapiens
ggcagaaagacaaatatcagaaagaaggtaggttttctaaacaagctgtactactaacaagataagcaattcttaaaataaccaacctatcccctcagagttgttctgagggttaaaggtgggataagtaaagcagggatcaggctgtacggcatcataaatggctacttcatcatcataaaacgagttgatmgaacctttttaaaacagctttgagatataatttacatattataaaattcaccaatttttaagtgtacaattcaacagattctagtgtatttactcagttgtacaaccatcatcacaatccaagtggattagatctgtgatttaacttaatttctatgatttaacttgtcatttaaaatcaggcaagcaaaaactgccaatgtcctcaagttcaaaggatgaaagggactttggtttcccaccttctgagggcaacaggctaactttaagacaactctcacttgaaaggagaaaaaaaagcttgtgttgttgagagcctcgtccttttcacaacttgggaacttgactaagccacaaagcaacactcagcttctcacttcaactcagcaccacgcatgggagggcagtcacggcagcagaagg

SEQ ID NO: 677832 - DNA, 1922 bp, Homo sapiens
  misc_feature 884, 885, 886, 887, 888, 889, 890, 891, 892, 893, 894, 895,896, 897, 898, 899, 900, 901, 902, 903, 904, 905, 906, 907,908, 909, 910, 911, 912, 913, 914, 915, 916, 917, 918, 919,920, 921, 922, 923, 924, 925, 926, 927, 928, 929, 930: n = A,T,C or G
  misc_feature 931, 932, 933, 934, 935, 936, 937, 938, 939, 940, 941, 942,943, 944, 945, 946, 947, 948, 949, 950, 951, 952, 953, 954,955, 956, 957, 958, 959, 960, 961, 962, 963, 964, 965, 966,967, 968, 969, 970, 971, 972, 973, 974, 975, 976, 977: n = A,T,C or G
  misc_feature 978, 979, 980, 981, 982, 983: n = A,T,C or G
cccctgagctgggctctagagaagtgtgctgggggcagaggtgaggagaggggatggggcggtctcagttcctgtgtcgcttactggtggaacaggatgttgtgctgtggacacatgccaaggctctgccggactgcatccaggctggtttcaatgtcccttcccccaacgagcacagtcccagaggttggtggcaacagacccgtcaggatggacctgcagaacacaggcgtcagtggcagaagagatggcctttagcacatgccttaggagggccacccccacaccaggttcagtgagaactctcacagattcctgcttggggctgtcagtcaaactcaaacccctattagctgtggggcccccttagcaccagtgtatacatccaggccctaatgcagagggccacctctgccatccttctctgcttctacttgtttcatggtgctcccaggccaacgccgagggcctttgggattcccagcctcaaaatgttcacgtgcagtcacaggtgtccccagctcagccatcacggagcctggtgttggagaggatcaataaaaggtgttcggtgcatgactcgaggckttgcctcctgggtgagcagtcatggctattgaaaagccaggtgtcatcatcataaagcccgggtaaggtcttgatgaaggccagaaccctaagcagtcctaggcatttgctgattaattgatcgaagccaggcatgggaattaccaccaccaatattagctttggatccaaaacataaaaagcctcagagcaataggtgggcttttttttttttttttttaaatgggaactatgactcccatgtccttaggttgttgtaaggcttaaatgagttaatacacttacaacattagaannnnnnnnnnnnnnnnnnnnnnnnnnnnnnnnnnnnnnnnnnnnnnnnnnnnnnnnnnnnnnnnnnnnnnnnnnnnnnnnnnnnnnnnnnnnnnnnnnnnttagggcaggtgcatgattatgtaaagtaatcatgcacttttgtcttttgatttcaaaaaaatctgaaagtactcatcctgattgacttcctcatgtgttaggtggcataaaccaaatcaaagaacctgctctggacatggtgaaatatgtgtttttctgtaatagaaatgataaagataacatgttctctgtgcatagaagacaagagaatactcttctctgctgatttggggagtagggctttcaggaggttcctgctgatctatttagtgatagaaaacttggaaaaacataattaagatagaattttagaaatgattaaaatagaaaagagttgaaacattgcttctgaatccaatctcactgctcaaacttttcaagtagttaaaatatacccttatacatgggcatttctgattataaaggaatttgtttttcaacactttgaaaattaaaaaaaagttacaaacgttaaatcatgtattactacttccatcattacataacattttcagaatgtttaaaaaattatttactttccatactattaaacaacctgctaatttcactggaagtattttgttaatactttctcattttatttattttatattcttcttcaatgccactttgatttttccctcatagctttatatttactttgtaaactacttaatcaatttgctaatctcaaatacttagcatgccttgtccttccactcttccatttttaactattttaaaagaattccataaaatttccttaaatctttgtaatcctaatgaatacacctgaaaggcaagggaagtccaaactccaaatgctgtcacagtgcaagttttccttgactgcaaagaggagattttatagagaaatatatccatacatatacacacatgtaatatctatataatacataccacatatagaaatatgc

SEQ ID NO: 677833 - DNA, 592 bp, Homo sapiens
ccaggccaaagtgcataagcattggatgcaaccctccagctccttcttctcctgtctggataactataaggctttgggtggtaatgtagaagcatccatcagctcgggctcagtatgactctgtgcatgagtggccctgccagcccagatggtacctgtagcttgaatgaaagatgaatattggtcattgatattttatggttaacttagcctatcttaatatattaaaccacaggtcttccagggtaatatacatcaggtggtgtttataaattttaatttctgcaactggaaaaatattgctcattcattctttactccttttattaattcatctatccatgcatttatctgcctatatattcaacaaatatttgtttagcaacactcattgctagatactaatctgggtrctgaggatatattaacaaaaagccctattacccctgccttcttggggccataacctagctggagaaacagacaagaaaaatccataattacaatcccatggggcaagggctgtgatcagtaagccctcctatgttataggagcccagaaaaagttatcccagcttgaaagtcttttaag

SEQ ID NO: 677834 - DNA, 1527 bp, Homo sapiens
aaggataaaaaccattatttaaaaatgaacaagatgccatggaagtacaaagtagaaaaggcctactgagcattcactccaggatctgaggaaagcgacagctggtgtggtgttggcctgtgaaaatgtaaagaccttgccactctttggagacacttcactcctcaagtgcagaataacatctaaaatcgttatcatgacctgaagtactccacaagattcatctctgcctatgtctttctcttcatttcctatcattctcacctctgttcagtatgycttgccatgcctgaaataggccatatttgctcacttgtataactacgccttgatatttatactgttgctctttctctggccaggaggacactcttctctcggggtctctgaatggctcaattattttatcattgctatggtttgaatgtcccctccaaaactcatgttgaaactcaatctccaatgtggcagtattgagaggtggggtctgtaagaggtgattggatcatgacagctctgcccttatgaatggattattccattcacagattaatgcactatcatgggagtgggattcatggctttatacgaagagaaagaaagacctgaactagcgcattagcaagcacaggcccctcatcatgtgatgtcctgccccacctcaggactctccagagagtctctgccagcaagaaaactcacaccagatgcagcccctcaaccttggacctctcagcatccataactgtaagaaatacattccctttctttaaaaattgcccagctttgagtattctaagtaacagaaaatggactaagacatcactcttgtgagggagcttctagcatgcaagcttcctgagggcaggtctcaggtgtctgagaatatccttgtatccttgatgcttgagctctgcctgggatatagtggggctcattcagtgataaagatgccattttatgatagttcattgaggacattattttcattttcctagataccacatttcaaatgtaactaagataaactttttaaaagaagctatactgtttatcttactgtcaattatatccctctatggtttttccacaaaatcttctctttgccatggttgtctccacttcagatgtatacttaagtttttgtacccaagaatagaaccttacttttgtcactaattaactgtgtcttctcatattagatcaatcacacatgcatcttctgatttttctgagtctactttgtgatttactctttaccccaagtttactccaaatttcatgttatccaaaaatgtgatcaaatggatttctgtgcttcccccaagtagagcccaggagccccagagtagccagtcttctagaaatctcaaagttttctttactcagcacgtggaaagaatgttcagaattcaaaataattttggaaactgaagaagtcagggataaattacttaataaagacaaaaacaaatatctcacttataaaattatatgattgggtataaacaaactactcacagatag

SEQ ID NO: 677835 - DNA, 1527 bp, Homo sapiens
aaggataaaaaccattatttaaaaatgaacaagatgccatggaagtacaaagtagaaaaggcctactgagcattcactccaggatctgaggaaagcgacagctggtgtggtgttggcctgtgaaaatgtaaagaccttgccactctttggagacacttcactcctcaagtgcagaataacatctaaaatcgttatcatgacctgaagtactccacaagattcatctctgcctatgtctttctcttcatttcctatcattctcacctctgttcagtatgtcttgccatgcctgaaataggccatatttgctcacttgtataactacgccttgatatttatactgttgctctttctctggccaggaggacactcttctctcggggtctctgaatggctcaattattttatcattgctatggtttgaatgtcccctccaaaactcatgttgaaactcaatctccaatgtggcagtattgagaggtggggtctgtaagaggtgattggatcatgacagctctgcccttatgaatggattattccattcacagattaatgcactatcatgggagtgggattcatggctttatacgaagagaaagaaagacctgaactagcgcattagcaagcacaggcccctcatcatgtgatgtcctgccccacctcaggactctccagagagtctctgccagcaagaaaactcacaccagatgcagcccctcaaccttggacctctcagcatccataactgtaagaaatacattccctttctttaaaaattgcccagctttgagtattctaagtaacagaaaatggactaagacatcactcttgtgagggagcttctagcatgcaagcttcctgagggcaggtctcaggtgtctgagaatatccttgtatccttgatgcttgagctctgcctgggatatagtggggctcattcagtgataaagatgccattttatgatagttcattgaggacattattttcattttcctagataccacatttcaaatgtaactaagataaactttttaaaagaagctatactgtttatcttactgtcaattatatccctctatggtttttccacaaaatcttctctttgccatggttgtctccacttcagatgtatacttaagtttttgtacccaagaatagaaccttacttttgtcactaattaactgtgtcttctcatattagatcaatcacacatgcatcttctgatttttctgagtctactttgtgatttactctttaccccaagtttactccaaatttcatgttatccaaaaatgtgatcaaatggattkctgtgcttcccccaagtagagcccaggagccccagagtagccagtcttctagaaatctcaaagttttctttactcagcacgtggaaagaatgttcagaattcaaaataattttggaaactgaagaagtcagggataaattacttaataaagacaaaaacaaatatctcacttataaaattatatgattgggtataaacaaactactcacagatag

SEQ ID NO: 677836 - DNA, 549 bp, Homo sapiens
aattccaggaagatgcaatatattctatttgtgtgtagtttcttataaacagccttagttctatttgaagctaaagaagaacaggatggttagtttcaatatgttaacagctccttctctttaagtaaaatagaaaatggaaaagagaaggacctagaaagaagcatgtctcactccatccagaagtcatgaaagcagatgatgcagtgatgtacctagctctgaggtcctcttttgtataagagaaataaatattcatatatacagtatatctgagaagagggcttcttcagaggagaacccagagagagcccagtgcccacaagaaaatgcctgggtgagcttattatagttctggttgcccaagcaaattayattttacctacgtgaaaataatagtaatagtgagaaaaatgttcttgaacatttgaatggtgctttcattcattcatttattcatccatccagcaaatgtttattaagcacctactgtgaagtaggcaatgtgctaaacattgtcatactgtagcgaagaagagagactggtcc

SEQ ID NO: 677837 - DNA, 484 bp, Homo sapiens
tgtgagttagacctcgcagaatctctatgtctctgttaggaaaggtagtctgccatgggtgctgagtgttcctgtcagtccttgctaagtgtgccaaacttcaaggcttatcatcctgtaacagtgagcaggtcctgtaactattcacataggccactaagtagatcagggcacctgagcatgactgccatgcaactgcccatccctggagtagggggactcgtgtgttcactgcttgctgaaaagatgccaggtcagttcttcagctgtgctgcaacccactgtctgtacagccaccatatggacccgcaacaccaccccaagggacttggaggcatacgtttgtatgttggggagagtgggccatggaatatatatatatgtgtgtgtatatatatatgtgtgtgtgtgtgtatatatatatatrtgtgtgtgtatatatatagtgtgtatatatatatgtgtgtatatatatgtgtgtgta

SEQ ID NO: 677838 - DNA, 885 bp, Homo sapiens
tatcacaaaagtttttaattttgctgaatcaacgtacctgggttttgttttgttttgttttttttggtggtgttgactgtgctccaagtccattttttagtgaaaatttatcatatttctatattatcaaaactatcttcaaaagaaaattcaaagctttaaaaataaatatgtttttacagggcacagtaactcatgcctgtaatcccagtgctttgagaggccaaggtcaggggattgctggaagccaagagttcaagaccggcctgggcaatagaataagaccctgtctctacaaaacaatttttttaaattagctgagggcatgattgtacactcctgtagctctggctactgggaaggtttaggtggaatgagcccttgaggccagaagtaggagttccatattacaaggagctatgatcaagccactgcactccaatctgagtgacagaatgagaccttgtctcaaaaaaaaatttttttaataaaaataaatgtgttttgtcacttcttatgccttacttcttgtataatatgataaaagtagtaagttttccctatggacaaaatactatgtttaaaatcttatgtctttcaaagtctttaattatattgtactccaagtcacaatagtctttgctgtaacatctagaattttcttcccacctgaaatttccttttgtctttaaatttcaatttmaaatgtaattaatttccaaacttacatattatattataacttcattttttgatctggatcaaaagtaaccacaacacattatgatttgtatgtttataaaaaggtatcctttatgttctgctggtagtagtccccataaagtgcacatattcagaaaaacctcagacatgagccaactgcat

SEQ ID NO: 677839 - DNA, 885 bp, Homo sapiens
tatcacaaaagtttttaattttgctgaatcaacgtacctgggttttgttttgttttgttttttttggtggtgttgactgtgctccaagtccattttttagtgaaaatttatcatatttctatattatcaaaactatcttcaaaagaaaattcaaagctttaaaaataaatatgtttttacagggcacagtaactcatgcctgtaatcccagtgctttgagaggccaaggtcaggggattgctggaagccaagagttcaagaccggcctgggcaatagaataagaccctgtctctacaaaacaatttttttaaattagctgagggcatgattgtacactcctgtagctctggctactgggaaggtttaggtggaatgagcccttgaggccagaagtaggagttccatattacaaggagctatgatcaagccactgcactccaatctgagtgacagaatgagaccttgtctcaaaaaaaaatttttttaataaaaataaatgtgttttgtcacttcttatgccttacttcttgtataatatgataaaagtagtaagttttccctatggacaaaatactatgtttaaaatcttatgtctttcaaagtctttaattatattgtactccaagtcacaatagtctttgctgtaacatctagaattttcttcccacctgaaatttccttttgtctttaaatttcaatttcaaatgtaattaatttccaaacttacatattatattataacttcattttttgatctggatcaaaagtaaccacaacacattatgatttgtatgtttataaaaaggtatcctttatgttctgctggtagtagtccccataaagtgcacatattcagraaaacctcagacatgagccaactgcat

SEQ ID NO: 677840 - DNA, 1153 bp, Homo sapiens
ccttatgcagcatatgactgtattgtatgatcccacttatatgaggtaaccagagtggtcaaactcatagagacaaagtagaatggtggtttccagttgctggtggttgccagttgctggggaatgggaagttagtgtttaatgggcaaagaggttcagttagggaggatgaaaaagttctggatatggatggtggtgatggctgcacaacagtgtcaaatatacttaatgctgcagaactgtatactttaaaatggtaagttttatgtctattttaccacaataaaaaaaaattggaaatgaatgattactgaaaaaagaatcacagtcacgaggataaagagtaagttactgttcagacaaagaggatagaagaaactatatttttacatgtactttattattttcatatggtacctggatttcaagctcagcaatgtgttgtcgtagttcagccacagcagctatgctatctgcttcccgaagcctcacagccatcacttcttccttattgtagtgtggtaaaccaaaccgaaacaaaataaaccaggtgtgtttggaattcagattttagaaaagtaataggttgcataaaccatacgttaagtattatctagcagggcctaaggcagcatccataatgaaacaatatgctcaatacatacaacgaagcagtgagatataaatgttcacatcaagtggaataaataacaattataaatggccatatatcaattcaaattaagttttgcctccaaaggaatttgtgtgaaatttatgaaaaaactccagggttttagagtgttttgcattttgaaactggggttcacaggcttgtaatatttcaactttaagtgagaacattcaaattaagttgagagggaaaataacattaatattataaacaatatccacacattttacacaactaaaaataaaaaagctttaataattataaattaatcataagctataatmttataatactaaatgaaaatgaatcagatttacataattcacggactggctttcttgaaaaattaactttgttcccgaattattccaacataacagggtaaaacatacacatttaatcagaatgtactaggtgctagggtaacaatacattggtcattctcaaaacctgcaaagg

SEQ ID NO: 677841 - DNA, 610 bp, Homo sapiens
ataaatatcctaaatatcctatctttctttctctctctctctctctatctatctatgtattttttcttttttactatttctacccagttagttccagtgggaagaaaagctattgatttctctatattgaccttctgtacccactttactagattcttctattaattctaatatttttcataaagtctcacgatttttatagaaatgtgcacaatttcataaggaaataaaataagattatttcatttttaagatttattttggagttaatcatatgaatgcattagttataaaggtacagttatataatggttgctaaatacaaaatggtaataataggaatccataacttgctccttgttttcaatgaaagtttcttcagcgttcatatatagtggttgaaatgagtcttggtgattaatttttatcatgtttaaagactttccttttcttcctattctccttcaaaggatttaacctttaattcactgaggcaatgaaatataacacaaaagctcctgatgttaaccatttatttatttttggaaaawaactctagatgataatgctaacatgttggattttattgggtaatatattttatttataa

SEQ ID NO: 677842 - DNA, 659 bp, Homo sapiens
ggactcactgctgtgtctcctcagtccttccttctggcactcctctttccatggagacagtgcttcagcaggaccacctgaacaggccagtatctgtgggctcggatttcttacttctcattattttatttcagagagagtttaaagtgtgcatcatgtccatttaaatttactgacaatgtttatctaatctatctgcctacgaacctactcctccatccacacacacatactttgttcaagaaagaatttaaggtgctttcttcactagaaaaggtatctattatttttcaagctcagagaaaaatgttagcttttaaataatgacacaactgtactaattctaagttttttcttctataacattttgttaaacgaattcaagatgctgtggaactccaaatgcttaggaaaacatggcatccttatgraaaattgggttttgaatgacacatgctgtaaacaacaaccaaacacatttgtatgtgaaaatcaaattcaaaaactttagaaaatatttgcaaaagctgattatgggtaattcctctgaacagatccaagatttaaaaaaaataagataatctgtataaaagctgcatttcgtatctgatgaaatttagcgttaaaaaacttaataaaataggatttgataagtattt

SEQ ID NO: 677843 - DNA, 659 bp, Homo sapiens
ggactcactgctgtgtctcctcagtccttccttctggcactcctctttccatggagacagtgcttcagcaggaccacctgaacaggccagtatctgtgggctcggatttcttacttctcattattttatttcagagagagtttaaagtgtgcatcatgtccatttaaatttactgacaatgtttatctaatctatctgcctacgaacctactcctccatccacacacacatactttgttcaagaaagaatttaaggtgctttcttcactagaaaaggtatctattatttttcaagctcagagaaaaatgttagcttttaaataatgacacaactgtactaattctaagttttttcttctataacattttgttaaacgaattcaagatgctgtggaactccaaatgcttaggaaaacatggcatccttatgaaaaattgggttttgaatgacacatgctgtaaacaacaaccaaacayatttgtatgtgaaaatcaaattcaaaaactttagaaaatatttgcaaaagctgattatgggtaattcctctgaacagatccaagatttaaaaaaaataagataatctgtataaaagctgcatttcgtatctgatgaaatttagcgttaaaaaacttaataaaataggatttgataagtattt

SEQ ID NO: 677844 - DNA, 659 bp, Homo sapiens
ggactcactgctgtgtctcctcagtccttccttctggcactcctctttccatggagacagtgcttcagcaggaccacctgaacaggccagtatctgtgggctcggatttcttacttctcattattttatttcagagagagtttaaagtgtgcatcatgtccatttaaatttactgacaatgtttatctaatctatctgcctacgaacctactcctccatccacacacacatactttgttcaagaaagaatttaaggtgctttcttcactagaaaaggtatctattatttttcaagctcagagaaaaatgttagcttttaaataatgacacaactgtactaattctaagttttttcttctataacattttgttaaacgaattcaagatgctgtggaactccaaatgcttaggaaaacatggcatccttatgaaaaattgggttttgaatgacacatgctgtaaacaacaaccaaacacatttgtatgtgaaaatcaaattcaaaaactttagaaaatrtttgcaaaagctgattatgggtaattcctctgaacagatccaagatttaaaaaaaataagataatctgtataaaagctgcatttcgtatctgatgaaatttagcgttaaaaaacttaataaaataggatttgataagtattt

SEQ ID NO: 677845 - DNA, 469 bp, Homo sapiens
accaaggaggccaaggagtttccggggagaaaaggaatggagacctgacctttccctttgggaaagtaaggacattataactgctgatgacttcaaatggtatcaactcaggtctgaaaaaaatgttttttttaaggaaaagaaaaaagaaagataccaagaactgccactgaggaacttaccttaagggaagggagggtaccagtataaagaagtgatcccaatggaaactgtgcccttaccattgaaagcctgcctaaagattcacaracactggagcctaggcctaaagtgacatgggacaaacacgtctgagcttaacagtggagagaaagatctcttttttctctttcagtgttcctaggagcctcctttataccgaaggacagagacagtatcattctgtgcaagctcttgtgtttacaatgaaacaccctgtggtagccacaaaaacaacatgatcaaacct

SEQ ID NO: 677846 - DNA, 637 bp, Homo sapiens
tatttgtaaattcaatgacttatctacagaagtcccaagagggtttttgttttgttttgtttttaaatatggcaaaatgatcctatcrgttgaaagaataatcaaaggggcaatgccaagaaaatactgacaaggaagactttccctatcagactttaagatttatcaaagaattatagtaatcaaatagaagtagcacaggaatagaatcaatggaataggacagagtgtgtgtaaatatgaaaatttaacacatggttaaatgaggtatttcaaattatcagagaaaaagattgagctgggtttttttttgggaaaacaaaagtaagcactccttccatctttccactaagtagaactctggacaaatcaaggatttagatgctcaaacatgataaaatgtcttttaagcatgtcatgaaaaccagaaatcaaagaataaagaccaataaatctgattacctataagtcttagacttctgtatggaagaaagaagagaaaatactgccataaaccaatatctctgggcatcaggtaaggcactattctttagagactcaaatccatttgactgaagcccgattccagatcctttggtactcttcatcccttctccaagattactgtacacattca

SEQ ID NO: 677847 - DNA, 2031 bp, Homo sapiens
tgagtttatttcagaagggaagcctcaatgtgatcttcttttcttgtaataaacatatcttctgaaagtggaatactgaaaaaaagtcaggttaagggttgaagcctatgagttggggtctgtttgatcaagaatttacggcatatctacattgggcacttgccaaactcaggaatagctcttttctctagctttggcccaatttttatttcttttaaaataagatatgaaacaaattttcagacatcaagacttgacatgaaaaaccaatcaaggcataattatgttgcccatttatttttgtctcaaaatggtattatacaatattcacacattaccacatggttttcmttcccctgtgaaatttttaccttttttacatgtttagcagacctggggatcctaactttggaggtgaggcaatctcaaatctcagaggactgggcctccgactcaaaggagagagctgccctggatctttttataacctttctccaggcaatactgaatgccaggaaaggtatccaaacccaagtcaatacttcatttgtggtgagttcgtgatcaggcatttctctgttctttaacagcaaggtaaacagtaaaccaggacaactttttgacaagaatttatccttgaaacttggaaagctggtcttagggccagctcatagggggttgtacgttattctttaaataataggacactatcatcacatgctatcaaggagagcaagagtggagacagtggagtcagctgagggcagtactgatgttgtacataagagcctgactagtggagtcgcagtgggagtggaggtgagaattgtgaagagaagaacattgagaaattgacttggcaatggatgcccactctgccactgtcccccagctgtggggatgacaaactcagatcaagggtatctcttgccttctaggagcttacgggttacctgcatttggaattgaaaatacagaatggaggtgaggtgttgatcatattgatgacagggtgtctttcagcaggccccacagggtggctatcctgtaggtttaaaaaccaattttaccactatactgagaggatccatatctcagggaggatttacagaaacccagtacacagactggcagagagtttactgcctgcatgttcccctatactcagctttctcaagttagatctttggggaaaccatattgtattcataattttgcctagtgagcatagaatcaggatcagaataagttacaggaattaggcaataataaattatctaattatcacctaaaattaaaattctcacctaagagagcatgtggcacttgctcccctcagagagatactttgccagtggaactaagacacctgatgtcagagactcagacttccttttctctcaacacgactcagacagaacctaccaacatttgccttccagactctctctgcttctgatgctgatgatcccttgcccctccaccttacattctttcttttgatatattaataactcaggcaagtcccagttctctggatcactatttctgggactctacattttagaaatagtaacacaaatcagtgaaaaaatatattcacaagaatgttaattgcagccttttttaataccccagattggcaatgagctatgtgttcatcagttgggggattgggtaaataaaagatattataattatttaatgccatactatgcaaccattagcaagactgcatagaaaaatatgtactgacttgacaagatatacaaaataaaatgttaatataaaaccaaattatattataaaaacaaattttatatctatatatatagcagaatcccatctttgtgaaaaagaaatacatgtatgtatggctatttgtatatgacatatacatatatgcatatacacatatacatatatgtgcttgtatatcaaatttaagcacagaataaatccaggaaaatagtgcttttatatgttaacagtggttatccctgaggaaggggtaggattgtatatgttgga

SEQ ID NO: 677848 - DNA, 2031 bp, Homo sapiens
tgagtttatttcagaagggaagcctcaatgtgatcttcttttcttgtaataaacatatcttctgaaagtggaatactgaaaaaaagtcaggttaagggttgaagcctatgagttggggtctgtttgatcaagaatttacggcatatctacattgggcacttgccaaactcaggaatagctcttttctctagctttggcccaatttttatttcttttaaaataagatatgaaacaaattttcagacatcaagacttgacatgaaaaaccaatcaaggcataattatgttgcccatttatttttgtctcaaaatggtattatacaatattcacacattaccacatggttttccttcccctgtgaaatttttaccttttttacatgtttagcagacctggggatcctaactttggaggtgaggcaatctcaaatctcagaggactgggcctccgactcaaaggagagagctgccctggatctttttataacctttctccaggcaatactgaatgccaggaaaggtatccaaacccaagtcaatacttcatttgtggtgagttcgtgatcaggcatttctctgttctttaacagcaaggtaaacagtaaaccaggacaactttttgacaagaatttatccttgaaacttggaaagctggtcttagggccagctcatagggggttgtacgttattctttaaataataggacactatcatcacatgctatcaaggagagcaagagtggagacagtggagtcagctgagggcagtactgatgttgtacataagagcctgactagtggagtcgcagtgggagtggaggtgagaattgtgaagagaagaacattgagaaattgacttggcaatggatgcccactctgccactgtcccccagctgtggggatgacaaactcagatcaagggtatctcttgccttctaggagcttacgggttacctgcatttggaattgaaaatacagaatggaggtgaggtgttgatcatattgatgacagggtgtctttcagcaggccccacagggtggctatcctgtaggtttaaaaaccaattttaccactatactgagaggatccatatctcagggaggatttacagaaacccagtacacagactggcagagagtttactgcctgcatgttcccctatactcagctttctcaagttagatctttggggaaaccatattgtattcataattttgcctagtgagcatagaatcaggatcagaataagttacaggaattaggcaataataaattatctaattatcacctaaaattaaaattctcacctaagagagcatgtggcacttgctcccctcagagagatactttgccagtggaactaagacacctgatgtcagagactcagacttccttttctctcaacacgactcagacagaacctaccaacatttgccttccagactctctctgcttctgatgctgatgatcccttgcccctccaccttacattctttcttttgatatattaataactcaggcaagtcccagttctctggatcactatttctgggactctacattttagaaatagtaacacaaatcagtgaaaaaatatattcacaagaatgttaattgcagccttttttaataccccagattggcaatgagctatgtgttcatcagttgggggattgggtaaataaaagatattataattatttaatgccatactrtgcaaccattagcaagactgcatagaaaaatatgtactgacttgacaagatatacaaaataaaatgttaatataaaaccaaattatattataaaaacaaattttatatctatatatatagcagaatcccatctttgtgaaaaagaaatacatgtatgtatggctatttgtatatgacatatacatatatgcatatacacatatacatatatgtgcttgtatatcaaatttaagcacagaataaatccaggaaaatagtgcttttatatgttaacagtggttatccctgaggaaggggtaggattgtatatgttgga

SEQ ID NO: 677849 - DNA, 1349 bp, Homo sapiens
  misc_feature 421: n = A,T,C or G
tgaagttttcttttttttttaaactaacatttccaaagagcatttacagagtgttttatgaatgaatgcagaatatagcaccgaacgaggcaaacctttcttatgaggacagccgtatagttaaatccaagcatgcaagattgaatgaccccgattgacaacccttgccctctgttacaaacaaatgggaccaggaatgtggtccccccacagtgcactgggggatgcctgcacccactaccctctgccatccatctcctcctcctctgatttgtgtgtgtttttgttaaacagtggatcttgctatgcttttcagaaagctgacaagaagcaagctgaaaattaaaaatgggtgccgagaggcttactgggagtctaaataaacagcccgacaggaaagacgtgtggcaggctaaggttncaggctagtggtcggagcgagctaacagacatccgtataacagaaggctgtgtttgttttccctgtccctgctctagcaaatttattgggttatctgtcttattttgacacttgggtgtttaaggtttctgttttaggtgtctaaagacataaaaaaattattgtacagtttacattcctggcagaagctttgacatgtgctagctgaaaagttcctatctgccagtgatttcacagaaaaagcctcagagagttgggttttcatagagggtccaagaatcctctgtgaaaagcaccaagaacaaagggtttcttcttttatttctgtccttatcttcctattgtctagtgaagagtggccaccaagccatttgcttcccgttgtactggatttttacytaccatgtaacatataggaaaccttacccctgtcttgtagaggaagagattatttccatcagtggagcttgcactcaacatagatcaacaagatacagtttgatttgctgtagaggtcaggaaggcacggcagtgttgagtgaattctagatgttatgataacgcaccatcaaaatattagagtcatatgtgtataaatattgacattttgatgatggatgtactaaaccacccacaagcaatgttaatatatttcttcttttcagaataccaatttggaaataattttacttataaatgtatacctgccttgtttctcaaaggttttgtggctgcagtaactaattaaggagtggtagggaatttaaatagctctctgacataaacctattttcattcattcattcaaatggcattcaataaacactcatgtatttaattgttaggaagcagaaacagacatgggagaaaagtataaaacacagtctgtggctccaatggaagcttatagttttttctctcatcatct

SEQ ID NO: 677850 - DNA, 1050 bp, Homo sapiens
gaaagacggccggcctacttgcatccccagtgcctatacacagcaggtccagtgtctgctggactcaaataagacccccagggccgggacagagctctgctcctggaagtcccctccctccctggtctcaggaggcagaagactggggcagacctgagcccagatggcttggattggggggctcctaacttagccagcgatggccaaggggaccagatgttaactatgcttggagcccatggtggccacgccaaaggggaaatttctctcctaccctcaaggagaccctcaagttgctgagctgatgaagccattaccagggcacaaggggcaaccgtggcctgggagatgcttcttaaccttatttgggtgtaagacgctttgaaaatttaatgaaaacatacacatacacattttctatttcatttcctgggggacctcgggtcccaaaataagactccctgagctagcggcggggccatcttcagaggctgccgtggagcccatgcagctcagctgccctttgaggttccagtacccaagccctttgcatctttggaagccagagctcccaaagtgactccccacggggggccaggctgacccctatcagcttgcacgctgccctctcacacttcaccggggccctgctcagacccatccagagccaccgacaccctttcctctgagttctscttcaaaagtccccagagccaagcccctcagggctgagctgatgctgaggttcacagcatgaggtctggagtcagatctgcccgcgtaaggaccgggttccaccacctcctaggggtgtgaacctggggaaacctctctgctccagagcttcactgcgaccatctgtaactggggacatgagagctcaagtccctttgccagctgatcaaatgagctgatgctgcaaagtgcccctctggtctagcttacagaagtgatgagctgagggcagttaattattgtggtggtcacagggttctgggcatggtttagtgaaaagccccacaccatgaggggagacctggattctacact

SEQ ID NO: 677851 - DNA, 415 bp, Homo sapiens
ttgacacctatgagttcttttgttatattgaaccttacrgtttctagcttctcaactttccctagactgtacttccaatggagccctggacttcttgggccagcaagtaaactatcagaaccactctcagctgccccagctaacaccactagatccagaatcgtgggtgagtgcacagtgcacccacgtttaccctgatcaaagtgatgttccttcctcttgaccaatagccttcaggatgcctttcctcacatattcccacatctttgccaatataattaagtcctgtaagtcttttggtggttgaattcccttctcccctagtaagtgctggggtctgactttagttacaagtctggggatgtggaagatgagtgtgtaaaggtgaggggtgggggtagggatagagcattaa

SEQ ID NO: 677852 - DNA, 415 bp, Homo sapiens
ttgacacctatgagttcttttgttatattgaaccttacagtttctagcttctcaactttccctagactgtacttccaatggagccctggacttcttgggccagcaagtaaactatcagaaccactctcagctgccccagctaacaccactagatccagaatcgtgggtgagtgcacagtgcacccacrtttaccctgatcaaagtgatgttccttcctcttgaccaatagccttcaggatgcctttcctcacatattcccacatctttgccaatataattaagtcctgtaagtcttttggtggttgaattcccttctcccctagtaagtgctggggtctgactttagttacaagtctggggatgtggaagatgagtgtgtaaaggtgaggggtgggggtagggatagagcattaa

SEQ ID NO: 677853 - DNA, 644 bp, Homo sapiens
aagatgtctacatcctaatccctagaacctatgactgtgttaccttacatggcaaaagagactttattgatgcaattaacttaaggattttagatggggagattattctgcattaactgggtgagcccagtttaatctgcagggtcctgtgagaaggggacatgagggtcaggatcagagaagaagattggatgatggaagcagaggtggggtgatgaggccaggagtctgggagggctggcagcctctacaaattgaaaaaggcaaggaatggaatgtcccctagagccttcagaagcatacagcctcactggcttgctggcaccttgactttggtccagtgagacagatttttgacttctgtcgtcagaactgtaagataacaaattgttttaagccactaagtttgtgataatttataatagaaggaataggaaattaatacaaaggcatataataaaacacgggtcatgagttccagaaggggagcaatccttcctctccaaaccccatatgtgagaggaaaggacacagtctccttggtctatgaccgtgtcacttcctcaggtgagacacttttacagcaggaaaartgtcaccaaccagtcctctaaccttcgaatattatagcttaagtcggggat

SEQ ID NO: 677854 - DNA, 644 bp, Homo sapiens
aagatgtctacatcctaatccctagaacctatgactgtgttaccttacatggcaaaagagactttattgatgcaattaacttaaggattttagatggggagattattctgcattaactgggtgagcccagtttaatctgcagggtcctgtgagaaggggacatgagggtcaggatcagagaagaagattggatgatggaagcagaggtggggtgatgaggccaggagtctgggagggctggcagcctctacaaattgaaaaaggcaaggaatggaatgtcccctagagccttcagaagcatacagcctcactggcttgctggcaccttgactttggtccagtgagacagatttttgacttctgtcgtcagaactgtaagataacaaattgttttaagccactaagtttgtgataatttataatagaaggaataggaaattaatacaaaggcatataataaaacacgggtcatgagttccagaaggggagcaatccttcctctccaaaccccatatgtgagaggaaaggacacagtctccttggtctatgaccgtgtcacttcctcaggtgagacacttttacagcaggaaaaakgtcaccaaccagtcctctaaccttcgaatattatagcttaagtcggggat

SEQ ID NO: 677855 - DNA, 1204 bp, Homo sapiens
gaagagctcttttgaacaagaaaaaataacaatgttttaatttagattggagtgggatttttaatgtctgaggttgtgagtgctccaataatcaaaaatgaccagaaatgttatgggaayggcttaaggtatcttcaggagacagagaaaggacaagaagcagacaaggtttgaaggcagtggtgtctgctgaccatcgtctgttccgtcaactaaggcagctcagtccaaaaaagaggatcctgtgttctgagcacaaagtcagcagctgagtgggcttcacaaacatttggatctggagcttaaataatggtgtaacagaactctctctctctctccttcatttctcaacttatttctgtttcacttttcctgttgtctcctgccacaaaaggactgtcccatgtggtggaaagacagctgctggccacactaaactcattcctgctgtgagtagtcccaagggagaagcagcctcttctttcagcacctgcatgccggctttcacagatggagtctcacctgactggtcctgcctgggcttgtctccaccctttgagcccatcctggggagggtttaatggggtacatgatttaccaggctcagtcacacacctccttccggggctggacactggtgggggggggggtcccagagaggagtcactcagccagagtcatgtgggatgacagggaaacatgctccgctggaaagagaagtatcaggtcaataaaatcacatttatgtcctgcgaggagacctgatgaatgaactggagggtgagacacaagcagaggtgccaccaggcccagatgtgggagagcagagcatgccaggctccgggctccgcttcagaggagcggaagtactgccaggtggcagctcccatcttgccgccatcttccatggcacagagataaggtcccacctcctctttagcctctgtctcttggtgtctacagctgcagcagtctcagtggaggggaaatgaaagtattaagcttatattcacattttaaagatagataaattgctgaaaaaagagtatattgaaggccaacagcaagcccagccatgttggaactgtctaaatctctccaaaacagcttattgaaacaaaattgtacgttagatatggccagtagtgcagattttcccatatatgactaatattttctctttcggtgtctgacaaccaaggga

SEQ ID NO: 677856 - DNA, 1419 bp, Homo sapiens
aaaaacttgacctcacatgcagagatcttcaactgccagcaaaagttaaatgtatgaggtaactgtgggcttttctcaagttcacatttctggtaaagtctttgtgtgtgtgtgtgtgtgtgtgtgtgtgtgtgtgtgtgtgtgtgtgtgtgtgtgtgattgctgtttttcttctttgtggattttccaccctctacgtgttttgaaaacatcagtgctgaaaaactaagctgtcaagaaaaagctgtaaattgcttttttgaaactagaatatgctgacctcttccttgagaatgaaaaaggcctctcttttattgggcaaattcttatccaaagttttgacccataagacactttaaatctgtagaaattgctaacaacacattttctttgttttctggacacaaaacttgactgcattttctagcctcccttgccattacacaaggccaaaggaatatggctgaaagtgatgtacagcaactacctctgagcaatgctctctgttccctgtctttgctcatatggtggccagacgaggagcactcagtagagaactccaaaacctaatggtggagccactatggggaaagaacctggttcctgcttggggtagagtgccctcattccctccactccgttcctactaacctggacaggactgtgaggtgtgcaagtaatagacatggataattgagttttgtttgatactgtttgttacaatacttaacttactatgattaacaacatttccaaaacaagatgccatgtgggtttctactaggaataattcacartgttcactgatggatagatttccagtggcaggctatagcaaaacttgtctgtctgggaaaaatggttgtgggttttttttttttttttttttttttgagatggagtctcgccctgtcacccaggctggagctcagtggctgagtagctgggactacaggcacccgccaccacgcccggctaattttttgtatttttagtagagatggggtttcaccatgttagccgggatggtctcaatctcctgacctcatgatctgcctgcctcggcctcccaaacttctgggattacaggtgtgagccaccgtgcctggccggcaaaatgtttttattttacttcactatgaagtttccttcagcttcagtgagtaatgtagtgatactttttaaggttctgaagctttgcaaccagagttccaaggaaggtgctcagatatgcccaacttcgatggcttgtctggagataaatgactccagggaaaaacagtgacggtcccttctgtgagccagcatactgattcatggagctatttcatgtctggtcaagtgtaaatactaatgaatgttactataacatctctttgagatgtgtaagggttaatattctttccagcatgacctagt

SEQ ID NO: 677857 - DNA, 596 bp, Homo sapiens
ggttcctaaaaacatgccctttaccaatatactgtactgtctccctatcttcctgttattatctattggcccttttcatcactatgaatgacttttggcatagtttgtattgtctgatattattatagccatgtaaaagaaatccagactttggcagcctgtggctgctaagtggattacamaggcatccagaattcagcttccatagcttctgacctcaaggaaactcagagtctaggagagttgctgaagttccagccaacacaaatgtattgcatttcagaaaaagaagacaggcaggagaacacaaaatacttgtccatttaaaactctgctccctaatatgatagccaccagctgtatgtggctattgagcatttgaaatgggcatagcctgaactgaaatgtgctgaaagtgtaaaatgcacaccagaatttcaagatttcatacaaaaaatatggaagttaaccatttattatattgatttcatgttgaaataatattttggatatattggtttatataaagtacattattcaaattaatagcccaggcatggtgactcaagcctgtaatcccagcactttggaagatt

SEQ ID NO: 677858 - DNA, 596 bp, Homo sapiens
ggttcctaaaaacatgccctttaccaatatactgtactgtctccctatcttcctgttattatctattggcccttttcatcactatgaatgacttttggcatagtttgtattgtctgatattattatagccatgtaaaagaaatccagactttggcagcctgtggctgctaagtggattacaaaggcatccagaattcagcttccatagcttctgacctcaaggaaactcagagtctaggagagttgctgaagttccagccaacacaaatgtattgcatttcagaaaaagaagacaggcaggagaacacaaaatacttgtccatttaaaactstgctccctaatatgatagccaccagctgtatgtggctattgagcatttgaaatgggcatagcctgaactgaaatgtgctgaaagtgtaaaatgcacaccagaatttcaagatttcatacaaaaaatatggaagttaaccatttattatattgatttcatgttgaaataatattttggatatattggtttatataaagtacattattcaaattaatagcccaggcatggtgactcaagcctgtaatcccagcactttggaagatt

SEQ ID NO: 677859 - DNA, 688 bp, Homo sapiens
aaatcgaaaatgtctctagcctcttcccaaaaatgaaagaatatttaaatgctttcacttggattatttactttacttccattttacatgtgactatagtctagtattttgtttctatcatgctttacactgccaaaatagtaattattttatatagtagattattatttagacttactcacatgcttaccaacttctatgcctgatattattattattattttgcatttcactcctttcttctggttcagttttcttcctttagtattcttagggtgatctattagggataaattacttaattttttatttcattgaaaatgtatttttctagtgcatttgaatgataatttagctatttgatagtaattttctttcaacmttctctaagtctttcctttcggaatccctattgactatatgttagactattatctgttaccctaattatctgttaactgctttttgaaattttctatctgtgaaactccatatgctgcattgttattcttggttcagaacaatcttctactttacaaattctcttttaagctgcccaattctcttttactctcgactaattttctttttagcatgaacattgagttttcaacgtttatagtcatgtaaccagcctcattatcaagatacagatttctaccatccctccaaattcccttatatggca

SEQ ID NO: 677860 - DNA, 668 bp, Homo sapiens
gaaatatgtacagttaaatttattatttttcaktgattaacaatgttgcttgtaactgattatttctgtcctctcatatatttatctttcaatgttgtagtaaagtttaaaccttttctctgaagggttgatgattgagtcatcctgtcaaaatatacttataatggacagattaacaggagaaaaggcatgtaaatcgattaatctgcacatagataaaggggttttccaaatatgagactccaggaagagtcagatggttgaggtttaaagagcacactcctcacaggagagaggaagatagggaatgtaagtattatgaggggtagttaagtgattttcaggagagatatgtgagcccaaacaacaggcaatagccagggacaaagttcctctgagctctggcaggagaaggtggtgggaaggtgaggggtggaacttagccatgaacaaaagttaccttattatgcaagtaaagtatcccaggtaacctctagagctgtctcaaagaatagctggaaaggctatcttagcatggtggcaaagtttagtatttcctcttctctggtggttaatcttttctgataatttgataagaattctagggagaaggtcttaaggcaattgcatttttttgaaagaagtttttctcagacagataacttcca

SEQ ID NO: 677861 - DNA, 609 bp, Homo sapiens
aaaaagcaaaagtagaaggaaatgggagagtcagtcttagataaggcattttggtgcgattataagctgtccaaaatgtaaataacgttttacatttttctcagcaaaaattatgccaagtaaagaagcagacagagggaccaaacataactgcaaagggtattcagtcaactgaaaaaccttttccaaaacagggtctaaaagagagaaagtccgcctgcctcggtctcccaaagtgctgggattacagacgtgagccactgcgtccagccccatagagctcttaaaaaaaaaaatattcagatattgtatcagmtttcagccaggacaaacagacattattcccagcttttgattggccactatctttttcattaatttcttgttaaaattttatacctaaatttttgtagcaatgctgcctgagccaaatatttcactttctctttggaaacaaaaaggctctaaataattagtaaaataacctgatacattcgaaaacattatttctcatagtagatgtttgggccaccctgaaaggcattaacgagtgtttgatcattagaagcagacaagcccttttgattttactctacttgcactgtaaat

SEQ ID NO: 677862 - DNA, 640 bp, Homo sapiens
atactagatctaactcctgttgcccagactggagtgcagtggtgcaattatggctcactgcagccttgatctcccaggcttaggtgatcatcccacctcagcctcccaggtagctgggattccagacacatgctcccatgctaggcgatttttttggtatgtttttgtggagatggggttttgccatgttgcccgggctggtctcaaactcctgggctcaaatattctgccaatctcaacctcccaaagctctgggattataggcatgagctaccatgcctggctaaaaataattctaatatttatgaaaatgctacaagtatcaaaatttgctaaagtaaatgctatgagggctcagaagaaggagagctcaatttgaacagagattggggtgaaatttgacttacgcctttaaaaggaggatgatttttgatgttgaggaatggaagaggtccactgttgttaaagctatttgcctatgctaaagtgtagaaaagaaaaaggaaatggcataattttagactmctacaagtgattttgataagattttaagaaataggagacaaaatatcaaattgaaataggagttttggcctagaacagagtctagccaacagttttgtaaaggaccaaagaaata

SEQ ID NO: 677863 - DNA, 3686 bp, Homo sapiens
  misc_feature 2, 3, 4, 5, 6, 7, 8, 9, 10, 11, 12, 13, 14, 15, 16, 17, 18,19, 20, 21, 22, 23, 24, 25, 26, 27, 28, 29, 30, 31, 32,33, 34, 35, 36, 37, 38, 39, 40, 41, 42, 43, 44, 45, 46,47, 48, 49, 50, 51, 52, 53, 54, 55, 56, 57, 58, 59, 60,61: n = A,T,C or G
  misc_feature 62, 63, 64, 65, 66, 67, 68, 69, 70, 71, 72, 73, 74, 75, 76,77, 78, 79, 80, 81, 82, 83, 84, 85, 86, 87, 88, 89, 90,91, 92, 93, 94, 95, 96, 97, 98, 99, 100, 101: n = A,T,C or G
tnnnnnnnnnnnnnnnnnnnnnnnnnnnnnnnnnnnnnnnnnnnnnnnnnnnnnnnnnnnnnnnnnnnnnnnnnnnnnnnnnnnnnnnnnnnnnnnnnnnntatctaatcaatgtgtatataatgaatgttcaagactgttcattatgagaagtctttcaaggacaaattgtatttgtatgaaagggtatatttttagctgtgttggagagaatataatctagaaaatgagcttggggacattgatccagatatgaaaatgcatggacagagattcagtgatatgccactgagaagttgagtttttctggttttcctctcatccattcctctctgtgtattgatgtcctggagaccaagccctgtggtctgtattcccagagagaactcatgctccctatgctcattgtccatgttctagtttttggctgatcatgttggccactcttgtaatgtgatgttgttctcataaaaccagtgacggccaggcacagtggctcatgcctgtaatcccagcactttgggaggccagggcaggtggatcacctgaggtcaggagtttgagaccagcctggccaacatggtgaaaccccatctctactaaaaatacaaaaaattggccaggcgtggtggcgggcgcctgtagtcccagctactcgggaggttgaggcagaagaatcacttgagcctgggaggtggaggttgcagtgagcagagattgtgccactgcactccagcctgggcggtagagtgagactcggtctcaaaaaacaaacaaacaaacaaaaaaccacacacacacaaaaaccaatgacaacatagcaagtttttggttatttcaagctctcgttgcttatttgaggctttaaagtgcctagtcattaatcagggcccagagtataaagatcttaccatgttgacatcaaaagcataccaatggtagtctactggtgtcttactaaattctaaggaaggtctgtcaaaaactattgagggctttattatgctcttgcactgagctttatgagggttgaataggtaataagaccaagtttgtatttgcacaggattgtggactgcagaacatctccaagagtggtggttctcaaagtgaagctctgggcccagcaacatctgtcttgcccgggaacctcttagaaatgcattgtcaaaccccaccctagaccgactgaatcagacagtaggggtggaaggattcagaacagtctgggtttaataagcccctcacctaagtgattcatcacatctaatatatctagtaactagtgtactggttcttaacaattttccccctggtgttagctttcaccatttgtatatcctatgtgtctgcatgttgaactcaaccagacattatctttactttcagctgcccttgctaggaaacaggttgcaacctctttgaattaggaagagagaagttcagaatgtgtctgtgctcatcacagagttagaaacaatgaatgttaactcttctctgagtttcttaagaaactgagatactctaagcattgtataaacattgacttggttaattaatcaagatgttccatctatggaagacaaaagccttctgaaaaactaggtggagactgatacgactgatactgatttttaaaaacttaacataagtattttagttccccatcagtttctctacttttcacacgattttctaaatggcaatttttttttttttttttttgagatggagtctccctctgtcacccaggttggagtgcagtggcccgatctcggctcactgcagcctctgcctcctgggttccagtgattctcctgcttcagtctcccaggcagccgggattacaggcctaaatggcaatttctcttcatagatgtgaacaggctgagagatggtggaatgggctgggcttcctggggttcatcattactctctactgctaggacttggcacgtttgttctgcatggttccatgaacataaaataaaagcgagccaagtcttttaatgtgggagatgcatttgaaatcagacaaccagtaaatataccaaaagacatcaaaacaagttcaagtaaaccttaggccctactgagtggcagccaccgttcatggacaatttaggtgtgtgatctcaggttaaatctctcaatcttgcctgtgtttcctgtaaatgggaacaacactaccttataaagtacttcacataaatgggtaagtatatgaaacaatatacaaaatttagtatagtcatggcaaacaaagtttttgtggggcctgaagcttgtacaatttgggagtcctctttaaaaaaaaaaaaagaatataggatttcaaaagcaagcacagggctgggaaggggtccctgagccctgctctcctcgcacaggaaatccacctttgtgcagttactctgtttattttaagccaggggagagcagagcaattgcttccttcatgtggaggtgtccatcagtggctccgtcactgggcgtgtgcatgactgtacttccctctgccgcagacacctcagccaccgtctagccaggcaaacctgtttggtgtgctcactgcatgatgaaggcgggtgtggctcccagtgggagtgtcccgcctccagaacatggccagaggctacagaatcagacttttgccaaaggaagaaagagcgcctgaagcatgtgttcaccgggcaactatgaatggcttgactgggtggagccttcagtatctttttagttaagccttttagtctcaaaaatggaagaggcaaagctcaattcttaaagatcacttcttttttttttttgaggcggagtctcgctcggtcgcccaagctggagtgcagtggcacgatctcggctcactgcaaactccgcctcccgggttcacgcctttctcctgcctcagcctcccgagtagctgggactacaggcgcccgccaccgcgcccagctaatttttttgtgtgtttttagtagagacggggtttcaccgtgttagccaggatgctctcgatctcctgaccccatgatccgcccatctgggcctcccaaagtgctgggattgcaggcgtgagccacggcgcctggccaagatcacttcttaaaagagaattccatctgcctccacccgcatcacattgcatatcagaaatggtagttttggggttgccctcagacccgagcctgctccaaacagaacacaaactgaacagcaagaacatagacctcgacttttcagccaggacttggtgctagctttatttttatgaaaacaaaacaaaacagcaacaacaaccaaaacaatgctatttcattgagttgaaagatctaaactcttttttttttttttttttttttttgagactgagtcttgctctgtcgctcaggctggagtgcagtggcgcaatcccagccgactgcaacctctgtctcccaggttcaagtgattctcctgcctcagcctcctgagtagctgggactacaggaacccgccaccatgcctggctaatttttgtatttttagtagagacggggtttcaccgtgttagccaggatggtctcgatctcctgacctcgtgatcggcccaccttggccccccaaaatgctgggattaccggagtgagccaccgckcccagccaggggagaaagttctatgaagaaaaataaagctgggaaggga

SEQ ID NO: 677864 - DNA, 648 bp, Homo sapiens
ccggctgagaggtgctaggggaggcggtgggatgtcatgcccaagagcctgaccaacagggttggaaccacgcctccaccacctctagctgtgtgaccttgggcaagtcccagactgctctaatcctcagtttcctcatccatcaagcaggggtagattacaggagctcacgggtgtacagctgtcagcataggtcttggcacatggaagagctattataattattggggaccccgtttgatccagggtccttggtctgctcatctatcaaatcaggattgctcaacyttggcactattgacattgggactggatgattctgttgtaggggctgtcctgtgcattctaggatgtttagtagcatccctggcatcagctgacccagtttcaaggtttctgttacactctgaaattccctgatttgctttaggaaccccagattcttctccatggtcggaatcattgcaaaataactggtaagtattccttcactgcaaaataatctccctagtctaggggccccaaatgcctcaggctgctcacaatgagcattggacatggaggatgatggcggcgtctttaattatgcaagagctgtaacaggacccaaccctgagcatcctggaaactccttgaaatgttccccat

SEQ ID NO: 677865 - DNA, 635 bp, Homo sapiens
agacaaacaaaaaccccaccttactgagataaattaaagaaaatatgaatggaaggatattctcatgtttatgggttgaaagactattatcaagatktccatttgtcagaattcatctatggctataataacttccaaattgacaaactaagcccaaattttgtatagaaatgtgtatataaatgcaaatggccaagaagagccaaaacgaaatcttgaaaaagaacaaaggaaaactggggggcttattgtataagttatcgaaactttttgtaaggcaacagtaattataataatgtagtattgacataagtcaagaaaaattgcacaatgattcagaatagagtctagagaaaaaaaaatccatgtacccaaggagtgatgatgtatgacacaggtagtaggaaaaaaacatagtcttttcagtatatgatgctaggtcccttgggtagccctatgtagaaatataaaattttcccctacttcccagcacatataaaaataaattctggttttgattatagatgaaatatggagtagaaagcaattaagtttctaacatataacaaagaagaaaaacttcatgatttggggtattattaaatataaagaaatacattaaaattaaaaacttt

SEQ ID NO: 677866 - DNA, 2869 bp, Homo sapiens
tcttgaactcctgacctcaagtgttctacccacctcagcctcttaaagtgctgggattacaggcatgagccactatggccagcctgaaacatactttaaactttgcttttttaaaattaacacaatataaactttgaagaaatagaatgaggaatacagtatttcattttacattcttatttagggttcaggtccagatgcttagaaaacagtatagacaactggagccatttcctatggacattgacccaccattcagaatccacctgtgaggtacagagataatgatcattgtgataagaaccatcacggagtgtagacaaggttattttgatagttcataggctctatgcactcttacttttggagactcttatcttttattacacatattaaaatgctctcattccacattaaatgtaatatatacatgagttgaatggagttgccctcaactagttgacctaatgtcacaatccagagacatttaattaaacacttgtaatttcaatgttgctgtcttccttgcaatattgtgcggccaataaaatatttttaatctttcaaacatttctgtggaggttgactcaaacacttgttcatttcaacactgcaattttcttttcctgtttttttggagtcaatgattttttttttgtttgtaatgtcataaacacttctatgggtgcatgaaaaacttatggaactatgtatggcatggtgccttagggcttaaaagataaaatggccctagatgttgacaaggaccttggccttgaacaatgmctgaagctttagctgtgtcaaatttaagaacaaattgcactgcaatgtaaatatttctcatggcattccaccttctctttaccaaatccaatgaaataattcttcaaaacttttcatccagattttgcttttcctttcttcttccgcaacatttttatagaccgttatcatgtcagacacaaactattacaatagacttttattttgtctccctgcctgaagttcttttgtccttcaatagagggtgaacagattagccttgctaaatagttaagtatatttaattaaccaactaattaaattgacttgtctattttgtagtaatttactatgaatttttgcagtttaaacataaatgtttggctttatctaaaatagcttctacgtttccaagaaatcttttctacttacttttctttgactatatttatcactttctcacccttgtttgtccattaatccaggcattcaacaaatattattaagtacctacagagtctcagacatcacactagtcaccaaggattccgtgatgaataagagcaatacctgccttttttatttatttattttaaattttattttatcttattttaagttccaggatacatgtgcaggacgtgtaggtttgttacagaggtaaacgtgtgccatggtgatttgctgcacctatcaacctatcacctaggtattaagccccacatgcattagctctttatcctgatgctctccctctgccatccccaacccctgtgacaggccgcagtgtgtgttgttcccctccctgtgtccatgtgttctcattgtttagctaccgcttataagtgagaacatgcagtgttttctgttcctttgtcagtttgctgaggataatggcttccagctccatccatgtccctgcaaaggacatgatctcgttcctttttatggctgcatagtattccatggtgtatataaggtagtcctattttagaaagggcaaataataaaatacatatgtctgaaatgccactggttctttgatagaggtaagtacagactacagtgaaaaccacaaaggaaaaatggtctattctgcctgatttggggaataaaggggaggggagggtggttcaggaaaagcttatttctggaaaatgtataatcatctgcctgatatacatttgggcaagggcactccaggcagaagtagtactatgagcaaaggcatcaaggcaagaaagacatttaaaaaatattgttggctgggcacagtggctcacatctgtaatccctgcactttaggaggccaaggcaggcagatcatgaggtcaggattttgagaccaacctgaccaacatggtgaaaccccatctctactaaaaatacaaaaattagtctggcatggtggcgcccacctgtaatcccagctactcaggaggctgaggcaggataattgcttgaacccgggaggcagaggttgcagtgagccgagatcgcaccactgcactccagcctgggtgacagagtgagactctgtctcaaaaaaaaaaaaaaattgttgaattgatgactttgtttttattaaaaccaaagcattaaaattataatgttttttattaaaaataaaatatttggataaaataatgttgagttctaatatacttatttttcaacttttcaatattttttcagttactttaatattctggaaaacaaccattttaaaaacacataaaaacatggctctaggaacatacatttttacttttgtctcaagctccaatatggcttggcacagcactgtcagatcttatttttatttaaaattttgacattttgttcatcatggatcttttgcattaattctgatttttaaaaaatgtttcattaaaaagttagtcatcttagttactgagttttctaaggccacctaaatttcatactcaaggcgagtgcttcctttgtcttcccctaatcccaggcctggaaaaagccatcatatcaatgttttaaagatcactttcttatagtgatgagtacgggttgctaaagactttggtggttaaaaaccgagaaattgagggaaattcagtatctatca

SEQ ID NO: 677867 - DNA, 646 bp, Homo sapiens
ggagatctgtccatatgtagcacaggtaggaagatcagtgagctcaggagaaactatctattaaatgagcttcaggaggaaggtaggaacagtaaataatagagagtaaggcccaaatcctctcacccagaacagttggctcttaatcttggcagactcaatgctccctgttaataataaatattttattttattttattttttgagataaagtctcactctgtcgccaggctggagtgcagtggcgcgatctcggctcactgcaacttctgcctcctgggttcatgcgattctcctgcctcagcctcccaagtagctgggattacaggggcctgccaccacgccyggctaatttttgtatttttagtaaagacagggcttcactatgttggcctggatggtctcgatctcttgacctggtgatccacccactttggcctcccaaagtgttgagattacaggcgtgagccaccacacccagccaataataaaacgtgctttctgtcatctgtggaatgaaatttaaagataatatgaactgcctacatatataacttttaaaaatcagtatgagtgccttaactgtatattgaaggaaaagttggaaagtgatatataataaggtaccatccattttgacatgcta

SEQ ID NO: 677868 - DNA, 646 bp, Homo sapiens
ggagatctgtccatatgtagcacaggtaggaagatcagtgagctcaggagaaactatctattaaatgagcttcaggaggaaggtaggaacagtaaataatagagagtaaggcccaaatcctctcacccagaacagttggctcttaatcttggcagactcaatgctccctgttaataataaatattttattttattttattttttgagataaagtctcactctgtcgccaggctggagtgcagtggcgcgatctcggctcactgcaacttctgcctcctgggttcatgcgattctcctgcctcagcctcccaagtagctgggattacaggggcctgccaccacgcctggstaatttttgtatttttagtaaagacagggcttcactatgttggcctggatggtctcgatctcttgacctggtgatccacccactttggcctcccaaagtgttgagattacaggcgtgagccaccacacccagccaataataaaacgtgctttctgtcatctgtggaatgaaatttaaagataatatgaactgcctacatatataacttttaaaaatcagtatgagtgccttaactgtatattgaaggaaaagttggaaagtgatatataataaggtaccatccattttgacatgcta

SEQ ID NO: 677869 - DNA, 552 bp, Homo sapiens
  misc_feature 450, 451, 452, 453, 454, 455, 456, 457, 458, 459, 460, 461,462, 463, 464, 465, 466, 467, 468, 469, 470, 471, 472, 473,474, 475, 476, 477, 478, 479, 480, 481, 482, 483, 484, 485,486, 487, 488, 489, 490, 491, 492, 493, 494, 495, 496: n = A,T,C or G
  misc_feature 497, 498, 499, 500, 501, 502, 503, 504, 505, 506, 507, 508,509, 510, 511, 512, 513, 514, 515, 516, 517, 518, 519, 520,521, 522, 523, 524, 525, 526, 527, 528, 529, 530, 531, 532,533, 534, 535, 536, 537, 538, 539, 540, 541, 542, 543: n = A,T,C or G
  misc_feature 544, 545, 546, 547, 548, 549: n = A,T,C or G
ctcactttcttcttcccttttcagtggcaagagccttgggttggaagaattcagatgtgtgttgtaattctgggaacattactcgcttcctaaggcagattccttcgcctcgaaagctaagcagtgcgcttctttgtgtactgtttactttctggactctcccgctagctctaaggttctgtcactgtgctcttgctcggtttccatctttccttcctcctcttttctcagctggaaacctgaatgtgcaggtgtggctataggtaaggtcatgtgcctgagcccggtttctccagcagctaagkgctaagtgctttctattactgtgacgcctgattcttccgacagccatccgagtcttctatgcccgttttcatggacacaaggaggttgaagctttcaggtattgtaaagagttcagacaaacgtggggacaagagtcaaacaccnnnnnnnnnnnnnnnnnnnnnnnnnnnnnnnnnnnnnnnnnnnnnnnnnnnnnnnnnnnnnnnnnnnnnnnnnnnnnnnnnnnnnnnnnnnnnnnnnnnnaga

SEQ ID NO: 677870 - DNA, 552 bp, Homo sapiens
  misc_feature 450, 451, 452, 453, 454, 455, 456, 457, 458, 459, 460, 461,462, 463, 464, 465, 466, 467, 468, 469, 470, 471, 472, 473,474, 475, 476, 477, 478, 479, 480, 481, 482, 483, 484, 485,486, 487, 488, 489, 490, 491, 492, 493, 494, 495, 496: n = A,T,C or G
  misc_feature 497, 498, 499, 500, 501, 502, 503, 504, 505, 506, 507, 508,509, 510, 511, 512, 513, 514, 515, 516, 517, 518, 519, 520,521, 522, 523, 524, 525, 526, 527, 528, 529, 530, 531, 532,533, 534, 535, 536, 537, 538, 539, 540, 541, 542, 543: n = A,T,C or G
  misc_feature 544, 545, 546, 547, 548, 549: n = A,T,C or G
ctcactttcttcttcccttttcagtggcaagagccttgggttggaagaattcagatgtgtgttgtaattctgggaacattactcgcttcctaaggcagattccttcgcctcgaaagctaagcagtgcgcttctttgtgtactgtttactttctggactctcccgctagctctaaggttctgtcactgtgctcttgctcggtttccatctttccttcctcctcttttctcagctggaaacctgaatgtgcaggtgtggctataggtaaggtcatgtgcctgagcccggtttctccagcagctaagggctaagtgctttstattactgtgacgcctgattcttccgacagccatccgagtcttctatgcccgttttcatggacacaaggaggttgaagctttcaggtattgtaaagagttcagacaaacgtggggacaagagtcaaacaccnnnnnnnnnnnnnnnnnnnnnnnnnnnnnnnnnnnnnnnnnnnnnnnnnnnnnnnnnnnnnnnnnnnnnnnnnnnnnnnnnnnnnnnnnnnnnnnnnnnnaga

SEQ ID NO: 677871 - DNA, 552 bp, Homo sapiens
  misc_feature 450, 451, 452, 453, 454, 455, 456, 457, 458, 459, 460, 461,462, 463, 464, 465, 466, 467, 468, 469, 470, 471, 472, 473,474, 475, 476, 477, 478, 479, 480, 481, 482, 483, 484, 485,486, 487, 488, 489, 490, 491, 492, 493, 494, 495, 496: n = A,T,C or G
  misc_feature 497, 498, 499, 500, 501, 502, 503, 504, 505, 506, 507, 508,509, 510, 511, 512, 513, 514, 515, 516, 517, 518, 519, 520,521, 522, 523, 524, 525, 526, 527, 528, 529, 530, 531, 532,533, 534, 535, 536, 537, 538, 539, 540, 541, 542, 543: n = A,T,C or G
  misc_feature 544, 545, 546, 547, 548, 549: n = A,T,C or G
ctcactttcttcttcccttttcagtggcaagagccttgggttggaagaattcagatgtgtgttgtaattctgggaacattactcgcttcctaaggcagattccttcgcctcgaaagctaagcagtgcgcttctttgtgtactgtttactttctggactctcccgctagctctaaggttctgtcactgtgctcttgctcggtttccatctttccttcctcctcttttctcagctggaaacctgaatgtgcaggtgtggctataggtaaggtcatgtgcctgagcccggtttctccagcagctaagggctaagtgctttctattactgtgacgcctgattcttccgacagccatccgagtcttctatgcccgttttcatggacacaaggaggttgaagctttcaggtattgtaargagttcagacaaacgtggggacaagagtcaaacaccnnnnnnnnnnnnnnnnnnnnnnnnnnnnnnnnnnnnnnnnnnnnnnnnnnnnnnnnnnnnnnnnnnnnnnnnnnnnnnnnnnnnnnnnnnnnnnnnnnnnaga

SEQ ID NO: 677872 - DNA, 728 bp, Homo sapiens
caaatattgctgctgaaaactaaaataagtgctggtgacacagagtcaaacaaaacacagcctctgctttcaaagataattgtacctagtggaaaagggagaaaagtaaatcaagatttacaggacaacgtggaaagtgcaatggcaggacaaagaagagaggccaggagaggaggggaagtcrtcaggaagaagtgaagcttaatccgaattagaaagaatgaaggggagggaaccaagatgaatcagggagagggacagaggaaatgggatgtgcagaagcagggagggctccgtggtgaatggttccagccaggatgccagtagttcacagtggctgcttggaagccaaacatcaggagaggccagcgaagtctcccaaacgcagacatcctgtggggccagggaacaggcactgctctgattctacagaatttgcagaaaggtcatttgtcttatttcagaaagctctggagagtggttgagggattttatgcagggtttaatactgtgtgggaagttgaggggggcaggtgtgcatgctataaagagtatattttctcattatgccatggggatctagtgagaaactttgtcaaaattgtatatgatttatataaaatcatataagaaaaagaatgcaagaaaaatgtatatactatgcttatagcaattctcttttgttttgaactagctcagaatggaaatatctgatttgttctaggcac

SEQ ID NO: 677873 - DNA, 2413 bp, Homo sapiens
gcctcccaaagtgctgggattacaggcgtgagccactgcacccagcctaacatgctttttaaaaaaggaccaattctgggcttttaagtcccatttagtctgccaayaacctggccttcaacaaacaggtcaagcacagagtgatgaaaatttgattcttaaaataactctagcagagcaagggacttaaacacccatattttgatagaacatgacattgcaagaaagcaaacttatcaaaatttcatttttaaaaagatattccagcgacagcttctaagctgacaagcaaacatccttaacaatattgaagttaccactacagaactctgctgtaatattctaggtcaggataagcaaactttttctgtaaaagggcagatcataaatattttaggcatttgtgggccatatggtctctgtagcaactagtcaactctgcccttgtagcgtgaaaactataatagacaatatgtaaatgaaagggcatggctgtgttccatcaaaattttatttaaaaaaaaatcagtgatggacagtgcaccacagtttgttgactgctgatctaagttatgaatattgattcctaggagagttacaagaccagatctaattctttcagtcatttatgtttactaaactaaacttacgaaggtaaagaaaaatgcataatagaattttttttatattaaactaaccagaaaaattcaattaatcacaacagccaatttctagattatttcagttcactgacggtaattatgaaaaaacatctactacaaattactctgacgtattactaaaagagatccctatgtcatcctactttttctaggcctgagggaaaataggacagtaatgaatggcataaaaatgactgtgctcaagggtgagttaggccaggcgcagtggctcaggcctgtaatcccagcactttgggaggccgaggcaggcggatcacctgacgtcaagagttcaagaccagcttggccaatatggtaaaacttcatctctactaaaaaatacaaaaattagccggacatggtggcacatgtctgtagtcccagctacttgggaggctgaggcaggagaatggcttgaacccgggaggtggaggttgcagtgagccgagatcgtgccactgcactccagcctgggtgacagagcgagagtccgtctcaaaaaaaaaaaataagagtgagttaggatgcaagcattccataagttcacagtaatcagcttattttttttaaccttatggtgagtctaagcccttagaaaagacaaatattggcaataccaggaatgagtcaggattttctttttcctgttggtgaagtctatccaaattctcttcttcatgcataataagaccttttaaagattccagccggactccaaaatccttaaactgtgagagaacaaactagaacaagagaaattttcattagaaactattttcatgtacatataaaacagaattaaacacaggcttgggagctgctaaaaattcaagatgtttttggctaggcacggtggctcatggctgtaatcccagcactttgggaggccgaggtgggaagattgcttgagcccaggagttcaagaccagcctgagcaacataggcagactccatctctgcaaaaaataaaaaattagctgggcatagtggtgtgagcctgtggtcccagctttttgggaggctgaggcaggaggatcaactgaacctgggaggtcaaggctgcagtaagctgtaattatgccactgcacgccagcctgggtgacagaataagaccctgtctccctgtctcaaacaaacaaacaaacaaacaaaaaaaaacaaaaaataaaaaaaagtaaattcaagttgttttcaacacccagaagttcactattatctcaagaatcatagataaatattcagaagccccctgatttttcactcgtgcctttgagccttcccaaatggacagatcacccgcctgaggagaccacatagagagtcagtgagcactccgttctctcagtcccactagttaaatgtgcttttttgtttgtttgttttcctgctggtactgagatgtgatactgcaactccatggccttctgtgtagcttgttgacagctcctgcactaaaggctttataaaaagtgaatgaaggctgagagcagtggctcatgcttgtaatcccagcactttgggaggccaaggtgggtagatcacttgaggccaggagttcaagaccagcctggccaatgtggcgaaaccccatctctactaattatacaaaaattagccggccagacacagtggctcacgtctgtaatcccagcattttgggaggccaaggcaggtggatcacgaggtcaggagattgagaccatcctggctaacatggtgaaaccctgtc

SEQ ID NO: 677874 - DNA, 669 bp, Homo sapiens
tgaaattatatcctatgtgtccctttgtccagcattacccctctgattagccttcttgtttcaatgaaaagacttctgctccttttgcataattaccttgtgcttctgaagaagatgtttaacttgagatgcagaacttggtgaatrcacggagtcttcatctgaagtttgatgctccacattgttcatccagctaatcatttctgtgattgctttacgagacggcaatttctccatttgaagctgtaagaacaaaatgatttccatttaattgcctgcagttaacaaaatgaatcagagcatcactaaagatgatatctggtttgataaaaggtcttgctatataattatgcaggttactcaaaaaaaaaacaaacccagcattcaaacttagaataagcgaccccaaaacaatgacaatgaccttcacataaactaacacagtggcaaagataaactgagaaataaagtaattaagcctgatttctctcttaagaaaaatcccattggaggagggtccagtaattaagacttatattcagtggtgccagagaaaaataggtagtgtcaatgaaaattattgagtcagagaaataattttaaaagagttatgagctaacaagtgaatgctaattcaaatgctgaggctctaaagacttacctggtgaa

SEQ ID NO: 677875 - DNA, 2034 bp, Homo sapiens
tcaaatacctcaattcagtacagcaaaatcactcagactgtgtatgaatgggtaggagagtttattgaataatccaaatgtcattgcttttctttatattctccattgtatgaagccagctgccttttaatttctactatatttgtaacacatatttgcaaaaattttccataacattttattcctgacagatgcaccgtggtcatatatagctgggtccaaattgtttccattacagaagaaaaatgtggatttcagaaaaatatttttcctcagataaaccatgaaaaactttcaaggatgctggatttttttttcttgtaaacaatttcagctttcatttgtcagattgccaagagcttgggatactttggtaaattgaattgaagtttgctttttgaaattaactctttgtgtctttggcttattaccttactaccaggataaaatcaatatttaacaaatttaaattagttgcctagctttacattatgcattgctgaaaatcaaagattggtaaagggtaaagcatctaaagcaatattaggtctgcgaatgtaggagctaaactctgtgggaaaagctgtagaatgttttgttccaaagcacaaaacagggaaggaagagctggaactagaaccacttgccaaccctcggtactgaattcatttctctatattattgcttaacaggcacgcctggtctgcagatgaagagcttaagagtttggttgaaaataaaagttttcaacatatttaaaataaacaattctatcagttgaggattttgtttttgttttccactctatctaaaagtcccaaactctgtggctttgtgttcagtccacttaataactctaagttatttaataaggctcagtctattaatttattttatcaaagacctcatatttaaaatggcatttttatgacttatttgtaggttacatctgaatgtgtcctaaaagcaagctgtattagtctgttcacccactgctataaggacatacccaagactgggtaatttataagggaaagaggtttaattgactcacagttcagcatggctggggaggcctcaggaaacttacaatcatggtggaaggggaagcaaacacatccttcttcaggagaagtgcagagcgtgaagggggtgggctgtgggagagcrtcttataaaaccattggatcttgtgagaactcactcactatcatgagaacagcacgagagtaaccatccccatgatgcaattacctcccaccaggtccctctctcaagatatggggattatgggaactacaatccaggatgagatttgggtggggacacagccaaaccatatcacaagctaaatatgtatgctattgtaaatgcattaactgatgggatgggaggaagagaaaattacagcacatttcacctccattttgtaaacttgagtttctttctttctgatttattatgagtcagataagatccagagatccacggagttctgaaaatgtctcgacaatgaacatcacattccacagtgagaaactcagctctgatctgggaacttggattctcattcaccatgcgcagtcttgcttactccctaacatgtcttgttttccttcaacatcatgggaactttctttatttttcccgtccgttaaatagacctctctttttcccgaatttctgatcccttcaagggccttaaaatttaatttaatcaaatcaagttataaagtgatgcaaataaaatattcccatatattggaacaatatttatgtataagaaatgataaattttaagaaactcttaaaaagattagaatatatgaaatgtcccaccttcaagaatttttaagtgtattcttggataatcactcaatggaatttacataattttttaaagcttgtaaagacctgcaataatataaaaaagtttcttttattatgtaaagtgaaaaaaggacacacacttttataattaatatgacaattgtggaataaaaaactttgcataaaagtgctaggatttgccca

SEQ ID NO: 677876 - DNA, 648 bp, Homo sapiens
ccatgtgatgagattgagagcttaaaaggtgagaagaacctactggggtatggagggtgggcagagaagacagtgggggagaaataatgctcaggcattgtagatttgaaaactatgcagatgacgtgtactgtaaagaatgtttttagaaatttctatgtacattctgtacacagatctgggtccccmtccttggatgtaaaagacaaataactaatcacagtcaggtgagatgtttcaatagaacttttgactaatctgttaatagatcttttgactaatctacaacaatctgttgtaaggttgtaagtagcatatcttgaaggaatccctcatcttgagtcattgcctgactcgaaaaaaatgcccagttgttcctctccctctcatcccattcatttaatataattaagccacttaccatttaaaatggtagaccgaaggttaattatcttgaaatatgtatcaagagaatgaactttaatatttttaggccagtagttaggctccaggtgggctggaaatagaaaagaatacctgtcatctgggtttagaaagtattgttaccaatgggcatgtgtgacctgatcataaatatgtttagtctagaatcaaaaatggtggaaatggaaaagcaaaaaccttcca

SEQ ID NO: 677877 - DNA, 648 bp, Homo sapiens
ccatgtgatgagattgagagcttaaaaggtgagaagaacctactggggtatggagggtgggcagagaagacagtgggggagaaataatgctcaggcattgtagatttgaaaactatgcagatgacgtgtactgtaaagaatgtttttagaaatttctatgtacattctgtacacagatctgggtccccatccttggatgtaaaagacaaakaactaatcacagtcaggtgagatgtttcaatagaacttttgactaatctgttaatagatcttttgactaatctacaacaatctgttgtaaggttgtaagtagcatatcttgaaggaatccctcatcttgagtcattgcctgactcgaaaaaaatgcccagttgttcctctccctctcatcccattcatttaatataattaagccacttaccatttaaaatggtagaccgaaggttaattatcttgaaatatgtatcaagagaatgaactttaatatttttaggccagtagttaggctccaggtgggctggaaatagaaaagaatacctgtcatctgggtttagaaagtattgttaccaatgggcatgtgtgacctgatcataaatatgtttagtctagaatcaaaaatggtggaaatggaaaagcaaaaaccttcca

SEQ ID NO: 677878 - DNA, 654 bp, Homo sapiens
ttaaatattatttgcaaattacctctgctttcaggcctcctgtgtaatatctaagttgtcaaggtgtttattggagaagccaaatgtggttgtgtgtttaacacctttgaattttggagttttaaagctattctaaaatccttggaactaccctctggctgccaatgtgtttttcattaagatcacatgatgaggacttcacaatcaaaagctaccaagcacctatatttcaaagatataggagtggataatttaaatggctcaataaaaataatcgcttattttatagagtgcttggcatgtgttagctctatgctaaacactttgtattatctatcaaatattatccttacaacaactgtaagggacggatacttttacagtctcagtttagctcaggaaatattgagaaaatatttaaataattcaaggtaaggacagctgacttaagactccataaagatgcagtaggtattctgrccactgttttttctttgtttgtttttaatttgggcacaatattaccctcaatttccactagaaactgggtatggttttaacaggctgagaccatcttctacaccaaatttcttcttattgtgttaattgacctccaaatttctagtttattcttgggttaagattgttttagct

SEQ ID NO: 677879 - DNA, 654 bp, Homo sapiens
ttaaatattatttgcaaattacctctgctttcaggcctcctgtgtaatatctaagttgtcaaggtgtttattggagaagccaaatgtggttgtgtgtttaacacctttgaattttggagttttaaagctattctaaaatccttggaactaccctctggctgccaatgtgtttttcattaagatcacatgatgaggacttcacaatcaaaagctaccaagcacctatatttcaaagatataggagtggataatttaaatggctcaataaaaataatcgcttattttatagagtgcttggcatgtgttagctctatgctaaacactttgtattatctatcaaatattatccttacaacaactgtaagggacggatacttttacagtctcagtttagctcaggaaatattgagaaaatatttaaataattcaaggtaaggacagctgacttaagactccataaagatgcagtaggtattctgaycactgttttttctttgtttgtttttaatttgggcacaatattaccctcaatttccactagaaactgggtatggttttaacaggctgagaccatcttctacaccaaatttcttcttattgtgttaattgacctccaaatttctagtttattcttgggttaagattgttttagct

SEQ ID NO: 677880 - DNA, 2369 bp, Homo sapiens
aaaaggactcaagtggtccatatttagttgcctactggtatttggcctaagacctggataktaagatagaaaaagcctttttttttgtacagtttcaccagcatctcttattttctgactttttaataatagccattctgactggtgttagatggtatctcattctggttttgatttgaaatcctctattggtcattgatgttgggcttttttttatacgattgtttgccatatgtatggcttcttttgaaacgtgtctattcctgtccttttgccacttttttatggagctgtttgtttttatcttgtaaatttgtttatgtttcttacagatgccggatattagacctttgttggatgcatagcttgcaaatattttctcccattctgtaggttgtctgtttactctgttaatagttacttttgctgtgcagaagctccttagtttaattaggtcccatttgtcaatttttgcttttgctacaattgcttttggtgtcttctttatggaggagggagaggatcgggaaaaataactaatgggtactaggcttaatacctgggtgaggaaataatctgtaccacaaacccccataacacaagtttaccatgtaaaaaacctgcatttgtaaccctgaactaaaaataaaagcttaaaagaaaatcctaaggaaattcaaataaagtatggacttttttaaaaaatagataggtaaataaattaagaagtattgacttaaaaaaaaaaaagacaggaaaggccatttctcaaaaaagcattccctggtgctttactcttatttcacatggagttacatattttgatttcttatttgtaaacttaactgtttccaaaaatcaaaataagaataggaatcatgagctgtgtggtgagatggacactaccaaaaagatggcaacgaatgatgaagatatttggcctgccatgaggccttcggctgtcttgtgatttacaagttgttctcaacttccaaagatgtaggaaaaatcctttttcctctcaagaaaaggaaggtttgctgccagtagtttctctcacagcacatctatcctacgattccgagaagtatttttttttctttgttttattctcccctctgggatcttatatcatgagaggaaaagcaggcctgatgggaaacaaaagcagacattttatggattgtaattgatgaaagaatgaaatgcattaactaattgagaacagaaaattggagcttgagatcccattagaaatctcttctacttcctagatctttttaaagatttccaaaatgcttttggttggccccctcactgctttccatctgctgtgtttttcttttttttttttctagcttcccatttaacctgaaacaattaatttactcataaaaccaggcagataattttttttcagatagcttagaagaaaaaaaagagaatgaatttctaattaggtaattatccatcacctcatgcaactaaggatttatcattacttccaataccacagtagcgtgaaaaatggaaaagaatgcaacaccattgggtttcacagcagcagaaatgttcaccctgaagaaacattatggcccttagtctttcctggaacgatcagtcattgtgctttggctgagatcaggattaaggctattaacccagaactatgtagtttgcaaaatacttttccatgctttgttgtattcattcctcatgtaggccctacaaaattaatgatattcatccattttgccaattaaaaaaatgatcgctggaagatttatgagaattgtccatggttatctactggagagcacacatacctagcaacattccctttaccatgcagacagtggacactctctcttagactttggagaggacaatggtcgacttcttcttagagtttaaaagcaagtgcctagggtaaactgcacttggttcctttcctagaaggaattatgaagtgtatcttttattaattggtattgcaatcttatctctgctctgtttccagaagatgatgccaattcctaggagccccatttctgggctggaagttttgaccaggagacttgacaccatttggaggtagaggtggttggtttggttcatgaaaattttccacccagatgcaaaaagactattttgtagctaatatatatatatgtacatatatatgtgtatatatatatgtacatatatatgtgtgtatatatatgtatgtatacatgtatatgcatgtatatatacacatacatatgtgtgtgtatatataatatataatatatatatgttatatatattatatattagagacagggtctcactctgtcacccaggctggagtgcagtgttgtgtccta

SEQ ID NO: 677881 - DNA, 594 bp, Homo sapiens
gagggtgggtgggagtcgtgggtattgtttgttttttaactcacttgtatgtattctttcgtatgtatgaaatataacamaaatatcatttggagaaatatgtacaccctcctcattcaaccacccatttctcttctgcagaggcttgttatttattaattatggagcatccatacagtggagtataatgcagctattaaaaaacaataaacagcttccaacattctgaaatggaacgatcactgggttacatattgttaagagaaaaaaatgtgtgtggaatgctaccatttacattaaaacgtgcacatacacatatatttgtgtgtgcatacaccagctgtctctgtaaggttaccaagaaaccggcagtcataagttcttgactctgagtatgaattatagaaaccatatgtaggaaatgaggtggtacctgcaaggtggtggggttgggctgggccaaaggagtgtcgttcagtaacaaaaccaggaagaaccgctagtaaatcatcacaggattcagctctgagggaacaaggatctgagaaagggtgatggctgtggggctgcaaggtagagcatacggatgttata

SEQ ID NO: 677882 - DNA, 594 bp, Homo sapiens
gagggtgggtgggagtcgtgggtattgtttgttttttaactcacttgtatgtattctttcgtatgtatgaaatataacaaaaatatcatttggagaaatatgtacaccctcctcattcaaccacccatttctcttctgcagaggcttgttatttattaattatggagcatccatacagtggagtataatgcagctattaaaaaacaataaacagcttccaacattctgaaatggaacgatcactgggttacatattgttaagagaaaaaaatgtgtgtggaatgctaccatttacattaaaacgtgcacrtacacatatatttgtgtgtgcatacaccagctgtctctgtaaggttaccaagaaaccggcagtcataagttcttgactctgagtatgaattatagaaaccatatgtaggaaatgaggtggtacctgcaaggtggtggggttgggctgggccaaaggagtgtcgttcagtaacaaaaccaggaagaaccgctagtaaatcatcacaggattcagctctgagggaacaaggatctgagaaagggtgatggctgtggggctgcaaggtagagcatacggatgttata

SEQ ID NO: 677883 - DNA, 594 bp, Homo sapiens
gagggtgggtgggagtcgtgggtattgtttgttttttaactcacttgtatgtattctttcgtatgtatgaaatataacaaaaatatcatttggagaaatatgtacaccctcctcattcaaccacccatttctcttctgcagaggcttgttatttattaattatggagcatccatacagtggagtataatgcagctattaaaaaacaataaacagcttccaacattctgaaatggaacgatcactgggttacatattgttaagagaaaaaaatgtgtgtggaatgctaccatttacattaaaacgtgcacatacacatatatttgtgtgtgcatacaycagctgtctctgtaaggttaccaagaaaccggcagtcataagttcttgactctgagtatgaattatagaaaccatatgtaggaaatgaggtggtacctgcaaggtggtggggttgggctgggccaaaggagtgtcgttcagtaacaaaaccaggaagaaccgctagtaaatcatcacaggattcagctctgagggaacaaggatctgagaaagggtgatggctgtggggctgcaaggtagagcatacggatgttata

SEQ ID NO: 677884 - DNA, 594 bp, Homo sapiens
gagggtgggtgggagtcgtgggtattgtttgttttttaactcacttgtatgtattctttcgtatgtatgaaatataacaaaaatatcatttggagaaatatgtacaccctcctcattcaaccacccatttctcttctgcagaggcttgttatttattaattatggagcatccatacagtggagtataatgcagctattaaaaaacaataaacagcttccaacattctgaaatggaacgatcactgggttacatattgttaagagaaaaaaatgtgtgtggaatgctaccatttacattaaaacgtgcacatacacatatatttgtgtgtgcatacaccagctgtctctgtaaggttaccaagaaaccggcagtcataagttcttgactctgagtatgaattatagaaaccatatgtaggaaatgaggtggtacctgcaaggtggtggggttgggctgggccaaaggagtgtcgttcagtaacaaaaccaggaagaaccgctagtaaatcatcacaggattcagctctgagggaacaaggatctgagaaagggtgatggctgtggggctgcaaggyagagcatacggatgttata

SEQ ID NO: 677885 - DNA, 610 bp, Homo sapiens
gggaggatccagtgttgtggttcaaatacaaagactgtctgttggcagaattccttcttgtttaggggagttcaatctttattcaggccttcagctggttggatgaggcccacccacatcatgggggacagtttgttttcctaaaagtccactcattaaatattcatctcatttgaaagcactctcacaaaaatatccagaattatgtttcaccacatatctaacactgtggcccagccgagttgacacacaaaattaacaatcataccttcctttcttttccaacctagatgtacccagtgaatgatttcatttgcttctcccttactcccttaacttattgtgtaaccactgcatttgctttgttaatgccaaagcttgtatcactcttgcaatcygctgctgcttctaaaactgctcaatacaagaaaaccacaaactcaggtgtaatggtgctacaacaaatgtgtggtctccagcttcaaatgggcccacagcgttgctaggaagtgcttgtgtgtcctcagtcagctccctctccactcccacagtggctgtctcagacctaaacagttctatgagtccctgacccatacgtgtccctgtctct

SEQ ID NO: 677886 - DNA, 649 bp, Homo sapiens
agtgctaatcaccttaataccagtcatttaaacaaaagggatttgttatatgtaactgaaaagttcccactcaaattgtcttgttatagcaggaataccatacacactcatcagagataagtcctaactcgtggtagctttagcagtctgtcagtctctttgtactataatatcttaccatctttgcctaactgttgatggtctgacgtgcgtcacaaacaaggagactcagaagctggtgaactaaaaagaggagaaaatacctctaaggtcaccaaccaaccagttttattatttaggtcaagtatatagtttctacagaaccgttacccaaggttcctcaaaaaaacctctgtctgtttattcatcagttaatgtaagtatgtagcatcattgctyctttaaatgatagtcaacaaggagagagaataatgaggacaggacctaagtgttctgcaggcatctaggagggtctggaattgtcagttgccatttgcaacattggttagcatcagaaacaagcatggaagaaaacatgtgctgagacacctcccaagtatatctctggactgagaacttggctcacttctcacacaaaggcccactcttaaattccattttatgaattaatgatggcaaatggcaagca

SEQ ID NO: 677887 - DNA, 649 bp, Homo sapiens
agtgctaatcaccttaataccagtcatttaaacaaaagggatttgttatatgtaactgaaaagttcccactcaaattgtcttgttatagcaggaataccatacacactcatcagagataagtcctaactcgtggtagctttagcagtctgtcagtctctttgtactataatatcttaccatctttgcctaactgttgatggtctgacgtgcgtcacaaacaaggagactcagaagctggtgaactaaaaagaggagaaaatacctctaaggtcaccaaccaaccagttttattatttaggtcaagtatatagtttctacagaaccgttacccaaggttcctcaaaaaaacctctgtctgtttattcatcagttaatgtaagtatgtagcatcattgcttctttaaatgatagtcaacaaggagagagaataatgaggacaggacctaagtgttctgcaggcatctaggagggtctggaattgtcagttgccatttgcaacattggttagcatcagaaacaagcatggaagaaaacatgtgctgagacacctcccaagtatatctctggactgagaacttggctcacttctcacacaaaggcccactcttaaatkccattttatgaattaatgatggcaaatggcaagca

SEQ ID NO: 677888 - DNA, 576 bp, Homo sapiens
tccatgatacagtctggaaaatttcatgaatattttatcccaatgtatatatttattatttcagctgtcttgccctggattaaattatgctttgattttgttatgtttgcatagtaggtatatatggttagtaaattgcttttttttttgagacacagtttcgctcctgttgtcccagctgaagtacaggggcgcaatctcagcacacagcagcctccatcttccaggttcaagagattctcctgcctcagcctcccgagtagctgggattacaggcactcaccaccacgcccagataattttttgtatttttagtagagatggggtttcaccatgtcacccaggctggtctcgaactcctagcctcaagtgatctgcccgcctccacctcccaaagtgctggcattacaggcatgaactaccaygcccagacataaattcctttttaatggcgttaatttaatatagtttttcaccttcacgatgtctgtctaatgcatttcaacaactgtctattttgtcctcatacggttgtcattcctgtggggcggctcctcccacgcacctgacctttca

SEQ ID NO: 677889 - DNA, 576 bp, Homo sapiens
tccatgatacagtctggaaaatttcatgaatattttatcccaatgtatatatttattatttcagctgtcttgccctggattaaattatgctttgattttgttatgtttgcatagtaggtatatatggttagtaaattgcttttttttttgagacacagtttcgctcctgttgtcccagctgaagtacaggggcgcaatctcagcacacagcagcctccatcttccaggttcaagagattctcctgcctcagcctcccgagtagctgggattacaggcactcaccaccacgcccagataattttttgtatttttagtagagatggggtttcaccatgtcacccaggctggtctcgaactcctagcctcaagtgatctgcccgcctccacctcccaaagtgctggcattacaggcatgaactaccacgcccagacataaattcctttttaatggcgttaatttaatatagtttttcaccttcacgatgtctgtctaatgcatttcaacaactgtctattttgtcctcatacggttgtcattcctgtggggcggctcctcccacgcacctgrcctttca

SEQ ID NO: 677890 - DNA, 678 bp, Homo sapiens
tgccctgagccttcttctgtttaggaattggtcccctgctgacccctttacctttcaggtattaacctgagtaagtatagaattcctcacttgcagttagtcccctgagagtactctcttagcatctccttcccttatctttttactatcgggaagtccagtcccactgagaagcaatgctattgacatgttgagttgaaaatcacaaaacacaaaaatgcattttaaattacataattcagtctagcatatgtattttttaatttactcctatttttcagtttatcatgagaggtcaagatttgcattttggccaggcgcggtggcccacccctgtaatcccagcactttgggaggcggaggcaggcggatcaggtgagggcaggagtttgagaccagcctggccaacrtggtgaagccccatctttactaaaaatacaaaaattagccgggtgtggtggtgcgtgcttgtagtgccagctactcgggaggctgagacaggagaatcgtttgaacgcgggaggtggaggttgcggtgagctgagattgtgccactgcactccagcctgggcgacagagtgagactctgtctcgaaaaaaaaaaaaaaaagatttgcatttcatgcttaaatgtatgcacactagtgacttaattacttcctccctgaagaccccaat

SEQ ID NO: 677891 - DNA, 678 bp, Homo sapiens
tgccctgagccttcttctgtttaggaattggtcccctgctgacccctttacctttcaggtattaacctgagtaagtatagaattcctcacttgcagttagtcccctgagagtactctcttagcatctccttcccttatctttttactatcgggaagtccagtcccactgagaagcaatgctattgacatgttgagttgaaaatcacaaaacacaaaaatgcattttaaattacataattcagtctagcatatgtattttttaatttactcctatttttcagtttatcatgagaggtcaagatttgcattttggccaggcgcggtggcccacccctgtaatcccagcactttgggaggcggaggcaggcggatcaggtgagggcaggagtttgagaccagcctggccaacgtggtgaagccccatctttactaaaaatacaaaaattagccgggtgtggtggtgcgtgcttgtagtgccagctactcgggaggctgagacaggagaatcgtttgaacscgggaggtggaggttgcggtgagctgagattgtgccactgcactccagcctgggcgacagagtgagactctgtctcgaaaaaaaaaaaaaaaagatttgcatttcatgcttaaatgtatgcacactagtgacttaattacttcctccctgaagaccccaat

SEQ ID NO: 677892 - DNA, 703 bp, Homo sapiens
acttttctatgcttattttatacaatttttttttcatagttgtaaaatgtaatacaatgcttctgtttgttaaacaatgcatttctgtttgactttgagtctcagatacttatgtacactcttctggagatagaactatttgctgctgtatttttatctaactgtctccagcaaccagtaaagagaraattgtaaatatcgcatgcttggaaaaattccacctggcactagtcagtcactaggtggctaaatattgtgaatgaaaacaaccggtaagaaggaaaatcctcttattagaatctaacagcacattagagctccacattaatgtgaaaataaaaatttgcttttaggagctttgataatattttaaaggcagcaaaactcttccttttttctacttctctcttatcactttattcgtaaccacatgctttataagcttggttgaagagggttgtttttctttttctctctctttttttaactttacccaaagaggagttggaaacaataagattaaatacagactccctctgattttccaggaaatttactctgcaactggaagtttctttgatatatttaaagagagatattctttcaatcacttttaaaaggcagaaataaaagttaaaggtatttcacactataccaatccattaaagaaatcccagcatggtcatctcttgtttttcagatg

SEQ ID NO: 677893 - DNA, 658 bp, Homo sapiens
ccacatctcagacatttcaagttcagttattgtcatgaaatttatcaaagatgctcatgatgggagttttaattagcctatctaattaaacttgagccagcacaatctattcttatattttcccattcatatttyactaatactgcatttctatcactggcctatagtgatatcactgttgggtatacatggagcctgcacattcagcttctgtctttaatcatctctatactaatttaacactccaaacattttttttttaattttttttattatactttaagttttagggtacatgtgcacaacatgcaggtttgttacatatgtatacatgtgccatgttggtgtgctgcacccattaactcttcatttaacattaggtatatctcctaatgctatccctccccgctccccctaccccacaacaggctccagtgtgtgatgttccccttcctgtgtccatgtgttctcattgttcaattcccacctatgagtgagaacatgcggtgtttggctttttgtccttgcaatagtttgctgagaatgatggtttccagcttcatccatgtccctacaaaggacatgaactcatcattttttatggctgcatagtattccacggtgtatatgtgccacattttcttaatccagtctatca

SEQ ID NO: 677894 - DNA, 658 bp, Homo sapiens
ccacatctcagacatttcaagttcagttattgtcatgaaatttatcaaagatgctcatgatgggagttttaattagcctatctaattaaacttgagccagcacaatctattcttatattttcccattcatattttactaatactgcatttctatcactggcctatagtgatatcactgttgggtatacatggagcctgcacattcagcttctgtctttaatcatctctatactaatttaacactccaaacattttttttttaattttttttattatactttaagttttagggtacatgtgcacaacatgcaggtttgttacatatgtatacatgtgccatgttggtgtgctgcacccattaactcttcatttaacattaggtatatctcctaatgctatccctccccsctccccctaccccacaacaggctccagtgtgtgatgttccccttcctgtgtccatgtgttctcattgttcaattcccacctatgagtgagaacatgcggtgtttggctttttgtccttgcaatagtttgctgagaatgatggtttccagcttcatccatgtccctacaaaggacatgaactcatcattttttatggctgcatagtattccacggtgtatatgtgccacattttcttaatccagtctatca

SEQ ID NO: 677895 - DNA, 658 bp, Homo sapiens
ccacatctcagacatttcaagttcagttattgtcatgaaatttatcaaagatgctcatgatgggagttttaattagcctatctaattaaacttgagccagcacaatctattcttatattttcccattcatattttactaatactgcatttctatcactggcctatagtgatatcactgttgggtatacatggagcctgcacattcagcttctgtctttaatcatctctatactaatttaacactccaaacattttttttttaattttttttattatactttaagttttagggtacatgtgcacaacatgcaggtttgttacatatgtatacatgtgccatgttggtgtgctgcacccattaactcttcatttaacattaggtatatctcctaatgctatccctccccgctccccctaccccacaacaggcyccagtgtgtgatgttccccttcctgtgtccatgtgttctcattgttcaattcccacctatgagtgagaacatgcggtgtttggctttttgtccttgcaatagtttgctgagaatgatggtttccagcttcatccatgtccctacaaaggacatgaactcatcattttttatggctgcatagtattccacggtgtatatgtgccacattttcttaatccagtctatca

SEQ ID NO: 677896 - DNA, 622 bp, Homo sapiens
tcttctgccccttcctgtatcatgtagctttgcctggcattttttccatgggcggagatgatgtaagccagctggcaatgacggggttttcaaaggcagctggtaacagaggaaggctcgcagactaatacttattaccccactgccattgtttsatttaatgttgtcctcaaagctctcctgggttcaaacttaaaacccatgcaagtgtcaaaacaaatcgtgcctttttgagtatttttttctctcctggatcttcctttcaagcttgtttcctaccttccctccgggtgaaaatgaagatttgagttcctattttctttctttttttttttttttttgagacggagttttgctctcattgcccagggctggagtgcagtggcgtgacattggctcactgcaacctccacctcccaggttcaagcgattctcctgcctcagcctcccgagtagctgagattacaggtgcctaccactacgcttggctaatttttgtatttttagtagagatggggtttcactatgttggccagtatggcctcgaactcctgacctcaggtgatccacctgcctcggcctcccaaactgccgagattacaggtgtgagccaccgcaccca

SEQ ID NO: 677897 - DNA, 622 bp, Homo sapiens
tcttctgccccttcctgtatcatgtagctttgcctggcattttttccatgggcggagatgatgtaagccagctggcaatgacggggttttcaaaggcagctggtaacagaggaaggctcgcagactaatacttattaccccactgccattgtttcatttaatgttgtcctcaaagctctcctgggttcaaacttaaaacycatgcaagtgtcaaaacaaatcgtgcctttttgagtatttttttctctcctggatcttcctttcaagcttgtttcctaccttccctccgggtgaaaatgaagatttgagttcctattttctttctttttttttttttttttgagacggagttttgctctcattgcccagggctggagtgcagtggcgtgacattggctcactgcaacctccacctcccaggttcaagcgattctcctgcctcagcctcccgagtagctgagattacaggtgcctaccactacgcttggctaatttttgtatttttagtagagatggggtttcactatgttggccagtatggcctcgaactcctgacctcaggtgatccacctgcctcggcctcccaaactgccgagattacaggtgtgagccaccgcaccca

SEQ ID NO: 677898 - DNA, 621 bp, Homo sapiens
agccgggcgcaatggctcacgctgtaatcgcagcactttgggaggccaaggtgggcggatcatgaggtcaggagatagaaaccagcctggctaacacggtgaaacactgtctctactaaaaatacaaaaaaaaaattcgttgggcacggtggcaggcatctgtattcccagctactcgggaggctgaggcaggagaattgcttaaacccaggaggtggaggttgccgtgagccaagatcgcaccactgcactccagcctgggcgacagagagagactctgtctcaaaaaaaaaaaaccctggacaccaagacttcgttgcacttccctggttgcttcatgtatgttgcctcccactgctcctgggagaagtaagtgccgttcacatgactccactgggcgaggacaattggaagccgtgcctgtctaygcacctttgctggtttgaatctggatcctttctgagtataactcagagcttttctgagttctgtgagtcctgttagcaaatcagggaacctgagagtggtcttggggacctccccccaactcaatggtctttggataactttgacaacctactctatcagtttttttgagacagagcctggagtgctcatttt

SEQ ID NO: 677899 - DNA, 659 bp, Homo sapiens
tgcctgtcttaatggtccagacaattgcatgttccatcccacacggggagcatatttccctaagtgagtataagctggagatgtgagtccagtcggctgctctcaactgccccgcttggtgaaaacatcccaccactgcatgtcattctgatgtttacccatccgttttcttcacccagcctgggccctccacagagaccaacgactgggcgaggcccttgccctaagacccaagaatctgtcccctgagcccgggaggtggagggaaaccagccgtgccagtctgcaccatagtgtttgcctagggtatgtccaagggaaattttggtgaagcaaggtacatgcccgatgcaaggccttagaacctcagcccatgaggaaggagctcctctgtcctttagccaggagtggtcggagcagggagaaggagtggtgaggctcttggaagtgggacctccatggcttgagaataaagtttgytccaagccgacctaacgtcaccatcaggctggccctcaccttgcccataaggagaataaaccagtactaccagtgtgcctgcttggaggttcttgggtgagtatcttgggcatttccagaggcagccacccccactctacccaaccctcactgaggctttagggccctccccacctgac

SEQ ID NO: 677900 - DNA, 635 bp, Homo sapiens
ggtttcttgggagcaaaaacctttcgaatgactgcagggccctctggcttkcctgtgattcagaggaagttccactggagtccaggggccatctcatactctgaggagctgggatggggtcggggcaaatagtaaggaagcagttgtgtgtgtgattttctccttctctaatgagctcacgttgtgctgctttagcctgaaaggaccttcagcagactgctggctagcaccttgaaaaactcttgaagtgacgattctgatcgattttagtggccactttggagaccgtgtggagtagattccgagcctgtgtccaagctcaagggcagcaagtgctgtggtcagtgcaccatggtgtcaggggcaggagatggagtgtggccaccattcttgggctcttgagttttgtgtctctagagttatcttgtggtttccaaggatgtgtagcagtaattctgatgataccagacataaatattctttccagagggtcacctcataacatccacagtgtactatgaacatgagcttattcctctcagaatgttttgagagtagaggcttacacttgtttgctctaagttaagggattatatccagctttggactggaattttctcctagagattggagtg

SEQ ID NO: 677901 - DNA, 655 bp, Homo sapiens
taataattggtttgtgtgttatctacatggagcatcccttatattagaggtacaacacgtgagcatgttggtgggtaaagagctgccaaaggcttctctccccgtataggatgtgccctggacccactgagagcggccgttgtgaggaaggtgatcaagggagtggtggggcaagtccagcctgctctgcccggggctgggggcacggtcatctaaaccccttccttggctgcagaataaaggcagaggtgctcccttacttatgtgtgtgcacaaatactgcatttcctgtagcagcaggaaataagatgggcttgtgaaggagcctgtcggaagtaaccacccccaggacatttgtcctccagctttggattgtcaaaaatggattcccatcctttcctctcagtctgtgtctacacaacaatgcacacaggcacatggcacatgcacgcacccacacacacagttttcaggttacaaacttcatgaccttttacccctaagcacttcagtgcgatagagatatttgcttgggtaacagaggtttagttatcaacttcagatagctaatatcgattccttactcacaccaaatctattayttgtatcccagttttaccatttgctcgaaaatgtcctttgtagcatcattccc

SEQ ID NO: 677902 - DNA, 666 bp, Homo sapiens
aattgccagacaccctcttgctgcctaccttcttggaccccaagtacttgccccactctgggagtcctgactctggatcaggtgacagtctattctcagtgacaagctttattscaattcccacctcctatgtaaccaccatagctcttatgcattgttgctgtttgctgacttattttaactacaaaggccattaagcatttactctcctatgttcagcaatccttgtgaaaacatccccagtgatgcattagttaacagtctgtcaacactccataataattttgatttatcactcagctataaaatttttcaaaaggcaaagctcgcctacattgcctgagctctgaagcagttttatttgtactcactttctaaataaaacttggggaactcaaagggtggatgagcaagactggcaactcaaaagaaaaagtgtgagaaagaaataggcaagcctaacgagagaaatgagagctttccacaaaggcacggggagttaccaaaggtggagggaaaaggagagagagcacatggaagagactgactgtaagcagaataccaaatgaagagccaagaaagaatcaacaatgagagatcccattgccttctttttggtatgtatcaaatctccctctgccttattcatataaggatacacttaat

SEQ ID NO: 677903 - DNA, 664 bp, Homo sapiens
gatagtttttgcaaattaacatttactgatgaatttgagatatgtacaatggatactttaaaggtactccgtcatgtctacagtgtgtttttatgtatacccattttatatatgcccactgaatatacccatttttgggtaatggttcacaattgtttatactactttggatcttctgtttaaaatatatttgcatgattataatttaacrtgaacctcattgataatggtggatttataaccagaatatttgacatattcttagaaagcattagttttgtgttttgcagaaatttattctatgcagaattttcatgaatttgttcctatgttttcctttggtgctccttagcataatatggtagcagacagccttgggagttaaagttatattttacttttgtaatgtgcaagtgtcactaatatttgaataaagtagatgtgatgctttaatttgatttgatttttggctttgctagcaaatctgtgttcatctttgaatttcttatttatatgcttatgttttgatcactatattccacttccttttcaaatccttatttcataactccttaaattgaaggtatattttcagaacttctagtaaaatatctttgaacaacccagtctttttcatgggtagtttttcagatatagaatatta

SEQ ID NO: 677904 - DNA, 1464 bp, Homo sapiens
tcccatgccttcccccctttttttgagatggagtctcactctgtcacccaggctggagtgcactggcatgatctcagctcactgcaacttctgcctcccaggttcaagccattctcctgcctcagcctcccaagtagctgggatcacaagcatgcaccaccacacctggctaatttgtgttatttttagtagagatggggtttcaccatgttggccaggctgctctcgaactccttaccttaggtgaccacctaccttggcctcccaaagtgctgggattacaggcctgcaccaccatgcctggcctgttttcttactggttctaacaagtgaggcccacagcagatctatttggtttataggagaaaatacatttctattctccctcaaaacatgaagagattattcaacagttatgtaaaatttatatagctccattatatacagtacgaattcagtgaaattataggcagtaacagttttgaaaattaacacattaacaaaaataagtaacaattaatgttctttcacctgagcagcctaggaaactctggggaagttggactaggaaggatkagcaggctgacagggccagaaaggttttccttctctacatctctgccctttttctttcaattagcacattgagtgcaacagctgaactgcaaccagccaggggtgtggttgttcctttaagggaggctgggcttctggcctacatgtggcctctgccctggtagttaagactgaacatttttatcttcttataaaccagtgatcaaggccaatttggctgtcatctctccctaccccatgaaccccttaaaatagtccagaacaggatgctgatttttctacttacaattacacattacacgctagacaaaacaaacatacacaatcacacttccttccctttaatttatgtcccttggactagtggtctggtgctctcctttgtcacctatgtccctgcttgaccttgagttttctgtagctagagatcactatttagaaaaacctcacactatctctattaacctctttttgaatttcaacaattatttcttaagcacctactttatgtcaggttagtgagcaaggtattagagatgccagaataaacaaggcacagtttctgccctcaaagaatttataggataatagggaaaacaaacaattttgctagaataggataagtaaaaatgacaggaataagcacaggttgctacaggagcaagtcttgttaaggatcacctgatacagttttgaggtattacaaaaggcttccaaaagaatttgatgtctgaggtaagacctgaaggatttaagcaagaaaaatatgtgtaaagtatgtcctgggtagaacaaaagcatgcggaggagcccagaggcaaaatcaaatatgattgaggcatagcctgcaatggggcaaaagggagtccagaaaagtggtcacatttt

SEQ ID NO: 677905 - DNA, 1462 bp, Homo sapiens
tttcaaggtgcatgctttaaataccagagacttctcaggacccagtgtgactttagactggaaagaactgatcagctgagtcacttgctttgaaaaccataggagaaacgtgtgactagactttatgacagtatttatgtcaaaaatccccatcagagctggtttgtttcttctagtgaagcctgaggtgggtgtggtgagactagcggtcagcttggtcaagtcctcaatagtcactgctgtttttctttgctgtctagtgactaactcagcactgcccatggcccttcacacacagagggcacttcggtgatagccaaagcaatgagaaatccaagctttctcactgcttccaatcaagaattctttttcttttttcctgttccatgaytgctttatacggctcaaaccttgccgaggctccaataagaaggccaggcaaagatgggtatgaaaaagataaaaaacagcattttaataaattgcacagtgaaaagtgaccttaaatgatcaatgttggagaacaaaagcataaaaataaaaccgtattttagtgcaattggtaaaaccaaacacacgtggatgttttaatcttagggagcaatgttagattccaaaaagtgaaattatacttgtgaagctctacagaggaaagtgatctgctgtcaaatggtgtgggtccaaacgatcttgtgtatattcacttttacaatactctgagagtattataggtgacactgataatgatagccgacctattccaaaattttaaaacttaaagagagaaaataatatgcatacttctaggtcttcacacaaagtctttaaacaaacaaacgaacaaacaaacaaaaaatccatctctttctgttaatgtagtttattgtctatttattgattttttcttctgtatttttcccgagtgtagtaacaaaggaataatacagaagaaatatgaatagttattattttactacttcaacacatgaacgcttttcttgtgttcacattcccttctagttctttgccaatatgtaaaattcattgcagtgccgcttataagtaacatcataaacgtaccatgggatgttttaccatgatctctactgaaatttatctttgcagagccagcaaaaaccccacagcttttttggaactccttctctgaaaaggcatgtctcctctacctgaactccctcaactcccctacactttactgaatgaccctctctttcacaagtttccttttaatcacttaattttgttttatttctttttgtttttcttttctttcttttcttttcttttctttttttgatggagtcttgctctgtcacccaggctggagtgcagtggtgtgatctcggctcactgccacctctgcctcctgggttcaagtgattctcctgcctcagcctcctgagtagctgggacgacaggcacccgccaccacacctggcta

SEQ ID NO: 677906 - DNA, 1462 bp, Homo sapiens
tttcaaggtgcatgctttaaataccagagacttctcaggacccagtgtgactttagactggaaagaactgatcagctgagtcacttgctttgaaaaccataggagaaacgtgtgactagactttatgacagtatttatgtcaaaaatccccatcagagctggtttgtttcttctagtgaagcctgaggtgggtgtggtgagactagcggtcagcttggtcaagtcctcaatagtcactgctgtttttctttgctgtctagtgactaactcagcactgcccatggcccttcacacacagagggcacttcggtgatagccaaagcaatgagaaatccaagctttctcactgcttccaatcaagaattctttttcttttttcctgttccatgactgctttatackgctcaaaccttgccgaggctccaataagaaggccaggcaaagatgggtatgaaaaagataaaaaacagcattttaataaattgcacagtgaaaagtgaccttaaatgatcaatgttggagaacaaaagcataaaaataaaaccgtattttagtgcaattggtaaaaccaaacacacgtggatgttttaatcttagggagcaatgttagattccaaaaagtgaaattatacttgtgaagctctacagaggaaagtgatctgctgtcaaatggtgtgggtccaaacgatcttgtgtatattcacttttacaatactctgagagtattataggtgacactgataatgatagccgacctattccaaaattttaaaacttaaagagagaaaataatatgcatacttctaggtcttcacacaaagtctttaaacaaacaaacgaacaaacaaacaaaaaatccatctctttctgttaatgtagtttattgtctatttattgattttttcttctgtatttttcccgagtgtagtaacaaaggaataatacagaagaaatatgaatagttattattttactacttcaacacatgaacgcttttcttgtgttcacattcccttctagttctttgccaatatgtaaaattcattgcagtgccgcttataagtaacatcataaacgtaccatgggatgttttaccatgatctctactgaaatttatctttgcagagccagcaaaaaccccacagcttttttggaactccttctctgaaaaggcatgtctcctctacctgaactccctcaactcccctacactttactgaatgaccctctctttcacaagtttccttttaatcacttaattttgttttatttctttttgtttttcttttctttcttttcttttcttttctttttttgatggagtcttgctctgtcacccaggctggagtgcagtggtgtgatctcggctcactgccacctctgcctcctgggttcaagtgattctcctgcctcagcctcctgagtagctgggacgacaggcacccgccaccacacctggcta

SEQ ID NO: 677907 - DNA, 1462 bp, Homo sapiens
tttcaaggtgcatgctttaaataccagagacttctcaggacccagtgtgactttagactggaaagaactgatcagctgagtcacttgctttgaaaaccataggagaaacgtgtgactagactttatgacagtatttatgtcaaaaatccccatcagagctggtttgtttcttctagtgaagcctgaggtgggtgtggtgagactagcggtcagcttggtcaagtcctcaatagtcactgctgtttttctttgctgtctagtgactaactcagcactgcccatggcccttcacacacagagggcacttcggtgatagccaaagcaatgagaaatccaagctttctcactgcttccaatcaagaattctttttcttttttcctgttccatgactgctttatacggctcaaaccttgccgaggctccaataagaaggccaggcaaagatgggtatgaaaaagataaaaaacagcattttaataaattgcacagtgaaaagtgaccttaaatgatcaatgttggagaacaaaagcataaaaataaaacygtattttagtgcaattggtaaaaccaaacacacgtggatgttttaatcttagggagcaatgttagattccaaaaagtgaaattatacttgtgaagctctacagaggaaagtgatctgctgtcaaatggtgtgggtccaaacgatcttgtgtatattcacttttacaatactctgagagtattataggtgacactgataatgatagccgacctattccaaaattttaaaacttaaagagagaaaataatatgcatacttctaggtcttcacacaaagtctttaaacaaacaaacgaacaaacaaacaaaaaatccatctctttctgttaatgtagtttattgtctatttattgattttttcttctgtatttttcccgagtgtagtaacaaaggaataatacagaagaaatatgaatagttattattttactacttcaacacatgaacgcttttcttgtgttcacattcccttctagttctttgccaatatgtaaaattcattgcagtgccgcttataagtaacatcataaacgtaccatgggatgttttaccatgatctctactgaaatttatctttgcagagccagcaaaaaccccacagcttttttggaactccttctctgaaaaggcatgtctcctctacctgaactccctcaactcccctacactttactgaatgaccctctctttcacaagtttccttttaatcacttaattttgttttatttctttttgtttttcttttctttcttttcttttcttttctttttttgatggagtcttgctctgtcacccaggctggagtgcagtggtgtgatctcggctcactgccacctctgcctcctgggttcaagtgattctcctgcctcagcctcctgagtagctgggacgacaggcacccgccaccacacctggcta

SEQ ID NO: 677908 - DNA, 659 bp, Homo sapiens
ttttttttttttttttcttagagggagtcttactctgtcacccagactagagtacagaggcgctgtcttggctcactgcaacctctccytaccagcttcaagtggccctctcatctcagcctcccaagtagctgggattacagacacgtgccattatgaccggctaatttttgtattttttgtagagatggggtttcatcatgttgaccaggctggtctgagccacactatgcccggccttgatagccttttctatcaagcttctggggtttgccttttttcttataaaaaaaaaaacttccagttgagggctccaaaaagtgaattcgaatagtaatatttaaaatttatatctatatgaggaaatataaaggctgttgaaagattctgtattgcaaatatttctgctatattgttggtgcttgaaattataccataaaatatacctcttttgactaaaaggacttgttttaagaccaaatgtaaatatgcctgctatagaaaaaatatcttctatgcaatggcaatttttactgtaaagaaatgtatccatccctccttctgtatcttgacaatgtgataaatatatacatatgcttttaaagtaactgtgtatgtgtttatgtatatatgtgtctatacgggtatatacatctaat

SEQ ID NO: 677909 - DNA, 659 bp, Homo sapiens
ttttttttttttttttcttagagggagtcttactctgtcacccagactagagtacagaggcgctgtcttggctcactgcaacctctccttaccagcttcaagtggccctctcatctcagcctcccaagtagctgggattacagacacgtgccattatgaccggctaatttttgtattttttgtagagatggggtttcatcatgttgaccaggctggtctgagccacactatgcccggccttgatagccttttctatcaagcttctggggtttgccttttttcttataaaaaaaaaaacttccagttgagggctccaaaaagtgaattygaatagtaatatttaaaatttatatctatatgaggaaatataaaggctgttgaaagattctgtattgcaaatatttctgctatattgttggtgcttgaaattataccataaaatatacctcttttgactaaaaggacttgttttaagaccaaatgtaaatatgcctgctatagaaaaaatatcttctatgcaatggcaatttttactgtaaagaaatgtatccatccctccttctgtatcttgacaatgtgataaatatatacatatgcttttaaagtaactgtgtatgtgtttatgtatatatgtgtctatacgggtatatacatctaat

SEQ ID NO: 677910 - DNA, 701 bp, Homo sapiens
tggaactgagaaatgggaataacattaaaaacataatttggaagtagaactgacaasacttactgatgggttggatgtgggcagagggggtaaagaaaaagaaatcaaggatgacttttggggtgggggtgtccacatggacaaggcatggttgaaaagagggaacaaacagttcaatgaagggtttgttttggactttaaaatatttgaggtggctatttattattcatccaagtggaggagtcaagaaggaagttggacacataggcctgcagttgaaggaagagttgaggactaaatctgtatgtcatcagtatacatacgatgtcttagtcactttgtgctgcacaatattacagactgggtaatttataaattatagacatttatttctctcagttctaagggctgggaagtccaagatcaaggcaccagcaagtttggtgtctgatgaggacctggcatcttctcactgtagcatccttacatgggagaaaggagaagaacaaaaagagcttagctagttccctccatcccttttataaggttctaattcatttatacaggcagctccctcacgacctaatcacctcctaaaggccttgcctcttgacaatgctgcattggggattgagtctcaatatgaattttgaaggggacatatacattcaaaccatttcacatggtatttaaagccttgg

SEQ ID NO: 677911 - DNA, 636 bp, Homo sapiens
tagtaaatacataaaccagtaacatagtcacttattatcattattaagtattatgtactgtacataattgtatgtgccatacttttacatagctgacagtgcagtaggtttgtctgcatygcatcactataatcctgtgagcaatacgctgtgttaccaggttatgaaagctaccatgtcactacatgataggaaattttcagttcaattataatcttatgggaccacccactatcatacatgtggcctgccattgacctaaatgtaattatgaggtgcatgactatatataaatatacatatgttggacattctgataggaaaatgcctggatatataagaaacaatgcttttacctctgaaaatctgaataagggaggctagagagatagaaagacttttactcttcatataataatctttttaaaaaataataaacttttaaaaatactgtcaatattatcctaggaagcatagttttatttctgttttcattaattaatttggacccagcattgatgaagtaaagtttaacttttattttagtttttctcgattgttgaatgaacattctttctcccagtttccaattatgttatctacattgaatcactgcttgactccatttccatattt

SEQ ID NO: 677912 - DNA, 636 bp, Homo sapiens
tagtaaatacataaaccagtaacatagtcacttattatcattattaagtattatgtactgtacataattgtatgtgccatacttttacatagctgacagtgcagtaggtttgtctgcattgcatcactataatcctgtgagcaatacgctgtgttaccaggttatgaaagctaccatgtcactacatgataggaaattttcagttcaattataatcttatgggaccayccactatcatacatgtggcctgccattgacctaaatgtaattatgaggtgcatgactatatataaatatacatatgttggacattctgataggaaaatgcctggatatataagaaacaatgcttttacctctgaaaatctgaataagggaggctagagagatagaaagacttttactcttcatataataatctttttaaaaaataataaacttttaaaaatactgtcaatattatcctaggaagcatagttttatttctgttttcattaattaatttggacccagcattgatgaagtaaagtttaacttttattttagtttttctcgattgttgaatgaacattctttctcccagtttccaattatgttatctacattgaatcactgcttgactccatttccatattt

SEQ ID NO: 677913 - DNA, 1581 bp, Homo sapiens
gaaattgagggcatccagagtgaataaagtgtttattgcggtggagtgagcaggggggagtagcattatgttctaaaagcattcaataaaagaatagccaccttccgttttctcaaacatctatgcaggtgcttagatcccaaatatggaagattttgcatttcacaaggtatctttcattctacatagatttgtagcaaaataaaaatcattatacattttaatggctttgttgatttggttaaattagctgaaggcattgttgactgcacataaaatccatttctcaaagttctttagctttttgaccctttcatcaattcttcttcagttctgtcatcattctttccctcctctttcaatttcctatctaaaatgttccaaaataattataaaagtcagagaggcatgatgaacctttttattggaaagagatgaaccttccaaactcattctcagctcatcatcacagcatttggaatatggagtaaaaattcgtattttgcaagtgccttggtgcttaagcatgcagaacagatgtttcatttcacaagttttcccaatttatgacacataatatctctatttctgtgagacaaacactgctttggggaataggcctttccatttcctccagcaagctgatgcatggaaatggactgttgagtcaccttctagtcacctcaggagaggagatttttcaaatgctgtttgtttattttcatgcaaggtcatcaaggggaaatagtcacagtcccatactccttaccaaaggccgtcacttctgcacatggcatttctctacctgaaatgcattcaattaaatgcactcatccttgctaggcctggcttgatttcacatctgtgacggattccttgatgaactcgacactgagtggtttcttccaatagctaaataatacctgatgatgacattattttcatcattaccattagcaacttaggagggagaaaggtggtgttgggcagggaartcacactaacctcacctttccctgttgcactgtaaattctgagggcaggggtggcttgcacagtgcctttcatatgattggtgttttaaaaacgttgcttggttgattacataggatagtattgctgctttggtagcctaactttgctcctacactacagccagaagagagggtgaagaagaaataagaaaataaaaatcaatcctaaagaaagtggtaaggagcaaaataggagttattggggaagcacaaaaacctgaagcagataaccctcaggcgtgaaggcctatttctctcctggtttacacacgcacccacctccgtttctctcctacttctccgccaccccacctcaaccaggaggcaattccccaaccaaccctgaatatgtcttctaatttcatgtactcaataatacccaaaccatttaatctcagtcactgctggtgggagcggcaattgacacgaccttgaagggaaagcaacttggcagcagatatcaagagttctaaaaaacatttatactcatcttctccataattccacttctgagctgtatcctaatttttaaaatcttaaatatgta

SEQ ID NO: 677914 - DNA, 1581 bp, Homo sapiens
gaaattgagggcatccagagtgaataaagtgtttattgcggtggagtgagcaggggggagtagcattatgttctaaaagcattcaataaaagaatagccaccttccgttttctcaaacatctatgcaggtgcttagatcccaaatatggaagattttgcatttcacaaggtatctttcattctacatagatttgtagcaaaataaaaatcattatacattttaatggctttgttgatttggttaaattagctgaaggcattgttgactgcacataaaatccatttctcaaagttctttagctttttgaccctttcatcaattcttcttcagttctgtcatcattctttccctcctctttcaatttcctatctaaaatgttccaaaataattataaaagtcagagaggcatgatgaacctttttattggaaagagatgaaccttccaaactcattctcagctcatcatcacagcatttggaatatggagtaaaaattcgtattttgcaagtgccttggtgcttaagcatgcagaacagatgtttcatttcacaagttttcccaatttatgacacataatatctctatttctgtgagacaaacactgctttggggaataggcctttccatttcctccagcaagctgatgcatggaaatggactgttgagtcaccttctagtcacctcaggagaggagatttttcaaatgctgtttgtttattttcatgcaaggtcatcaaggggaaatagtcacagtcccatactccttaccaaaggccgtcacttctgcacatggcatttctctacctgaaatgcattcaattaaatgcactcatccttgctaggcctggcttgatttcacatctgtgacggattccttgatgaactcgacactgagtggtttcttccaatagctaaataatacctgatgatgacattattttcatcattaccattagcaacttaggagggagaaaggtggtgttgggcagggaagtcacactaacctcacctttccctgttgcactgtaaattctgagggcaggggtggcttgcacagtgcctttcatatsattggtgttttaaaaacgttgcttggttgattacataggatagtattgctgctttggtagcctaactttgctcctacactacagccagaagagagggtgaagaagaaataagaaaataaaaatcaatcctaaagaaagtggtaaggagcaaaataggagttattggggaagcacaaaaacctgaagcagataaccctcaggcgtgaaggcctatttctctcctggtttacacacgcacccacctccgtttctctcctacttctccgccaccccacctcaaccaggaggcaattccccaaccaaccctgaatatgtcttctaatttcatgtactcaataatacccaaaccatttaatctcagtcactgctggtgggagcggcaattgacacgaccttgaagggaaagcaacttggcagcagatatcaagagttctaaaaaacatttatactcatcttctccataattccacttctgagctgtatcctaatttttaaaatcttaaatatgta

SEQ ID NO: 677915 - DNA, 635 bp, Homo sapiens
tgttcaaatccacgcctggatgcttcgctcactgcacctcctggctccaccaccccaacctctcaacatgtgtcttgaggctccgcctacccggcggatgttacaagcacaccatctcaaatgcagtcgccattgcaacaggctgcaggtcgcttatcacaaggcaccgaagacaagctcttccaccctcggccacatctctcctgcaagccccctctgtgccatccccaccctgaaacagtcagcacacagatctgccacttgcttcctgggaagtcctggtttttcttacttttccatctgccctgagcatctaacagtcagacaacgaattcctatttctggtatgcaattcaagaaacagaaattagtggcatttcccttgcctgacagtatgaccaatgtctatacaacaaragaatactttctaccttcagcatagcaatcaggaggtatagctgccatgcatatgcacaactatagtttaatttcaaaactaattaaaatttcaaagggaacaatttctcttatggagaaaaaacccaaaacacacaaaaaccctatctgaatcaggaacagaaaaatttataccaacctatatatgttaaccatgcgttacagcaaacctaagtgca

SEQ ID NO: 677916 - DNA, 631 bp, Homo sapiens
gcccagtccctcaaggcagccagatttgggttcaaaccctagtttgaccttttactcgctgagtgactttaccctgctacagcttcagtttctccaaatggaaataatatatactccattaaggttcttgtaaactctcaagtaagagggaatctgaggctctagcacacggcccggcccttaatagttgtactaatttttattttatttttcgaaacggagtttgctctgtcacccaggctggagtgtagtggcatgatccggctcactgcaacctccacctccagggttcaagcaattctcctgcctcagcctcctcccgagtaactgggattacaggagtgcgccaccacgcccagctaatttttstattttttagtagagacggggtttcggcatgttgtccaggctggtctccaactcctgacctcaggttatcctcccgcctcggcctcccagagtgctgggattacaggcgtgagccactgcgcctggccagtagttgtactaacaagggtttctgcttgcgagcaacaaagactgactctagttgtggctaatttctttcacacacacatattaagtgccagaggtaggacttgagctcggatctctgatttccagacctaga

SEQ ID NO: 677917 - DNA, 1904 bp, Homo sapiens
tctggatgtcaaggctcaggtgagcttccctaattggcagcacttcatacacctttgtcacacttcagtgctgggagaattaagcactgtgcatgtgtcagttgagagaggataactggccttcatcccatgtgctttgccttttgctgattttaatttgtatccgttcactataagaagctataaccatgagtatcacagcttttctgaatccttgagtttttctagtgcagccagcctgagattggtcttgggaactcctgacatatccacttactctatgctagcaatgtgtccttggtcatattatctaatcttatttagtttcagtttcttcacctataatatggggataataataataacatctcccttgtagtgaagttccagcacccagcctacactttattttctccacaagtataacttgagaattgctatagaaattataagaaagtgctttttgagcacatagtggatgcttaggaaaagtctgtttccctaagcaatcccttttgtaagttctcatatttcccctctcycccaaccctaagatataattgttgagaccaggagatgtcatctcagctagtccaaggagatgtcctcttccaatcttttcacccttatggacaccattctctttttatcaattgtttgctttttccatttccatccaaaaattgttctctctgatgaagaagacaggaaaagtcagagctttgtttggcatttgtcttccatcacctttatcttattggccttaagcagtaaatctatctctttttccatcttttttaaaagttcagttttgttttattctactctctctgggatgttttcctattcccagatcaattggatgacagcttttctggccttactcctacacgtttgtgatggttcctggtattagttttttttttttaatctacccttcctttttcaaaaaaataaaaacatattctttacttaattttaagatttattttgttgctattacttttcctaattacaaaaggaatgtatggtcaaaatcaaaacattacagatatttgtactttagaaagtaaaattttctagaagcctacctctaaagatatcatatttcctttagactcttcagttcatagcgagttcttgtgcaaccagccactggtttctttaattaccttaccattttcttccctgttaggagaattttcaattgcataacagaagttatttttaaaagcgttccagctctctcaaatttcattatggaaatcatgaaaagatggatcatgttcatccttttctctggactttaaaactatgtctttctcaagtctacacacaggtttgagcatactcagctttctctccctggttttcaggaataccttttcgtgcttctttttttaaatgaaggacttggactatgcggtctaaaagcactcatcatttgctattttctctgattctaccatccacagaaagctgcacaggtgaacaacatttgaacaagcctttgtgaagaacagctttcccaggcatacatgcctgtgacagggatcagagaagtgccgcaggaatgcagccatgggggagctagtgacaaatttggagtagctaatttttgaatcttattaattaacgaccctttgaggtacatgggtggttgaaggcagcatggaagctggtctagaaaggtagaatcttattatatggctttaggtgatactattctctttgcctcagttccatatatgtaaaatgagataatggaaattgaagcccggtgtggtaagctacactggtgactcacatctattatttgatgtgttcagcactccacttttctgggaacaggcactaactcgctgttttagtcagggttctttcaagggacagaactaataggg

SEQ ID NO: 677918 - DNA, 1873 bp, Homo sapiens
  misc_feature 1773, 1774, 1775, 1776, 1777, 1778, 1779, 1780, 1781, 1782,1783, 1784, 1785, 1786, 1787, 1788, 1789, 1790, 1791, 1792,1793, 1794, 1795, 1796, 1797, 1798, 1799, 1800, 1801, 1802,1803, 1804, 1805, 1806, 1807, 1808, 1809, 1810, 1811: n = A,T,C or G
  misc_feature 1812, 1813, 1814, 1815, 1816, 1817, 1818, 1819, 1820, 1821,1822, 1823, 1824, 1825, 1826, 1827, 1828, 1829, 1830, 1831,1832, 1833, 1834, 1835, 1836, 1837, 1838, 1839, 1840, 1841,1842, 1843, 1844, 1845, 1846, 1847, 1848, 1849, 1850: n = A,T,C or G
  misc_feature 1851, 1852, 1853, 1854, 1855, 1856, 1857, 1858, 1859, 1860,1861, 1862, 1863, 1864, 1865, 1866, 1867, 1868, 1869, 1870,1871, 1872: n = A,T,C or G
attttacattagcagtatagaagagcagcaggcaggcttcaaaggtaggaaatggcatttcagctgaacctggaaaggtcagtaggacttctacaaccaaaggtgctgagagagatgagcagcttataaaagaaaaacatgagcaaaggcaccacatttgaaaaggtgtggagaatttagagagcagatgaataacggggttttccatgcactgttgcacaattactactctcctactctatctcccaagtgttctgtgctcactcaaatgtcttttccgttaaaaaaacaaaaacaaaaataactatctccaaacttatccaatgtcctagtatcccattctcaaatcaaaaagatagaatttgtttatgatgagagtctctttaggacaggcatggactctatacatgtatttccagctttctgtaggatcatcttacaagacctgtatctttccaatcgtaggaatctattttaagaatctgaaacatctggctgatacagatgtgtgggtaaaaactaaaaacaaaacaaacaaaaagttctatctataaagacatctctcacaaaatcagttctgacaaaactctggtgataacctcagtgacctcaaatagggaaatggttaataaatggtattttagccatatgatggaacattttatagccattaaaaataaagtttacaaagagcttatcaacatgaacaatgtttatgttacaatgttaagtttaaaaaaatggatatataagtatacacagtgaagtagatctcaactttaaaaatctgcatagacaaaaagctacaaggaaatatggcaaaaatgttaactgactattgatgaaaggtggaaaatggataattttttatttgcaactttcttgtattttctaaattttctcactgtttctataacctctaaagttaaaaaaatttttttgaaatggtatatagaaattttatttacattttaagtgatttatgataaataggtgtattcctttcctattgctactgttaacaaattaccaatctgtcttaaaacaatacaaactttttatcacatagttggggaggtgagaagcctgaaacaggtttaactaggcttaaaatcaaagggttggcttgaccgtgttcttctctggaggtgctaggggagaatccttcactagagcctccgtagaggacctttttttttttgcctcctccagcttttagaggctgcccccattctttggcttgtgatccccttcactcttcaaagccagcaaccacattactccaacctctgcttccactgccacatctcctctgactctctcttctgcctcctcttccacttttaaagaatattgtgattacattgggtccacttggaaattccaggataatctatcttaaagtcagctgattagcaacatcaattccatctacaaccctaatgttccttgtgatgtaacctaatatattcacaggttatggaaattaggacacagacacctttagagggccattattttgcctaccacgtatttttgagaaacttgtgaaccctctagcaactatgctatagaattataaacctgaatttcaggttataatcttaaattgtcagctaaattcttaatctgcaccattaatattgcaaaaaaaaatgttgaaagtaaaagtatattttttttgcayaggtccagttttagttttgtttgtttgtttgtttgtttcaaaaaagacttttggccgggcatggtggctcacacctgtaatcgcannnnnnnnnnnnnnnnnnnnnnnnnnnnnnnnnnnnnnnnnnnnnnnnnnnnnnnnnnnnnnnnnnnnnnnnnnnnnnnnnnnnnnnnnnnnnnnnnnnnt

SEQ ID NO: 677919 - DNA, 665 bp, Homo sapiens
tgacagtctagtgctgtgggaggggctctctgattgctgacctctgacttctgctttccaacttgacttttttttttgagacagggtctcactctgtcactcaggctggagtgcagtggtgcagtcacggctcctcctgggctcaagtgatcttcctacctcagcctcccaagtagctaggactacaggcatatgccaccatgtttggctaattttttttattttttgtggaaatgggcttttgtcatgttgctcaggctggtcatgaactcctggactcaagtgatctgtccgcctaggcctccgaaagtgctgggattacaggtgtgagccactgcgcccagcctcgagttcactttaatgaaaaaagcacaagtgacagcttggcctttagtagctgccagcattaggcatccttatctgcttttctccttgtactcaygtcacgcatgggaccatcagacttggtgcttctctgtgtcttttgtggtttcaggcttcctggtttctctgtcatttcacccatgctgtcctccttatggggatcctgggcctccctggttcctcacgtccaactcggacacattcttcaaggccaggccagccagcaaggctttccagctctgccctgacatcatcccgcctctgtctgaactcccacccag

SEQ ID NO: 677920 - DNA, 607 bp, Homo sapiens
aaacaaaacaaaacgaacccaaaccaaaaaaaatcccatacagtacttagagcctgccacagagtccctggaatgtcacccctgctgtgatttactaaacagtccccctcttcttggacaattgagttgctccagttccccatcagtgtaaatacttctttgttgagcagcttcatgaaaatgaaggctgttgtgtatttaggattctttctccccttagtctagattgggcatcagcaaactacggcttagaccaaatccagcctgccgcctgtctttgtaaatgtgttactggaacacagtcttgctgttctctactctgctggcccaygactgctcttatgctgggatggcagagttcagtagctgcagcagggaccctgaagcctgaaagtctagagtatttaccgtctggccctttatggaaaaagtttgccgacacctggtggagattcccaaagatgggattaaatttcaccaaagggcgtggcccttctttagggcctctgtgaatctcacttgaatctcacttgccctccaaaaggtactgacccagcaggagaactggagatccgagggcccttggggttctcttgacaacccccca

SEQ ID NO: 677921 - DNA, 688 bp, Homo sapiens
ttcccatgcttttaggtcagtatggacatgtgtgccaacatgaacaaaacttgggaaagagaggagacatgagtccctttgtaaaggtacagaattctgttttagaccacaaggcagggacatcttatccccacaccggaacatatgaagtcccttctcaaagcaaactgcaataaagggacagaatcaaggagctaattgatctaagcatgatctttgcagcaggtgagtgaaaacctatgggcatgggggaaaaaaaagcagaataaacagtctggatgggcaaagccactcatggtatctagaatgtcaagacctgggatggactgtgcacaacgcccagactacccattactgaaaataaaaacaaaacaagacagaaaacaaccaagcaaacaattacactaaaatttaaaatcctctttccaaatatcagtcaggcagtatttcccaccaaataacttgacttttgcaatgacaattcaaaagtgacaattcagtcactttggtcttayttaaattatatggaggcacttttgtgagttgaactttcttgaggctacttcgggcaaacatgaattcatatatccatgaaaagaagatacctccacagctaagcataccactcatatccaatcaaaggccaaaatacctgcacagccatggaaagtctgaacatccaatcaat

SEQ ID NO: 677922 - DNA, 948 bp, Homo sapiens
  misc_feature 4, 5, 6, 7, 8, 9, 10, 11, 12, 13, 14, 15, 16, 17, 18, 19,20, 21, 22, 23, 24, 25, 26, 27, 28, 29, 30, 31, 32, 33,34, 35, 36, 37, 38, 39, 40, 41, 42, 43, 44, 45, 46, 47,48, 49, 50, 51, 52, 53, 54, 55, 56, 57, 58, 59, 60, 61,62, 63: n = A,T,C or G
  misc_feature 64, 65, 66, 67, 68, 69, 70, 71, 72, 73, 74, 75, 76, 77, 78,79, 80, 81, 82, 83, 84, 85, 86, 87, 88, 89, 90, 91, 92,93, 94, 95, 96, 97, 98, 99, 100, 101, 102, 103: n = A,T,C or G
catnnnnnnnnnnnnnnnnnnnnnnnnnnnnnnnnnnnnnnnnnnnnnnnnnnnnnnnnnnnnnnnnnnnnnnnnnnnnnnnnnnnnnnnnnnnnnnnnnnnnaaattatattccaacaaagaggagggaaatggaatttttaggagtaaatcgaaaggaagctgaagatgattacacaagttgttttggaaaaattatttgtggaggcagctgtcttagtacataagtccatagttcattggtygttgctgtttaggcgttgtggcactggcgaaatttagctgttttccaggatgttgtggtagttacagtttaacccagttcaaaggcgcaaggtaatcaaggtaattttttttttttaacctgagggcagtccttcttagaatggcttcctgactcttatttacagctctgaatcagagtgccgccattttgtatatcacatttcacactcttgactaacgacgttttattgtttaaaataaaaccccaatctatttgtggatacatgtgtgagatggacttctatgtaataaacatattatctctttgttttccattcctagattattttatatcacctatgccctgaactttctctgcaaggaatagcattatcttctaccttttagcatatttgttatatttttctatcagaatgattaatattttacagattttaatttaagcttagactcacatggccaaatgcagtggtaggaatgggcaggatggagacgatggtggtggtattggtattgtagaaagacttgatataaagtaaaatatatatataaataaatgaaaattaatatagaagaagatttaggaatttatttttaataaaggaaatggagtattttcaatgttgtgcctcataattagaaatgataataagtgccgtttattctagttcaactagaagaacttaggtggaatgccatatt

SEQ ID NO: 677923 - DNA, 948 bp, Homo sapiens
  misc_feature 4, 5, 6, 7, 8, 9, 10, 11, 12, 13, 14, 15, 16, 17, 18, 19,20, 21, 22, 23, 24, 25, 26, 27, 28, 29, 30, 31, 32, 33,34, 35, 36, 37, 38, 39, 40, 41, 42, 43, 44, 45, 46, 47,48, 49, 50, 51, 52, 53, 54, 55, 56, 57, 58, 59, 60, 61,62, 63: n = A,T,C or G
  misc_feature 64, 65, 66, 67, 68, 69, 70, 71, 72, 73, 74, 75, 76, 77, 78,79, 80, 81, 82, 83, 84, 85, 86, 87, 88, 89, 90, 91, 92,93, 94, 95, 96, 97, 98, 99, 100, 101, 102, 103: n = A,T,C or G
catnnnnnnnnnnnnnnnnnnnnnnnnnnnnnnnnnnnnnnnnnnnnnnnnnnnnnnnnnnnnnnnnnnnnnnnnnnnnnnnnnnnnnnnnnnnnnnnnnnnnaaattatattccaacaaagaggagggaaatggaatttttaggagtaaatcgaaaggaagctgaagatgattacacaagttgttttggaaaaattatttgtggaggcagctgtcttagtacataagtccatagttcattggttgttgctgtttaggcgttgtggcactggcgaaatttagctgttttccaggatgttgtggtagttacagtttaacccagttcaaaggcgcaaggtaatcaaggtaattttttttttttaacctgagggcagtccttctyagaatggcttcctgactcttatttacagctctgaatcagagtgccgccattttgtatatcacatttcacactcttgactaacgacgttttattgtttaaaataaaaccccaatctatttgtggatacatgtgtgagatggacttctatgtaataaacatattatctctttgttttccattcctagattattttatatcacctatgccctgaactttctctgcaaggaatagcattatcttctaccttttagcatatttgttatatttttctatcagaatgattaatattttacagattttaatttaagcttagactcacatggccaaatgcagtggtaggaatgggcaggatggagacgatggtggtggtattggtattgtagaaagacttgatataaagtaaaatatatatataaataaatgaaaattaatatagaagaagatttaggaatttatttttaataaaggaaatggagtattttcaatgttgtgcctcataattagaaatgataataagtgccgtttattctagttcaactagaagaacttaggtggaatgccatatt

SEQ ID NO: 677924 - DNA, 637 bp, Homo sapiens
gcaagggcacggtcatcaaaagaagtcaaacagaggtctacacatcctgattccaaaggccgtactcctgtcacaatgccaaactatcttcttcctgaagtagctctagtagagtagctagaaacccaaaccatcacatgcagcctactttgtctaatttcagggwtccttctcaaagggaattcattccttatctactctgcattctcctgtgttttactggccaaatcttgtcagagatgttattctagaccacccaacttatcaatgtcattttccacctccccaagcatttttgttcaaagtgcttatggctatcaaaaattaactttatcttattcatttattcttttgcatatttgtctgccccaccattagaatatgaactcattaaaaaagagtgaagttatctgtgttattcacagttgtgttcttgccacctataaaaagtcctagcgcaaggaacctcagtaaatatctgaataaataaatgagtggcaaatagataagaataaaacaactgaattggaacaccaagaggcggagtgtagggagggatatgccacagtactaccgtgtctctttctaaaaaataccacaacagaggctacctggggaattcatactcttttcagga

SEQ ID NO: 677925 - DNA, 663 bp, Homo sapiens
ttatctactaatcggaagcttattagtggttttcctctctaccataataaacattttttaaagttatttaggattattaaattaaaatataactttaaaataagtaaaacagtgcacatgtatacaaatacagagaatgaaagttcatgtctgcctctgtcacacttttccagcctgatacaaacttttggaaatagaaaaacctaaataattttgattgttaataacttgtgaaatattttaaatcttagatgaaaaatcaacactggaacagaaaccttctaaaccagcagctccacaagtcccacccaagaaacctactccacctaccaaagccagtaatttaytgagatcttctggaacagtgtacccaaagcgacctgaaaaaccagttcctccaccacctcctatagccaagtaagttttacctaattttaaattagcttactgatttactcacctttgaccttaatggctctattgcctttctaaatctccaggtatgttttttcttatttttcagttatatttatttttaaaattgacatatacaattgtgtgtatttattgtatacaacatgatgttttaaagcgtatatataattcattgtggaatggcttcggtaactgtgataacctcacatagttaacatttttatgatg

SEQ ID NO: 677926 - DNA, 659 bp, Homo sapiens
ttaagaatatgtcagtcagaagtgaactggagaaaatagaatgtattgaagatcccatctagcctttgtccaggttctagggcctagtcagaccaactacagaatgtctgctttggagatggaaaacatcagcctttaagagcttaatgccgttaaacattggcaccatctaactaactctcactgctctgattccatcatcaccaagacacctgcttcaccacctgttcactgtgttactttgggtaattatattagctttgtgttttgttagttcgccctctgtaaaatagaaatactcayaatgcctacttcatatgattgggaattaaatggcggtaaatatatacataaagctcagctataataaccactctgaaaatagaagagaaagtgtgtgcttgatctatttgatcatccaggctactcgactgatatttcacattgtaaattaacaaaatggtatgaagaactttgttgacatgaggcagattcctttagttaaaactgaatatggcaaatagtacatttagaaatttcttaggcctgcatattcaaagtctctggatacccagtgaatagggtcctctctggcagccctttcccttactggacacctttcttttcaaatttctacagagtagagattaattttgtgt

SEQ ID NO: 677927 - DNA, 1092 bp, Homo sapiens
caaaaagaattaaaaaaaaaaatttacatgtaacttttagtgaatacaggaaataaaacagcatccaattagaagacaaataaaaatctttggtcagaattgcagtgggaataagttatacggtttatgtgatcctaaaggagatctatttttttactccaaatatgggataaatttcaactgaatgttgtttctcagaccttttcaaactgcttgaatctggaggatcaatcagatcaaagtagagaaaaactatcacttttgtaaaactaaacaaaaatgaaatagagaaatgtttgcaaaaagttcagaaagcaacaatgggtgatgagtaggatacaaattaattgttgaaagaaacaggaaccagttatacctttccactatgagtttttgtccttgggataggtgattatcctcttgagatctagaaataatggtttcttctctgcctcatttctgaggttgcagtcaagacaaaatgagatcaggtatacaaaagcaacttgcaagttagaaatcactatcaaagagaatattgttaccatcttcaaataatcagcaatgaatatactttatcctgtaaatagctattaaaatctattgtrgtctatgcactcctcatagagcaatatgaatataagtaatttactacattaattgttactctgtttcataattattttttgctgtaaaactgtacctacactaaatttccaatgctttcttcatttatgcaattatgtggaaaacatcatcagaaattaaaaatacaaaacatagttttagaaaggcatttacaaaatgcaaaatttagtgagctgttataagtttcttttaacaactaacaaggttaattaaatactaataaactgataatgagaaagattatttaagaatgaagtctttgtaagtcaaatactgaggaaagaaatatttgatgataaatgtccaagagtaggagaggggaggtgataacctggcataaagtgtcaaatacaataatgggtagaatcaacgaaagtaaactaagataatagcaatttcttttattgggaattgtgtgggtgcagaaaataactcctctagaga

SEQ ID NO: 677928 - DNA, 679 bp, Homo sapiens
aattcatgaaaagacaaataatttcatgcccatcttctgtagaaatacagttgcacaaagctttatatatattggactttacaaaaacagtttctataaacacaacacagctctttaattgggcaagatttaagagttaaaaattttaaataaattatttaggttactttgcctaacacaagacctttttaggcttactgctactattttcatttctaataataacaagtaatatttctaggtgtagttgttatatttcagaaatgtgacttggctaagagtattcctaaatctagcaatagcgagtcatatttttatgaatccaatagcaataatggcaaaaacaagtattagtgttattcagggctaggtaattgtgacttatatagtacttatcactttccyttttttttttttttttttttgagatggagtctggctctgttgcccaggctggagtacagtggcataatctggggtcactgcaagctctgcctcctgggttcacgccattctcctgcctcagcctcccgagtagcagggactacagatgcccgccactgcacctggctaattttttgtatttttagtagagacagggtttcaccgtgttagccaggatggtctccatctcctgacctcgtgatccgcccgcctcagcctcccaaagtgctgggat

SEQ ID NO: 677929 - DNA, 608 bp, Homo sapiens
tgaaaagttaacagcatcacttttatgtttgcttctattttctctattttatgaacaacattcaagtagtatttgtcaattacctattatgttatgaggtattgtaggtttcatacagtgatgagcaccatggacaagatctttgtagatattacaatcaaatacagagagaaaaattagtatcacagaaaaaaaaataaatgctgctatgttttacgatggtgtctaatgagagatacaactttattgagtgggttggtgggaggtggggaaagaagattttcccatacctgttcttttgagagtgagttaggggagcattagcaattattcttgaataacaggcttaactcaggcacatatttagtcaactaaccctacarccttgactgattgatggagaatatggtaggtcttgagaacttttccaagacaggaataccttagttgggagtctccagaaacagaccttgagcaaaaagtttgagtagaagtagttttttaggagatataaaacacacctaaagttgagtaagttggtagatgaaagagaatgtagaaaatgaaattaaatcaactattaaagtgggtgcttagaggttattccc

SEQ ID NO: 677930 - DNA, 608 bp, Homo sapiens
tgaaaagttaacagcatcacttttatgtttgcttctattttctctattttatgaacaacattcaagtagtatttgtcaattacctattatgttatgaggtattgtaggtttcatacagtgatgagcaccatggacaagatctttgtagatattacaatcaaatacagagagaaaaattagtatcacagaaaaaaaaataaatgctgctatgttttacgatggtgtctaatgagagatacaactttattgagtgggttggtgggaggtggggaaagaagattttcccatacctgttcttttgagagtgagttaggggagcattagcaattattcttgaataacaggcttaactcaggcacatatttagtcaactaaccctacaaccttgactgattgatggagaatatggtaggtcttgagaacytttccaagacaggaataccttagttgggagtctccagaaacagaccttgagcaaaaagtttgagtagaagtagttttttaggagatataaaacacacctaaagttgagtaagttggtagatgaaagagaatgtagaaaatgaaattaaatcaactattaaagtgggtgcttagaggttattccc

SEQ ID NO: 677931 - DNA, 653 bp, Homo sapiens
tcaagaaaatagctttttattgaagagggctagatttttwaaaatctgtaagagttaatcagagcttagcgaattgatgattttcctaaaaaataatagaattagacttcccaatgttactagttatcttgataacaattttgctaaaaattcaaaatccactgacaacaataattatgtatgcttgtaaaacaaaaaagccatattctgacgaaatataccattggtaataagggaaaattgctcagtttttattctcattaagtctcaagaaagtctgagtgaggaaaactttaattggataccacttcatttggtaacaccattaattggacagttaacaactttttcaaaaggttgataagtaaattggtcatggtagactaacttatgctgtttgaaaaaataatccccaaatctcagaggctaaagtaacaaaagcttatttcttgcttataagacaaagctatcacgggttcactagaactacattcttcggatcattgtcctccctttggacctggctgatgatgtattaccaatgtccatatcagcaaaaaaagtgagcctgcaattctctcatgagtatttaattgctcttcccacagaggaacacgttacttccagccaacttctccccttagtgaaaaata

SEQ ID NO: 677932 - DNA, 684 bp, Homo sapiens
cacagcccttaaatttattcaaataaaaaataaattgaaaaaaataaactcaaaaattaaaagagcagaagtatataataactttaaaatagtctggttttttttgaatttgctttgcaatttacaataattattttgagaatggagtgcatattatgtgttaactattaaaataaaatgcagtaaattttacccttgtgctattagtcataaaatgcctttttttttctcattggttttcaataacaaaaaacctcatttgattcaacttcacctacatatgaataaagtagccactatcttttaagggaattgggcttcaaacacaactggacaatttttacatattttaaaagaaaagcgtgtctatgaaagaaacacttctctagaatgaacatttttacaaatacaaaaaaagaagtttcacaccctttctacaaagatgaaatagagaacagagcctaccagtatcaatcatacagcctcagttttctaagttaaaagacaagaatgtatttattcaaaatgctcaatgtaggaccaagrcaaagaagacatgcacacatgcacaaacacatataactatgtaaaataaaatttaaaactgtataatatagacattaaaattaatgcttttatatatctatatgttacataaattgacaaatttatgtactttatgta

SEQ ID NO: 677933 - DNA, 610 bp, Homo sapiens
tgaagttgttctacaagtaaacctattctctcctaaagggttaactctagggcatcaacctgaggtaacacaatctcatccttaatatgtattaactagaacagagatttgtttattgatctggcattaaatcatgtgactcttgatcttgatctgtgcccactttttttgttttttttggttaaaatccatgattgggaatgtggtccactttcagtattctgtttgagaatatgctaattaaagaaattattttaattagaaagaacaagcaaaagtgagagagaaggaaaggagaaaaagaaagcccaatcacccaattatgaatgtaaagtgtaaaatatgttccccgtgtcacgtgagaacatttttttttcccttcttattttacagtagtatgtggcaatgtattcaatggagaactgcagctctcastaatctgactaatctgtttggttgcttttggcagcttggtaactgatggaaatgtatttttgcttaacttactaaaatgctgtacagtgtaataagtaacattgctttgaaccaatgcaagaaatgtgcctgatctcaagccacagtcatttttccatgccatgcaaagattttt

SEQ ID NO: 677934 - DNA, 1276 bp, Homo sapiens
gaactcctgtcctcaagtgatcgcccgcgttggcgtcccaaagtgctgggattacaggcctgagccaccacgcctggcctttagaattctttcctagacttcaagggttctctgatgttttgttttctcacccatactttaaaaacaaaatgagtaataattaggaaagctattttcctcctctgaaaaataggatctttccattgtgccacaacactcttacagtttactttctgataaaacacagagaaactttgctttcttaccacgtggtccaaggaaggaccataaaccactggagtcagccctctgggtcctccctgctcctatcctgctrctcacaggctggatggccttgagaaagacccattaatctttgtgcctgcagttttgtcaactgtcaaatagggacctgtattttataacctgaagattagtcagtctctgttctttagctttactaattgtatgttgttgctactgctctttagttctgtgtcttagaggtttatagacatctttcctgcagtcttttagttcagcaaacattttagttcaaacaattactgagagcctaagaagataaagatgagcaaggcctggtcctctgccttgcagtttcaggcaattgggtgacagctagtatcacctgaatgtctagatcaggcactgtgctggctgctttacagcattactttagttcacacagaaaaccttaaaatgatcgttacaactctgcattagtctcaggttacaggtaagaatgctaagctccaaagaactgttttctccaaatctcacagtgagtataataagcctgggattcaaagccaacatgtttcctctacgtgtcattatttgaaagtggactgaagaattgggagatttaggaaatgagaagcagtctgtaaaatgacagtgaacccatttcaaatcttcctgctttctcaaatacagaagtgagtgcctcttggcttgaggttgggtccgaggtgatcagtgtgtgtgtgttttgccattgtgaggtggaggctgttccccagctcacagccgttctctgtcctgaccctggcaggcactggctcaggcgatcagggaagccagagagcagcaccctgacatgtcggtcacaagagtggtggtacacaaagaaacagagttggctgaggaaggggaagattaagtaaggtaagagagccctcattgtctgtggcctttctagtgactgctctgtactcctgaacttgtgaaaggatgtgaaatgaaagttcatatc

SEQ ID NO: 677935 - DNA, 672 bp, Homo sapiens
gcttctataagcaaaaaggacttaggaaatgctttcttcactattgcattgccagtgcctaccacagtgcctaatacacagtaggtgcttaataaaaacatgttaaagaataaatgaacagtaaagcctatgttccaatagcagtgaacaattatccaagacagggctacgagcatcaggggaggtccctgggcgggtcaggggaatacctatcctattctgttcctcctcattaacctgtatttatggcccctctgaagcaatgctaggttctgaaggtctaaagctgtatatgccaatccctcaaggagctctaaaccagacaagggcccagaacttatacaaaacagagtgtgacctctgataaattccaagccattctgctggtgcaatggaggtaagagaagacagaccctccagggtgtagttgrgaaaagtccacggaaagtagctgtgaagcagaggaaaggcaaagaagtcaaggaagaactgcatggacaaaggtggaggtgggagccccgtgacttgcttataaagggaagagaaggcaaacctttatcctccctgtaaacaaggaggcccaaggagcaaggtgtgaagaccaactttgggaaaattaactctgaaagccaattccagaccaaggactttgaccgccaacctaaaagtaga

SEQ ID NO: 677936 - DNA, 1866 bp, Homo sapiens
tctctcagaaaattgaacaaaattgaaacatcttaaaacgatgaggaattatttatttggcacctttgaaaaaggaacagaataaacttgaatgtcactatggaaccatttaaattagtatgggaagtagttaaaaatagaactgatgttgcagaaaaatcaattagtaacatagaaaatagagttgagaaacatatagaatgtcaaagaaattaacacagcggaaaataatatgaataagtatttttgtatccacatgytgcctggctgttctggctgctgacaacataaacatgaagaaaccgtttccacctgcccttaaggtggtcacagctcagtaaggaagatagagaaataaatagatagcaatctagatgtcattaattgataccaactcactatcccagaatcacaaaaatataatttttattatagtagccacagatggtatacaaaaagaaagataaaaaacaagacacattaagaatatcctattgctcttaaaagaaactatgtataggctttattctcaggatactcactagcacatccaaaaatcaggaaatattagcattagtctcctaaataaaaggataaaaattcaaattgttaacaatctattttgacagaaaagatgaaatgtataaaactacatatcactatatgtgagataaagcacagccatacacagagagaaacatagatgccttcaatgtttttgccatttcaaatactatggtcccattaggatatggggtagtaaataaagtattggaaaaccaaaaacacaggaaataccacaatgtaaataaacaagacaatagcaaatatagttgggagaaaaagtaaaattattttcaaaattataaaagacttccttcatatctttacctggttgaaagttaatatagtttatattaatattataaactattaaagaaaaaaacaaagaaaatataaaggtcttagaacaaatgaacatcttaaaaataaacaaaatgttgaattgttgtactaaaaatttaatagaggaattacagtttggggtacaatggactaagtgtagtccccgtgtctctcccactgaatgcaactataaaacctgaacaaagactgaaagaaaaaaaacaaaaaactgaaatctagaattgggcaccagcgtgtaaaagtaactccaggaaaagccctctagttctggttcaataaacagaaaggggatttcttagtacctagagaaagtatggaaatcttcttgcgttaattttttttcttccacattcttgggtcccaggccccatacaatctctttgtgatggcagcagagatggaatgagagcccacaggaatccaagttttgagtgaggaaaactgctttttgcagtccatggagccccaatcccaagaaggtgggtcaatcctctattaattttatttctccttgtgtcttcttgctgtttctctctagatgcagaagcatatatggagaagcaactaaatccccagttttctgacataataattaaaaatcagaggcccaggaaactatatagaaaataataggcaggaaatcagagagagggaatagcttgggaaagaggcaccataaagatttgttaatgaatttctgttctcaccccaaagttgaccatgggtagatctgatttaatcaatacagcaaagaatttaaggatggaactcacagattattgcccaggtctcagagtggccactgggtggcacacacacaggacaactaaaaataacattgcaaagactctgaaaactgaattaactttgggactgcagtccacagaaggtgggctggactgtgtgtcctaaacctaaacaggttgattgcttgctgaa

SEQ ID NO: 677937 - DNA, 1866 bp, Homo sapiens
tctctcagaaaattgaacaaaattgaaacatcttaaaacgatgaggaattatttatttggcacctttgaaaaaggaacagaataaacttgaatgtcactatggaaccatttaaattagtatgggaagtagttaaaaatagaactgatgttgcagaaaaatcaattagtaacatagaaaatagagttgagaaacatatagaatgtcaaagaaattaacacagcggaaaataatatgaataagtatttttgtatccacatgttgcctggctgttctggctgctgacaacataaacatgaagaaaccgtttccacctgcccttaaggtggtcacagctcagtaaggaagatagagaaataaatagatagcaatctagatgtcattaattgataccaactcactatcccagaatcacaaaaatataatttttattatagtarccacagatggtatacaaaaagaaagataaaaaacaagacacattaagaatatcctattgctcttaaaagaaactatgtataggctttattctcaggatactcactagcacatccaaaaatcaggaaatattagcattagtctcctaaataaaaggataaaaattcaaattgttaacaatctattttgacagaaaagatgaaatgtataaaactacatatcactatatgtgagataaagcacagccatacacagagagaaacatagatgccttcaatgtttttgccatttcaaatactatggtcccattaggatatggggtagtaaataaagtattggaaaaccaaaaacacaggaaataccacaatgtaaataaacaagacaatagcaaatatagttgggagaaaaagtaaaattattttcaaaattataaaagacttccttcatatctttacctggttgaaagttaatatagtttatattaatattataaactattaaagaaaaaaacaaagaaaatataaaggtcttagaacaaatgaacatcttaaaaataaacaaaatgttgaattgttgtactaaaaatttaatagaggaattacagtttggggtacaatggactaagtgtagtccccgtgtctctcccactgaatgcaactataaaacctgaacaaagactgaaagaaaaaaaacaaaaaactgaaatctagaattgggcaccagcgtgtaaaagtaactccaggaaaagccctctagttctggttcaataaacagaaaggggatttcttagtacctagagaaagtatggaaatcttcttgcgttaattttttttcttccacattcttgggtcccaggccccatacaatctctttgtgatggcagcagagatggaatgagagcccacaggaatccaagttttgagtgaggaaaactgctttttgcagtccatggagccccaatcccaagaaggtgggtcaatcctctattaattttatttctccttgtgtcttcttgctgtttctctctagatgcagaagcatatatggagaagcaactaaatccccagttttctgacataataattaaaaatcagaggcccaggaaactatatagaaaataataggcaggaaatcagagagagggaatagcttgggaaagaggcaccataaagatttgttaatgaatttctgttctcaccccaaagttgaccatgggtagatctgatttaatcaatacagcaaagaatttaaggatggaactcacagattattgcccaggtctcagagtggccactgggtggcacacacacaggacaactaaaaataacattgcaaagactctgaaaactgaattaactttgggactgcagtccacagaaggtgggctggactgtgtgtcctaaacctaaacaggttgattgcttgctgaa

SEQ ID NO: 677938 - DNA, 670 bp, Homo sapiens
atgtttgtatgtacgcatacacccaatcatggggtgaagcaaaggagataattcagataaactcagatacttactatagaaaaaaccttgaasatgaatgagataaatgtccaatttacaaaatgagaaaaaccaacagaacaaaccatccgaaagcagaacataaaagagaaggggagagagagtgaacaaagctaaggttggtctgaaggaacattcttaactttcatttccaactggggttgagtgatggcttctctgggctgctaaagtgcatagtttcagttttctccataatcagaaagaaatgatcatcaatattgcttctaaatttgaggttttatttttgtgctaaatggaagaagtttattagaaataataaactattaatagaatagaaataataaactattagaaatagaaatatcttcccacttttcagaatatcaagtatttccaaacatggaatagagctcatgagaaagagctcctttccatttggagtaagggtcaaaaaaagcatttgtctttttgtaatcaaattgtcagagtccttcctacccctgtattagggctggtattggcgctcaagcctgttggcacatttgcccctccagcctctcagctgagaggaaacaggtccctgctggatcagggcctgagtcggagc

SEQ ID NO: 677939 - DNA, 670 bp, Homo sapiens
atgtttgtatgtacgcatacacccaatcatggggtgaagcaaaggagataattcagataaactcagatacttactatagaaaaaaccttgaagatgaatgagataaatgtccaatttacaaaatgagaaaaaccaacagaacaaaccatcmgaaagcagaacataaaagagaaggggagagagagtgaacaaagctaaggttggtctgaaggaacattcttaactttcatttccaactggggttgagtgatggcttctctgggctgctaaagtgcatagtttcagttttctccataatcagaaagaaatgatcatcaatattgcttctaaatttgaggttttatttttgtgctaaatggaagaagtttattagaaataataaactattaatagaatagaaataataaactattagaaatagaaatatcttcccacttttcagaatatcaagtatttccaaacatggaatagagctcatgagaaagagctcctttccatttggagtaagggtcaaaaaaagcatttgtctttttgtaatcaaattgtcagagtccttcctacccctgtattagggctggtattggcgctcaagcctgttggcacatttgcccctccagcctctcagctgagaggaaacaggtccctgctggatcagggcctgagtcggagc

SEQ ID NO: 677940 - DNA, 540 bp, Homo sapiens
ttgctaatgaataaaatgatctyttaaaactaagtccatctataactggcatattttttctgtaaagcataggtgtcatgtttctaggaaaacagtttcagatacatgtgctatgttctcaagttcttcttactgaagaaagattaaacaaattatgattttttttctcaaagcaaatattttgcatcctactataactaagaatcactattggtcaatttcaggaatttcctctctggtttttttaaaagaccatttggcagattgaattttttcttcttacatttaaatagttgtttcaaatccatattttataagtattttgtctttttacagttgaatctaccattttagttaaaaatatttaagtaactggaaaaaataagagaaaaatatgctcttgctaaatttatatattttatcaaataaaaatgtatactaaattataaatttttctacactgtgctgctcatgtagatcctgcttatactaccattattatgaaaacttggggttaagaaatttagaagttgagagaaa

SEQ ID NO: 677941 - DNA, 680 bp, Homo sapiens
tcacagcattcgaaaataataaattccaggtagattatacttggaatgaaagcttatataacataacaataycttcctgatgtgggagtaagaaagtttgttttcaacagtatataaaaatcactaaccgtaaaggaaaatactgaaaaaaagagactgcattcaaaataaggatttctgtttatcataaaaatcaatatgatgtaaaggccaaccagtcaatgggagagaacatttgtatcacgttaaatgaatataacatttattgattgctttctttgtagcatgcactacgccagatgttcaactgtgtgtgtgtgtgtgtgtgtgtgtgtgtgtatgtctgtgtacgttattatatgtacatatttatttaactatatacctgccagctagaactggataaaatatcccaaaatgttgatatatttattgctttacttagggaccatatccattttgttgtctacacagggtctagcagacctacaaaataggcaaaataaccaagtgaatttaaaattaataaagcacatgtgtaataaaaatataagggtatgacagaaattgtagactcagatgaaattatacataaaaagttgatcactgtttcaggctggggaaaaaataaaacgtaagaagagacagaacaaggctaatagatctggagaccatggaga

SEQ ID NO: 677942 - DNA, 680 bp, Homo sapiens
tcacagcattcgaaaataataaattccaggtagattatacttggaatgaaagcttatataacataacaataccttcctgatgtgggagtaagaaagtttgttttcaacagtatataaaaatcactaaccgtaaaggaaaataytgaaaaaaagagactgcattcaaaataaggatttctgtttatcataaaaatcaatatgatgtaaaggccaaccagtcaatgggagagaacatttgtatcacgttaaatgaatataacatttattgattgctttctttgtagcatgcactacgccagatgttcaactgtgtgtgtgtgtgtgtgtgtgtgtgtgtgtatgtctgtgtacgttattatatgtacatatttatttaactatatacctgccagctagaactggataaaatatcccaaaatgttgatatatttattgctttacttagggaccatatccattttgttgtctacacagggtctagcagacctacaaaataggcaaaataaccaagtgaatttaaaattaataaagcacatgtgtaataaaaatataagggtatgacagaaattgtagactcagatgaaattatacataaaaagttgatcactgtttcaggctggggaaaaaataaaacgtaagaagagacagaacaaggctaatagatctggagaccatggaga

SEQ ID NO: 677943 - DNA, 680 bp, Homo sapiens
tcacagcattcgaaaataataaattccaggtagattatacttggaatgaaagcttatataacataacaataccttcctgatgtgggagtaagaaagtttgttttcaacagtatataaaaatcactaaccgtaaaggaaaatactgaaaaaaagagactgcattcaaaataaggatttctgtttatcataaaaatcaatatgatgtaaaggccaaccagtcaatgggagagaacatttgtatcacgttaaatgaatataacatttattgattgctttctttgtagcatgcactaygccagatgttcaactgtgtgtgtgtgtgtgtgtgtgtgtgtgtgtatgtctgtgtacgttattatatgtacatatttatttaactatatacctgccagctagaactggataaaatatcccaaaatgttgatatatttattgctttacttagggaccatatccattttgttgtctacacagggtctagcagacctacaaaataggcaaaataaccaagtgaatttaaaattaataaagcacatgtgtaataaaaatataagggtatgacagaaattgtagactcagatgaaattatacataaaaagttgatcactgtttcaggctggggaaaaaataaaacgtaagaagagacagaacaaggctaatagatctggagaccatggaga

SEQ ID NO: 677944 - DNA, 613 bp, Homo sapiens
cgcccggccttgtcacttgacattttaaataacaactggattcagagatagcagacatcttgtctggggtggcagaggaaacagttgtaaggtcagggaagtgctcccagatgaaaccccctttttagggctggtctcagaaggctagtgtcaggtctgagtaatcaagggtggaggtctgaaagctgggatcggagacaccctttggaattattctcagagggaggagcttgcttttttcacagatgctcccttccaagcattgtctttattgtttgttaggtctcagcatttccctttcagccctgccctgggagagcttcctggaagagtctagttcttccaaggcgtctctccaggagrgaaggagtcttctaagttcatctcaaaagactatgtgatgttctctggggaatttaggtgggtgggctctaaattcttctgaaattatcagtttgcctcctgagcctctatctccccaaaggatatctgtgtgattgtatcacctgcttattctctgtagatggcttactggtgagctcacagaatcaggatttaaatagattgttctaggctggaagggtggaaaaccaaaacaaaaagataccatttc

SEQ ID NO: 677945 - DNA, 1142 bp, Homo sapiens
ggcacagtggcttaaacttgtaatcccagcactttagaaggccaaggcaggtgtgtcacttgagctcaggaattcaagaccagtctgggcaacatggcaaaaccctatctctacaaaaaattacaaaaattagtcgtgcatggtggcatgaggctgtagccccagctacctgggaggctgaggtgagaggattgcttgagcccaggaggcggaggttgcagtgagccaagatcatgccactgcactccagcctgggcaacagagccagacttcatctcaaaaacaaacaaacaaacaaacaaataatcaaaaagtgaactccttactaaggacaatgcaaagaataagctaagttatgtgtaaggtcaatgatgcctcatgcttgcacactgccttaatatattttctctttgccatgcaaagagtctgtgtcttgggaaacagaaactaaacctaatgcattgttactctggctgccactttgttcaggatttagagacagcccattgatagacaatcacacaactgtgaggtttttcacagatatattatgatttatgtatcctgcataagggaagaatgttacattctgatgatgaagacactacctgcctgaaatctaaccctgtcttgttctctaacctgtaacaaaaccttgcacctgtcttttgaaattcagggcacaatattttctccattgtataagaatattttgaaagctgattttttaaaatatagagcattttgaaagaaagtgatctttatactgataaacctctgagacatttaatggccaatatcagtttatcaattmtgctctccatgacgttaaaatgcaccctaacctcttcttcattgatataagcgttttctactaaacaaatttgatgacaatgtagcaggttacccaacatgacagaccacaggattaaactacacacctatcagcaaaattttaaaacaaaaaaaataaaaactagaagctgactaaaataactaaattgaaaattcactagagaagttcaaaagcagacctgaccaggcataataaagaatcaccaagcttgaagacaaatcacttgaaattgctgagtctgagaaacagaaagaaaaaagaatgaagaaagggaacagagccaaaa

SEQ ID NO: 677946 - DNA, 1033 bp, Homo sapiens
ttgtaccctaaaagttattgaaatttaaaaaaatttaaattatgcagcctagtcaagtgttgattaattgaatattgcagtgaagtaatacatacatcgagggtcagtatatataaacatataagaattasagtatactataatatacatatcattcaagctacactgccaaaacataacttttctttgataattcaagaattcaggatttttgaatgccttatgatcattattttgaacacttattttacggattgcattgttttcctgtgatagagatttctagagaaaaatactgaataacagacagctttcatataggagtaatagtagtaatgatattgatcataatattcaataatatcatgagtgctgactacatgccaagcatataactcatccttgccttacaatcattttaacagactcttctgatacccttttgtgcttcaatgcagatttcaagagaccagaagaccagcccaggtcaaacagccaataaaaggcagacataggaatttgaactctgacctatcttcccccaagctcttttgttaaaagctctcgggcttccacagcaaggttcaacctacaaagaactaaaaatgagaaaagaaatattgtattgatgagcaagtaaaaaacagcccattttataggagaaaaattgcaaggctaaaatttcatttaaaaaaatttttaaagaaaaaacagctaaaataaagtcaaattttaattgaaatgatacttaaaaagtgttttataatctattaaagaccttacaaataacatattacatagtctactttaaacggatatggaatgtgtaaccttattttttgttttaaagtggtatttgaaatagcgttaagcaccctgcaagttcatatttctaatgtaatggctacatttcatctcactgttacttttatcttcctatctccagaggctgatggaaaaagacgtattaaatgtgataggatcagtagaattttgagtaatgtcaaataaaatgccttacgtgttgttgctg

SEQ ID NO: 677947 - DNA, 1033 bp, Homo sapiens
ttgtaccctaaaagttattgaaatttaaaaaaatttaaattatgcagcctagtcaagtgttgattaattgaatattgcagtgaagtaatacatacatcgagggtcagtatatataaacatataagaattacagtatactataatatacatatcattcaagctacactgccaaaacataacttttctttgataattcaagaattcaggatttttgaatgccttatgatcattattttgaacacttattttayggattgcattgttttcctgtgatagagatttctagagaaaaatactgaataacagacagctttcatataggagtaatagtagtaatgatattgatcataatattcaataatatcatgagtgctgactacatgccaagcatataactcatccttgccttacaatcattttaacagactcttctgatacccttttgtgcttcaatgcagatttcaagagaccagaagaccagcccaggtcaaacagccaataaaaggcagacataggaatttgaactctgacctatcttcccccaagctcttttgttaaaagctctcgggcttccacagcaaggttcaacctacaaagaactaaaaatgagaaaagaaatattgtattgatgagcaagtaaaaaacagcccattttataggagaaaaattgcaaggctaaaatttcatttaaaaaaatttttaaagaaaaaacagctaaaataaagtcaaattttaattgaaatgatacttaaaaagtgttttataatctattaaagaccttacaaataacatattacatagtctactttaaacggatatggaatgtgtaaccttattttttgttttaaagtggtatttgaaatagcgttaagcaccctgcaagttcatatttctaatgtaatggctacatttcatctcactgttacttttatcttcctatctccagaggctgatggaaaaagacgtattaaatgtgataggatcagtagaattttgagtaatgtcaaataaaatgccttacgtgttgttgctg

SEQ ID NO: 677948 - DNA, 659 bp, Homo sapiens
ttagaatggtgcaaaggtagctgggcatggtttcatgcacctgtggtcccagctacttgggaggctgaggcaggagcccaggagattaaggctgcagtgagctatggttgtggttgtgaatagccactgcactctagcctggccaacagagcaagactttgtcctaaaaaacaaaaacaacaacaaaaaacccaagaaacaaaacaaacaaagaatagaaaggaagaaaaaaaaaagaaagagaaacaaagctatatataggctcaaggactagccatccacatgctgatgttgaaggkccccacgtgttcccatctgtgacggggactattggtttcctacccaaagctattttcgtctcctttttaccatataatagagcacagcttcagtaatactgccaggaagtataggggcaaagcttgtaaaacgaaggttgataactttggtcccaagttggtaacttattctctcatggcctttctctgctaataatttttaaaatggcttttaaagagttatcttagaatcttttgtaaacttcagttcactttagactttttctttctctataacattcatgtatgtattagttatagttgtcttgataacaagtagttccactgtctcagaggcttagcacatagaacactcatgcc

SEQ ID NO: 677949 - DNA, 659 bp, Homo sapiens
ttagaatggtgcaaaggtagctgggcatggtttcatgcacctgtggtcccagctacttgggaggctgaggcaggagcccaggagattaaggctgcagtgagctatggttgtggttgtgaatagccactgcactctagcctggccaacagagcaagactttgtcctaaaaaacaaaaacaacaacaaaaaacccaagaaacaaaacaaacaaagaatagaaaggaagaaaaaaaaaagaaagagaaacaaagctatatataggctcaaggactagccatccacatgctgatgttgaagggccccacgtgttcccatctgtgacggggactattggtttcctacccaaagctattttcgtctcctttttaccatataatagagcacagcttcagtaatactgccaggaagtataggggcaaagcttgtaaaacgaaggttgataactttggtcccaagttggtaacttattctctcatggcctttctctgctaataatttttaaaatggcttttaaagagttatcttagaatcttttgtaaacttcagttcaytttagactttttctttctctataacattcatgtatgtattagttatagttgtcttgataacaagtagttccactgtctcagaggcttagcacatagaacactcatgcc

SEQ ID NO: 677950 - DNA, 614 bp, Homo sapiens
ttcaccatgttgtccaggctgatctcgaactcctgacctcaggtgatccagccccccccaaacccccttcaggctcccaaagtgtgggattacaggcatgagccaccactctcagccggcccaaagtaattttcagtgaaggggtactgctgtaaaaatgagtctgcaaactagatgcccttcctcctccaattcatcctgctgagatgcacatagatgtgtgtgtcttagaatcagctgatgctgggaataggtcccttgttattaaggaggaagatgccaagggagtcaggaggagagaggtgtgttcctacagtgctgcgtggaattctgcagatgacctagctgctcctgtcttactgtcagtttctgcagtcaaatcaggcagttgtaacttgcgtttctctactttctttgatttcatatcaagcatcctrcaaattggtgggcatttttcaaattcccttaaagtttgtgaacaagcatctccaaggagcacttgccatctctgtgcctgatttgtgtatgctcactggcttgcagcttttcccaggttctctggtgttaaattaataacaaatgatgtagagctgacaggcaggtgaaactgggga

SEQ ID NO: 677951 - DNA, 585 bp, Homo sapiens
aaatttgctataatttaaaagtccaatatttggttaaaatagcacaattcaaagattataaatggcatgtgagcttggtgccacgtggcagtggcagacagaggtctgataaacagaagtccctcatatttcagtagcctgtgaactgtgctgctgcttatgtgtagggtagcttaataagtagaattgtcaatttagtggttgctaatgttttacctaaamtattacaagtttatactctggctgggcgcgggggcttacgcctgtaatcccagcactttcaaggccgaggcgggtacatcacctgagctcaggagttcaagaatagcctggccaacatggtgaaaccctgtctctactaaaaatacaaaaactagccaggcatggtgacgggtgcctgtaatcgcagctacttgggaggctggaggggggagaattgcttgaacccgggaggtggaggttgcagtgagccaaaattgcaccattgcactccatcctggggaacaagagtgaaactccatcttaagaacaaagtttatattctacaaccgtatcacatagggtgtcatgataaacagcgggaca

SEQ ID NO: 677952 - DNA, 561 bp, Homo sapiens
  misc_feature 544, 551: n = A,T,C or G
cagagtcaacacaggaaggagaataaggaatttccctccaggatggcaaaggagatcccagggtgatagctgcaccaggagttgagagtacccagtctagattggagctgtgtgattcaagagacagacatgttaaaggatgtttgagcaatacccctgaagccatggaatggttttgtgaatctgaggacagaatggccaggtaagcctatccaaggttcttacctgtccttagcttcccttggttataagctgatgaatttcctcttatcttctccttgccccactgcctggattaaaggcactcatttccccttcaaccaccaaaatatctgtgtggacttacctttgaaaaccagaaattaagtaaggtatgtacagaaacggaaaatgcagagcaccctgctcactttgaccccatttcgggtggaaattaagaacctgcattttcrgttaaggtaggctaaagggctgaaggacagacccagacagaagtttctcacccacataatagttcaagtgaggtgttcctagtgggcatgtncttcctnccatgtgggg

SEQ ID NO: 677953 - DNA, 1385 bp, Homo sapiens
gaagccaggggaggtcagcatgtgtaagactcatggaggtggccctgagggaggtggcctactaaacattgctttaaaagtcctttactaggggacgtttcaaatggagacatttctactgtcaatttcttgaaatgtcagtaatggtctccctatattgaatttctgtacaaatccaaattcccagagctggctgtggtggctcatgcctgtaatcccaacactttgggaggctgaggtgggtggatcacctgaggtcaggagtacgagaccaccctggccaacatggtgaaactctgcctctactaaaaatacaaaattaaccaggtgtggtggcacatgcatgtaatctcagctacttgggaagctgaggcaggagaatcacttgaacccaggaggcagaggttgcagtgagccaagatcatgccattgcactccagcccgggcaacaagagcaaaactctatctcaaaaaaaaaaaaaaaccctccaaattcccatcaastatacttaaaagtaagctctggctaaaagaaatttcttaacaaagaggtggagaaagacggagggagagggaagaaagaaaagcaatatctactactgctaaaccacttagagggggcaaaagggacatattcccaatctttagatattaaccactttctacttgtgtccaccaagttcagaattagagatgaaataagctttagtgggcttcctgagaggacaggagaaagagaagaaggaacgggcactttgatttgtaatgtctctgccttaaccaacctgaaaagtatctactggtatccctgttctacaaatgaggaaactaaggcttggcagaatgcatgacaaagcaacttccaccaaagtctcacatccaatatgcagcagagtgaaactgcaatcccacaactctaggcttcccaagggcaaggccagggggctggaatctgggatctagatctcttggtccttccaggagctgaagaaggtgatcagcttccattgtcctagcttcagccttccttaggtgaatgtcctagaaatgctcacttgccagtcatggcccaactctgtttcctgttactgagcacaggctatgggccagccccaagctaggctctggaagatgcagcactaagacagtcctgcccttgaattgctcagagtgcaagggagaagaggcaagtgcaagcagatactgcaggatacgtagtggcaagtgtgaggaagggacattccatccaaatattatgcaaagtcatcaagagcctcaggctcagcattcaacagggaatattattaaggcctgatgtgcagagttggggatataacaggaaggctttttgtttgtttacctgcccttcatatttatcaagagcc

SEQ ID NO: 677954 - DNA, 617 bp, Homo sapiens
ggtttttattttaaaagctccctttaaaaattcttcccccacttttttttttttttaagagacagggtcactttctgtgacccagactggagtgtagtagtataattatagctcatcgtaaccttaaattcctggactcaagcaatcctcttgcttcagcctccagagtagctaggactacagatacgcaccaccacacctaattttatttacctttttttgtagggatgggttgattctgtgttgctcaagctggtcttgaaatcctgggctcaagcaattctgcctcagcctcccaaagtggtgggattataagtgtcagccacctcacttgacctacttttgtttgtataacaaatcacaaatattgggatacaggaaaaactatttttactaraagccaaataaatattaagataatagatatgcacgtttttattattttttttacaggtgttgaagaagagaaaaggttgcagagatgcataaaaatgaaatctacaacccaagtgaatcagatgagtgtagatgctgtagaagtggcaacactcggaaaaacagttgaggactatttctgcttttgctatcttaaaagcaatacacttaaattttataaa

SEQ ID NO: 677955 - DNA, 1139 bp, Homo sapiens
ggactgaggtttgaaagccacaccaatgagaaaatcaagcacggtcagcctggagcactcctcagaaggcactgccgggagccgcccccacagtgccgggaccacacctcccctgccacacaagctgcagctctgagggcctgcctgagcaagggtggtcactcctgctctcactgacatctccacaggaacaggctcttccagccccagctcaggagccagccagagcacacagttcaccctgcagcctctagcaggcccaaccctatccctcaactggcctgcaaggcccagaaagactggagggcggggtctgcacccagccacggggggacgggggtggccagggacacccactgcgagggttcatgccgtaacatctcggcaacccaaaaggatgagggctgcatgcccgggccctgcagggttgctggcgaatcaatgagcaacgtctaactagttggcatgaaaaataatacattaatcccccaattatcatacccaaatcctctctttttcccccagctgtaaacactgaacaaactacccatgacaaattaacatattttcctccattttcttcagctgtttttccaagcagtccatacttaaaacagaacaaatggaccatcaaaaactgacctacgctccaaatgggagattttgggagaggaactgcctgcagcgggctgagggggaccggcggtctcagtggcccctggcaggcacatatgcacgtgcayactccccgaaggtatgggttcagcaggggaagctctgggtttcttgttatcagtgtttccacagatgggttgccccactcctgggctcagattcacagccgggaacccaggacgcagtgcctcctcacagactcaagcacaaaaccctccccacctctgtccccatcaccatgccccctgcaagtccacaggtgcccacaacaaagcaccttgtgacccctgggctcttggccctgtctgccctcatcttgggtggcctcagacaccccctaactccacggctcccgggcctctccagggacctcgggaggggcctagggtgtttagaagcctctcccacccctgaggccagtcactgaggtgtcggctagtgcacactccttcccagagacaggc

SEQ ID NO: 677956 - DNA, 1410 bp, Homo sapiens
cttttgcttcaatgtcaaagatctattgcctttatttttgtgagcctatttctgggctctctattctgttctattgatttatttgtctattttttggctaatactcacaaggtctttttttttttttagaaactgctttgttgagatataattgtatattccacattttgcttaatgatgaatacgtgggttgcatccacatttcagctgttgtgaatagtgcggctatgaacatggctgtagaaacatctcttcaaggccctgtttccatttctttgggtatatactcagaagtggaattactggattatatggtaagtctgtgtttaattttttgcagaatcatcatactgttttccatagtggctgtagcattttacattgccaccaacaatgtgtaagactttcaatttctccacatcctcaccagcactttttattttctggttttgtggttaatagtagtcatcctaatggtgtgaagtggtatttcattgcggttttgatttgcatttctataatgattagtggtgttgagaatctttctatgtgcctgtcggtttcttctgtgtcttctttggagaaatggctattcaagcctcttgcttattttgaatcagagtttgttgttgttgttgagttttaagttatctgcatatataacttgcaaatactttcctccattccatgggctaggttgcttttttatcctgtggacagtgtgttttgatgtgcaaatttaaaattttttttatgaagtacaatttctctatttttatcttttcttgtctgtgtctttggtatcatttgaccaagaaatcattgccaawcccaatgttgtgaaactttagtccataggattttttaaattcatgtaaaccatcagcgtaatttttattacactcattgagtttggtttataatctagttagattgactaaatcctttttctagactgactttgaaaagggctaagaaacttttcattaactttttcacgcttcaagttgccagttttgactacattttaatcccttaatttttgttccatctcttatgggatcactgtaaaattatatttgtacctacccggcatgaacacatgaatagcagtagtagttattagtctttttcacttgccttacttggtttagattatctaataaccaataactactactaaagataagagtttatgtccataggcctgaggcaaaagtaaaatatatatatatatatatatgtgaaaagaaatttctgaggctgtgagctacaacactgtcttcaaaggactttaacaaatagagttccaagaaatgcctctggaattgaagaaaaagtcataattgaaattttaagtgcagtggatgattcaaactgctctgcatgttagatgccattaaaaagagc

SEQ ID NO: 677957 - DNA, 432 bp, Homo sapiens
atttctgattcacctcctcccaccctggctagactataacctccatgaaggcaagtttttttgtaagtttggttcactgatttatctccaggacttagaacagtgccygatacatagcaagtgctctatgaatacctaatgaaagaataaatgtgtactcacagaaaatctctaaaaaacatactaagtgaaaacaaagtagattactaaataatacacataaaatcataccattcatgtaaaagccatatatgtgtctgtgtgtgtctgtaaagatacatgccaaattatcatggagaggggagtgggatgggaataattaaagtgattaattttttaattacttaaaaattaacttttcttttgtatatttctgtatcatttggcaatttttaaacatataagtatttattacttgtacaataaaatggg

SEQ ID NO: 677958 - DNA, 432 bp, Homo sapiens
atttctgattcacctcctcccaccctggctagactataacctccatgaaggcaagtttttttgtaagtttggttcactgatttatctccaggacttagaacagtgcccgatacatagcaagtgctctatgaatacctaatgaaagaataaatgtgtactcacagaaaatctctaaaaaacatactaagtgaaaacaaagtagattactaaataatacacataaaaycataccattcatgtaaaagccatatatgtgtctgtgtgtgtctgtaaagatacatgccaaattatcatggagaggggagtgggatgggaataattaaagtgattaattttttaattacttaaaaattaacttttcttttgtatatttctgtatcatttggcaatttttaaacatataagtatttattacttgtacaataaaatggg

SEQ ID NO: 677959 - DNA, 432 bp, Homo sapiens
atttctgattcacctcctcccaccctggctagactataacctccatgaaggcaagtttttttgtaagtttggttcactgatttatctccaggacttagaacagtgcccgatacatagcaagtgctctatgaatacctaatgaaagaataaatgtgtactcacagaaaatctctaaaaaacatactaagtgaaaacaaagtagattactaaataatacacataaaatcataccattcatgtaaaagccatatatgtgtctgtgtgtgtctgtaaagayacatgccaaattatcatggagaggggagtgggatgggaataattaaagtgattaattttttaattacttaaaaattaacttttcttttgtatatttctgtatcatttggcaatttttaaacatataagtatttattacttgtacaataaaatggg

SEQ ID NO: 677960 - DNA, 366 bp, Homo sapiens
gggtaggatctgctgcagcgcagcttccccagccaggctttgtggcttctcaggaggggaggttgtggggccagaggtgtcctgagccagggcagaggtttttgctgatctcaagtgcgtgtcgcgtgcctgtcttcaggcaagacctgcagtgtggaggcacaggcttgtgagcagtgaccacagggtgtgctgggtaggtggcactgacacaggccatggcagaagcatcttgggagaggagttgggaggcttcctggaagaggggagccctgaagggtgagtggacatttgctaatgggggggtattgcataatgaggtggggttgsggggaagaagcacgaatgtggctgggcttctctgtg

SEQ ID NO: 677961 - DNA, 1005 bp, Homo sapiens
agtttttgacttccccagttagtaggatgctgtttctcccccagctccctacagccttgggagtgctccacaacccacccccagtaacagtgggttactctctcataccatcccagtaaccatgagatactccctctcattgcactgtgctagcattagtgatatactagtgacccagacagagggacgctgtaactctgtggagcttgtgtagaatgggggacagttgaacaactgaattacacaacttacttcaattacaattgtgaagaatcctaaaaggaacagtagaagctgctacgaaagcatgtaacagggatctgaccatctgaagtatcagggaaagcttcttagaggaagtgatttttaagctgagactcgacggatggtgaacagattctggcaccaaaggggcaagtgttcctgactgagaatcactctcagaggcctgagctttgacctctctgtgatgactgatattcttgttgacctccaatccccagtgatagtggtcattctctctggcatttgatcacccctgaccaccaccacccacttaggaggaggtatttcagttccctgacctcatgctccttctcccagcgactgcttcttcaagaccttcatgacagccacgtgtgtaactctcttctggtggccgagagtgaagaagatctgtggcgcagtgagactcccttccactcccgtcagcgggcaccactgcccagtgatggtgagatcccmcccaggagcctccctcacaaggcagtgctgccgccctttcttttaccgaatactctggtgaaagctgagggcagagtcctcattacttggtcatcagtgccaagtactagagagagagcaaggaggataggacaggaaaggatcactggccttggctgctgctgcgagttcatcagtgattttcatggaagtaatttcagtagagagatgggaatagaaagcagatgaaatgaaaagtgaaagagggtgataggtggggca

SEQ ID NO: 677962 - DNA, 1681 bp, Homo sapiens
gttgtttacctaatctagcgttgggttattttttcccctttcctgattgcaagaaagtgccaaatgtaatcagctgtctgggcccatcgctgttctcggctctgagccagagaaaatcagacctagagaaggatcgttcccaaggccaaaagctcacccaggggccttgttcccagccttctttctcacctttccccagtagggacctaacctcgagagttccatctcctcctggccccgtcacactccaggctcattcccctctcccagcctgagctcatactctctcccctgctgggggtgcccttcccatttccttacacctcctgggaccccacctgtcctcacagctgagcttggccgtcattgcttccagcccacagtgactgggtcctggtcaccgctcaggaccaaggtagaatgtgaccacaccctgccttccagcagcttctgacacaggcagcggcgaacgtgtgcgttaacaattacagccccaactggaaggatgagaaattcctcttcggcrtttagagaacatcctcgagccgacttcgctgctgtcttcctcaggtctcccaggcacttctgcctgccacctcactgccaccccgccgccaccgacagcacagcctctcttccagcctgggtgggggtgtgggctagagttccagctgcctcctgaagttgttgggaaatgacttaaatcttccttgctcactagggcttggaagtgaagtaagtcagacatatgtggattaaaccttgtgatcaccaccgaccagcgcctagagaggatgtgcgacacccgcctcgctgcgtgggagcatgcagtgagatcatttgcacaaagtacttagcatccagcacacggtacttcctcaataggtctaagcgggcatttctgcatgtattacattccatcctcagcccaaccttcataaggaaaacaagaccagctcatgcttccttccgttctccagactgacgtgcggtagtgcaatctcagctcactccagcctcaacctcctgggctcaagctagcctcccacctcagcctccccagtagctgggactacaggtgtgcaccaccacgcttggctaattttttattttacgtagagatggggtttcgccatattgccccggctggtctcaaactcgtggagtcaaacgatccacccaccttggcatcccgaccgctgggattataggtgtgagccactgcacccagcctctgttctcttcttcaagcacaaatagatgcatgcactgctccgcagccttgtgctctaaataagtagggttcacaggtgaggtcttttctcatggccaaattgtataaatgtaggcagggaagagggcaaaggttttcagagccagagacggcacagaagttcctagtgatgtctggtacgtgtaactgcctgtcagctggtggatgggaagctgctgtgtgagcaaatatttctcttccttcccttcctcgaccttccattcctccccacacaccccttccaatctcatgggtctcctcaccagtgctggcctccctgcccctccaaaacatacctgaagaaataattccccccaaaaagaaaaatgtgtgtacaaagatattcatcacaaaattatttataaaatgagcctcgatcttcaactattgaggaacaatttaactaca

SEQ ID NO: 677963 - DNA, 1681 bp, Homo sapiens
gttgtttacctaatctagcgttgggttattttttcccctttcctgattgcaagaaagtgccaaatgtaatcagctgtctgggcccatcgctgttctcggctctgagccagagaaaatcagacctagagaaggatcgttcccaaggccaaaagctcacccaggggccttgttcccagccttctttctcacctttccccagtagggacctaacctcgagagttccatctcctcctggccccgtcacactccaggctcattcccctctcccagcctgagctcatactctctcccctgctgggggtgcccttcccatttccttacacctcctgggaccccacctgtcctcacagctgagcttggccgtcattgcttccagcccacagtgactgggtcctggtcaccgctcaggaccaaggtagaatgtgaccacaccctgccttccagcagcttctgacacaggcagcggcgaacgtgtgcgttaacaattacagccccaactggaaggatgagaaattcctcttcggcatttagagaacatcctcgagccgacttcgctgctgtcttcctcaggtctcccrggcacttctgcctgccacctcactgccaccccgccgccaccgacagcacagcctctcttccagcctgggtgggggtgtgggctagagttccagctgcctcctgaagttgttgggaaatgacttaaatcttccttgctcactagggcttggaagtgaagtaagtcagacatatgtggattaaaccttgtgatcaccaccgaccagcgcctagagaggatgtgcgacacccgcctcgctgcgtgggagcatgcagtgagatcatttgcacaaagtacttagcatccagcacacggtacttcctcaataggtctaagcgggcatttctgcatgtattacattccatcctcagcccaaccttcataaggaaaacaagaccagctcatgcttccttccgttctccagactgacgtgcggtagtgcaatctcagctcactccagcctcaacctcctgggctcaagctagcctcccacctcagcctccccagtagctgggactacaggtgtgcaccaccacgcttggctaattttttattttacgtagagatggggtttcgccatattgccccggctggtctcaaactcgtggagtcaaacgatccacccaccttggcatcccgaccgctgggattataggtgtgagccactgcacccagcctctgttctcttcttcaagcacaaatagatgcatgcactgctccgcagccttgtgctctaaataagtagggttcacaggtgaggtcttttctcatggccaaattgtataaatgtaggcagggaagagggcaaaggttttcagagccagagacggcacagaagttcctagtgatgtctggtacgtgtaactgcctgtcagctggtggatgggaagctgctgtgtgagcaaatatttctcttccttcccttcctcgaccttccattcctccccacacaccccttccaatctcatgggtctcctcaccagtgctggcctccctgcccctccaaaacatacctgaagaaataattccccccaaaaagaaaaatgtgtgtacaaagatattcatcacaaaattatttataaaatgagcctcgatcttcaactattgaggaacaatttaactaca

SEQ ID NO: 677964 - DNA, 1681 bp, Homo sapiens
gttgtttacctaatctagcgttgggttattttttcccctttcctgattgcaagaaagtgccaaatgtaatcagctgtctgggcccatcgctgttctcggctctgagccagagaaaatcagacctagagaaggatcgttcccaaggccaaaagctcacccaggggccttgttcccagccttctttctcacctttccccagtagggacctaacctcgagagttccatctcctcctggccccgtcacactccaggctcattcccctctcccagcctgagctcatactctctcccctgctgggggtgcccttcccatttccttacacctcctgggaccccacctgtcctcacagctgagcttggccgtcattgcttccagcccacagtgactgggtcctggtcaccgctcaggaccaaggtagaatgtgaccacaccctgccttccagcagcttctgacacaggcagcggcgaacgtgtgcgttaacaattacagccccaactggaaggatgagaaattcctcttcggcatttagagaacatcctcgagccgacttcgctgctgtcttcctcaggtctcccaggcacttctgcctgccacctcactgccaccccgccgccaccgacagcacagcctctcttccagcctgggtgggggtgtgggctagagttccagctgcctcctgaagttgttgggaaatgacttaaatcttccttgctcactagggcttggaagtgaagtaagtcagacatatgtggattaaaccttgtgatcaccaccgaccagcgcctagagaggatgtgcgacacccgcctcgctgcgtgggagcatgcagtgagatcatttgcacaaagtacttagcatccagcacacggtacttcctcaataggtctaagcgggcatttctgcatgtattacattccatcctcagcccaaccttcataaggaaaacaagaccagctcatgcttccttccgttctccagactgacgtgcggtagtgcaatctcagctcactccagcctcaacctcctgggctcaagctagcctcccacctcagcctccccagtagctgggactacaggtgtgcaccaccacgcttggctaattttttattttacgtagagatggggtttcgccatattgccccggctggtctcaaactcgtggagtcaaacgatccacccaccttggcatcccgaccgctgggattataggtgtgagccactgcacccagcctctgttctcttcttcaagcacaaatagatgcatgcactgctccgcagccttgtgctctaaataagtagggttcacaggtgaggtcttttctcatggccaaattgtataaatgtaggcagggaagagggcaaaggttttcagagccagagacggcacagaagttcctagtgatgtctggtacgtgtaactgcctgtcagctggtggatgggaagctgctgtrtgagcaaatatttctcttccttcccttcctcgaccttccattcctccccacacaccccttccaatctcatgggtctcctcaccagtgctggcctccctgcccctccaaaacatacctgaagaaataattccccccaaaaagaaaaatgtgtgtacaaagatattcatcacaaaattatttataaaatgagcctcgatcttcaactattgaggaacaatttaactaca

SEQ ID NO: 677965 - DNA, 1681 bp, Homo sapiens
gttgtttacctaatctagcgttgggttattttttcccctttcctgattgcaagaaagtgccaaatgtaatcagctgtctgggcccatcgctgttctcggctctgagccagagaaaatcagacctagagaaggatcgttcccaaggccaaaagctcacccaggggccttgttcccagccttctttctcacctttccccagtagggacctaacctcgagagttccatctcctcctggccccgtcacactccaggctcattcccctctcccagcctgagctcatactctctcccctgctgggggtgcccttcccatttccttacacctcctgggaccccacctgtcctcacagctgagcttggccgtcattgcttccagcccacagtgactgggtcctggtcaccgctcaggaccaaggtagaatgtgaccacaccctgccttccagcagcttctgacacaggcagcggcgaacgtgtgcgttaacaattacagccccaactggaaggatgagaaattcctcttcggcatttagagaacatcctcgagccgacttcgctgctgtcttcctcaggtctcccaggcacttctgcctgccacctcactgccaccccgccgccaccgacagcacagcctctcttccagcctgggtgggggtgtgggctagagttccagctgcctcctgaagttgttgggaaatgacttaaatcttccttgctcactagggcttggaagtgaagtaagtcagacatatgtggattaaaccttgtgatcaccaccgaccagcgcctagagaggatgtgcgacacccgcctcgctgcgtgggagcatgcagtgagatcatttgcacaaagtacttagcatccagcacacggtacttcctcaataggtctaagcgggcatttctgcatgtattacattccatcctcagcccaaccttcataaggaaaacaagaccagctcatgcttccttccgttctccagactgacgtgcggtagtgcaatctcagctcactccagcctcaacctcctgggctcaagctagcctcccacctcagcctccccagtagctgggactacaggtgtgcaccaccacgcttggctaattttttattttacgtagagatggggtttcgccatattgccccggctggtctcaaactcgtggagtcaaacgatccacccaccttggcatcccgaccgctgggattataggtgtgagccactgcacccagcctctgttctcttcttcaagcacaaatagatgcatgcactgctccgcagccttgtgctctaaataagtagggttcacaggtgaggtcttttctcatggccaaattgtataaatgtaggcagggaagagggcaaaggttttcagagccagagacggcacagaagttcctagtgatgtctggtacgtgtaactgcctgtcagctggtggatgggaagctgctgtgtgagcaaatrtttctcttccttcccttcctcgaccttccattcctccccacacaccccttccaatctcatgggtctcctcaccagtgctggcctccctgcccctccaaaacatacctgaagaaataattccccccaaaaagaaaaatgtgtgtacaaagatattcatcacaaaattatttataaaatgagcctcgatcttcaactattgaggaacaatttaactaca

SEQ ID NO: 677966 - DNA, 1681 bp, Homo sapiens
gttgtttacctaatctagcgttgggttattttttcccctttcctgattgcaagaaagtgccaaatgtaatcagctgtctgggcccatcgctgttctcggctctgagccagagaaaatcagacctagagaaggatcgttcccaaggccaaaagctcacccaggggccttgttcccagccttctttctcacctttccccagtagggacctaacctcgagagttccatctcctcctggccccgtcacactccaggctcattcccctctcccagcctgagctcatactctctcccctgctgggggtgcccttcccatttccttacacctcctgggaccccacctgtcctcacagctgagcttggccgtcattgcttccagcccacagtgactgggtcctggtcaccgctcaggaccaaggtagaatgtgaccacaccctgccttccagcagcttctgacacaggcagcggcgaacgtgtgcgttaacaattacagccccaactggaaggatgagaaattcctcttcggcatttagagaacatcctcgagccgacttcgctgctgtcttcctcaggtctcccaggcacttctgcctgccacctcactgccaccccgccgccaccgacagcacagcctctcttccagcctgggtgggggtgtgggctagagttccagctgcctcctgaagttgttgggaaatgacttaaatcttccttgctcactagggcttggaagtgaagtaagtcagacatatgtggattaaaccttgtgatcaccaccgaccagcgcctagagaggatgtgcgacacccgcctcgctgcgtgggagcatgcagtgagatcatttgcacaaagtacttagcatccagcacacggtacttcctcaataggtctaagcgggcatttctgcatgtattacattccatcctcagcccaaccttcataaggaaaacaagaccagctcatgcttccttccgttctccagactgacgtgcggtagtgcaatctcagctcactccagcctcaacctcctgggctcaagctagcctcccacctcagcctccccagtagctgggactacaggtgtgcaccaccacgcttggctaattttttattttacgtagagatggggtttcgccatattgccccggctggtctcaaactcgtggagtcaaacgatccacccaccttggcatcccgaccgctgggattataggtgtgagccactgcacccagcctctgttctcttcttcaagcacaaatagatgcatgcactgctccgcagccttgtgctctaaataagtagggttcacaggtgaggtcttttctcatggccaaattgtataaatgtaggcagggaagagggcaaaggttttcagagccagagacggcacagaagttcctagtgatgtctggtacgtgtaactgcctgtcagctggtggatgggaagctgctgtgtgagcaaatatttctcttccttcccttcctcgaccttccattcctccccacacaccccttccaatctcatgggkctcctcaccagtgctggcctccctgcccctccaaaacatacctgaagaaataattccccccaaaaagaaaaatgtgtgtacaaagatattcatcacaaaattatttataaaatgagcctcgatcttcaactattgaggaacaatttaactaca

SEQ ID NO: 677967 - DNA, 612 bp, Homo sapiens
atcttcatgacaacacctagattagggttcgattaaataactgatactaatagtctagacaagttgacacatcaaacttaccatcacatagatacaaaagaatataagaatatttaaagtatcaaaagaatgataatgtggatacccatgcacccactgaccactgggaattttcatatgcctcttcatatgccacctccttcccttctactgcaatgggaactrctgccttgaattttttcttttacagtgtgtatgtttctgaatcatatgttgctgcaaatatatgcttttggattttgtttaaattgaattattccatatttacttttgtactttcataactcagcagtgttacttaatggttttgggagtagctctgttgtagagtatcctatttgtatatatcacaaattattcaatgtactttggattatttccaaattcttggctattatgagccctgctgccataagcattcttgtatgagtctcttggtgcttatgtgacggttgaagccctagaaatacagagttcgtactagcagtgaaattactgagtctctctctctctctctttttttagacaggatcttgttgttctgtcacccag

SEQ ID NO: 677968 - DNA, 593 bp, Homo sapiens
gagcaaaccttctaaggaatttcatattcccaggtctctcctggcaggcacgcctggctcagaggtagatttttttttttttttttttttttgagcaaaagggtttctgcaaggtaccaagtcaaccaccctggagtggttcccaggaaagcagtggtgatggcttgggcaccagaggctcgggaaaaacaggtgctcggctttccaggaaaagaaatcttggccactcagaggggaatctgaaaccagagaggtaaggtagctgaagcgcatgtcccaaccaagcctgggacgggccaggcacctgggcaggactcctctctgctgcaccaggcgggcgtggrcgcttactttcttggttcccgaagcactctcctgctggggatggcgacagtgaccacccttaggaagactggcttgcatcagtacggatttttaagcaatacacagcattctaaagtcaatagggtttgtgatgggcgctgctccgagtaaggaagcgggtgtgagggcacagtctctggcagcccctcctgactgctgcctgtccttggtgaaccgaggggaggcagggcgtgcaggggccggctctg

SEQ ID NO: 677969 - DNA, 575 bp, Homo sapiens
tgtcccattttagagtagagttttaaaaaatcactattttcataaagaaaatatagagtttttttaaagagagaaaagaaattgcttataaatgtcagttgcaagtataatttattgtgattggaacyactatcaagatttacttcgtatgtaaatttctttgataaattttatggattttaataggtcacaggaaatctcattgtgctcctctttgattttttatattttattttattttaagttccaggatacatgcacaggagtctttatttcttacaaaagcattttgtaactttctggatgcagatcctatacacattatattatattaaatatctaagtattgcattttctatgcagcagttgtaaatggtatgtgttctcttaacacagttttattgataccattcacataccaccgaattcacccatttaaaatattcagttcagtggcttttagtatattcatagttgtaccatcatcaccagtatctaatttcagaatattttagttaccctgaaaaggaaccacatatccattagcaaacatcctcaattaccccctgcccaag

SEQ ID NO: 677970 - DNA, 575 bp, Homo sapiens
tgtcccattttagagtagagttttaaaaaatcactattttcataaagaaaatatagagtttttttaaagagagaaaagaaattgcttataaatgtcagttgcaagtataatttattgtgattggaactactatcaagatttacttcgtatgtaaatttctttgataaattttatggattttaataggtcacaggaaatctcattgtgctcctctttgattttttatattttattttattttaagttccaggatacatgcacaggagtctttatttcttacaaaagcattttgtaactttctggatgcagatcctatacacattatattatattwaatatctaagtattgcattttctatgcagcagttgtaaatggtatgtgttctcttaacacagttttattgataccattcacataccaccgaattcacccatttaaaatattcagttcagtggcttttagtatattcatagttgtaccatcatcaccagtatctaatttcagaatattttagttaccctgaaaaggaaccacatatccattagcaaacatcctcaattaccccctgcccaag

SEQ ID NO: 677971 - DNA, 603 bp, Homo sapiens
tgacacttccttaaacctggaattcctccttctaccttaaatctcagggattaagactctggtggctcctgactgatgccacttcttggcctaatcttgctccactctggggcattgctctcccctcctcacatgcctcccttttactcatctcaccctccaaggcccacccttcctgaggtgagggagtcctgaaggatggacctctaaggtggacgttgcaagacccaagccaaggtcacacagttaccggggcccttaggcacagccacagtagacaacartagaaggcagtgaggactcagggcacaaacaggacagagttagagttcacaggaaaaacagaagagattggaggtttcatggtgaaggggccacatgagctcagtcaatagccaggaggattttgacaggtccaactgggtatagaaggagatgcccctctgggaaaacctgaaccaatcattacatctgaaaaaggactggggtacatgggactagcctgatggtgagacagagacccagatgcaccgtaatggagagtgacagttccctaagacacctggaatcttaaaaaacatgggtttcaaagccaaataggca

SEQ ID NO: 677972 - DNA, 652 bp, Homo sapiens
atcccaccttttctgttagcctactgcaaggcatgagaactgctttgcaaactctcatacttaatttttttattgttaattgctctcaggtttctaaatttgcattcactgttgtcttatcatcccatagggcttggatgcacttgataatgaccatccataacaaccagcaggattgggcagggaaccatcaaatcacaatgcagatttaactccgtctttgcacctcaaaaaggggctccaaattttctctcttgctcgtctgctttgtatctctttgccttctgctcttatctttattatttccatccttctattttgtttgtgcttaatttgctgttctttttctagctccttgatatagatacttgaataatcgattttttttctagaataggctgtagtagacatagagatgtgccactctgataacccttcaaaaaagaactgtgggccaggttgggtggcacatgcctgtaatccagtgctttgggaagccaagtygagagattcacttggggccaggagtttaggaccagcctgggcaacatagcaagaccctatctccacaaaaataagaaattagccaggcatggaggcatgcacttgtagtcctgcctactcaggaggctgaggtgggagttcaagaggt

SEQ ID NO: 677973 - DNA, 666 bp, Homo sapiens
tttttttttttttttgagatagtcttgctttgtcaccgaggctggagtgcagtggcacaatcttggctcactgcaacctccacctcctaggctcaaggtcaagcaattctcgtgcttcagcttcccgagtacctggaactataggcacatgtcaccacgcccagctaaattttgtattttttttgagatggagttttgctcttgttgcccagactggagtgcaatggtgtggtctcggctcactacaatctctgcctcccgggtacaagmgattctcctgcctcagcctcccaagtagctgggatcacaggtgtctgccaccatgcccagctaatttttttgtatttttagtagagacgggatttcaccatgctggccaggctggtctcgaactcctgacctaaggtggtccgcccgcctcagcctcccaaagtgctgggattacaggcgtgagccaccacgcctggcctgaattttgtatttttagtagaaatggggtttcgccacgttggccaggctggtatcgaactcctgggctcaagtgatccacccgactcagcctcccaaactgttgggattacaggcatgagcctggtttcccagtgcctttctcaggcattcaggcctggacctcagtgcccagggcacctccaagtctcgtggggg

SEQ ID NO: 677974 - DNA, 584 bp, Homo sapiens
tgtggctttaaatggcaaatcctccaggaaaagactgtgtttatmcctttctcagatttttctacaatatttagttcctttttagttgttactctttcaattgcccctttttagaaaaggtagaatccatctgaacaaaaactctaaagaatatattctgagtaggtgaactatgaaccccctatgcttttgattcatttaatacttatcacttgtctactatgtgcaaagctatgcgtagtgaacttggcactcacaccgattctgactcccaaatagactgtcagagagctacaacatcacctacatctggactttcccaaacttccctttctccacttgctactttctttttcttttcacctatgtcctacacaaatactgaccactttttaaatctggtggacagaaaagcaatcgaagttttgtcatagagaggtatgaagatatatgacttatgctggagtatgtttcacataatgatatgaatatagccatatttataggctataaataaatcctattgcattgactatagttttcctaagagagctaatatatgcttttacaaaatcaatttaaaa

SEQ ID NO: 677975 - DNA, 622 bp, Homo sapiens
tggaatattattctgcctttaaaaagaaggaaatgttgtcattttcatcaacatagatgaacctggagaacattatgctaattgaaataagccagacacaaaaggacaaatactgcatggtaccactcatatgagaaatctaaaatagtcaaactcatagaggcatagggtagaaggataattgccaagggctgggggtcatggggaagtatattagtcaagggtacaaagtttcaggtactctggttggtggaaatgtaagtacaggataaatatacaagataaactctagatatttgtggtacagcatagtgcctatagttaacaatactgtattgcatacttaaaaacttgctaatagggtagatcttatgttgagtgatcttatcacacacgtacaagtaataatgataaagagggtaggaggaaacttttggagatgatgaatatgtttatgaaattgattatggtgatgactccacaggtrtatccttctctccaaactcatcaagttgtatatgttaaatatgtacaactttttgtatgtcaattcataacctcaatataatagtctaaaaataattggaatggagtctcaaatacaaaattattacagccaagc

SEQ ID NO: 677976 - DNA, 597 bp, Homo sapiens
attttattatatctcagtggttgtgaagggtgaagagttacataacagtgttcatgtgattctctctctctctagacatcagtgcagagtttagtaaatcatattccttagttcataagaggctattatccttggtcaaggtaaaaacccttctctgctttcttcccttatctcttgactgccattccccattttcctctctccactcccataggtacctactctaatgtgtgtgatacatgacgtttagtgtgcacacagattgtgaatgtgtatatgcttttcaccttccttgctcccaagtactacatagtattctaatacatgcatcctccatattttgtttatccattccccttgggatgaacacctaggttgcctccagcttccctttactataaatgactttgtgatgagtatccttgtatatgtctctttataaaactgcttgagkttttctgttgtatatatgccctagaaagtagatgcagtatcaattaattttgctgtgtagaagagttattttgtctccattgtcacacaaacatataggattacttaccttactaatttttaatattctgatttattatcaca

SEQ ID NO: 677977 - DNA, 1954 bp, Homo sapiens
tggatgaggaacggaggggagtggagtcacagagaaggctctgacagaggatgaagaggagtgagtcgaagccacctacacgatcctagggcacgaaacccaaatgctggggacaacacccattagaataaatattaggtgacagatgagggtggaggtgatgaaagtcttgggcgactgcatgtacctgaagctccagtttctctgccacactgaatgaggcaccagaaagaaagtgaggtgtcttagccgggcctggtggcgggcacctgtaatcccagctactcaggaggctgaggcaagaggataacctgaactcaggaggcggaggttgcagtgagccgagatcacgycactgcactccagcctgggtgacagagtgagactccatccccctgccccacaaaaaaaaaaaaaaaaaaaagtgaggtgtcaaggatgcgataaatatttgtccttcacttagcacacatggatcctggacggagaacacaactgcaagtccacagaccagaggtctaaatatttcaaaagaagaaatcgagccagcaaactttcaaataaaatattggctatcctcctgctttcctaatgatgaaaccaaaaaatacgtggaaagctatgatttttattggctgaaagttggcaaaatctcaatggctgaatgtaatgcttgttgtacatgtctgggggttttactcacgggccagcaatgcttgaataagtcaaaaataaagacatccataattcataaatgagtatgtactttttcagtaaaatttatttttcttgcctcattcagtataatcaataattatgttgtatgagcaagattttcacataattcatcttttaacattaatgtgataaagtgccaaattttgaatgcatttttgtcaaaaatgtacattaagcctggtgcagtggctctcacccgtaatcccagcactttgagacgccaaggcaagaggtttgcttgaggccaggtgtacgagtccagcctgggcaacagtgtgagacctcatctctaaaaaatgtgtttacaaaactatccaggcatggtggtgcatgcctgtgggcctatctactcaagaggcagaggctgaggcgggaagatcacatgagctcaggagttcaaggctgcagtgagctatggtcatcacaccactgtacttcagcctgggtgacagattgagatcgtgtctctaaaaattttttttttaaaaaggaaattaaatgtaaatttagaaaataaatttaaataatttttcatattttcaaaaagtattgcctctaaaacattcaaaattagctgttaaaaagcaaaacacaaattttaattatggaagtaactttaatcaaagctagttttttaaaaaaaactttgaaaatttaattaaatcacctgaaatatttaggtaaaaatgaaactatttatgattccactgagaactgtaaccagaccagaaaatgctgtgttgcttatataaaaaaaagtaggccaggtgtggtgactcacacctgtaatcccaacactttggaggctgaggctggaggatcacttgagcccaggagtttcagaccagcttgggcaatatagggagaccccatttctataaaaaatttaaaaaaagaattagttggggctgtgattgtgccatgccagcctggataacagagcgagaccctgtcagaaagaaaggaaacaaaagagaaggaagagagggaagaaagggaagaaaagaaggaaggaaggaaggaaggaaggaaggaaggagtgagtgagtgagtgagtgagtgaaggagggagggagggaaggagagagggagggaagagagagagaaggaaggaagggagggagggggaggggagaaagagaaggaaggaagggagggagggagagaagaagaaagaaagcatatctcacttcatgtaggttataactagacctac

SEQ ID NO: 677978 - DNA, 636 bp, Homo sapiens
aggtgtccctgctcttgtcctctgctataggacagccagggtctgttctggtgaaatcagagacaagccgtgagaacataggtgaaccacctgagactctctccatgctcttgtgtttgcattggcaagagcttgtgtgtcttgaaggtctgacttttggattccgtcagagcttctcatgactgggtcgtactccttccctttttagtgcaagctccctcatcctttgcatcttgtcacctggtctctggagtagaagatggcacagttgtcctgtgctggttaatgctacaatgtggaggtgatggcaggtgacgtggtccagaggcctggaaggcaaaacaagagacccatttattctgaatccagtgtggtargaatcctctgaatcccacggacccagtgagaccttgtacaaccctccttgcacccactggaagcgtgtcatcttctcttaaagactatataaaccacccataatcgaatccaattaagaggagatagtctagctttaaacaaatggtgaaccaacagagcatcctctggtgagctacaaattttatgccttggcactttcagatgttgtcaggccaagcacatacccaacttggagccaaatacactaatgctgagaat

SEQ ID NO: 677979 - DNA, 506 bp, Homo sapiens
tcacctaccaccaggtccctccctagacacatggggattacaatttgagatgggatttgggtgggaacacagagccaaaccatattagaggaagaagttcctctccattgctccattcagcagattactctgtgcatagcttttccatacaagctgtcccgtgacatccacctgtcttcgagagtcacctgtcaagtgatggcccggtagctgagcrttcactgaaagcaggccagaggtgtaatacatcaccttgtttttgcttaccacttacctctaatttaattctctcttccctcactcttgctgccctgggatttcacttttctgtgaaacattggcactcatgccttgcttcaatcattttctagggaatctaagctaaaacaagaatgtacatatgttgcaggagctgtaagcgttggggtaaatgggtcaacaagaaaggcaggacctgtgctttgatgaaccctacatctctgagggtagacaacagactttcttga

SEQ ID NO: 677980 - DNA, 1262 bp, Homo sapiens
ccttcctcccttaaaaccaaaaataagatcatgttattcccctgtttacagccattaaattcaaatgaccctctggaacctccaacccgccccgctaccacacatgtgccaattaatctgctccattcctccttcatatctcagaactattaaataaagcccagactccttagctgtgggcactaaaaaccttcatgctstgtctgggccctgcctctctgtctggccccatcaatcgccacatccttatatctaatgaagcgtcccagataagggcagtaacttcacactcggacacacctgggctggagcctacctcctccactctgaagctgcttggccttgaaagaattaaccctgtcaaccacactgaacaagacgaaccacactgggaaaatatttgcaacaaaaatagcaaatatatcctaatgatatgaatagtttgtacacgtttctttaatttgtttagcaagcatttgttaagtggactactaggtaccaggacataactgcctaagctttcagacgtcctgaggcaagattgtactccttgcctcagaaattctacattcccattaacacatggaacttaatatagatacacacacacacacacacacacacacacacacacacacacacgctgctttccagaaaagtcataccaatttaagggcctacacagagagaacaaaactacaatgtcatcacaggaaccagcactggttttcattgttaaaatatttgccaatgtcataagcgaggtagtgttttgttttgattcacatttatgaggttgtatcagtctgttctcactctgctaataaagacatacccgagactgcataatttataaagaaaaagaggtttaatggtctcacagttccacatggcaggcgaggcctcacaatcatggcagagggcaaaggggaagcaaaacacatcttacatggaggcaggcaagagagcatgtgtaggtgaactgccctttataaaaccatcagatctcatgagacttattcactaccatgagaacagtataagggaaactgcccccatgattcggttatctccacatggccccacccttgacacatggggattattacaattcaaggtgagatttgggtggggacacagagccaaaccatgtcataggttataaatgatttctcatgattattgcccattgatatttctcccatgagttgccattccgtgtgcataatactatctgcaaataatggccttttgactattcc

SEQ ID NO: 677981 - DNA, 1262 bp, Homo sapiens
ccttcctcccttaaaaccaaaaataagatcatgttattcccctgtttacagccattaaattcaaatgaccctctggaacctccaacccgccccgctaccacacatgtgccaattaatctgctccattcctccttcatatctcagaactattaaataaagcccagactccttagctgtgggcactaaaaaccttcatgctgtgtctgggccctgcctctctgtctggccccatcaatcgccacatccttatatctaatgaagcgtcccagataagggcagtaacttcacactcggacacacctgggctggagcctacctcctccactctgaagctgcttggccttgaaagaattaaccctgtcaaccacactgaacaagacgaaccacactgggaaaatatttgcaacaaaaatagcaaatatatcctaatgatatgaatagtttgtacacgtttctttaatttgtttagcaagcatttgttaagtggactactaggtaccaggacataactgcctaagctttcagacgtcctgaggcaagattgtactccttgcctcagaaattctacattcccattaacacatggaacttaatatagatacacacacacacacacacacacacacacacacacacacacacgctgctttccagaaaagtcataccaatttaagggcctacacagagagaacaaaactacaatgtcatcacaggaaccagcactggttttcattgttaaaatatttgccaatgtcataagcgaggtagtgttttgttttgattcacatttatgaggttgtatcagtctgttctcactctgctaataaagacatacccgagactgcataatttataaagaaaaagaggtttaatggtctcacagttccacatggcaggcgaggcctcacaatcatggcagagggcaaaggggaagcaaaacacatcttamatggaggcaggcaagagagcatgtgtaggtgaactgccctttataaaaccatcagatctcatgagacttattcactaccatgagaacagtataagggaaactgcccccatgattcggttatctccacatggccccacccttgacacatggggattattacaattcaaggtgagatttgggtggggacacagagccaaaccatgtcataggttataaatgatttctcatgattattgcccattgatatttctcccatgagttgccattccgtgtgcataatactatctgcaaataatggccttttgactattcc

SEQ ID NO: 677982 - DNA, 601 bp, Homo sapiens
catttatctgtctatttttgcatcaataccacactgctttaattattcaagtataagattgtctaagatctggtagggctaattactcctcattattcttgcctttaacatatatgcctgtatgtgtgcatatgtatgttattctatatgttttattcttctaaataaattttatattaatttgatcaaatattgatcccagtgtgctccctaccattattatattttcaatgctatttcctttttcatcataattttaatacattattgttattatrcaggctagctattgatttttgtatatttatctcatcctaccattttgttgaattctgtttttatcaattcaagtagctttataatggaatctctttcgttttatagatgtacaagtcattttctcttatattgctcaaaagttttactatgtttttcatgttacttgatgctttaggatttattaacattacatttttattttgaaatatactttttatcaaaataagattactgtctttactaaaaggctttggccttgaaaaataaaataaaataaaaccaagcagaaattctagaacaaaaaaaatcattgaaggaaata

SEQ ID NO: 677983 - DNA, 1958 bp, Homo sapiens
  misc_feature 1511, 1512, 1513, 1514, 1515, 1516, 1517, 1518, 1519, 1520,1521, 1522, 1523, 1524, 1525, 1526, 1527, 1528, 1529, 1530,1531, 1532, 1533, 1534, 1535, 1536, 1537, 1538, 1539, 1540,1541, 1542, 1543, 1544, 1545, 1546, 1547, 1548, 1549: n = A,T,C or G
  misc_feature 1550, 1551, 1552, 1553, 1554, 1555, 1556, 1557, 1558, 1559,1560, 1561, 1562, 1563, 1564, 1565, 1566, 1567, 1568, 1569,1570, 1571, 1572, 1573, 1574, 1575, 1576, 1577, 1578, 1579,1580, 1581, 1582, 1583, 1584, 1585, 1586, 1587, 1588: n = A,T,C or G
  misc_feature 1589, 1590, 1591, 1592, 1593, 1594, 1595, 1596, 1597, 1598,1599, 1600, 1601, 1602, 1603, 1604, 1605, 1606, 1607, 1608,1609, 1610: n = A,T,C or G
ttgcacctgctgatgtgtctgcctgaaaacctctttgtatagctaaatccttctcatccttcaggctttagctcaagtatctcagccttcaagaatccttcctctacaaatgggacttcatgaagaatgtgggactcagataaggatgtacaactatgaaagcatggagcctggacagaacctagttcttccaactcctcatccatgacgcctgccatgatgtatgccaacctgtgatttaggtgcatttcttctgtcatgaactagggagatgataaattatagggacaatgtcttttatgtttgtttgcttgcattattttgcagggaaaatggggagagtattgcagatgttaaataatttctgagtggttgagactgattctggcaggaaggattttgaccatctgagaacccacacagatgtgtgcttaccagcttccacagaaacatgtgcacgtgagtccctttttaaagtgtagagagacagctctccttgctctctatttgtctgaaaggacatggagatttccatttaaaaaaataccagaaaacatctcattatgagttctttaaaatraaatggaagtatattttaggcccagtttctgcccttctaagtcatattttctctaaactatcagaataaacaggtcatttttcctctggactattttcttcatctaagcattgtcatgcaaatacaattttggcatctatttgtgactcattctcacctttttaacctagaggctcgcccccaatgtcagcttgtctcctctgagttattcatccaggttttgagcatattgaacacatatggcatgtgtcaccttggacaggcaaaaccaaggaaggataataaacaaacaaacattacttttcttaaccattaataagtgatatgcatttgcatttcagattttcatggtcttagattttagaataattgaatcacacaatagaaaaaaaattaaaagattgttttgccccataatctcatagatacattaagtctccttggctgtgtctccaccaggcgcctcattcagcctctcttttaagatgtccagcaatgggaactgactctctcctgggactgcaccatctttgcagagcattaactgttacaaatttaagtcaagcctaaatttgggggtgttagtttgatcagggaatagcatatgttttcatttaggtcatcagttgaacactaaaaagccaagaacagtgcactgtggtcaacttctagagaactctagagccattaatcaagacatgctatatcctaaaaatctggccacagtgctcattgaggagaccatggaagcctttcgcaatgtcttacagaggtcaagacatgctgtgtattccatgaacattccttggtctaagaagctttggtaacctcatgttgccctctggcatcctgataataggcaacgttattaagtaagctcaactccaggtaaagatttgagaaagatttatatattaatacattaaaactnnnnnnnnnnnnnnnnnnnnnnnnnnnnnnnnnnnnnnnnnnnnnnnnnnnnnnnnnnnnnnnnnnnnnnnnnnnnnnnnnnnnnnnnnnnnnnnnnnnntttcaaaatctccttaaagctcatccacctctcacttccatgataatacataccatgataaccagtggaagaacctgataatttgattttattgccaattgagagctgttcatctctgcacacaccacctgataatggtatcttcctttttcccttggaatcttggtatttgtggatgcacagtacctctccaatagcactagaaaaatcaccaggtgaatctaaaactctcattgtcttcccactaaggatactatgtctatgtgtcttctcaaaatctagtattcacaatcaaaacaaattctacaattacgtaaattctatatcttcagtttggaaaaacctaaa

SEQ ID NO: 677984 - DNA, 621 bp, Homo sapiens
  misc_feature 600: n = A,T,C or G
gtattctaattaaatcttacaggctttgatagatcatattgttattaataatcacttcaaattatttactaattttcaatataatatcttcttgaactaatgagttacgttaagtgtttcatgcaaatattcacacacwtatccatttttgtctttcaaacaatagaaccataatttaatccatagttttcagagaacctatacattaatttaaaacgtttgttattttgcagacatttatgacccaatacacagtaaatcttaacagatgtactatatgcattttctagttattgattgtagtgttcaatatatatgtcactggatcaaactagttaatttttcttgttcaattcttatatatagctaatgattttttttgacagctggtctatcacttatggaatgaggtgtattaaaatttccagaaattatcatggatttgtctatttgtgcttttcagtcaactttttaaaagtatatatatataattgaacccaagttataaacagtatataaatttacaattgcataacttcctgttaatgtattattatatttttatgcaatgtctgtctccataatagctcctgtactttnttccaatcattttaaatgtat

SEQ ID NO: 677985 - DNA, 1242 bp, Homo sapiens
tcaagttattttattcggatataaaaaatagttacacctcaattatctatagacttgaggatattcagtttcattataattactgtactgatgaataacttttgtatgaaaatagtatatcacataacttgcaaagcactttactttttattatataatttcacagataattcattattgttttattctccaaacmtgtcccaatacgtggaagagatgatatatattttccctaaataatacttttaaggtatttaaacagaacctaacaccattttagaatagagccatgcaatgatttcttcaggattattaagtaatccattctatttaccatagagcaaacacccagctcatttgaaattgtttgcttgtttgttttttagagatggggtcttgccgtgttgcccaggctggattagaattcctgggctcaaaagattctgctgtttcagcctcatcagtagctgagactataaacatgtaccacctcacccagctgaaataagattttaaatttgaaagtagacctcacctttcaaggacatctttattagagagcatgttgatactctctagtggcttgggccagatggccctataattctccccccttcaggttctataatgcatggagatggaagagaatgaataaagagaacgtcagaaaggctcaagtgtcaaaagagaaatgtaccaattatactgcttcccttagcaaaagtgaacctgggattagcatggcagcgatggaggtcacatctgtctgtgaggagcagagacatcattaaatagcttttgttttatcaatgaataatgtcatctggcttttcttcccttaaactagagctaattgatcagctctctcttcctcaaaaaaggtgttatcttacacattaactgcaaagcactttcaaagtttttcctcgagcagcccacagcaaccaaggaaagaaactccacatgtgcacaggaagttgggatgaccctgaatctaatataagagcatgccatgcaaaattaaactggggggcattctccaaaagaagtggcctgtattcttcaaaacttccaggatctttaaggacaatgaaaggctgcagttctgatgaaaggagacgaaggagacatgacagctccatgcactgtgtggtcccctttggatcctggatcagagaaaaaatatctataaagaacatgaatatggcaattgataaaaattgaatgtgcactgtagattat

SEQ ID NO: 677986 - DNA, 1143 bp, Homo sapiens
atgtactagaaagaagggggaaattattgaacaattatcctagacgttgaagactgaaaccaaaaattattataggagtgacaggaaagtagtaaataagactagatgttcataatttgttatcccctttgattatatgggctttgaaatgcccagaaagtctaatcaaaattcacaggtaaaactggagatragtatgagttaagtactagtaggcttgtaattgattaaagatgtgttgcaaggaacacaatcttctaaaatatctagttaaaatgaattttataagaatgataatttcttcacatgacctaaattcccttttaaaaatcccaattatggttcagcagattaaagatagtagaaatccaggaattgctaagacaaatataaatcgtgtaatgttcatttggctgaagaactgctgggatcccaattccttgccagccctgcagaccctccagaatgcatttgcttacttgagccagcacatctttgtaatgacaaggttcaatccataagcctggaatgactgttcacagtctggtaatttattttatttatttttattttttagggaggagtaagttcagtagaattaggaagagagagattggaattagcagtaggagaatattctaaaaggaactaataaaagaggaggagatgctttgattttttgccttacatccaggttcttctatcaagtttctaaacttgttcttctaacaagtttagatgccatcctcctgccccccatcctgattcttccatctagagatgctggcttgttcgctggttctccatatgtgttatctttataattactatctacctcctgaaattaaccattccaatatgcattactatttttcttttttgaatttaatttacttttgtctttattatgttgttgtactagtacattctcttacgctaattatttttgtttcttttgcaacatattttaagtttcttggggactgaaaagagttccttgtgcattccctgagagctatctggcaggaactagacatgatgaaatcaatgattaaataaagctgaagaacatgtgttttattacatttaattacatttacattatttctccttgcaatgttagctggtgtagtctgctttgta

SEQ ID NO: 677987 - DNA, 1143 bp, Homo sapiens
atgtactagaaagaagggggaaattattgaacaattatcctagacgttgaagactgaaaccaaaaattattataggagtgacaggaaagtagtaaataagactagatgttcataatttgttatcccctttgattatatgggctttgaaatgcccagaaagtctaatcaaaattcacaggtaaaactggagatgagtatgagttaagtactagtaggcttgtaattgattaaagatgtgttgcaaggaacacaatcttctaaaatatctagttaaaatgaattttataagaatgataatttcttcacatgacctaaattcccttttaaaaatcccaattatggttcagcagattaaagatagtagaaatccaggaattgctaagacaaatataaatcgtgtaatgttcatttggctgaagaactgctgggatcccaattccttgccagccctgcagaccctccagaatgcatttgcttacttgagccagcacatctttgtaatgacaaggttcaatccataagcctggaatgactgttcacagtctggtaatttattttatttatttttattttttagggaggagtaagttcagtagaattaggaagagrgagattggaattagcagtaggagaatattctaaaaggaactaataaaagaggaggagatgctttgattttttgccttacatccaggttcttctatcaagtttctaaacttgttcttctaacaagtttagatgccatcctcctgccccccatcctgattcttccatctagagatgctggcttgttcgctggttctccatatgtgttatctttataattactatctacctcctgaaattaaccattccaatatgcattactatttttcttttttgaatttaatttacttttgtctttattatgttgttgtactagtacattctcttacgctaattatttttgtttcttttgcaacatattttaagtttcttggggactgaaaagagttccttgtgcattccctgagagctatctggcaggaactagacatgatgaaatcaatgattaaataaagctgaagaacatgtgttttattacatttaattacatttacattatttctccttgcaatgttagctggtgtagtctgctttgta

SEQ ID NO: 677988 - DNA, 640 bp, Homo sapiens
ggaaatcctctttctttttattgttgtccactattactcacctcatataataaacgggcagctctttctttggtcttccccttgaggctgctgtatttaaaaatctaaagaatgcaaagaatgcttactgtgaactataagagtatctttcagccacaaatgctcttgccacctcttagcttccaggcaaagatacacttgtaagggaaaggcagccagaagtatgggggcctgaggtgggggtatatgtgggggctgagggttgatattaatggagtttgttctccttttctccctcagacaggctttatcattttctgtcttgaaaaattactaagtagcatttgaaataaactcccccagggaaaatgacatggatattgtgaattttargtaaaaatcactttctgcctctctgcatgattaattcttcttcatatcttcttttccaaatatcgtgttaaaaacagtattgcgtttacatatagtcttaaataaccatggttaatagcagaagaaagatagttctttgtctgactaaagcaagtaactttttcagtgcaaagtatcagttgtagggctggagacagtggaagttgctgttctgccctctgtttctagaaaaataaagtttttctga

SEQ ID NO: 677989 - DNA, 640 bp, Homo sapiens
ggaaatcctctttctttttattgttgtccactattactcacctcatataataaacgggcagctctttctttggtcttccccttgaggctgctgtatttaaaaatctaaagaatgcaaagaatgcttactgtgaactataagagtatctttcagccacaaatgctcttgccacctcttagcttccaggcaaagatacacttgtaagggaaaggcagccagaagtatgggggcctgaggtgggggtatatgtgggggctgagggttgatattaatggagtttgttctccttttctccctcagacaggctttatcattttctgtcttgaaaaattactaagtagcatttgaaataaactcccccagggaaaatgacatggatattgtgaattttaagtaaaaatcactttctgcctctctgcatgattaattcttcttmatatcttcttttccaaatatcgtgttaaaaacagtattgcgtttacatatagtcttaaataaccatggttaatagcagaagaaagatagttctttgtctgactaaagcaagtaactttttcagtgcaaagtatcagttgtagggctggagacagtggaagttgctgttctgccctctgtttctagaaaaataaagtttttctga

SEQ ID NO: 677990 - DNA, 640 bp, Homo sapiens
ggaaatcctctttctttttattgttgtccactattactcacctcatataataaacgggcagctctttctttggtcttccccttgaggctgctgtatttaaaaatctaaagaatgcaaagaatgcttactgtgaactataagagtatctttcagccacaaatgctcttgccacctcttagcttccaggcaaagatacacttgtaagggaaaggcagccagaagtatgggggcctgaggtgggggtatatgtgggggctgagggttgatattaatggagtttgttctccttttctccctcagacaggctttatcattttctgtcttgaaaaattactaagtagcatttgaaataaactcccccagggaaaatgacatggatattgtgaattttaagtaaaaatcactttctgcctctctgcatgattaattcttcttcatatcttcttttccaaatatcrtgttaaaaacagtattgcgtttacatatagtcttaaataaccatggttaatagcagaagaaagatagttctttgtctgactaaagcaagtaactttttcagtgcaaagtatcagttgtagggctggagacagtggaagttgctgttctgccctctgtttctagaaaaataaagtttttctga

SEQ ID NO: 677991 - DNA, 1497 bp, Homo sapiens
tttcttaaatgtgttgaacatttatctctacacaaaacccagcaatgactgtttatagcaactttattcttaattccccaaacttggaagcaatcaagatgtccttaagtaggggaatggataaaccaactgtgatacattaatatgttgtaatataattgcatgatcaaaacaaatgagctatttaaccacaaaaagacatggggaacwttaaatgaatattgctaagtgaaagaagccaatctgaaaaggctgcataccactttgtacattggcagtatcgtaatcaatgaggtttctccagggtgtgattattggtaattgaaaatgaaggtttattcattttgtttgttgccttagttaatcaagaaaagtcactgccacagatcaccaaggattaatggactttggcttgatttggtgattggacaaaacttgagttttcttaacgtggaaagatacgactgattctgtttgaggaatagagagtacagtgaatacttggaacccagaaatggagactctgctacttatttatgattatttaccaaatatttctggttcttccactttgaagcatatggtaggattacatttaactgcctgcttgaagtttttgtcatggcatctcttattttgctcaatatagtatgagcaaaggtgttgtatctcaattttggttgaaagatttcaaagctggtataagattcatcattttttctttcatcttaaacaaaatactgtggatgcttatgtgaaactggaggctccattaatatttgtccttgagtaacttgaataagttgcttgaataagcatcatttttaacctgctttggacatcaaggacaaacaagaaatattgttgtgttaaactactaagattttgggagagtttcttactgtggcataatttagcccatcctgatcaaacattactagattaattattcaagacaaaagactcactgatgagccttttcaatgcgtattcccttagtttattttttaatatatagattgctttttatcataaagaaataatgaggattagagagagacaatgtgtgataaacaaatcaataattcaagaaaacatatccctgagagttacttaccaatcagaagctaagattcagctttaattttaattcaatgaaactttaatataatgatcttagaaaacacacttgagtttaggcagttgagttttagatatattttttatgaattgcatattttttccttttatttgaatgtgttacatgtatattattcctctattaaatgatcctggtgatatataagagaaagcattcctccaatgagtactttaatttagtactctattcaaagttctgtgaagaatccaacttaaaaagaaattgagtgcatgttattttcttaatgtacgtacttgctttccttttccaacttaagataaaagaggattttgttgataaatgtgaaaagatttggtcactacagagacacatcc

SEQ ID NO: 677992 - DNA, 1497 bp, Homo sapiens
tttcttaaatgtgttgaacatttatctctacacaaaacccagcaatgactgtttatagcaactttattcttaattccccaaacttggaagcaatcaagatgtccttaagtaggggaatggataaaccaactgtgatacattaatatgttgtaatataattgcatgatcaaaacaaatgagctatttaaccacaaaaagacatggggaacattaaatgaatattgctaagtgaaagaagccaatctgaaaaggctgcataccactttgtacattggcagtatcgtaatcaatgaggtttctccagggtgtgattattgrtaattgaaaatgaaggtttattcattttgtttgttgccttagttaatcaagaaaagtcactgccacagatcaccaaggattaatggactttggcttgatttggtgattggacaaaacttgagttttcttaacgtggaaagatacgactgattctgtttgaggaatagagagtacagtgaatacttggaacccagaaatggagactctgctacttatttatgattatttaccaaatatttctggttcttccactttgaagcatatggtaggattacatttaactgcctgcttgaagtttttgtcatggcatctcttattttgctcaatatagtatgagcaaaggtgttgtatctcaattttggttgaaagatttcaaagctggtataagattcatcattttttctttcatcttaaacaaaatactgtggatgcttatgtgaaactggaggctccattaatatttgtccttgagtaacttgaataagttgcttgaataagcatcatttttaacctgctttggacatcaaggacaaacaagaaatattgttgtgttaaactactaagattttgggagagtttcttactgtggcataatttagcccatcctgatcaaacattactagattaattattcaagacaaaagactcactgatgagccttttcaatgcgtattcccttagtttattttttaatatatagattgctttttatcataaagaaataatgaggattagagagagacaatgtgtgataaacaaatcaataattcaagaaaacatatccctgagagttacttaccaatcagaagctaagattcagctttaattttaattcaatgaaactttaatataatgatcttagaaaacacacttgagtttaggcagttgagttttagatatattttttatgaattgcatattttttccttttatttgaatgtgttacatgtatattattcctctattaaatgatcctggtgatatataagagaaagcattcctccaatgagtactttaatttagtactctattcaaagttctgtgaagaatccaacttaaaaagaaattgagtgcatgttattttcttaatgtacgtacttgctttccttttccaacttaagataaaagaggattttgttgataaatgtgaaaagatttggtcactacagagacacatcc

SEQ ID NO: 677993 - DNA, 1497 bp, Homo sapiens
tttcttaaatgtgttgaacatttatctctacacaaaacccagcaatgactgtttatagcaactttattcttaattccccaaacttggaagcaatcaagatgtccttaagtaggggaatggataaaccaactgtgatacattaatatgttgtaatataattgcatgatcaaaacaaatgagctatttaaccacaaaaagacatggggaacattaaatgaatattgctaagtgaaagaagccaatctgaaaaggctgcataccactttgtacattggcagtatcgtaatcaatgaggtttctccagggtgtgattattggtaattgaaaatgaaggtttattcattttgtttgttgccttagttaatcaagaaaagtcactgccacagatcaccaaggattaatggactttggcttgatttggtgattggacaaaacttgagttttcttaacgtggaaagatacgactgattctgtttgaggaatagagagtacagtgaatacttggaacccagaaatggagactctgctacttatttatgattatttaccaaatatttctggttcttccactttgaagcatatggtaggattacatttaactgcctgcttgaagtttttgtcatggcatctcttattttgctcaatatagtatgagcaaaggtgttgtatctcaattttggttgaaagatttcaaagctggtataagattcatcattttttctttcatcttaaacaaaatactgtggatgcttatgtgaaactggaggctccattaatatttgtccttgagtaacttgaataagttgcttgaataagcatcatttttaacctgctttggacatcaaggacaaacaagaaatattgttgtgttaaactactaagattttgggagagtttcttactgtggcataatttagcccatcctgatcaaacattactagattaattattcaagacaaaagactcactgatgagccttttcaatgcgtattcccttagtttattttttaatatatagattgctttttatcataaagaaataatgaggattagagagagacaatgtgtgataaacaaatcaataattcaagaaaacatatccctgagagttacttaccaatcagaagctaagattcagctttaattttaattcaatgaaactttaatataatgatcttagaaaacacacttgagtttaggcagttgagttttagatatattttttatgaattgcatattttttccttttatttgaatgtgttacatgtrtattattcctctattaaatgatcctggtgatatataagagaaagcattcctccaatgagtactttaatttagtactctattcaaagttctgtgaagaatccaacttaaaaagaaattgagtgcatgttattttcttaatgtacgtacttgctttccttttccaacttaagataaaagaggattttgttgataaatgtgaaaagatttggtcactacagagacacatcc

SEQ ID NO: 677994 - DNA, 1497 bp, Homo sapiens
tttcttaaatgtgttgaacatttatctctacacaaaacccagcaatgactgtttatagcaactttattcttaattccccaaacttggaagcaatcaagatgtccttaagtaggggaatggataaaccaactgtgatacattaatatgttgtaatataattgcatgatcaaaacaaatgagctatttaaccacaaaaagacatggggaacattaaatgaatattgctaagtgaaagaagccaatctgaaaaggctgcataccactttgtacattggcagtatcgtaatcaatgaggtttctccagggtgtgattattggtaattgaaaatgaaggtttattcattttgtttgttgccttagttaatcaagaaaagtcactgccacagatcaccaaggattaatggactttggcttgatttggtgattggacaaaacttgagttttcttaacgtggaaagatacgactgattctgtttgaggaatagagagtacagtgaatacttggaacccagaaatggagactctgctacttatttatgattatttaccaaatatttctggttcttccactttgaagcatatggtaggattacatttaactgcctgcttgaagtttttgtcatggcatctcttattttgctcaatatagtatgagcaaaggtgttgtatctcaattttggttgaaagatttcaaagctggtataagattcatcattttttctttcatcttaaacaaaatactgtggatgcttatgtgaaactggaggctccattaatatttgtccttgagtaacttgaataagttgcttgaataagcatcatttttaacctgctttggacatcaaggacaaacaagaaatattgttgtgttaaactactaagattttgggagagtttcttactgtggcataatttagcccatcctgatcaaacattactagattaattattcaagacaaaagactcactgatgagccttttcaatgcgtattcccttagtttattttttaatatatagattgctttttatcataaagaaataatgaggattagagagagacaatgtgtgataaacaaatcaataattcaagaaaacatatccctgagagttacttaccaatcagaagctaagattcagctttaattttaattcaatgaaactttaatataatgatcttagaaaacacacttgagtttaggcagttgagttttagatatattttttatgaattgcatattttttccttttatttgaatgtgttacatgtatattattcctctattaaatgatcctggtgatatataagagaaagcattcctccaatgagtactttaatttagtactctattcaaagttctgtgaagaatccaacttaaaaagaaattgagtgcatgttattttcttaatgtacgtayttgctttccttttccaacttaagataaaagaggattttgttgataaatgtgaaaagatttggtcactacagagacacatcc

SEQ ID NO: 677995 - DNA, 1497 bp, Homo sapiens
tttcttaaatgtgttgaacatttatctctacacaaaacccagcaatgactgtttatagcaactttattcttaattccccaaacttggaagcaatcaagatgtccttaagtaggggaatggataaaccaactgtgatacattaatatgttgtaatataattgcatgatcaaaacaaatgagctatttaaccacaaaaagacatggggaacattaaatgaatattgctaagtgaaagaagccaatctgaaaaggctgcataccactttgtacattggcagtatcgtaatcaatgaggtttctccagggtgtgattattggtaattgaaaatgaaggtttattcattttgtttgttgccttagttaatcaagaaaagtcactgccacagatcaccaaggattaatggactttggcttgatttggtgattggacaaaacttgagttttcttaacgtggaaagatacgactgattctgtttgaggaatagagagtacagtgaatacttggaacccagaaatggagactctgctacttatttatgattatttaccaaatatttctggttcttccactttgaagcatatggtaggattacatttaactgcctgcttgaagtttttgtcatggcatctcttattttgctcaatatagtatgagcaaaggtgttgtatctcaattttggttgaaagatttcaaagctggtataagattcatcattttttctttcatcttaaacaaaatactgtggatgcttatgtgaaactggaggctccattaatatttgtccttgagtaacttgaataagttgcttgaataagcatcatttttaacctgctttggacatcaaggacaaacaagaaatattgttgtgttaaactactaagattttgggagagtttcttactgtggcataatttagcccatcctgatcaaacattactagattaattattcaagacaaaagactcactgatgagccttttcaatgcgtattcccttagtttattttttaatatatagattgctttttatcataaagaaataatgaggattagagagagacaatgtgtgataaacaaatcaataattcaagaaaacatatccctgagagttacttaccaatcagaagctaagattcagctttaattttaattcaatgaaactttaatataatgatcttagaaaacacacttgagtttaggcagttgagttttagatatattttttatgaattgcatattttttccttttatttgaatgtgttacatgtatattattcctctattaaatgatcctggtgatatataagagaaagcattcctccaatgagtactttaatttagtactctattcaaagttctgtgaagaatccaacttaaaaagaaattgagtgcatgttattttcttaatgtacgtacttgctttcctttyccaacttaagataaaagaggattttgttgataaatgtgaaaagatttggtcactacagagacacatcc

SEQ ID NO: 677996 - DNA, 2463 bp, Homo sapiens
ataattagaaagcaatagtaagctcctaactggactatttctgtccttgttcccagtaggattaatattcacagaacggacagtgatcttttttgataagtaaaattatgtgatccagctgtgtaaaaatctacgagttttataatacccaggccacacagtaatgtggcctactcaccatgacctcaatttactcattgtttcacctctttgctctttctcacttattccaagtgtgtttccacttcaggtactacgtctttactgtttccacgtccttgaagaatctttcacaagatcgtgtcgtatcttgtccttttcatgatgtttgtttatgctcaaaaatcattttatcagtgtggactttcataatgaaactccctgaaatatctctctttactgccactgactatccattttccatatcacttaatcccaatctattatattatttcttagtatctatatctctcaactacaatgtaaactccagaggaaataataatttyattatttcagctcaatgcatttcccaagtgcctagagctctgattggcataaagtaggtgccaaataagaaaagtgtttgttaagtgaatgaataaaccaggtattgcttttataataaatattaggaaattaccctttcattgggtatacatttcaattgttaatgaacaaataatttaggtaaaccataaccaaggtgattctaggtacttaattctcacacgtgtggtttgttatagtacatttcctaattttaaactaaaaataatatttatagctgtaaacggttgtcaggttgaaagtatcaaatctaatagctattttatgaaagccatttatgttcagtaaataaaataaccttaataggttatttttattatttcataagttaaggtcctcatttgtcaggaatatagcaacacatatatataattgtttagaatctatttttccttgtttcttcatttatagctatccttatgagtagaaattgatcccattactacttgtggaatgtctggcatttgcctttgcttattaaggaacaattgaaaaaataatttcttttctctgaagatagtaaatgaattatataggagaaaatacagggtggctagggtgtatgtcagatcccagagaagactctccataactaagaatctggggtcgtcccataactactactccccaagtaaatactgctagtcagaatatttggcacaataattttgaagtgcattatgagatgatcatgcaatttaaaaaatgtgcatacactataacccagaaattcaacaacttgatataacctctagagaactgctagtgaataagtgctccagaagataggaatattcatagtagcaatttgttatagcaaaacactgaaaacaacacaaataccagttgagagaaggacagaataataaactgtggaacagtcacacaatggaatataatgtaactgaacaataaataaaaattaccaacaaaccagatgccatcacacaaaccacaatattgagtaaaaaagaatacatctgtaccttggaaatattacacaggaaggtagtgatacatgcttacacacatacacacacacacacaaatagaacaatgataagcaaaggaatgggagggccacactgaaaatggtggagtctggagctccaaggatctgctcttctgtttcagcaaccgttagcctggcaaaaactgtcagaataatccttttcagaatgtgggaatctaatcaaacacttacaacaaccaggggagtgtttaatgaagaaaacaaatgctaaattgtggtaacagagtggtgtgtcattttactcatttatcatcccctgcttccgagctcaatcgtggctgtggaatttatgatgcatatttttggtgtggcttgatggtaccagagggagcaataaagactttgttctcaaagaattgtgattgttcattttgacagcagctctatgacggattctcttagacaactcctaaggctggagcacccttttggacagcattggtcagaagcatttaaaggtatatactatgcataaccactaggtgcaagggatagcaaatggtgcaagcaactgacagacaaaaagcttggaaaacaggaggctggagaagaagacacatggaggaatcaaaattcaaaggactcccacatacactggagaatcctggagaccacgtgcatatctagggctggaagcatacatggaaaagtctgatctttgggacctgcatgagcagaaaatgaggactaaaccagaggttcactcaacttgttctagctcagagccaatctgcaaagaccaggagaattttgttgtgttttgttttgttgtttttaatttatttttctttttagctgcaggcattgaaggaaatttctgtcaggttactggaggaccaatgagatactggaatgaaaag

SEQ ID NO: 677997 - DNA, 2463 bp, Homo sapiens
ataattagaaagcaatagtaagctcctaactggactatttctgtccttgttcccagtaggattaatattcacagaacggacagtgatcttttttgataagtaaaattatgtgatccagctgtgtaaaaatctacgagttttataatacccaggccacacagtaatgtggcctactcaccatgacctcaatttactcattgtttcacctctttgctctttctcacttattccaagtgtgtttccacttcaggtactacgtctttactgtttccacgtccttgaagaatctttcacaagatcgtgtcgtatcttgtccttttcatgatgtttgtttatgctcaaaaatcattttatcagtgtggactttcataatgaaactccctgaaatatctctctttactgccactgactatccattttccatatcacttaatcccaatctattatattatttcttagtatctatatctctcaactacaatgtaaactccagaggaaataataatttcattatttcagctcaatgcatttcccaagtgcctagagctctgattggcataaagtaggtgccaaataagaaaagtgtttgttaagtgaatgaataaaccaggtattgcttttataataaatattaggaaattaccctttcattgggtatacatttcaattgttaatgaacaaataatttaggtaaaccataaccaaggtgattctaggtacttaattytcacacgtgtggtttgttatagtacatttcctaattttaaactaaaaataatatttatagctgtaaacggttgtcaggttgaaagtatcaaatctaatagctattttatgaaagccatttatgttcagtaaataaaataaccttaataggttatttttattatttcataagttaaggtcctcatttgtcaggaatatagcaacacatatatataattgtttagaatctatttttccttgtttcttcatttatagctatccttatgagtagaaattgatcccattactacttgtggaatgtctggcatttgcctttgcttattaaggaacaattgaaaaaataatttcttttctctgaagatagtaaatgaattatataggagaaaatacagggtggctagggtgtatgtcagatcccagagaagactctccataactaagaatctggggtcgtcccataactactactccccaagtaaatactgctagtcagaatatttggcacaataattttgaagtgcattatgagatgatcatgcaatttaaaaaatgtgcatacactataacccagaaattcaacaacttgatataacctctagagaactgctagtgaataagtgctccagaagataggaatattcatagtagcaatttgttatagcaaaacactgaaaacaacacaaataccagttgagagaaggacagaataataaactgtggaacagtcacacaatggaatataatgtaactgaacaataaataaaaattaccaacaaaccagatgccatcacacaaaccacaatattgagtaaaaaagaatacatctgtaccttggaaatattacacaggaaggtagtgatacatgcttacacacatacacacacacacacaaatagaacaatgataagcaaaggaatgggagggccacactgaaaatggtggagtctggagctccaaggatctgctcttctgtttcagcaaccgttagcctggcaaaaactgtcagaataatccttttcagaatgtgggaatctaatcaaacacttacaacaaccaggggagtgtttaatgaagaaaacaaatgctaaattgtggtaacagagtggtgtgtcattttactcatttatcatcccctgcttccgagctcaatcgtggctgtggaatttatgatgcatatttttggtgtggcttgatggtaccagagggagcaataaagactttgttctcaaagaattgtgattgttcattttgacagcagctctatgacggattctcttagacaactcctaaggctggagcacccttttggacagcattggtcagaagcatttaaaggtatatactatgcataaccactaggtgcaagggatagcaaatggtgcaagcaactgacagacaaaaagcttggaaaacaggaggctggagaagaagacacatggaggaatcaaaattcaaaggactcccacatacactggagaatcctggagaccacgtgcatatctagggctggaagcatacatggaaaagtctgatctttgggacctgcatgagcagaaaatgaggactaaaccagaggttcactcaacttgttctagctcagagccaatctgcaaagaccaggagaattttgttgtgttttgttttgttgtttttaatttatttttctttttagctgcaggcattgaaggaaatttctgtcaggttactggaggaccaatgagatactggaatgaaaag

SEQ ID NO: 677998 - DNA, 667 bp, Homo sapiens
tgacagcacagactgcaaatgcaaactatcaaacagctaaagaaaatctctgaaaatttctgtgtttcttattcaattttttgttttcattataaaattatttctatgtacttcaatacaacttctataaattgcattgaraaatttaagatgcatatcacatgcttccatgttcattatttttgctagtttctacatagtttctatcaaaattgcaaatttaatcacagttagtcattaaatactgttaaatagactcagcatctatcatacagatggaaaataaatctaattttgaaacttttttattaccttaggtcacataattaggttctcttaaaatatggaaataataaactaatattattgaaattaactttaatggaagtcttctaaattcccgacacatataaaaaatcattattcaatgattttaagaagtaaaaaaattaagcatggcccatgttttcatatgtttagcatatttattatcaatagtagcatctatggaaaatacttgaaaattatacaatcctgtctccttttttgagatattataggacatttcgagtagtttacattatttgtaatagttgttccttgattattccagtaaatatactctacttaatcctttttacaggtattatgtaaaatgtatacatag

SEQ ID NO: 677999 - DNA, 2260 bp, Homo sapiens
aggattattagtgtttcttagcaataaagcatttttcatgaagggatgtatatacttctatacataatgctattgcacacttaatagactacagtacagtgtaaacctaacttttatatgtttcaaaaaaccaaaacatttgtgtgactcactttactgctatattttctttattgtggtggtctgggaccaacccatgatatctcaaaactgtgcctgtatcttattttgagctgatgttaattaccatacaaagaatatccatttgaaggaatgtggaggagtcattttacctatttcttttcttggaagttcatattgtttccattctttatgtcagaggtaatattattcacaggcagatattagtaaaagaaacccttcaatttctgagattaacttacatattatatgtatatttgtaataaaattacatttgtggaactcacaacactgaattcaaagttaataaacctataatgcttcctttcattacaaacagctgtagactctgtaagtggcagttaggataaaaaagcactgtgtttatgtgttaagaataaggaaattattgctgatcaaatatttagttttcttttgcatcaaactacaccattaacagttcacttttgggaccatgtttttttaaaaagaatttgtccccactattgaaaagccttaatgatattgataaagaattccctgtttcccttgccaatcagttgaaaactaaccattaatacctgaacttctcacaagtctctttacttttattttcttataaatatttaaaaaagatattcactaaaagattacatataaagcttaacaagtacaaattatatttcggtaatttcatttttcataacattacctagcctagtataataattatactttaaggttatgagtccaaatttattaaacaggctgatctatattcgagtatccataacttccttgagttcaaatgtctgtcgtattcttcctcagtcttcatttttctacgctgatataatttatttcatactttcccaacattgaaaagtataagatttaaaatattgaagttaaagaatatactccatattaaaaccaagtataaggctggacatggtggcttacgcctgtaatcctaacactttgggaggctgaggcaagaggatcattagatctcaggagttctagagcagcctgggcaacatagtgacaccttgtctctttaaaaaactaataataataattaaaacaattaaaatttaaaaataaaaacaaatataagatactcttctatttttttccattcttcccttaatcatggttttatatttcagcatcttcacaaagaccagacgttactttagaaatatgttctcacagaatgataaagatacaaaatcgcaaacatattatcttcatctaaatattaatttttatcctactatttacttgatagactttcttgttcactttcttattatacagtgtaataatatactccatcatttttaatgtaatgtgctactaatcttagtaactactgaatatctaaaatacacaatttgaaacattaaatcctgttgtatatttatcttcttttcagytcaaaatgtctatggtttggagatggaaagatgattaactaatttttcatttgtttggggacaggccaccattgataaagcaaacagaccaatcacttcaaacagagagggcactcaaagcaaagtggtgtacttcttcaactgatactccatgacctttcaagatgaaaggataatagtcatccacccagagaagaaggagaaaagttctatgtactatttacagggtttagaggtcacttggttatgcagaaaacaggatacaatagaaactgaagaaaacactggagagaggaatcatggctgcatatttttctaagcttcctattcaccaccagttttcatcttttaataagcccctctgttccccaaactaaggacacattttgtttattgtgtggctaggacccccctctccttatgttcagctgtctatctgtgccctctttagagtgtaagtaattggcttaaatcaagagccaaatggcatgtctaagtcattcagcgttctgatgatcatatgacagagcttaaagaatttgagggaggtcccacactacaaagcagcatattattttcagtgaagtcttgtggctgtgtgcacctctgttgcaaggacaattagactctttgtttctcctatgatcctaagagtc

SEQ ID NO: 678000 - DNA, 1439 bp, Homo sapiens
ggaagccaggagatcacacatgcaaaacacagcctggatcccagggctggggactggagttccagtgcacacatccacgtatctctatggaagctaggagatcacacatgcaaaacatagcctggatcccagggctggggactggagttccagtgcacacatccacatatctctatggaagctaggagatcacacatgcaaaacatagcctggatcccagggctggggactggagttccagtgcacatatccatgtgtctctctagaaggttggagattacacatgcaaaacacatttcaaagatttttgattgaaaggatatattgttgtaatgtattgctattattgtgaaaaacaaaagaatgtcattaagattcctttttccccattatattaagccttcattagaaacattgtcaatcttcaaaagacagtgtggtgattcctcaaggatctagaactagaaataccatttgacccagcaatcccattactgggtatatgcccaaaggattataaattattctactataaagacacatgcacacgtatgtttattgtggcactgttcacaatagcaaagacttggaaccaacccaaatgtccatcatggatatagacaccatggaatactatgcagccatataaaaggatgagttcatgtcctttgcagggacatggatgaagctggaaaccataattctcagcaaactaacacaagaacagaaaaagcaaacaccttgtgttctcactcataaatgggagttgaacaatgagaacacatggacacagggaaaggaacatcacacactggggcccgttgtgggatgggggactaggggaagggatacaattaggagaaatacctaatgtagatgacaggttgatgggtgcagcaaaccaccatggcacgtgtatacctatgtaacaaacctgcacgttctgcacatgtatcccagaacttaaagtataataaaaaatgtatttaccaatcagttgatggatagagattctaaagttgatcttgatcactayttctcaaaatacagctattaggttgctgcaaaagtaattgcactttttaccattaaataattaaataatgacaaaaaacacaattatttttgcactagcctaataaccttcttttgggcagagcgtatcgggatcattgttgataaagatagaatttttctttcaaaatggaaacgaaaatagacacaaaaaataaactggtgatattccaccacataggagttctgacctcgttcttcggcaactacttgctaacttaattacaattttaagataagaaaaacattgaagataaatatttactctaagaccagaatagataaatatttactctaagactagaatagataaattggatggcttgtaaagtgtctcaaaaaaggcaatgtttacattacataat

SEQ ID NO: 678001 - DNA, 623 bp, Homo sapiens
tatgtatctatctatcactatttacctatcctctatcaccatcatctaacaagctagctattactatttagctatcatctatctaatctctrtctatctatctatctatcatctataagccctacatatttcttctttacattacctccccctgcttagcaatggagctcaagatatggcccagtctaaatctctaaaagtaaactaaaataattggaactgttacccagaaaatttagaatctcagttttctagtttgttttgattctggaaactcaacttgcaaatgtaatactactacatactatacgtaatactacagtgaaaagcagatttatttaccccccatagtctgctacaatggttttgtccagagatgagtggctaaaagagctattgagaaaaagtttaaagtatgttctgataagatcaaaattccactgggtggtttgtaaatcctttcttctagtgccatgcacaacgatcgcatttagatgcctctatggctgcctatatttaaattcctacttcatattcttactcaaagtgaaattctctaaatctttgggtacatttatcaaaacatacattattgttgtggactttccttcagaatattctta

SEQ ID NO: 678002 - DNA, 2164 bp, Homo sapiens
aatgtttgagcattagcgaatccaagtctaacagctgcattcccctgggcaccattattcaaggagcatctctcagagaacatcgaagccaatggggagggaattatgggaaggtcatcgtgagaaactggggaggggattatgggaaggtcatcctgagaaactgttccccctgaatccacctgagtccagtggagagtgggttgggaagaatttaccccagttatagggttctttcccatgaggaaatatattcaaacacaattttaataaaagaaataaaaattaattatcctataaaacaatatagattctccagagttttgtacttaaatataattaagtatcccaactgaaaatagctccgacttatctcaattttgaagactaatctagttcactattctgtgtctctggatagttgttaattatgttattactactctcattaatattagcagtgttcgtattatttgagtttcctcttaccttttgtaagaagatgcatttgcgtattttttctagataacaataaaagaatttgtacaaaatgacttgtataacacgactccttcggtatccacagcacatcattcatgggtggtaacacacagagaaggtccctccccactaagtcttactgggccatcctcatatcctactttgtaagctgaaaaatagaatctcatgattgaaatggtagaactgtcacattttgtaacattcatgtatgtccactgtgaaccaggggcacagttttctcttactgttgttgttttactaaacatcatcaaatattcacaaatgtgagagagaggaaagagagggtgggatatagtatgatatatataaaatatatatgacattatatgtatatgacaatgtgccgataagtatgatatatgttacataccatgtatacatacgacaatgcactgcaggtctccaggaattaacatgtgcaatattcctcaggaggcaccagtctcatagttcatataaacagcaacaccagagtttatgcaatctccagctatatggttgcatgaaattgtcccagtaatatgtaatgtaacatataacatatgacttatataatgaaaaatacaaggacctcaccctgaggtgtacatgtgttcatgaaaagctgcacctcctatttgaggaggcaaaaaatttcaccagctttaaaaatcttaataactttagctaatccaatgctgttctttcgcaaatttatcggcagaagacctatctctatagcaaatgctattcctgcatctcatgcgtggtgagtggtgcttgttatgtggtgagtggtgcttgttgtctgatttttatagctctattatgatcagtttgaaatgtagttgtagttctcaggccttacaaatgcatgcaacttgtagtcaaagaaagagtgatttgaggcattgggatattaccctgacccaccctttattagatcatctgatttatattctgttcctgactgtcattgttttcttctacacagaaaaaaaattggtttttatcctgctgctcgagcttgtgaagcagggtaagtcagcaaacaaagtaaaataagcaaatgtgataaacgacccaaggctatggagaaaatcttttattagaggcagatctcactccccactctccagtagaggccactggtcctcctgaattaatacctgataatatcctcagattcatgggtgaggcccccagggcatgacagagcaagatatatactcttaaaatactttccacaggacttttttgaatctgctaagttactaggtttkgggttttacctgaatattcagagctaactatctcttgagaacacttggaatacaaatgtcatgtggactaaagagaaagaaaccaggccacgggcaactgaggagtgatttggggacaattgcagagatgtttaaagagaaaataactcaagatctccatgtcttgtgcaaggcattctttgcttccactttcccatgaagtattcattagaatctccatactcatacatgcatagcaaatgttcatgtattttgggagttgtggcaaagtactgactatattctcactaaataagggcctaaggattccagttaattagctgagatttgctccaattaatttgaatctgttcattatc

SEQ ID NO: 678003 - DNA, 2164 bp, Homo sapiens
aatgtttgagcattagcgaatccaagtctaacagctgcattcccctgggcaccattattcaaggagcatctctcagagaacatcgaagccaatggggagggaattatgggaaggtcatcgtgagaaactggggaggggattatgggaaggtcatcctgagaaactgttccccctgaatccacctgagtccagtggagagtgggttgggaagaatttaccccagttatagggttctttcccatgaggaaatatattcaaacacaattttaataaaagaaataaaaattaattatcctataaaacaatatagattctccagagttttgtacttaaatataattaagtatcccaactgaaaatagctccgacttatctcaattttgaagactaatctagttcactattctgtgtctctggatagttgttaattatgttattactactctcattaatattagcagtgttcgtattatttgagtttcctcttaccttttgtaagaagatgcatttgcgtattttttctagataacaataaaagaatttgtacaaaatgacttgtataacacgactccttcggtatccacagcacatcattcatgggtggtaacacacagagaaggtccctccccactaagtcttactgggccatcctcatatcctactttgtaagctgaaaaatagaatctcatgattgaaatggtagaactgtcacattttgtaacattcatgtatgtccactgtgaaccaggggcacagttttctcttactgttgttgttttactaaacatcatcaaatattcacaaatgtgagagagaggaaagagagggtgggatatagtatgatatatataaaatatatatgacattatatgtatatgacaatgtgccgataagtatgatatatgttacataccatgtatacatacgacaatgcactgcaggtctccaggaattaacatgtgcaatattcctcaggaggcaccagtctcatagttcatataaacagcaacaccagagtttatgcaatctccagctatatggttgcatgaaattgtcccagtaatatgtaatgtaacatataacatatgacttatataatgaaaaatacaaggacctcaccctgaggtgtacatgtgttcatgaaaagctgcacctcctatttgaggaggcaaaaaatttcaccagctttaaaaatcttaataactttagctaatccaatgctgttctttcgcaaatttatcggcagaagacctatctctatagcaaatgctattcctgcatctcatgcgtggtgagtggtgcttgttatgtggtgagtggtgcttgttgtctgatttttatagctctattatgatcagtttgaaatgtagttgtagttctcaggccttacaaatgcatgcaacttgtagtcaaagaaagagtgatttgaggcattgggatattaccctgacccaccctttattagatcatctgatttatattctgttcctgactgtcattgttttcttctacacagaaaaaaaattggtttttatcctgctgctcgagcttgtgaagcagggtaagtcagcaaacaaagtaaaataagcaaatgtgataaacgacccaaggctatggagaaaatcttttattagaggcagatctcactccccactctccagtagaggccactggtcctcctgaattaatacctgataatatcctcagattcatgggtgaggcccccagggcatgacagagcaagatatatactcttaaaatactttccacaggacttttttgaatctgctaagttactaggttttgggttttacctgaatattcagagctaactatctcttgagaacacttggaatacaaatgtcatgtggactaaagagaaagaaaccaggccacgggcaactgaggagtgatttggggacaattgcagagatgtttaaagagaaaataactcaagatctccatgtcttgtgcaaggcattctttgcttccactttcccatgaagtattcattagaatctccatactcatacatgcatagcaaatgttcatgtattttgggagttgtggcaaagtactgamtatattctcactaaataagggcctaaggattccagttaattagctgagatttgctccaattaatttgaatctgttcattatc

SEQ ID NO: 678004 - DNA, 2164 bp, Homo sapiens
aatgtttgagcattagcgaatccaagtctaacagctgcattcccctgggcaccattattcaaggagcatctctcagagaacatcgaagccaatggggagggaattatgggaaggtcatcgtgagaaactggggaggggattatgggaaggtcatcctgagaaactgttccccctgaatccacctgagtccagtggagagtgggttgggaagaatttaccccagttatagggttctttcccatgaggaaatatattcaaacacaattttaataaaagaaataaaaattaattatcctataaaacaatatagattctccagagttttgtacttaaatataattaagtatcccaactgaaaatagctccgacttatctcaattttgaagactaatctagttcactattctgtgtctctggatagttgttaattatgttattactactctcattaatattagcagtgttcgtattatttgagtttcctcttaccttttgtaagaagatgcatttgcgtattttttctagataacaataaaagaatttgtacaaaatgacttgtataacacgactccttcggtatccacagcacatcattcatgggtggtaacacacagagaaggtccctccccactaagtcttactgggccatcctcatatcctactttgtaagctgaaaaatagaatctcatgattgaaatggtagaactgtcacattttgtaacattcatgtatgtccactgtgaaccaggggcacagttttctcttactgttgttgttttactaaacatcatcaaatattcacaaatgtgagagagaggaaagagagggtgggatatagtatgatatatataaaatatatatgacattatatgtatatgacaatgtgccgataagtatgatatatgttacataccatgtatacatacgacaatgcactgcaggtctccaggaattaacatgtgcaatattcctcaggaggcaccagtctcatagttcatataaacagcaacaccagagtttatgcaatctccagctatatggttgcatgaaattgtcccagtaatatgtaatgtaacatataacatatgacttatataatgaaaaatacaaggacctcaccctgaggtgtacatgtgttcatgaaaagctgcacctcctatttgaggaggcaaaaaatttcaccagctttaaaaatcttaataactttagctaatccaatgctgttctttcgcaaatttatcggcagaagacctatctctatagcaaatgctattcctgcatctcatgcgtggtgagtggtgcttgttatgtggtgagtggtgcttgttgtctgatttttatagctctattatgatcagtttgaaatgtagttgtagttctcaggccttacaaatgcatgcaacttgtagtcaaagaaagagtgatttgaggcattgggatattaccctgacccaccctttattagatcatctgatttatattctgttcctgactgtcattgttttcttctacacagaaaaaaaattggtttttatcctgctgctcgagcttgtgaagcagggtaagtcagcaaacaaagtaaaataagcaaatgtgataaacgacccaaggctatggagaaaatcttttattagaggcagatctcactccccactctccagtagaggccactggtcctcctgaattaatacctgataatatcctcagattcatgggtgaggcccccagggcatgacagagcaagatatatactcttaaaatactttccacaggacttttttgaatctgctaagttactaggttttgggttttacctgaatattcagagctaactatctcttgagaacacttggaatacaaatgtcatgtggactaaagagaaagaaaccaggccacgggcaactgaggagtgatttggggacaattgcagagatgtttaaagagaaaataactcaagatctccatgtcttgtgcaaggcattctttgcttccactttcccatgaagtattcattagaatctccatactcatacatgcatagcaaatgttcatgtattttgggagttgtggcaaagtactgactatattctcactaaataagggccyaaggattccagttaattagctgagatttgctccaattaatttgaatctgttcattatc

SEQ ID NO: 678005 - DNA, 653 bp, Homo sapiens
ggcattaacaccaaaagagtccctcatccattcccaaaggtccaataaacagaagtctgggtttattgtgaaagtgtaatgttgcacttattttatttatttatttatttttgagacagagtctcgctctatcgcccaggctggagtacagtggcgtgatctcggctcactccaagctacacctcccaggttcacgccattctcctgcctcagcctcctgagtagctgggactacaggcgcctgctaccacgcccagttaattttttgtatttttagtagagatgtggtttcaccatgttagacaggatgatctcgatctcctgatctcgtratctgcctgcctcggcctcccaaagtgctgggattacaggcgtgagccacctgcccggccttattttcttaaatctacatgttttttatgtgtgattgatatggataatttacaccgtatcaccagaatacgttttcacagctcatctccatgactgcttagtaatttctcatggttaatccatttcccaggaatttcactctaagcttgcaatgtgcaaagcaatgagctgttaggaaatttaaaataagtaagacataggtattcttcaagaggagtttgaaatttagagaaagagaaaggcctagaaatgtttataag

SEQ ID NO: 678006 - DNA, 653 bp, Homo sapiens
ggcattaacaccaaaagagtccctcatccattcccaaaggtccaataaacagaagtctgggtttattgtgaaagtgtaatgttgcacttattttatttatttatttatttttgagacagagtctcgctctatcgcccaggctggagtacagtggcgtgatctcggctcactccaagctacacctcccaggttcacgccattctcctgcctcagcctcctgagtagctgggactacaggcgcctgctaccacgcccagttaattttttgtatttttagtagagatgtggtttcaccatgttagacaggatgatctcgatctcctgatctcgtgatctgcctgcctcggcctcccaaagtgctgggattacaggcgtgagccacctgcccggccttattttcttaaatctacatgttttttatgtgtgattgatatggataatttacaccgtatcaccagaatacgttttcacagctcatctccatgactgcttagtaatttctcatggttaatccatttcccaggaatttcactctaagcttgcaatgtgcaaagcaatgagctgttaggaaatttaaaataagtaagacataggtattcttcaagaggagtttgaaatttagagaaagagaaargcctagaaatgtttataag

SEQ ID NO: 678007 - DNA, 685 bp, Homo sapiens
tttatgcctcatttcactaaatccttaccatccccacactgtgtctgttttattatccccctttacagttgggaacactgaggttaactgtgtttactcaacaatctcagggtcacacagatgcagagtagaaaagcaggatgtgatcctaggactaaaggcagacaaagtctatgccttttctctcctattgcagtttccacatatcagcaggtacttcctgtgaaagaggaagcacatttgttctcctggctccagagaagagaaagcagactggcagctctcccatgagggaaagaggagaactttgacaggaatttacgaccaccagggagaacagaactaacttttctgtaaggctgtggccacctacccctgaagatgagatgctgatgtagaaaatggacagccatctcttagaggatctgcaaaataatttctattctgrttagaaaaattaaatacattcactttatctttatgatcttgagatattccttggatagtaacaacagctcctgacatctggagactatttcattttagacaaaacatttgcatggagaatctaatatgatcccatgtgacattctttttgggacaaggtagctgttgctcagagaagcagcaggaattgtccaaggacacacagggtgaatgaaagacttggcagtgggacctgggt

SEQ ID NO: 678008 - DNA, 424 bp, Homo sapiens
acccatccaggacatttcagttcagaactaattcagttctgtttttatttcagatgttattattttttttctttttatactttgtcacatttttggtgtctttgagttcccagtgcctcccaagcagtgagttgtgaaaccttttgaggctrtttgacaatggactattgaactgaaaagagaaagttttactgtattctcctatgatgacatcctcatcttttagtgacttcgtgttctgtttacataggggttttgacaagtgtaccttctgaggacaaggaactcaatgtgctttctcagccatctaatcagccaggcgtctgtacacatgaaagcagaactggcattacagttaatgatcaagctccctgaggtgaagagtgactagaagatatttttaaaatgacatttatctattttt

SEQ ID NO: 678009 - DNA, 2086 bp, Homo sapiens
tagctgtatttaggggtagaaaacaaagaaaattttaatcacaatactatgagtgaggacatgcaaaactagtaacatttgaggatgagttcgccagataaaacctctagttagtgaatatgggaattataatcatccaacattgttattgattacattttctttttagggaattttgtgactgagaatctcttgtctgaaattaagttttcatgttataagtatcgttatctatatgtactattttctgtatcctccctgtcacagatcactactgaacatggtataatcaatactcgaaataatgaaatgttataagtaaaaaagctcatagaattacataaattacacattttaatgctttcaaagccaattcagagtacaataatgcgttggtctaatcagagcatttatgtgaacaaaatttactcttttattgcatgtatagtcatgattcaaatcaccttctacatatgagcatatatttgagaaaatattttataactatcataaaaatgttagacattattattttggttattttatctggcatctagacgtgaattagatttagtatgatttgtacttaggaaataactttattattatttatatcaaaggatcacaaagaaatacacacacayatatatatatatatatatatatatacactttaatccttcgattgtcgtacagagttctaccgattttcacaaaaaactaatcagatgacttagggatactccagattccactacttaactagttcattcagtgtatcgtttattctctgagctttgctctgctcctcagagacttgtataatttcaaaattaattaaaaacttataatcacataaaccatcttcttctaaaaatcatcttaatttttaaaatgaagtaaccatgacatagaaggctaaattggactaaacaaaatgtggcagtattcatagttatagcatttgaataaccccagtcctctgatctaggcatgatgaactgtataatatgctctgttttatagttgcactgaggtagaatataaaaaagttcggaagccataacatgctgaatcatttgaaggtttatttatttaatactagtgataattaggtatttcaaaaaagattttttcctcatgatatcatttctttgtagttatagttattctgatcaatcttagttaaatgaattcttgaagaatattttaacattaacaaaatgcgaccacgataaattttacatcaccaaataaagagcaaatcctacaagacaaaaacaatgtcagagctgtcctgttatcatgaatacccttcaattaatgcgtttatagccatgcatgctcatagataacagtcctaaaaacccacctacaacttccaaggaaacactcctatagccactcacatacacaaatggagagtgaaaaaatactctaaagctccaagtataatgggaaacactgaatatattttaaaatctcacagacatacttagaattgaataagagtaaatagattgtaaattactaatggatagggttgatttcgaagatgatccttcagattttcaatgtatatttaaaacttttatggaaagctacaggctgaatattcagctataaatatccttctgacttgtgtaaggtggcaactgctgatccatttttttttaattgtcttttaacaagcaaacctcttttctgttgaaaaagcattttcttctagcatgtattctatatgctttgtttcctcctttatgcatttctcaacaagagtgacccagatgtgaaagttgtagcatcatttatatacctcagcataaattaacagtcaaattggtatataatttttatttattatttctctttttcaatatattttgtgaaaatctcttactgaatagattaacaattcagctttataatctcctagcgctaatcagaaatcatatttatgtgtgtgtgtgtgtgtgacttatcgatgtgttgaaaatacatgttgttttccaaaattttaaattgtttaaaccatttcctaggcatagcaaactaaaaaagtaaaaatttctggtaggttttacag

SEQ ID NO: 678010 - DNA, 1227 bp, Homo sapiens
atgtagacagggaaaggcacggcaagaatggtttcataacattttattctaatcaaaggactatcccattggcctttactctcccttctgcaactgatgaggcctcatattatccagttaccagtcatccattcaagaatggcaacattccctttaaaatggatacaaataattattgacacattttttttcctggcttctttaaaggtttcacttgttttgacttgcatagaaaaatttctgcaaaccatcatgggagatattttagttatttaaaaatgttatagtatataagaaatgaaaagttaaattactttattttaggtaaatcattatgaacaattattgatttcatttaaatacaaacttgaataattctgacttcttttcctgtttaattaataatgtgctgtttaatttactttaaatttattatgtaatgaaatgtatggcttgtgaacaaatttgcgaaatagcaaattggtatagacttggtttggagacaacttatagaagttgcaagctacaattaataagtcatgatatcaaaatagataaaagttatttgtattaactaacgtttgagtatcatgcattttggacaaaaataatcaacctgcaataaattttatatttaaatataaaataatsagacaagacaaaaagttttaggctatggtttgtaaggatttctctgaaattaatatacatttgtgcctcatttgactctgctgtcagcttatcaagaagactgtaaggatatatatatatatacacacacatatatatatattaaaatgggtgatgtttatttctaataatgaaaagccaaattgtaaaaaaacaaaaaaacactgtcccccatcaatttatacaattatgatttgtcaattaaaataatataaataaatattaactaattaagttatatcaataagctagagaaaaatagtcatatgattgtattattaaatgtagaaaaagcatttgacaacatctaagatccattcagtataaaaactctcagttacctaggaagagagggtccacaatgtgattaatggtatttaccaaaacccacgacaaacatcacacttaatgatgagaaaagcgaagttttcccactgacatcaggaacttatatgtgagatcagtcagtacagttggcccttcatatcctcaggttccatatctgtggcttcaacaaaccatggatcaaaaatacag

SEQ ID NO: 678011 - DNA, 2405 bp, Homo sapiens
  misc_feature 1838: n = A,T,C or G
ggtggacccttgatagaaaaagaaaataaatgttgaacctatccatgcttttccttcatgtccgaagttctgaattttttcttaaattccaaagtaataaaaaccattttattcccacaattattaaaccagtatataaagtaaccattccttttataaacgttgagtctcccctgccatggcttacagcatgagaagggaggagaagggcttcatgatagatcagtactttacagccttcctacagcaatatgtgtataccaatggcatagctgaggagtgttttcctgactgttctgagtattatctaatcttacaaaaacagaacctctgttcatcaacattgagtgatatacgaatatctagactcctattgcagaaaactgctcctagattattgggttatttaataatggcataatatttttaaggacaagtgtttatagttatatggtactggggatgtgataccatcattatatacatattcaaggccaaggaaatccacaaaattttaagaagacagcagggactggtctccctcttccattatggatgcagccttctcaccctgcattcaactctattaaatagctgaaaaattaaaatatttggacaaaaccattttaacatcgtgtgatgatttattttatgtgtcaacttgactgggccaaaggatactcagatatttggtcaaatatttttctaagtatgactgggaggatgttttgtggggagattaatatctgagtcagtagactggtaaagcagactgcccttttgagtgtgggtgagcctaacccaatcagttgaaaggctgagtagaacaaaaaacctgacactttgtgaataagaagggattcctccagcctcactgctttcgtttgtgacatcagttttttcttacctttggatttgagctaaaggtcacctcttcttgagtctcaaatctgccagctttcagactggaactcacaccattaggtctcttggttctcagatcttttccctggatctccagcttactgacttcagatcctgggacttctcagtccttataattgtgtgagccaattgcttttgataaatatattttattaaaggaaaaggaaaaaggagtcattgtataaaaaaggatacttgcacactaatgtttaaagcagcacaatttgcaattgcaaaaatgtggarctagttcaaagactcatcaatcaacaagtggattaaaaaactgtgagatatatatatatatatcacacatatatatgttatatgtgtgaacacacacacatatatatgatggaacactactcagccataataaggaatgaattaatggtattcacagcaacctggatgggattacatactactattgtaaatgaagtaactcagaaatggaataccaaatattgtatgttctcactcataaatgtgagctaagaaatgaggatgtaaaggcataagaatgatacagtgaacttcggggactcagggggaaagaatgggaaggcggtgagggataaaagactacaaattgggttcagtctatactgcttggatgatgggtgcaccaaaatctcacaaatcaccactaaagaaattactcacgtgaaaaaagaaattactcatgtaaccaattgccacctgttccctaaaaacctatggaaataatttgtttaagttgtatataatagtccttgaaagaaacacaaccaacgagatatatatatatatacacgcacacacacgtgggtatacatagacatatatgtattcatgtatatatttctttgaataaccctgactctaactaacatacacatgcgccacatcgncacatccaattattgaagaagtttaacatttgctcaacattttgagcacatggaaaaaatattatcagttttgaaacaaccatttacatttaaaaatgtttccattttgctttcatttctacattctcatctagttctctttcccactgacagtccactaaaaaaaggttgtggatatgtagcataattgaagaattttagattgggcatcagaatatctgtacctgaacatagaatttatctattagtataatatgtaaacttgaacaattcatttctccttccagatactacatttgtcatctttaaattaaagacaaatgtatgtttttttatggtagtattgtaagaattgagaattaaaatatagttttttagcaaattataaaatatcatctgatgtaagcttactgtgttcataatagtaacagtaatgttattattagtactttccctaaaacatgtaaaatccaaatatataaaacaattttactttttcaagtataatggagaaacatgctatgctattctgtagtctgataccattttcttttccctcttgaatta

SEQ ID NO: 678012 - DNA, 1035 bp, Homo sapiens
acatgttctagaaccctgaagaacatcaccggaataaattagtttggagtgattaggtcagaaagtgaacactggtagtggagaagaggggaaaaacttcatttgaattcactaatggttgtttctaaaatcagaagtatttggcaaaggcactcaacagtccctgaagtgatacgcccctataaccagcagagtccttgtggtgtgataagagcttaacctggaaaaggaaccggacataagagtgatcttgaacttgccaattaagggaaatgatacaaaacgtcagatawaggaaaatgcttacttcttcctaaaaatattgctaataatggaaataattataatagtggcaaataagagcactttttctaagcagagtctattcaaagcactttgcatatgtatattaactcaaatctcaccacagtgcaatgatatagtaactaagtatgtttatccccatttagtatattaggaaatgtaaagcagagggaaaagaggaaactttctccaggccctacactactagatggtggagtttggcttcacatccaggcaatgtgaactctccactatgctatgctctttgcttgttggtttaaacaaaagaagaaatttaaaagttgcagtgtggcaaataatattcccctgttgagactcatggattttaacacctatactcactctttggattattaaaatcattacataaattacaaatcttctctgtgtaagatacaggaaaaactttgctacagcacacaggcagataacaagaaaaagagattattattaaatagtttatgtcttagatctggagtccattccatgtctaaattgagtagcaagaaaaaacagtaaaatcaaaaacaatgcaaataacccccaaaaccaatgacacaagaatacaaatacacacaattctaacatagagtcagttaaaatttgtgtaaacttagcaaaggagaagaaatattgaagatggatgatagagaaaaaaattcaaagcatttgcttttgctttaatatata

SEQ ID NO: 678013 - DNA, 1035 bp, Homo sapiens
acatgttctagaaccctgaagaacatcaccggaataaattagtttggagtgattaggtcagaaagtgaacactggtagtggagaagaggggaaaaacttcatttgaattcactaatggttgtttctaaaatcagaagtatttggcaaaggcactcaacagtccctgaagtgatacgcccctataaccagcagagtccttgtggtgtgataagagcttaacctggaaaaggaaccggacataagagtgatcttgaacttgccaattaagggaaatgatacaaaacgtcagataaaggaaaatgcttacttcttcctaaaaatattgctaataatggaaataattataatagtggcaaataagagcactttttctaagcagagtctattcaaagcactttgcatatgtatattaactcaaatctcaccacagtgcaatgatatagtaactaagtatgtttatccccatttagtatattaggaaatgtaaagcagagggaaaagaggaaactttctccaggccctacactactagatggtggagtttggcttcacatccaggcaatgtgaactctccactatgctatgctctttgcttgttggtttaaacaaaagaagaaatttaaaagttgcagtgtggcaaataatattcccctgttgagactcatggattttaacacctatactcactctttggattattaaaatcattacataaattacaaatcttctctgtgtaagatacaggaaaaactttgctacagcacacaggcagataacaagaaaaagagattattattaaatagtttatgtcttagatctggagtccattccatgtctaaattgagtagcaagaaaaaacagtaaaatcaaaaacaatgcaaataacccccaaaaccaatgacacaaraatacaaatacacacaattctaacatagagtcagttaaaatttgtgtaaacttagcaaaggagaagaaatattgaagatggatgatagagaaaaaaattcaaagcatttgcttttgctttaatatata

SEQ ID NO: 678014 - DNA, 671 bp, Homo sapiens
taggaaaagagggagagaagaaaggaggccaggattaagtagaaaagggagtagatgttcctgcagaaaagaatgttccaagtattttatttatttttatttttaacatrggctccctggtgagaccttctggttctagctgttgttttctttgcttctgtcaatacggtctggagttgaaatcgcagattgaactgttgtgctctgcgggtggcgatatggaagcacgaggctgtctctgacaaccacgtcacgcaggccgctgtccctcctacccggatgggctctgtgctgggccgggaattctgcccccagggctgatgtgaggacgaagttcttcacttatctgttatgagttttcaccgtcaactacccctgctcttcttttggggtgagagatgggacttgtcttggaaagaaggctttgctttgcccttgggaaggtggagagttgcgaaaaagaatgtgaatggctgggcttaatggtgcgagttggttttgtgtgctctagggttagaagtctgtttttcccatgggagaagggttttgtctttctggtccaagaactcgaggaccttgctagaagagcgttccagccacattctcttttcacctgcttctggagtttggggttgagcagcctggagtgcacagaaccttggcatccctgg

SEQ ID NO: 678015 - DNA, 660 bp, Homo sapiens
gatacttgttgattgaaaggttctcagcacctcagaagaaagtaatggctcactctgttttagttgactctttaaaaatacaaaatacataaatattttaccatcatactggcaaactctatgactaaaaataaacagaaggaagagaaagaaatggggctggttgggtagtggtgcccatgggttgcaatgacaaaattagcatcaaggaaggaagtccaagcatccacatctgcggcctagagcaggctgtcaagatgtctggtaggacaaaagatccttcaacaaaggttaggccacaaatcagagcacagagcagtgtgacgggcctcctagagtggcttgtcacagtgacatgtggcagaggaacagaaaaaaacctggaaacagagccagcggaagtgctggccacaaatgtttgcagaccatttggcttcttttctcacctcatcttaagctcttttccttgcacagggaagtgcagtcggccctccatatccgtgggttccacatatgcaaattcagccaacttaggattgaaaatacagtatttgtgggaaatggaatccatggatatcgagggctgayttttcatacccatgggtttcacatggccagatgcaggaattgagcatccatagatttcagtatcggggtgag

SEQ ID NO: 678016 - DNA, 1007 bp, Homo sapiens
gattatgagattgctttatattcccacatagcattcccccttcccacagctttaattgatgctgggatcaagtaggtataaattgataaagttcaagtgagacatggagagaaaaatcatctaccctcctctccaacctatccccctcttcttctggatgaaaacccacatcaataacgcaagttcaaggtaggcatccagtacagtgtagcttacttgcgctttacttccactgagctatgctcaagtgaagtgcaatccagagacaaacagacaacattccctgaaattcttccctagatacagaacatcatcaaattgccattttttcatccagcagtgtaggccaccagattctatcccagtccatagatgttggagcagaatacaaaaatgaggggatcttatttgcatgactgtttggggaacacagtttctgctttgtctccttaagggggaagaagcaagagtccattatgaagactctttccaatatgaagctcctcaaatggtgtgttgtttttttctcttagcaagatgtttggaaaaacaatctttgttaggattcaggaaacaacttttttaaactttgaagtgaagactaggtgcttatttcctctggccctgaccatggtcaacacacgcyatcaaaacaagccttagtaggttaccagaagagatacatgggcatggagagaaataactacagaaaggaacgtcacttggtgaaaaccataatcacaacaagatggaaaaaagcaaagaattgcaccaaaatgcaatatcccattcaggaggaaaagcttcatggtttttttgcttgtctgtttttatgtggggcagggggggatttttttgtttgtttgttttctttttgaatccactgtttttggactttcaaaagtagtaaaagcagcatgttttaaaacacttgaacttagctcaaagaaatggtgtcatttcatcctgatagaaatctcttccagaaaagactatctgagctactc

SEQ ID NO: 678017 - DNA, 1007 bp, Homo sapiens
gattatgagattgctttatattcccacatagcattcccccttcccacagctttaattgatgctgggatcaagtaggtataaattgataaagttcaagtgagacatggagagaaaaatcatctaccctcctctccaacctatccccctcttcttctggatgaaaacccacatcaataacgcaagttcaaggtaggcatccagtacagtgtagcttacttgcgctttacttccactgagctatgctcaagtgaagtgcaatccagagacaaacagacaacattccctgaaattcttccctagatacagaacatcatcaaattgccattttttcatccagcagtgtaggccaccagattctatcccagtccatagatgttggagcagaatacaaaaatgaggggatcttatttgcatgactgtttggggaacacagtttctgctttgtctccttaagggggaagaagcaagagtccattatgaagactctttccaatatgaagctcctcaaatggtgtgttgtttttttctcttagcaagatgtttggaaaaacaatctttgttaggattcaggaaacaacttttttaaactttgaagtgaagactaggtgcttatttcctctggccctgaccatggtcaacacacgctatcaaaacaagccttagtaggttaccagaagagatacatgggcatggagagaaataactacagaaaggaacgtcacttggtgaaaaccataatcacaacaagatggaaaaaagcaaagaattgcaccaaaatgcaatatcccattcaggaggaaaagcttcatggtttttttgcttgtctgtttttatgtggggcagggggggatttttttgtttgtttgttttctttttgaatccactgtttttggactttcaaaagtagtaaaagcagcatgttttaaaacacttgaacttagctcaaagaaatggtgtcatttcatcctgatagaratctcttccagaaaagactatctgagctactc

SEQ ID NO: 678018 - DNA, 1237 bp, Homo sapiens
ggaaagtgtgtgaaacaggaagagaagttctcagtctggtcccaggatttaacctgtagcttggcttttaggcttaaaactttcttcagcttggaggtggggtttcaccacggacctgtctctaacttcctgggcatttgactgggctgcctcctgccactctcaattactgtatcctttatattcagagcttgggttctttctttagtcatatcttccctgaaaccctaataaatttgactcttctccaaaattgccatttactaagtttctcggattttcctatctgagagtaaaactttggcaggattctaccaccatctcaaaatccagctataggattcaggttagggaacaagacacagatataaaagtactgtgtatgtgcgtgctcctttccctttcaaaatctttctctcctcctgagtagttcagatggtataattttgggaggcagcaggaatgttgtgcaggcaacaattcagatgatatcatatactttaaaatcttcttaaatattggcccctgcttttaaaatttggattaaaataaaagagaatgttatggaataattatatgactttttttgctccctctttattatcttctttaactgttccctagagtaagtcagttataagtgtggcacatgggattttagtttttccaagagtgttgttgtcacaaaatccagcaagcaaaatggcacatattttagattctgagatcaaaagtaaccatctgtgtttgaaacagaaatgattcaatgtgcatgttaatatgcagaataagatattatgcctagcactgttagtaaataatattctcaaaagttagagaaataggctgggtgctgtggctcatgcctrtgatcatagcactttgggaggccaaggtgggtggatcacctgaggtcagaagttcgagaccagcctggccaacatggtggcaggtgcctgtaatcccagctactcaggaggctgaggcatgagaatcgctcgaaccctggaggtaaaggttgcagtgagccaagatcacgccactgcactttagcctgagggacagaatgagactgtttctcaaaaaaaaaaaaaaaaaaaaaagtaaagaaaagaaagagaaagagaataagggtaagagacgaacatgatgaacatttgcatactatttcctgttaatatttcacctgagtatgagagtcagagaccattaagaccactaaggaactcttctaaag

SEQ ID NO: 678019 - DNA, 629 bp, Homo sapiens
aatagacatcaaaagaaaaaaacacttaaaatatttccaccatcctaggtttaacatctgggtgacaaaataatctatatagcaaaccctcatgacacaagtttacttatgtaataaacctgctaaagtacccctgaacttaaaaataaaacataaaaaaaggaaaaaaaaagtgtttccacccaaaattacaaataaaatgtgaatttgcagttattcatataaaataatatagtttacaatattaacataatgttacaataaatattatgcctatccttcktatttaatacactcctggccttgcagagttctgcactatgaactatttgtcctcatttttctaaatgtcatttttggaaaaatcacattatcacctgtatgctgagctagttatctcaatttaatcaatgcatcagttgtcattctcattacaaccactttgaagacttttaaatcaaccaatcatgaaagcctaactctctcttagaaatcttttcaattttagaatccacgttagaacttccaatactgtattttgggacctatgtattacaaaggaaagcatgtaaatgtaagttgaatgagccccatatatagctcaagactgctacaatggatattttgca

SEQ ID NO: 678020 - DNA, 629 bp, Homo sapiens
aatagacatcaaaagaaaaaaacacttaaaatatttccaccatcctaggtttaacatctgggtgacaaaataatctatatagcaaaccctcatgacacaagtttacttatgtaataaacctgctaaagtacccctgaacttaaaaataaaacataaaaaaaggaaaaaaaaagtgtttccacccaaaattacaaataaaatgtgaatttgcagttattcatataaaataatatagtttacaatattaacataatgttacaataaatattatgcctatccttcgtatttaatacactcctggccttgcagagttctgcactatgaactatttgtcctcatttttctaaatgtcatttttggaaaaatcacattatcacctgtatgctgagctagttatctcaatttaatcaatgcatcagttgtcattctcattacaaccactttgaagacttttaaatcaaccaatcatgaaagcctaactctctcttagaaatcttttcaattttagaatccacgttagaacttccaatactgtattttgggacctatgtattacaaaggaaagcatgtaaatgtaagttgaatgagccccatatatagctcaagactgctacmatggatattttgca

SEQ ID NO: 678021 - DNA, 593 bp, Homo sapiens
caggaggctgaggcaggagaattgcttgaacccrgggggcggaggttgcagtgagccgagattgcgccattgcactccaacctgggcgacagagcaagactccatctcaaaagaaaatagtgattttgtaggctgccgttagcttcccatgaatgggaagatgctggtcccttctatttgccaccactgctgtgttcaagttcttcggctccttctaaaccaataaagttaaggtgttttgctaaatcaggtcctggcactagcactactccctctgctgatcactgttcttccattttcaaatctcttggggcaggaaatttatgcaagggaccccttggatgtagcagagaacacaagcttatttgctgccccgaacgcttccatttacccatttcatttatatcctgcccatatctccagaagcaaagatagtggatacaagtgatctaagcaaatctctacaactctttatcaacttatccccatttaaatacataaaataacttcactagccttctgtggggacacatctgcacatacctgcacatgtgttaagcgtgacatgacatgaccaattatttttgaagcca

SEQ ID NO: 678022 - DNA, 593 bp, Homo sapiens
caggaggctgaggcaggagaattgcttgaacccagggggcggaggttgcagtgagccgagattgcgccattgcactccaacctgggcgacagagcaagactccatctcaaaagaaaatagtgattttgtaggctgccgttagcttcccatgaatgggaagaygctggtcccttctatttgccaccactgctgtgttcaagttcttcggctccttctaaaccaataaagttaaggtgttttgctaaatcaggtcctggcactagcactactccctctgctgatcactgttcttccattttcaaatctcttggggcaggaaatttatgcaagggaccccttggatgtagcagagaacacaagcttatttgctgccccgaacgcttccatttacccatttcatttatatcctgcccatatctccagaagcaaagatagtggatacaagtgatctaagcaaatctctacaactctttatcaacttatccccatttaaatacataaaataacttcactagccttctgtggggacacatctgcacatacctgcacatgtgttaagcgtgacatgacatgaccaattatttttgaagcca

SEQ ID NO: 678023 - DNA, 746 bp, Homo sapiens
tgcatagctatttctgtattttgtggctgataattctaatatctgaattcctcagggatcaaaatctgtttgttgcttgtgttcttgtggcgacttcttttctcacatttttggtgatccatgattgtgagctcataatggttgttcttcttcattggctatcctggaagcctaaagtggagaatcttttcctccagaaagttttggcatttgattcatctgaaaaccagggggtaccactcacgtggaatcactttagtytcttttgagggttgtgttaatgtgggagtttcagattcatctccattttgccacatcataatggacgcttgcgttcagggcagcctcacttgcttgttgctcataggttttagcttgctttgtgtttatggagggttctgtcattactgagtctagtgagcacattctgaaagtccattttatctaggatttcattgttttgtaggtgtatatcccttcagactgtctggttgggcatcttgccaaagcaggattcagttgcctgagtttagatattgaccaatagagtgatggtgatcatgttagacaccttgcagttctcctgggcatcctctcaatttcattctcaatcactcactcttcagagtcaaatcttgagccttaggcaagtgacagcatcccatgctgttgggaatgaaaagtgaggatggttagtttcgatactgcctgcatgtgctcatctggatgaccttttgtttccctgt

SEQ ID NO: 678024 - DNA, 608 bp, Homo sapiens
ttaacaacttgcaaagtgatcatacctcttcaataccagctatattattcacagccagtttttttagagaactctgaagctttttgtcatcagctgtggctgttctatgtaccaccttcttctttctgcgagctgtaccctgaaaaataaccaaacagaagcagaagtgttagcatgcctggcatctggcaactgcaatcacatcttacgtatcacaataatctaaaacccacattaaaaaatggacaaaataataatgattaatgttataagacttctcagaggttgtgattgtcagcctaacgcagatttttaaaggttggttctagccagttycttttttttccttatcagctttttcaggttgaattattcttatctaatatccagcctttgtcatttcaacacaagatactgtttgctaataaaacataatttataacttcaagacaatttaaatactttataacaattttaaaacattatcttttcttatagtaactaccaccccctgccagtagtctaaagatattctgaaatttggggaattaggacataactgaaaattaatgtctacattacagtaggaggaaaaaaatcaataaata

SEQ ID NO: 678025 - DNA, 705 bp, Homo sapiens
taaggagaaaggaatagtggtttcaatctctgggtagctcctatagtagtactcagggaatcagccttatagaggtaaggtaggggcttcagtctcagcaattccggtgggagtggaggagagatctgacagcagaggatgccttgaaatctagttgctgaaggactgactatttacataggcactcatttgtgaagcattcctgactcagggatagctcaactgcttggtgcttgttcaactcgaatgatcctcaggcacctcaaattcaatatgtcttaaagcttatcagtccaccaatctattcttatttcctaacttttgtagctggtggtaccaccatatactcaagtctctaaaatcatgaatctgagggttatcctagattcttctgcatgccctttaccccccatatcccatcagtcactaaatcgtgtcaattccaactcctaaatttgtatcccatataatagaggtccccaacccccaggccactgaccagtaccagtctgtgacctgttaggaacacggcagcacagcagaaggtggggtagggggcatgagcgagcattactgcttgggctccacagccagtcagatcagyggcagcattagattctcataggagggcgaaccctgttgtgagctgcgtatgcgaggaaactaggatgcgcactcctcatgagaatctaactaatgcctgat

SEQ ID NO: 678026 - DNA, 660 bp, Homo sapiens
tggagaaggaatggagggattattagtgcatatattttctgtgtcatggtatgattcttcaagaaatattagtcttttcaactgattatctccggtctgaggaatatctcagatactatataagatattgtgattttttttcagtggarcagctgatagccttgtaaatcattctctttttaatatcaaatgtatcattagacatttttgactattaattaatttttcacaaggaccactataatcaattggccactgtcataattctctttaggtcatgtcccatgctttccatttgatcccagagtctgttaaggtgattatctctgtcatacatctagtggtttagtgctgccacctgaccgccacttttccagcagcgttttatctactctactgataaggagaccagattaataaaaacatgtcttaacagctcccctggtttacttagacactggtgatttgccgaagcttaaatattacccttctttctagttctgctcgccttatgatcaaagcctctaagtattggagataaaggtctctgatcccatgaagacaagctgaaatgctcaccatgccatgagttggtaaacagttggctcgatagctctgttttcctccagggcaccggtggaacttagcaaaaccaacaaa

SEQ ID NO: 678027 - DNA, 660 bp, Homo sapiens
tggagaaggaatggagggattattagtgcatatattttctgtgtcatggtatgattcttcaagaaatattagtcttttcaactgattatctccggtctgaggaatatctcagatactatataagatattgtgattttttttcagtggagcagctgatagccttgtaaatcattctctttttaatatcaaatgtatcattagacatttttgactattaattaatttttcacaaggaccactataatcaattggccactgtcataattctctttaggtcatgtcccatgctttccatttgatcccagagtctgttaaggtgattatctctgtcatacatctagtggtttagtgctgccacctgaccgccacttttccagcagcgttttatctactctactgataaggagaccagattaataaaaacatgtcttaacagctcccctggtttacttagacactggtgatttgccgaagcttaaatattacccttctttctagttctgctcgccttatgatcaaagcctctaagtattggagataaaggtctctgatcccatgaagacaagctgaaatgctcaccatgccatgagttggtaaacagttggctcgatagctytgttttcctccagggcaccggtggaacttagcaaaaccaacaaa

SEQ ID NO: 678028 - DNA, 1925 bp, Homo sapiens
tttttaaagtaaaataccaaaatgtgtggtggtattttgttttgttctgttacaaatataataaaaataatgctcgtaaatgtcacttagctccaaaatgtaattgaagagtaaccctgcagatgtactctaggaacattacaaatgtataagaacacttatataaagttcatataaagttgagagcatagtgctatggaagttttctgtgagttctcttaatgtgtctaaactgctaataaatatggattcaaaataatggaaaaaagggaaaagaaaaatgcccccttttgcaaaacaacaataacagcaacaacttattataagacctttattggtttaagcatatgcaatttaacttttacaaagcaaaggttcaactaggaataaaggagaaaaccccaaatctttgaaaagtgaactcagaagttggcaaaaaatttcatttttttcatttcctccttctctccctccctctttctttccttcttttttccttcctttcagtataaagcctgtattctcctttccttttatcacacttgtggagagtattataattgtcatattagtttctcatatattacaaatgtaaatgaaagtaagtatcattatgatatttagtaaatgtctacacagkgattttccaaaatgatggttgctgccatgtccatttatgtttaacattctgcttagaaacacttttcagtgtagaaactttcctggaacgttgttgctcatggttccccctcattggagggttctacctggttcattctctctgtctttcattccacctcctacccagtgatcgtgtgggaaatattttgacaagtctaatgctttccatcaaagtacaaagcacttaactaacagcagcacactaagagaaaaaaatcacttctaaaggcttcactatttgtcagttaaaaaagtgtcagatcaaaaacctgattagtaagttttttacctaataatttcaataactgacatgcttgttggtggcacattgtataatttttgtcttatttttaaaaattttttggaaaagtttgaaaggaatgaatacccagggctcatattgcctatctggataattcatacactttttgattttaaatctgaagtagtatcatcctgtaactttgaatttagacatgcattcatctcataatttcagacgatggcattaaattggaaggaaaattatgtcacaagttgaggcacattatgtatttccatgtctcctgctccttatggccatcatgcctctatgaaactaaacttacagagtgctggagaccaaagagacatgataaatcatttaatggcatttcttctctttacagatgagcaaactgaagttcaaggagccagtatggttttgtataagggcttgagttttggagtcaaacagaaccaggcttgaattctgtcttagtaactatataaacttagacaagttacttgagtttgctgattcttggaattttctttcatggaatggagataataataattacttgctaggaatgccatggaggttttaattaaaattgtatatttttaatgcccggtaagcggtagacagttggtgcttcttagttctcttgacttctcaaggtaacaaagtaaattagtgacaaaaacttgctttagaagattttgagcaaaacagacttctattttatgctacttctatcataatttgctgtggagtccctaaggaagcctctgcttctggaatcgaaatccctcaccctgcctaattcaccacttttgtcaacaaatgaggcatctttatccaagtctggagcctctatggtttgtccaagtggagatgagaggtgcagaaatcacttcctaattatggaagaccagtgactcaagctgaggtaatagtcctaaactgagggtgtgcctgt

SEQ ID NO: 678029 - DNA, 1925 bp, Homo sapiens
tttttaaagtaaaataccaaaatgtgtggtggtattttgttttgttctgttacaaatataataaaaataatgctcgtaaatgtcacttagctccaaaatgtaattgaagagtaaccctgcagatgtactctaggaacattacaaatgtataagaacacttatataaagttcatataaagttgagagcatagtgctatggaagttttctgtgagttctcttaatgtgtctaaactgctaataaatatggattcaaaataatggaaaaaagggaaaagaaaaatgcccccttttgcaaaacaacaataacagcaacaacttattataagacctttattggtttaagcatatgcaatttaacttttacaaagcaaaggttcaactaggaataaaggagaaaaccccaaatctttgaaaagtgaactcagaagttggcaaaaaatttcatttttttcatttcctccttctctccctccctctttctttccttcttttttccttcctttcagtataaagcctgtattctcctttccttttatcacacttgtggagagtattataattgtcatattagtttctcatatattacaaatgtaaatgaaagtaagtatcattatgatatttagtaaatgtctacacagtgattttccaaaatgatggttgctgccatgtccatttatgtttaacattctgcttagaaacacttttcagtgtagaaactttcctggaacgttgttgctcatggttccccctcattggagggttctacctggttcattctctctgtctttcattccacctcctacccagtgatcgtgtgggaaatattttgacaagtctaatgctttccatcaaagtacaaagcacttaactaacagcagcacactaagagaaaaaaatcacttctaaaggcttcactatttgtcagttaaaaaagtgtcagatcaaaaacctgattagtaagttttttacctaataatttcaataactgacatgcttgttggtggcacattgtataatttttgtcttatttttaaaaattttttggaaaagtttgaaaggaatgaatacccagggctcatattgcctatctggataattcatacactttttgattttaaatctgaagtagtatcatcctgtaactttgaatttagacatgcattcatctcataatttcagacgatggcattaaattggaaggaaaattatgtcacaagttgaggcacattatgtatttccatgtctcctgctccttatggccatcatgcctctatgaaactaaacttacagagtgctggagaccaaagagacatgataaatcatttaatggcatttcttctctttacagatgagcaaactgaagttcaaggagccagtatggttttgtataagggcttgagttttggagtcaaacagaaccaggcttgaattctgtcttagtaactatataaacttagacaagttacttgagtttgctgattcttggaattttctttcatggaatggagataataataattacttgctaggaatgccatggaggttttaattaaaattgtakatttttaatgcccggtaagcggtagacagttggtgcttcttagttctcttgacttctcaaggtaacaaagtaaattagtgacaaaaacttgctttagaagattttgagcaaaacagacttctattttatgctacttctatcataatttgctgtggagtccctaaggaagcctctgcttctggaatcgaaatccctcaccctgcctaattcaccacttttgtcaacaaatgaggcatctttatccaagtctggagcctctatggtttgtccaagtggagatgagaggtgcagaaatcacttcctaattatggaagaccagtgactcaagctgaggtaatagtcctaaactgagggtgtgcctgt

SEQ ID NO: 678030 - DNA, 1925 bp, Homo sapiens
tttttaaagtaaaataccaaaatgtgtggtggtattttgttttgttctgttacaaatataataaaaataatgctcgtaaatgtcacttagctccaaaatgtaattgaagagtaaccctgcagatgtactctaggaacattacaaatgtataagaacacttatataaagttcatataaagttgagagcatagtgctatggaagttttctgtgagttctcttaatgtgtctaaactgctaataaatatggattcaaaataatggaaaaaagggaaaagaaaaatgcccccttttgcaaaacaacaataacagcaacaacttattataagacctttattggtttaagcatatgcaatttaacttttacaaagcaaaggttcaactaggaataaaggagaaaaccccaaatctttgaaaagtgaactcagaagttggcaaaaaatttcatttttttcatttcctccttctctccctccctctttctttccttcttttttccttcctttcagtataaagcctgtattctcctttccttttatcacacttgtggagagtattataattgtcatattagtttctcatatattacaaatgtaaatgaaagtaagtatcattatgatatttagtaaatgtctacacagtgattttccaaaatgatggttgctgccatgtccatttatgtttaacattctgcttagaaacacttttcagtgtagaaactttcctggaacgttgttgctcatggttccccctcattggagggttctacctggttcattctctctgtctttcattccacctcctacccagtgatcgtgtgggaaatattttgacaagtctaatgctttccatcaaagtacaaagcacttaactaacagcagcacactaagagaaaaaaatcacttctaaaggcttcactatttgtcagttaaaaaagtgtcagatcaaaaacctgattagtaagttttttacctaataatttcaataactgacatgcttgttggtggcacattgtataatttttgtcttatttttaaaaattttttggaaaagtttgaaaggaatgaatacccagggctcatattgcctatctggataattcatacactttttgattttaaatctgaagtagtatcatcctgtaactttgaatttagacatgcattcatctcataatttcagacgatggcattaaattggaaggaaaattatgtcacaagttgaggcacattatgtatttccatgtctcctgctccttatggccatcatgcctctatgaaactaaacttacagagtgctggagaccaaagagacatgataaatcatttaatggcatttcttctctttacagatgagcaaactgaagttcaaggagccagtatggttttgtataagggcttgagttttggagtcaaacagaaccaggcttgaattctgtcttagtaactatataaacttagacaagttacttgagtttgctgattcttggaattttctttcatggaatggagataataataattacttgctaggaatgccatggaggttttaattaaaattgtatatttttaatgcycggtaagcggtagacagttggtgcttcttagttctcttgacttctcaaggtaacaaagtaaattagtgacaaaaacttgctttagaagattttgagcaaaacagacttctattttatgctacttctatcataatttgctgtggagtccctaaggaagcctctgcttctggaatcgaaatccctcaccctgcctaattcaccacttttgtcaacaaatgaggcatctttatccaagtctggagcctctatggtttgtccaagtggagatgagaggtgcagaaatcacttcctaattatggaagaccagtgactcaagctgaggtaatagtcctaaactgagggtgtgcctgt

SEQ ID NO: 678031 - DNA, 602 bp, Homo sapiens
tgggagtgaaggagtaggaagaaccagagatgatgtccgggtttctggattgagcaactagtgatgccataattggcctcaattcaagtaatggctcttcaaaaactgaaggaggacacttcctacttgctatagcatctaagcagcactgtaagtcggtaagcatcctaatagtttcctggattctgtatatggcaactttctcccactcctgataggatgcgtasccaggtgtcaaacttctactgccccagtttcaccagtttcacccagttcaaaagtgggagaactgggcccaactatttaagcctccaaagcatacacacaattatttatgcccagaagagaaagcaaaatgagacatatggggaactggtggagaggcaatatagtgtagaagttaaaagcatgcactctggagttcgactatctgaattcaaattctggttctactagttataatttatatcagtttgggcaaattaacttctctgtgtctcagttccctttatctgcaaaatatgggtaatgatggtacctatcccaaaggattattgcaaatatcaaataaattaatacaaataaaattcttttcttttttt

SEQ ID NO: 678032 - DNA, 602 bp, Homo sapiens
tgggagtgaaggagtaggaagaaccagagatgatgtccgggtttctggattgagcaactagtgatgccataattggcctcaattcaagtaatggctcttcaaaaactgaaggaggacacttcctacttgctatagcatctaagcagcactgtaagtcggtaagcatcctaatagtttcctggattctgtatatggcaactttctcccactcctgataggatgcgtagccaggtgtcaaacttctactgccccartttcaccagtttcacccagttcaaaagtgggagaactgggcccaactatttaagcctccaaagcatacacacaattatttatgcccagaagagaaagcaaaatgagacatatggggaactggtggagaggcaatatagtgtagaagttaaaagcatgcactctggagttcgactatctgaattcaaattctggttctactagttataatttatatcagtttgggcaaattaacttctctgtgtctcagttccctttatctgcaaaatatgggtaatgatggtacctatcccaaaggattattgcaaatatcaaataaattaatacaaataaaattcttttcttttttt

SEQ ID NO: 678033 - DNA, 703 bp, Homo sapiens
cgctggcacgtgagctccctgagaaccgggctctgacctgtttcctcctgtttgccaagtgcctggcagatctcagcctgaaagatatcctcagtaaacgcctagcacatcaaactgaataaattcagcattcatggttagcaaagggctcgagcttctgccccatgcagctccctcgagtgccatggctaggccttcccagcattacttccctgttatacaaagggaggaccaggcttgtgagctcccctatcagatgtggactttgactttcacctctggggatgggctgccctgtgcaggtctgcacctccctctggccttccaaaggctgctgctcttcagattttgccagccatcttgttgaggggtcctgccgaggggcttccccagaggcggttatgctcctaaatgcactggtcccaaactgctgcctcagtgagccataggaaccttccctgggccccacccctccagcaaattcctctcccrgagcccctcccttcccctcccctcccagcacttggtggcatctgtttgctggtctgtccgtctagcaaggttccaagctgaaacccctttgccccctttcctaggcagggagaggcctcacattcttccgtgaatccaggggcagcaccaggcgtcaccccctgcgcaggcagtgtcgtgatgggcttggggaccccttagcaggctctca

SEQ ID NO: 678034 - DNA, 580 bp, Homo sapiens
agagtakaaaaatcgctacaatagggaatttcataattcatttatcatgacagagaatatgctcttatctgtggaccagaacgattctaccaaaaatgaataagaccatagctgggagtgccaggtgtcaaattaatgaaggactttaactatcaaaggaggttgcttcagtgcatctggcttctttcatggaaactggcaaaacatcactagtcctaatcctacaaatgtagatgtttaaaacaggttgaggcagccacattttataggccagcatgaaaaggaaaacaatcacaggaaagatataattacagggtaataaaaacgtaaacaccattaaatgcattaattttatatttgaggtttttttccgtggttgacttaccaacttatgagtgcgagattttgaaaaaattataaaagttttttatgtattcattctaatacacacatattggatttgatcatttttataggagattggtaaaattggctattgaatagaatagagaatttagaaggatttttatcaagtccagagacagaaggagagagagagaaaaatcgttgccaccttgaa

SEQ ID NO: 678035 - DNA, 580 bp, Homo sapiens
agagtataaaaatcgctacaatagggaatttcataattcatttatcatgacagagaatatgctcttatctgtggaccagaacgattctaccaaaaatgaataagaccatagctgggagtgccaggtgtcaaattaatgaaggactttaactatcaaaggaggttgcttcagtgcatctggcttctttcatggaaactggcaaaacatcactagtcctaatcctacaaatgtagatgtttaaaacaggttgaggcagccacattttataggccagcatgaaaaggaaaacaatcacaggaaagatataattacagggtaataaaaacgtaaacaccattaaatgcattaattttatatttgaggtttttttccgtggttgacttaccaacttatgagtgcgagattttgaaaaaattataaaagttttttatgtattcattctaatacacacatattggatttgatcatttttataggagattggtawaattggctattgaatagaatagagaatttagaaggatttttatcaagtccagagacagaaggagagagagagaaaaatcgttgccaccttgaa

SEQ ID NO: 678036 - DNA, 594 bp, Homo sapiens
aacaaggaggtttgtatggctggagccagcaagaggaggcaggaaggagatgaggacagagacatcatcagcagggaccttgcaggctttgccaccacttgtgcatcttaggtcgccttgagcacacctttcctgaaatccttctctgaaataagtataagaatgaacaaatttatatacaaatgtatgcttatctacatgcaacaactctgtgccttttgatctttcatcagcagtttgtctaacatggttgtacagtgtgtgtgtgcatgcacagaaaacggcagcatctccatgcctcagtatttgccttagggaacacgaaccccagcaatacctgcctggggttgttgtgggcawtaaatgagttaacactgacagcgggctgacggcctgtggaagggctccctatgtgtcagctctcgttaccagtgtgtgtacatctgacatgtgggactggttagggagggcgtgagtctggacatggttactgacacgattagttacataagatccgacggtgaatgttcctgtggacatctggcaggacatatataatctaataaacatccgtaacctctttagagcttggga

SEQ ID NO: 678037 - DNA, 1091 bp, Homo sapiens
agagatctaaagtggtttctaaatatcagcattcttgatgcctcaaatcgtttaaactttcagggtgaatcttaaagtttttgaaaattaaaaaaattatacatatatattttgggttgatacataatgttttgcatatttgatggttacatgtaatttaaatgcaacgtactctagtccacctaaaactccatggatccaacacctacggattcttgaacgtgtgtttctaagttgtccattgttcaagtttcccgtttccatttaattcttgatccatcagatcttgtctctagctacaggtcaccgctttccacctcaccccaccctaaatgtcccagctcccttattcattaattccataaaactcctgttaatacagggctttctcgaatatacggatataagttctgaaggttcgagggtaatagcaagatcacattccacttgacagagaaatgatttttaaatgaatgttagacaatgctgtttttaaaaacaccaaggccatttctgttgctgggaatttcttactggctgttcactcccaccacgtgttataggcacctgatattgcctccagcctgttagtctctggaactacttatagcttcacctcactccactcctctcctggctgctgctataaactaatattctaacaacacttttgtgcacagcaattagggtccctctttgtcttgccctgggccattgcagaaacagccttcaccatccaaagaggttactaaaatatttttatgcacaatgacacttctcttcctttctactgttatctgctagggagaaggtgatactgcaacagttcatgtaatagatacgcttttgagtttagtttcaattacaacgaatactttttaaatctaaaattcacttagcaaataaaatatgccctacacatagtagatatttaataaataggtgaagtgtgaattaaagcagtgctaatcaggagccattatgttacgtagtaaagaaagcctcagtacttagtttcactgtttgaccactaaastagcaaaacaatgaatgaaattcaatgaggaaaaacatgaaattgcattagaata

SEQ ID NO: 678038 - DNA, 661 bp, Homo sapiens
tcactgttcagaaaatggatttggcatgatgtggtggagaaaacattgtattgggaagagagcagcctggggaaagtcacttacctacttgacctccctttgctcttctcagaaaaaagagatttatgttagatttttaattttcttactttcttttttttttggacaaagaacttttgttcaagtagaattcttaagtggtaacagaaataaataaaagagataaagcaggccgggcgcagtggctcatgcttgtaaccctagcactttgggaggccgaggcaggcagatcacgaggtcaagagatggagaatatcctggccaacttggtgaaaccgcgtctctactaaaaataaaaaaaaaaaaaactgggcgtggtggtgtgcgcctgtagtcccagctacctgggaggctgagatagcagaattgcttgaacccagaaggcggaggttgcagtgagccgagatcccgccactgtactccagcctgggtgacagagcaagactccatctcaaaaaaaaaaaaaaaaaaaaagaagaagagagataaggcaaatatttgagtagaagcagaaatgcagcatgttgcatgattatctccttgaggcatccccatggaggacactgagaaacttaatgggyttttaaaaattcctgttgga

SEQ ID NO: 678039 - DNA, 1845 bp, Homo sapiens
tcatctttcttttatgctcttgtccaagcctggaaacctctttcttctttcaagactaatttcaaatcctgccttttccctgatgccttccttggcaactctggcctaccaagagcattcttattcccacattcccacagcagctctcaatggcatcatacctattagccgtggctccagcagtgattggrtcagtgatcctgcttcccttgtctttccaacactgatgagatgtctgaggccaggaaccaaattctccttgtgtgtttggccttgctcaccatcttcttccctcaaactccaactttcacagggtgtggccctccaagggacagaacaaaacacctgtgtaatttatttgtgagctgtggcctggccgggtccttgggaagtgagatctacatgatgttgtagtaaccctggggctttttgctgactttgggctgggttgagtgctgggttgagcctttgtgtttagagataagataaccttgagagaccagctgtatgtccctgaggctttgtgtctggcttgtgtggtatctttcttttataacatgcaatgaggggatgccaggaagtgaccattagtatttcatgacaatcagaatgtctagcaagcaatcatactacttctccagcaacatttcagaaagagctgggcaagtgagggctgattaacattcattagagactgtgatgttaaatttatgtgtcaatttgactggaacatggggtacccagattaaacattatttctgggtgtctttaagggtgtttctgaatgaaattagcatttgaattggtggacagagtaaagcagattgccctttccagtgtagatgggcattagtcaagccactgacgacttgaatagaacaaaaaggccaaggaagagggaattcactctctctgcctgactacttgagctgagctattagccttctcctgctgttgactgtgacttacaccatcagagctctgattctcagaactacaccaccagctttcctgggtctccagcttgcagacagcagattgtggaagttagcctccataattgtgtgagcgaattctttcatatatatgtgtgtgtgtgtgtatacacgtatatacatacacacatgtgtatgtatatacgtgtatatgtatgtgtatatacacatacatgtatgtgtgtatacacatacgtgtatatgtatgtgtatacacacatacgtgtatatgcgtgtatatgtatgtatatatacacatatacgtgtatatgcgtatgtgtatgtgtatatacacatacatgtacgtgtatgtgtgtgtgtatgtgtatatacacatacatgtacgtgtatgtgtatgtgtatcctatttgttctatttctctggagaaccctgaataatacagagacctttaatgcagcttcttagtgaatgctcagggcaggcggttttccatggagactctatgccataaaaatcatgtggattagaaactcatgtagattagatgtctaagttgactaattgtagttgttgcaaaaatgtccacaatatatgttccctttcttttatctatgccctttgatagtacccttccaacactgactctgagtttgaccttgtaatttgctttagccaatgagacagaagcaaattcatcacaggcagagacttaaagaacacttgactatcagtacttgctctctggctgctcctgaaaccctgagctaccctgtgaatgataccctgagctagcctgctgaattatgacagacatgtggcctagtatctccctttgtccagccaacagttagccaaccccaaaagtagagctacctagctgaccagcag

SEQ ID NO: 678040 - DNA, 776 bp, Homo sapiens
atacaggcgtccaccaccacgcccggctaattttttatatttttagtagagacggggtttcactgtattagccagggtggtctcgatctcctgacttcgtgttccacccgcctcggcctcccaaagtgctgggattacaggcttgagccactgcgcccggtcagtctcacgtagttccttaaagtaacgtgagaacggactaatacaaagtcccactatgtttccccggctggtctcaagctcctgggctcaggtgatgcaggtgatcctccggttttggcctcccgaagtgctgggattacaggcatgagtaaccatgcttgtcactcctatgggtcttaggggtgagagatgaacagatcagtttggggcttttttgtcatgtatacgaacccgaagtccgatctataaaagccactttagggagtgtcaagaaaacaggagtgagcgtgtaaatagaagccaatgcataaggtttatgtttgggtctgactcggaaggaaaaacaatacacctatgaagatgaaaaaggccgtgtctctgaaaacctttgagctcttcagagaagtgcatcacatatgcaagctcttctatgaccctccttacctttcatcccctattggcagttgtatgacctttctwttcccagcacctgtcacagcaccctgtaatgattggaactcatggttgtgctttgagtgggaaggtgggcagagggtgaggacatcctgtgtaggaacagaggaccaaatgttgggttagcatggcaggggtgg

SEQ ID NO: 678041 - DNA, 489 bp, Homo sapiens
cccagctactcgggagtctgaggcaggagaattgcttgaacccaggaggtgcaggttgcagtaagctgagatcactccactgcactttagcctgaccgatagagtgagacttggcctcaaaaaaaaaaaaaaaaaaaaaaagaatgtataaccaaaaatggagcaaaacatacttaccctgcctcacatttgtgaagattaacaagcattacaacactttacagcacttacggaatgcttgctctaccatatgatctctttcgatgttctgccaacgagctagatgttttcacttttgattgaagataaaccttgttttccttgttttgttgcgatcatggctcactgcaacccctacctcctgggttccggcaattctcgtgcctcagcctcccaagtagctgggattacagakgcgtgccaccacgcccggctaattttttgtatttttagtagagacagggtatcaccacgttggccaggctggtc

SEQ ID NO: 678042 - DNA, 1383 bp, Homo sapiens
  misc_feature 689, 690, 691, 692, 693, 694, 695, 696, 697, 698, 699, 700,701, 702, 703, 704, 705, 706, 707, 708, 709, 710, 711, 712,713, 714, 715, 716, 717, 718, 719, 720, 721, 722, 723, 724,725, 726, 727, 728, 729, 730, 731, 732, 733, 734, 735: n = A,T,C or G
  misc_feature 736, 737, 738, 739, 740, 741, 742, 743, 744, 745, 746, 747,748, 749, 750, 751, 752, 753, 754, 755, 756, 757, 758, 759,760, 761, 762, 763, 764, 765, 766, 767, 768, 769, 770, 771,772, 773, 774, 775, 776, 777, 778, 779, 780, 781, 782: n = A,T,C or G
  misc_feature 783, 784, 785, 786, 787, 788: n = A,T,C or G
taaatggtgagtttttttctgcaataaataggaagctataggattttgagcaaaaaaaaaaaaaaaaatgtgatcacatgaagattactctctgagggaagctaggcatagaggcacatgcctgtaatcccagctattcaaaaggctgaggcgggaggatcatgcaagcccaggagtttaagaccagcttgggcaacatgttaagacccttgtctaagcgtgctgtgaaggagtcctaagattaggggaaaaccatgggatggaaaatcagtgaagttacttgaatgattgtttgtctatctgtcccctcagtgaatcatcatgggcttctccaggccaggtgacatgtttcccacaactttatatcccccaaatcacacatatttcacaaataccactggatgcataaataaaagagaataagctcttgtattatgctaacagtggtggagaggaaaagaaataaaagagaaatactactattgaggaggtagcattgtaaagagatgttagctggttggatatagctgctgaggaagacaaaggaataaaaatgctgtgcaatttatcacaataaaaccaaacaccgcatattctcactcataggtgggaattgaacaatgagatcacatggacacaggaaggggaatatcacactctggggactgtggtggggtggggggaggggnnnnnnnnnnnnnnnnnnnnnnnnnnnnnnnnnnnnnnnnnnnnnnnnnnnnnnnnnnnnnnnnnnnnnnnnnnnnnnnnnnnnnnnnnnnnnnnnnnnnttaaagactagtaccctatccataactagacatttttttttttcctaaactgaaacttttccaattcaacaactccccgttaccgaggctcttttacatgggaatggccattctattcttagcctctataaatgtggttattctaggtactttatgtaagtgaaatcatacaatatttgtccttctgtgtttgatttatttcacttagcatamtgtcttcactatacctggtaaggctcttttgattagggaaaatttgcacagaaaaaaatactgaattcttttccaaaaatttccaaaaatacagaacaatatatttgttcattcattcattcatgcattcaacaagtatttattgagcccatattgtgccaggctcttcttctaataagccattggcaggagataataaaggaatcatactaatctccttactagatcacagttattcttcaatcaacataactcaaattatctgtctcagattactaatgccaccagtggctcacttcctggatcttcttacattggcatatcatcggctgaagagaacagtggcagagtatcaaaagaatcaagccggtttctatcatga

SEQ ID NO: 678043 - DNA, 1383 bp, Homo sapiens
  misc_feature 689, 690, 691, 692, 693, 694, 695, 696, 697, 698, 699, 700,701, 702, 703, 704, 705, 706, 707, 708, 709, 710, 711, 712,713, 714, 715, 716, 717, 718, 719, 720, 721, 722, 723, 724,725, 726, 727, 728, 729, 730, 731, 732, 733, 734, 735: n = A,T,C or G
  misc_feature 736, 737, 738, 739, 740, 741, 742, 743, 744, 745, 746, 747,748, 749, 750, 751, 752, 753, 754, 755, 756, 757, 758, 759,760, 761, 762, 763, 764, 765, 766, 767, 768, 769, 770, 771,772, 773, 774, 775, 776, 777, 778, 779, 780, 781, 782: n = A,T,C or G
  misc_feature 783, 784, 785, 786, 787, 788: n = A,T,C or G
taaatggtgagtttttttctgcaataaataggaagctataggattttgagcaaaaaaaaaaaaaaaaatgtgatcacatgaagattactctctgagggaagctaggcatagaggcacatgcctgtaatcccagctattcaaaaggctgaggcgggaggatcatgcaagcccaggagtttaagaccagcttgggcaacatgttaagacccttgtctaagcgtgctgtgaaggagtcctaagattaggggaaaaccatgggatggaaaatcagtgaagttacttgaatgattgtttgtctatctgtcccctcagtgaatcatcatgggcttctccaggccaggtgacatgtttcccacaactttatatcccccaaatcacacatatttcacaaataccactggatgcataaataaaagagaataagctcttgtattatgctaacagtggtggagaggaaaagaaataaaagagaaatactactattgaggaggtagcattgtaaagagatgttagctggttggatatagctgctgaggaagacaaaggaataaaaatgctgtgcaatttatcacaataaaaccaaacaccgcatattctcactcataggtgggaattgaacaatgagatcacatggacacaggaaggggaatatcacactctggggactgtggtggggtggggggaggggnnnnnnnnnnnnnnnnnnnnnnnnnnnnnnnnnnnnnnnnnnnnnnnnnnnnnnnnnnnnnnnnnnnnnnnnnnnnnnnnnnnnnnnnnnnnnnnnnnnnttaaagactagtaccctatccataactagacatttttttttttcctaaactgaaacttttccaattcaacaactccccgttaccgaggctcttttacatgggaatggccattctattcttagcctctataaatgtggttattctaggtactttatgtaagtgaaatcatacaatatttgtccttctgtgtttgatttatttcacttagcatactgtcttcactatacctggtaaggctcttttgattagggaaaatttgcacagaaaaaaatactgaattcttttccaaaaatttccawaaatacagaacaatatatttgttcattcattcattcatgcattcaacaagtatttattgagcccatattgtgccaggctcttcttctaataagccattggcaggagataataaaggaatcatactaatctccttactagatcacagttattcttcaatcaacataactcaaattatctgtctcagattactaatgccaccagtggctcacttcctggatcttcttacattggcatatcatcggctgaagagaacagtggcagagtatcaaaagaatcaagccggtttctatcatga

SEQ ID NO: 678044 - DNA, 354 bp, Homo sapiens
gctgcagatgctggttgggaagcacggggatgacttgcagcatacaaagactgagatttaggccgggcgcagtggctcacgcctgtaatcccagcactttgggaggccgaggcaggctgatcacgaggtcagaagttcaagaccagcctgaccaacagggtgaaaccctgtctctactaaaaatacaaaaattagcctggggtggtggygcacgcctgtaattgcagctactcaggagactgaggcaggagaatcccttgaacctgggaggcggagcttgcagtgagccgagatcgtgccactgcactccagcctgggcgacagagtgagactctgtctcaaaaacaagacaga

SEQ ID NO: 678045 - DNA, 1498 bp, Homo sapiens
agaaacaataaaaccataactctccttccaaaactcacgaatgagccttagagatgaaaagaaaacaattgcaaatgagcgatgcaaatatttccatgacaaagttcttgttaccatagcaaagtgaccataggaataatgtttaagactaaacatctgtgtctgtcaaatgtctcggtaagatttgcttcctctactgcagatggaaagctgaattttccagtgactgtcccatgaagttgccacttcacaaggtgggttccagcaatcatattttgaacaagatccgacatggtctttggcctccattttccacagagaaaagacgtctgagtcagaagcaggctacagttgactttctgtctatctcactccctttatccacccacctccaatctcattccctccttttcttcctttatctttttcttctctcttccccctccttcttctctgcctctttttctttcttttcatgcattctttcatcagacatttcctgagagcttttcaggataggaagcactgttctgggcacagaaagcaacttcaggtttcatcatgggagcgtgggaaatagtacttttcaaggccaaatagtaccaggatttggggatttactttacttaatactgaaatgcttggattgatactgttattatagttttaaatattcagaattcataaactttaaagcttcagtaaaatgatatgtacagtactttttaagagcacacatttatagcacacattaaaacctgtttcaaaacatgaagcaaatgtgtatctttataaaggtataagcataaacgtacagtcttacgctattacaaatcagcaaatgaaaaagaataygaaaaatagtactcataaaatgaaaatttgattaacttgaaaaaagctatcattgaaatactacagtagcaatatacatttgactgtttttaacagcacaatttttaaagcaaagtgcttcaatgcattgccagcttagttttatgcaaattgttccaactgttgaaaatcctctttccaactctgtgctagtgagtgaacagtgaagagatagtatggattaactgtaaattatttccctctggctgggcgcggtggctcacgcctgtaatctcagcacttcgggaggctgaggtgagtggatcacctgaggtcaggagtttgagaccagcctggccaacatggtgaaaccccgtctctactaaaaatacaaaaactagctgggcatgctggaggggtacctgtaatcccagctgctcgggaggctgaggcaggagaatcacttgaacctgggaggtggaggttgcagtgagccgagatcacaccactacactccagcctgggtgacagagtgagactctgtctccaaaaaaaaaaaaaaaaaaaaaaattatttccctctgactcattcatcttcaaattatatgatttcttgctttacaccaaaggagttgtggggattctcaggagttgtgtatgcgtg

SEQ ID NO: 678046 - DNA, 1498 bp, Homo sapiens
agaaacaataaaaccataactctccttccaaaactcacgaatgagccttagagatgaaaagaaaacaattgcaaatgagcgatgcaaatatttccatgacaaagttcttgttaccatagcaaagtgaccataggaataatgtttaagactaaacatctgtgtctgtcaaatgtctcggtaagatttgcttcctctactgcagatggaaagctgaattttccagtgactgtcccatgaagttgccacttcacaaggtgggttccagcaatcatattttgaacaagatccgacatggtctttggcctccattttccacagagaaaagacgtctgagtcagaagcaggctacagttgactttctgtctatctcactccctttatccacccacctccaatctcattccctccttttcttcctttatctttttcttctctcttccccctccttcttctctgcctctttttctttcttttcatgcattctttcatcagacatttcctgagagcttttcaggataggaagcactgttctgggcacagaaagcaacttcaggtttcatcatgggagcgtgggaaatagtacttttcaaggccaaatagtaccaggatttggggatttactttacttaatactgaaatgcttggattgatactgttattatagttttaaatattcagaattcataaactttaaagcttcagtaaaatgatatgtacagtactttttaagagcacacatttatagcacacattaaaacctgtttcaaaacatgaagcaaatgtgtatctttataaaggtataagcataaacgtacagtcttacgctattacaaatcagcaaatgaaaaagaatatgaaaaatagtactcataaaatgaaaatttgattaacttgaaaaaagctatcattgaaatactacagtagcaatatacatttgactgtttttaacagcacaatttttaaagcaaagtgcttcaatgcattgccagcttagttttatgcaaattgttccaactgttgaaaatcctctttccaactctgtgctagtgagtgaacagtgaagagatagtatggattaactgtaaattatttccctctggctgggcgcggtggctcacgcctgtaatctcagcacttcgggaggctgaggtgagtggatcacctgaggtcaggagtttgagaccagcctggccaacatggtgaaaccccgtctctactaaaaatacaaaaactagctgggcatgctggaggggtacctgtaatcccagctgctcgggaggctgaggcaggagaatcacttgaacctgggaggtggaggttgcagtgagccgagatcacaccactacactccagcctgggtgacagagtgagactctgtctccaaaaaaaaaaaaaaaaaaaaaaattatttccctctgactcattcatmttcaaattatatgatttcttgctttacaccaaaggagttgtggggattctcaggagttgtgtatgcgtg

SEQ ID NO: 678047 - DNA, 769 bp, Homo sapiens
tggctgtgtagtatttcatgcttctgcacagaaaaataaactatcaacaaagtaaacagacagtctacagaatgggagaaaatacttgcaaactatgcatctgacaaaggtctaatatccagaatctatagggaacttaagcagttcaacaagcaaaaatcacataaccccgttaaagtgtgggcaaagtacctgaacacacacctctcaaaagaagatatacaagcagccaataagcatatgmaaaaatgctcaacatcactaattatcagagaaatgcaaattaaaaccacaatgagttactatcttacaccagtcagaatggctattattcaaaagtcaaaaaagaacagatgttggtgaggctgcagagaaaagggaaggctaatacactgttggtgggaatgtaaattatttcagctattgtagaaaccagtttggagatttctcacagaacttaaagcaggtttttaaaatattaatgttgcaaatgtcaaatattcttagtgcaaaaacaaatagatttaataaattagctgctaaatagtttaataaataaatgatttaataaatttaatacatttgttcctgttttattatataaagtagggcttatatatctttgcctgatgttcgaaaaatgccagagtgttagtagtgaatatccagaaaattttatctttctgtacttaaatgtgtttttgtcttaactggcagttctggtaatagcttcaagtgctcttacaaaaattcgaagataacaataccc

SEQ ID NO: 678048 - DNA, 670 bp, Homo sapiens
aacatagtgagacctcatctctactaaacattaaaaaatatcagccgggtgtggtggcgctgaccttgtctccaaaaaaaaaaaagaattgtttacagaagtaactatagtgtgagtcagaaatatattaatgccattagagaaattcaaatcaatacccatggaagttttgatgagggattgcattcaatatgagacgatcatggaaaacttcacaaaggagctgacatttaaactaggtttcttgaaagagtaggaatttaataaagacagtgagatcaatagttgkgggttggagaatatgggataaatgaaggaggggcaatggaaaagcacaatacattttgggaaaagtccagtctgactggcacatatgatacgtgtatgggaacagcaggagataatgggaaaaacaggatgctgctagatattgaatggtttttaatacgaggctaaggagtttgggtcctatttctgtaggcaactgtgtgctgttaaataataattgtgttttacagagattaattgtctgaattaggggaaagtgagtcaatacctgttagtgttaggctattaacaatagttaggtgaaaggtaatgagggcattgagaaggaagagtgatgtgttactgtggaggaggaattgatatgaattggtatgacttagca

SEQ ID NO: 678049 - DNA, 917 bp, Homo sapiens
  misc_feature 415, 416, 417, 418, 419, 420, 421, 422, 423, 424, 425, 426,427, 428, 429, 430, 431, 432, 433, 434, 435, 436, 437, 438,439, 440, 441, 442, 443, 444, 445, 446, 447, 448, 449, 450,451, 452, 453, 454, 455, 456, 457, 458, 459, 460, 461: n = A,T,C or G
  misc_feature 462, 463, 464, 465, 466, 467, 468, 469, 470, 471, 472, 473,474, 475, 476, 477, 478, 479, 480, 481, 482, 483, 484, 485,486, 487, 488, 489, 490, 491, 492, 493, 494, 495, 496, 497,498, 499, 500, 501, 502, 503, 504, 505, 506, 507, 508: n = A,T,C or G
  misc_feature 509, 510, 511, 512, 513, 514, 560: n = A,T,C or G
ggaggattgcttgattccatgagtttgagaccaacctgggctgtaacatagtaagatcctgtctctacagaaaaaaagacagaaaaagctcaggtgtcagctcatcctctttcttggatgaccttggcaaaataacttgaatttctggagcctcaagtgcttgatttataaaatggggtaataatatatagttcccagggatattacagggatcaaatgaaataacagatgtaaagatgctttatagtagctgcttaataaattttagtttcccttccaagcaagtccatcttcttcgaccatcacagcccaggagcttcttcacttctccacagcaaccggtgtgtcatagtcatcttggtgtccatggtatctggcacaatgctctgcatcttttaatgaaatgaatgaagtnnnnnnnnnnnnnnnnnnnnnnnnnnnnnnnnnnnnnnnnnnnnnnnnnnnnnnnnnnnnnnnnnnnnnnnnnnnnnnnnnnnnnnnnnnnnnnnnnnnnrttttccaaatgtggttatgtcacagtttttgtttaagttgctatntttgttttattagtacatgtgttgtttaaagctgagccacatcttactctaggggactattgtgaggcgactgtgccttacctctctgaactcatcctctgctactctccttgcttgtacttagctgcagtcactctggtctttcctctgtttctcacacacagacagcatattcttgcctcagggcctttggacttcctgcttgcctctgatatttacatgtttcactccctcactttgttcagtttatcttagaaccctcatggaccaccatccccactaactgcatgccactctctgtcttctttactcattttatttttcttcagaactcttaatactgcctaacagattgtg

SEQ ID NO: 678050 - DNA, 593 bp, Homo sapiens
tctccttggccagaatttctgtttctttgaagtgtatatattggttataaagtgcctataaaattaatatttggtgaataaatggacacaaactataggacccaatttttcataccacctcacctagaagccagcagtgataagcttggagacttactccctagaaagattttacmaaaaaaatttaagtccttgactttacctttagttcaacagggttttggggaaaagttttatctgacatcagtattgtatgctgtttgatccagggaatgagggagtccactcggctttggtattcttgccacctggagtccacttcctattgccagaaggtaaacatcacacacctgattagcaatatccaaaacaagcacaagagaaagtagctcaggccactccaaactatataaaatccatttcctttaattgcctagatgctgctcagtttaatgctcacagtactagcttcaaagctcctcaagggctctcaggatggggttcaatttcctgacactaagaaaggctacaaaccaagctactaaaaatattctgaaaagagccatgatctacctaatcaagctgatacataa

SEQ ID NO: 678051 - DNA, 508 bp, Homo sapiens
ctgcaacctctgcctcctgggctcaagtgaccctcccacctcagccacccaagtagctgggaccacaggcgcaagccaccatgcctggcttatttttgtattttttgtagagacagagttttgtcatattgcccaggctggtcttgaactcctgagctcaagtgatccacacaccttaacctctgaaagtgcagggattatagrcatgagccaccatgcccagcctacttgtgctttttttaagtttggaatcctttgactcctttttgggctgccagaatcctactcgttatccaaggtttagttcagacaccgttcacttcgtagccttttgtctaagatcaggtatagttctatcacgccttccatgaacacctcctacctctctgtgaggattaatcaactctatgcttgtgctatagtgtcattttgtgcagcttgtgtctggtgtgttatttgcttggtgttattgttaattatttacatgttgttctccaccactagattg

SEQ ID NO: 678052 - DNA, 508 bp, Homo sapiens
ctgcaacctctgcctcctgggctcaagtgaccctcccacctcagccacccaagtagctgggaccacaggcgcaagccaccatgcctggcttatttttgtattttttgtagagacagagttttgtcatattgcccaggctggtcttgaactcctgagctcaagtgatccacacaccttaacctctgaaagtgcagggattataggcatgagccaccatgcccagcctacttgtgctttttttaagtttggaatcctttgactcctttttgggctgccagaatcctactcgttatccaaggtttagttcagacaccgttcacttcgtagccttttgtctaagatcaggtatagttctatcacgccttccatgracacctcctacctctctgtgaggattaatcaactctatgcttgtgctatagtgtcattttgtgcagcttgtgtctggtgtgttatttgcttggtgttattgttaattatttacatgttgttctccaccactagattg

SEQ ID NO: 678053 - DNA, 3071 bp, Homo sapiens
caaggcatacaaaaatagaccattataataacagaacattttctaaagggattttaaaactgtaagccaaatgccttaatctaatactacttctaaaatgtattctaaagaaataatcttgcatgtgtggttagacttaattacagaaatattcattgtaacctttctttagaagtgaatattgaaaactgaaataaatctaaatgtccaactttataattgctagttatggaatactaacaaatgaaatccatgcttttaaaatagcatttagtgaagcaaatatatgttcaaaatacatataaaggaaaaactggtatgttattaaagaagatagaataaaatttattttgagagtgtatgctaataagacagttttgatatttaggaaaattaaaatgttaggtaatattttaaataaaaaaataaattttctgtttgctgagattatacgtattttaaacaatttttaatgtacgctatagacactgaacatgtataatttatgtatcaagaaaaaaatcaataagttcaatttttaaaatcaaaattaaaagtcacataatagatcagagaagataaagatgaattacacttttttctttatctaacaaaagagagtgcatggtttatggagacagacaatttttttctctggttttaactctaagatataaaaggaatctattgtatacatctggaaataagaggtatttaatacctaatgtatattaagattactgttttagctttttttttacaatatagaagtactgtgtgatgacttaccttatcaaccattgaaagagccattttcaaagattgattaaaatcgaagagttccataagcaattttcactaaagcattgaaaactattatccaagattaagaaaatacttttctagggatccctcatatctagggatctaatgaccattagatccaccttgtataatggaattaggacaacccaaagatctggatgattgaattgtcatttggggattattaccatcatacagctcagtttatggcaatttctatacatgtgtttagtattaattgaaggaaactcataggaattagatgccagacatgaagactatatacatatcttcagagcgcttgtgtcctaaactgaaaagtgtgttttaagagtctgggatatgaaaccaccttttctctattcttgtcaaatccatgtcattctagctactgacataatttatgcaatataaatacaaataataataagcaaagttatatgaaaatatgtttccagtatataggtagttttaaccattctttttagaagaaatgtgtgtgtgtgtaaatgtcttaattgttaaaatgattaagtcattcacaggtttgttaatgtttttccatgtagctggagtgataataatttgtattacattttagagtggtttgatgcaaataaataagaaccaactcaaaatgttattgaggttaaactccaagaagacaaaaggaaaactaaaataacaaagtaaactataattaaaacatttcaactaagaaaaaagtaaaaagttaagctatctcagacaatgttcgagattgaagcttgttaattgcaatggaaaaactgctaattaccacaaatagtaatttagaggcataaatattacacaggtgtggctgcaggaagttgatattaatcaaacacatttggcattttcaatgttgcaaaaattacaattgtaaacaccttccatacaatcaaatgttatgtgaattttaaatgagtctcaataaattatactgcataaaaacaggatttttactatggatcataattgttaatgtcttccgtactcaaggttgaaatataaatcaattcactctattatttggtttggaagtttaagaggacaattcacatttcctttgatacactctaccagtgtcactggactggtgatgtgacaagaaaggtcttctgtagaactgaattgcaataatatggagattataacaaaattatatatgtacctaagaatattgactttaaaagccttcttcagattgcaacattgatttccagatctgttgggaactagctgccttacttaatgtaacagtcttggcaatggaataatcatatatatcacccatggataattaatttttaatcattgaaattcactgaaatatgttgaacatgaaaattatacaaatataattttgtatgctgtttcagattctttggaattttattctaagcatcaatcaagatggtatagtacgagaaaggtagaacatgtaattataaattcaggattcaggaagtttatttttctcttctttttaattctctcaaaatgatcttgattcctgcaaagtgttagtrtatctggtaagtaagagtctatttcttttaaacttcatctgtattaaccagctttatatgaccaaaatgtcccccaaatttaaatctttgcacagtaaggccttatatgtacacctggcctcatttcaaaagactaaagcagttgttctcaaattcagctgcacattaatataaactggaaaactgtttaagctcctgatgacaaagccacatgtgagactaatttatgctgaatcactgggccaaggacccaggtatcagcattttttaaaactatagaggaataaccagggttgagaaccactgcacaaaatggtacatgcaacttttatttaagttattttttttaaataaataatggttgaatcgatattgatcttagtaccaagtcatggcaattttttcagacttagagaattcatcctggcattgagattattaaagaacctagaaatccaagtgtttttgtttatatttttcctgtaaatattagagtatgctagtgctcatccttatttgataattttggaaaatatattaaacatttgagattgaatatcaaaaatctctaaaagaattttagaaataccattcttctatgaaataagtaagctcaatcaagatacatattatagtgcccatttaagaaagtctaataataatgcttgcactgcttaaagattaggttgataa

SEQ ID NO: 678054 - DNA, 1364 bp, Homo sapiens
agacgaaaacacagagctctcaagatcgctgctagcttgacaggagcacacacattgaatggtttcattgtttcttttggttcctcaagtctcaaacccattttaaatttctcctcccggccagtagcggtggctcacacctgtaatcccagcactctgggagacggaggtggctggattacttgaggtcaggagttcgagacatgcctggccaacacagtaaaaccctgtctctactaaaaatacaaaaattagccgggagtggtggcacatgcctgtaatcccagctactcgggaagctgaggcaggagatttgcttgaacccaggaggtagaggttgcaatgagctgagattgtgccactgcactccagcctgggcaacagagcaagactctgcctctaaataaataaacaggtaagtaaactactctttctataccttctctttctagttacaagctattgaggcactccagagtgacggcatgtgatccccctgacacaagaaacaggcccagataacacaccgttcagaccgacagcagttctggttatgctgcagtacatcagacgagtgctcttatccatccacagttcttatcacagttacttatgcatatattcattttttatataaaagaatcttgaatcggtcacttaaatattgaatctcaataataaaaaatactaaaagtatagctaaatgtgttattttattttgcatttgtcctacactcttcccctcacttttttaggacatgtaatcaagacatttgggaggttgttcaataccagaatgacagagcaccatcgaccatgctcagaccgtactaaccccttgacaattatcacagtctttcttggatggggactacagagtcctggaggaccaatgacatattttggggggtatgataattctctacaataacttttaaattttgtattttcactgcaataaactaaaacataaccaatattagtaatagtctgcatggtctgatgaccactttatgaccaatgacattttgacttatgatcacaatctaattaatgccaagaagtacaactttaattgtctcaagaatggacaaaacactgaagtatatgtgatatgagaattatgcttctctaagagataaagactaatttacattatgcaaaaaagaagagataggccggacacggcagctcacgcctgtaatcccagcactttgggagaccgaggcaggcagatcacctgaggttgggagttcaagaccagcctgactaacatagagaaaccccatatctactaaaaatacaaaattagccgggcatggtggcacawgcctgtaatcccagctacttgggaaactgaggca

SEQ ID NO: 678055 - DNA, 600 bp, Homo sapiens
ttttttaatgaaacaatctgcacatatacaattccactctcaagaaaggcarttatttacataattatgcagaaattcctataattatgaaaataatgcctttcttcagagtggagttgtatatgtgcagattgtttcattttaagaaaagaaatatttactgatttgattaactgaagttctggatgcttaaaaaatgattaaaatacacagatctactatctgtcttcatgaactttaaatgtcttgtaagaaattcaagtaataaagactacaacatttattatttaactggaacatgtattatttattatcctaactgtggttaggaagcaccattatttattatatctatattaatcaagttgtatcctgtaacaggtttcctgttatccactcatgtcttctaacttctgaagtattgtttaaattacaagggagaaacctagacactacattttctaggatctcaggacaatagagctccaggtgaaattatgctaaataagggcatgagtgtaagatgtggatgtcacagtgaagagatttagagcatttttctggtgacctcctgtttaggtttgacaagcatctaaaatc

SEQ ID NO: 678056 - DNA, 2255 bp, Homo sapiens
atatattcaaaagtaagttgataatgctttcttgtgctcattatggcttaaatttctactatgtttataagtgctgaccctcttttcatcatcatcttgtgtcttttgatctatctccttctttttctctttacttggtaaacaatctggctggaaatttgtctatttaactatggtttttaaagaatcaactttattttttattgtactgcttccttctttctctttgatatatttttacttcattataatttacacttattttgtgtgtttatgtttatatttcttatataattccagcttttgctgtattcaacagtcttcctttttatgtgcaatttttcactgtcattaagttctaaataaagtataacttctatttttatttttctttgagtcataaattacatgcaagcttctgtttaagtttgcaaacaacagcattatctggctgcctctttttattgggttctttcttacatttgggtcagaaaacatagtcagtctaaaacagttttcttgacctctaaacattttgctaaattcacttattcaaaattttctgctaatcagaatattatgtaacataatcagaacataccacattacactctgataatcaattcactagaaagatattgtcccttatgtattaaaatttgttcattttttggaattctcagaaatgtttttcaagaacactttccgttaacattttacaaaatttaaaaatgcaagtaaatttatgcctaatcgtacattaagtatgattttataagtggcatataaacagattgataattcctttcctagagtgtagagatgccctatgcactgcaagacagtcaagggaaggagttggtttggtttaggatgagtgataaagcatctcatgaagtatctgtatgctcagttttagaaaatggatcccatttctaaaaactggattcattgactacattattaaattgtttcaatgctgtattccactatatgttgcattctatagaatgtttacttaacatctttggaataatcattaagtaaacaaaaactgtcccctcttcctcaaaactttcttttattcccatgcttatccactgtcatcaaagtaccacatctgacagaaataattttaatttcaccatcaattgctaggatattaatttagactacaaatagctgcatataaacataaatgaaaaaatatttttccactctcgttgttgaaacagtgggagtcctgaatgatttgatagctgtacaattaatcaaataatagactactggattaaatctcagtgaactaaaaatatctgtgcatagctgtaaacaaaattaaattaatatcctcagtacctcttatgcctttaatgctatcaggatcagtagatgtgattttaaatgacgattcatataaataggaatatacgtaaaatttaaaaatactaagtgaatttatacctaattgtactacattattaagtataattttctgagtgttactcctaaccagtagcaaatatgttatatatatgagatatatgatatgtgtatatatgatatatgatatatatgttatgatatatatatgatatgtgatatatatgttactgggtagsaggtacagtagcaagttttctttcttaaaagaatggtatactctgggtctaagaatgacaaacagatgatgtggtggtcacttaccagagtattttatttatactgatctgtacccctagaatattcaaaaatgaggatgtatgagatatataatactttttattctatttttctgagttttccctcccagttaggttttcggaatacaaacatggagcagttacatgacataagggcaaatagtataagaattattacactttattcatttgtatcttgtatacttcctctattgggtaaatggatagatgcaatgaactgctaaataatacctgttgaatccaacctgagtgaaaacaaaatcttatgcctattgaaaagcatacaatgtttgtagtagggagaaaggaatatgatagatgtctgatatttaaatgtaaaaacgttggccgggcactgtggctcacgcctgtaatcccagcactattggagtccgaggcacaggcagatcatctgaggtcaggagttcaaaaccagcctggccaatttggtgaaaccccgtctctaataaaatacaaaaattagccaggcttggtggtgcctgcctgtagtcccagctacttgggaggctg

SEQ ID NO: 678057 - DNA, 2255 bp, Homo sapiens
atatattcaaaagtaagttgataatgctttcttgtgctcattatggcttaaatttctactatgtttataagtgctgaccctcttttcatcatcatcttgtgtcttttgatctatctccttctttttctctttacttggtaaacaatctggctggaaatttgtctatttaactatggtttttaaagaatcaactttattttttattgtactgcttccttctttctctttgatatatttttacttcattataatttacacttattttgtgtgtttatgtttatatttcttatataattccagcttttgctgtattcaacagtcttcctttttatgtgcaatttttcactgtcattaagttctaaataaagtataacttctatttttatttttctttgagtcataaattacatgcaagcttctgtttaagtttgcaaacaacagcattatctggctgcctctttttattgggttctttcttacatttgggtcagaaaacatagtcagtctaaaacagttttcttgacctctaaacattttgctaaattcacttattcaaaattttctgctaatcagaatattatgtaacataatcagaacataccacattacactctgataatcaattcactagaaagatattgtcccttatgtattaaaatttgttcattttttggaattctcagaaatgtttttcaagaacactttccgttaacattttacaaaatttaaaaatgcaagtaaatttatgcctaatcgtacattaagtatgattttataagtggcatataaacagattgataattcctttcctagagtgtagagatgccctatgcactgcaagacagtcaagggaaggagttggtttggtttaggatgagtgataaagcatctcatgaagtatctgtatgctcagttttagaaaatggatcccatttctaaaaactggattcattgactacattattaaattgtttcaatgctgtattccactatatgttgcattctatagaatgtttacttaacatctttggaataatcattaagtaaacaaaaactgtcccctcttcctcaaaactttcttttattcccatgcttatccactgtcatcaaagtaccacatctgacagaaataattttaatttcaccatcaattgctaggatattaatttagactacaaatagctgcatataaacataaatgaaaaaatatttttccactctcgttgttgaaacagtgggagtcctgaatgatttgatagctgtacaattaatcaaataatagactactggattaaatctcagtgaactaaaaatatctgtgcatagctgtaaacaaaattaaattaatatcctcagtacctcttatgcctttaatgctatcaggatcagtagatgtgattttaaatgacgattcatataaataggaatatacgtaaaatttaaaaatactaagtgaatttatacctaattgtactacattattaagtataattttctgagtgttactcctaaccagtagcaaatatgttatatatatgagatatatgatatgtgtatatatgatatatgatatatatgttatgatatatatatgatatgtgatatatatgttactgggtagcaggtacagtagcaagttttctttyttaaaagaatggtatactctgggtctaagaatgacaaacagatgatgtggtggtcacttaccagagtattttatttatactgatctgtacccctagaatattcaaaaatgaggatgtatgagatatataatactttttattctatttttctgagttttccctcccagttaggttttcggaatacaaacatggagcagttacatgacataagggcaaatagtataagaattattacactttattcatttgtatcttgtatacttcctctattgggtaaatggatagatgcaatgaactgctaaataatacctgttgaatccaacctgagtgaaaacaaaatcttatgcctattgaaaagcatacaatgtttgtagtagggagaaaggaatatgatagatgtctgatatttaaatgtaaaaacgttggccgggcactgtggctcacgcctgtaatcccagcactattggagtccgaggcacaggcagatcatctgaggtcaggagttcaaaaccagcctggccaatttggtgaaaccccgtctctaataaaatacaaaaattagccaggcttggtggtgcctgcctgtagtcccagctacttgggaggctg

SEQ ID NO: 678058 - DNA, 2068 bp, Homo sapiens
tcttcacattgctgtgagagaaaataaaaaagactaagtgatattttctatccccaaggagcttactgtccaattgtagaaatacaattaacaaatagaaaattagactctcttaagataaatttagtataatgtttccagagaaggataaatatccatatggattggaggagttagaagcttcagagagactggaggacttgtgttaggtcttcagaaataaagatgattcaattaccaaaacagagaaagaagtagggctttgcaggcaaaaatagcaacataaacagttatagggtgtgaaaatgagtgtgatgtgttctgggaattgtgtgacaacatacatggtacagtggagtatatatgtaaaagagtagaaaataaagttgtgcaaagaggttggaattatggaaagttatgaatgccaggctaagaagttgagacaactgaaaaaatttaaggaggaaggtaaaatgatcagaggtaggttttagaaagattattcttgcattaaaaaccaaatggaggtgaagactagggccaggtgataactttgagaatgaagtaacactccttgaggtatgccataaccagtttaaacaatatttgacctttccaacaagtatatggagatacaactcttttcttacttttaatgatgggtgtaataacttatattgcagattttattccttgtttcaccacctgctcatctgttcccatcaatagttgtctccacctccataaacagaaatcttgaggcttcccactcatgattacctcatataaacatgcatcattatcccaatactggtgcctctctttgtcattgaaaaggtttccagaattatctttcaagtcctcttgacaaacattgtattgagtggcgggaaaatagggaagaaaaaagcaactctttatcccatcctttgatactgcaaacatattttatatcctctttttttcctatataattaaagaagcataatgcggaaaaagtcccagcaaaggaactgctaacagaatgtctttacacttagtttaatgtgattttttttttttttttttttttgagacggagtctctctctgtcacccaggctggagtgcagtggcgcaatctccgatcactgcaagctctgtctcccgggttcatgccattctcctgcctcagcagtggtcagaaagatagctattttgtgcagttgatcttaatcctttggggtccatggatccatttaagaatctgggccaggtgcggtggctcagcctataatcccagcactctgggaggccaaggccggtggatgacctgaagtcaggagttcaagaccagcctggccaacatggtgaaatcccgtctctacttaaaatacaaaaaattagctgggtgtggtggtacacacctgtaatcccagctactcaggaggctgaggcaggagaattgcttgaaccctggaggcagaggttgcagtgagccgagattgcgccgttgcactccagactgggggacaaaagcgagacttcatctcaaaaaaaaaaaaaaaaagtagaatccgatgaaygctgaggaaactctctctataaaaacgcacatatcctacatgcataagcacaaagatttttgcaggcaatttcagaggattacaaaaatctacagaattctaaatacttctaattaagaagtaattgagaatattctaattaagaaccactgttatggtaaattctcagaaaatatgactgaataaaacaagaaaataaacctcaggatgatccagttgtaacaattctatttcttccatgttatgctgaaaggaatttatttgttgttgctctacgtaatcttccaataatgttatctgtactatagatattatatggcagaaaccctgtggtatagattgcaacatggttaaactcaacttattgcaacttcatagcctttagaaaaaaacaaagcaacacaaatgatatcaaaaataaggttgaaaaataaattaacttggaagaatatttgcaacacatattataaacaaagagttaatttcctggtacagaaagattta

SEQ ID NO: 678059 - DNA, 2068 bp, Homo sapiens
tcttcacattgctgtgagagaaaataaaaaagactaagtgatattttctatccccaaggagcttactgtccaattgtagaaatacaattaacaaatagaaaattagactctcttaagataaatttagtataatgtttccagagaaggataaatatccatatggattggaggagttagaagcttcagagagactggaggacttgtgttaggtcttcagaaataaagatgattcaattaccaaaacagagaaagaagtagggctttgcaggcaaaaatagcaacataaacagttatagggtgtgaaaatgagtgtgatgtgttctgggaattgtgtgacaacatacatggtacagtggagtatatatgtaaaagagtagaaaataaagttgtgcaaagaggttggaattatggaaagttatgaatgccaggctaagaagttgagacaactgaaaaaatttaaggaggaaggtaaaatgatcagaggtaggttttagaaagattattcttgcattaaaaaccaaatggaggtgaagactagggccaggtgataactttgagaatgaagtaacactccttgaggtatgccataaccagtttaaacaatatttgacctttccaacaagtatatggagatacaactcttttcttacttttaatgatgggtgtaataacttatattgcagattttattccttgtttcaccacctgctcatctgttcccatcaatagttgtctccacctccataaacagaaatcttgaggcttcccactcatgattacctcatataaacatgcatcattatcccaatactggtgcctctctttgtcattgaaaaggtttccagaattatctttcaagtcctcttgacaaacattgtattgagtggcgggaaaatagggaagaaaaaagcaactctttatcccatcctttgatactgcaaacatattttatatcctctttttttcctatataattaaagaagcataatgcggaaaaagtcccagcaaaggaactgctaacagaatgtctttacacttagtttaatgtgattttttttttttttttttttttgagacggagtctctctctgtcacccaggctggagtgcagtggcgcaatctccgatcactgcaagctctgtctcccgggttcatgccattctcctgcctcagcagtggtcagaaagatagctattttgtgcagttgatcttaatcctttggggtccatggatccatttaagaatctgggccaggtgcggtggctcagcctataatcccagcactctgggaggccaaggccggtggatgacctgaagtcaggagttcaagaccagcctggccaacatggtgaaatcccgtctctacttaaaatacaaaaaattagctgggtgtggtggtacacacctgtaatcccagctactcaggaggctgaggcaggagaattgcttgaaccctggaggcagaggttgcagtgagccgagattgcgccgttgcactccagactgggggacaaaagcgagacttcatctcaaaaaaaaaaaaaaaaagtagaatccgatgaatgctgaggaaactctctctataaaaacgcacatatcctacatgcataagcacaaagatttttgcaggcaatttcagaggattacaaaaatctacagaattctaaatacttctaattaagaagtaattgagaatattctaattaagaaccactgttatggtaaattctcagaaaatatgactgaataaaacaagaaaataaacctcaggatgatccagttgtaacrattctatttcttccatgttatgctgaaaggaatttatttgttgttgctctacgtaatcttccaataatgttatctgtactatagatattatatggcagaaaccctgtggtatagattgcaacatggttaaactcaacttattgcaacttcatagcctttagaaaaaaacaaagcaacacaaatgatatcaaaaataaggttgaaaaataaattaacttggaagaatatttgcaacacatattataaacaaagagttaatttcctggtacagaaagattta

SEQ ID NO: 678060 - DNA, 2068 bp, Homo sapiens
tcttcacattgctgtgagagaaaataaaaaagactaagtgatattttctatccccaaggagcttactgtccaattgtagaaatacaattaacaaatagaaaattagactctcttaagataaatttagtataatgtttccagagaaggataaatatccatatggattggaggagttagaagcttcagagagactggaggacttgtgttaggtcttcagaaataaagatgattcaattaccaaaacagagaaagaagtagggctttgcaggcaaaaatagcaacataaacagttatagggtgtgaaaatgagtgtgatgtgttctgggaattgtgtgacaacatacatggtacagtggagtatatatgtaaaagagtagaaaataaagttgtgcaaagaggttggaattatggaaagttatgaatgccaggctaagaagttgagacaactgaaaaaatttaaggaggaaggtaaaatgatcagaggtaggttttagaaagattattcttgcattaaaaaccaaatggaggtgaagactagggccaggtgataactttgagaatgaagtaacactccttgaggtatgccataaccagtttaaacaatatttgacctttccaacaagtatatggagatacaactcttttcttacttttaatgatgggtgtaataacttatattgcagattttattccttgtttcaccacctgctcatctgttcccatcaatagttgtctccacctccataaacagaaatcttgaggcttcccactcatgattacctcatataaacatgcatcattatcccaatactggtgcctctctttgtcattgaaaaggtttccagaattatctttcaagtcctcttgacaaacattgtattgagtggcgggaaaatagggaagaaaaaagcaactctttatcccatcctttgatactgcaaacatattttatatcctctttttttcctatataattaaagaagcataatgcggaaaaagtcccagcaaaggaactgctaacagaatgtctttacacttagtttaatgtgattttttttttttttttttttttgagacggagtctctctctgtcacccaggctggagtgcagtggcgcaatctccgatcactgcaagctctgtctcccgggttcatgccattctcctgcctcagcagtggtcagaaagatagctattttgtgcagttgatcttaatcctttggggtccatggatccatttaagaatctgggccaggtgcggtggctcagcctataatcccagcactctgggaggccaaggccggtggatgacctgaagtcaggagttcaagaccagcctggccaacatggtgaaatcccgtctctacttaaaatacaaaaaattagctgggtgtggtggtacacacctgtaatcccagctactcaggaggctgaggcaggagaattgcttgaaccctggaggcagaggttgcagtgagccgagattgcgccgttgcactccagactgggggacaaaagcgagacttcatctcaaaaaaaaaaaaaaaaagtagaatccgatgaatgctgaggaaactctctctataaaaacgcacatatcctacatgcataagcacaaagatttttgcaggcaatttcagaggattacaaaaatctacagaattctaaatacttctaattaagaagtaattgagaatattctaattaagaaccactgttatggtaaattctcagaaaatatgactgaataaaacaagaaaataaacctcaggatgatccagttgtaacaattctatttcttccatgttatgctgaaaggaatttatttgttgttgctctacgtaatcttccaataatgttatctgtactatagatattatatggcagaarccctgtggtatagattgcaacatggttaaactcaacttattgcaacttcatagcctttagaaaaaaacaaagcaacacaaatgatatcaaaaataaggttgaaaaataaattaacttggaagaatatttgcaacacatattataaacaaagagttaatttcctggtacagaaagattta

SEQ ID NO: 678061 - DNA, 609 bp, Homo sapiens
tttccccaattcagctgcagctgcctctcacagtgtttcacttctcacctgcacaactggataaaatattaaagtagagtaaaataaactcataaatgtgtcttgggatggattttagttaccgtctatgaaaactcacgttttaaggtgagtagcgttctttggcagtaagccagtccccgaggagactggatattttcacggtacaactaaagaataaggcaaggaacggcgggtgtgaggaagcctggaactcagtgctgaakcagtgaatcaccagcttaggggcctcatgctcccccggtctgaggataagattagtctccaaatctggaatggtgccctgcctacaggttagggttaagtgaccttacctgtaaaggttagagaatgcagggcaatgaaaccaagtaagtagtccttccattatccctatgaaaccagaactatgtcaggggtgtgttggaaatgaaatgactgataccagttcccaaaggagactgttaaagtttaagaaactttgcagcttgttggcttacactggtaatttgaaatcagctatcatgggagtatctacaacacagaaattagcactgcagaattacgcct

SEQ ID NO: 678062 - DNA, 636 bp, Homo sapiens
taatcttatatttcagaggtttccatacattgccatcatatttttgataacaatgattttggaatactaagcaggcctatacctgattttactactaagaatataaatccaagtatggtgggctttcagaggaacctagctctctgccaggctaagacaatcatgttgaagaatcatgctctggaggtgacagagatccttgatgtatcaagacttgccttaaatgttagggatcttctttttaatatcaggaaaatcaggtgatactcattagcttaagttgcctgattagtagtcacttacctttggaccaggtaatccaggtaaaccaggatttccatgtggccctggtatgccctgcaagtaacgaaaaaagtcatcattcttggaacatactggaatggaacaaagtacaattgcttactttcctctcaacatgtgtgatccctttaagcacttgagtttttgcttatgttattatgtatgccttaaagacctacttmcttcagcttatgccctatacctacccaaatttttcttcagatctcaactcatttttaaatcctagccacaagaacatgaagcaatatctctctcctactaatttccgtagaaatttcttcatgtaaaattcat

SEQ ID NO: 678063 - DNA, 636 bp, Homo sapiens
taatcttatatttcagaggtttccatacattgccatcatatttttgataacaatgattttggaatactaagcaggcctatacctgattttactactaagaatataaatccaagtatggtgggctttcagaggaacctagctctctgccaggctaagacaatcatgttgaagaatcatgctctggaggtgacagagatccttgatgtatcaagacttgccttaaatgttagggatcttctttttaatatcaggaaaatcaggtgatactcattagcttaagttgcctgattagtagtcacttacctttggaccaggtaatccaggtaaaccaggatttccatgtggccctggtatgccctgcaagtaacgaaaaaagtcatcattcttggaacatactggaatggaacaaagtacaattgcttactttcctctcaacatgtgtgatccctttaagcacttgagtttttgcttatgttattatgtatgccttaaagacctacttacttcagcttatgccctatacctacccaaatttttcttcagatctcaactcatttttaaatcctagycacaagaacatgaagcaatatctctctcctactaatttccgtagaaatttcttcatgtaaaattcat

SEQ ID NO: 678064 - DNA, 636 bp, Homo sapiens
taatcttatatttcagaggtttccatacattgccatcatatttttgataacaatgattttggaatactaagcaggcctatacctgattttactactaagaatataaatccaagtatggtgggctttcagaggaacctagctctctgccaggctaagacaatcatgttgaagaatcatgctctggaggtgacagagatccttgatgtatcaagacttgccttaaatgttagggatcttctttttaatatcaggaaaatcaggtgatactcattagcttaagttgcctgattagtagtcacttacctttggaccaggtaatccaggtaaaccaggatttccatgtggccctggtatgccctgcaagtaacgaaaaaagtcatcattcttggaacatactggaatggaacaaagtacaattgcttactttcctctcaacatgtgtgatccctttaagcacttgagtttttgcttatgttattatgtatgccttaaagacctacttacttcagcttatgccctatacctacccaaatttttcttcagatctcaactcatttttaaatcctagccacaagaacatgaagcaatatctctctcctactaatttccrtagaaatttcttcatgtaaaattcat

SEQ ID NO: 678065 - DNA, 671 bp, Homo sapiens
gaataagaagtaaattgctatctcagaaattaaattctcttgggtgggatccaaaaggatttgctttaattatgaaagtattttcagaggcaaatagtcttaaagtgaagtttcaatggactgcaaacagattatctttagcatgaaacatcttaagaagatgaagtcatgagaagtacctgttcagcaaaaagtaaaaggagtccaaagaaaatatatacacatgagactgggcatggtggctcttgcctgtaatcccagcacttttggaggctraggcaggtagatcgcttgaggtcaggagttccagaccagcctggccaaaatggtgaaacctgcctctactaaaaatacaaaaattagctggtctttgtggcacgtacctgtaatcccaactacgggagaggctgaggcaggagaattgcttggaccctggaggtggaggttgttgcagtgagccgagagttcgccactgccctccaacctgagtgacagagtgagtgggacgccatctcaaaaaaagaaaaaaagaaaacatatgcacatgaaaaaatcatttaaaaaataaaagtgtcagtgcacagtgatccactaaacagaagcattccatcctaaattattccatcagagcttctaaaatttccaaatgtaatagatttttggttaccagt

SEQ ID NO: 678066 - DNA, 671 bp, Homo sapiens
gaataagaagtaaattgctatctcagaaattaaattctcttgggtgggatccaaaaggatttgctttaattatgaaagtattttcagaggcaaatagtcttaaagtgaagtttcaatggactgcaaacagattatctttagcatgaaacatcttaagaagatgaagtcatgagaagtacctgttcagcaaaaagtaaaaggagtccaaagaaaatatatacacatgagactgggcatggtggctcttgcctgtaatcccagcacttttggaggctgaggcaggtagatcgcttgaggtcaggagttcsagaccagcctggccaaaatggtgaaacctgcctctactaaaaatacaaaaattagctggtctttgtggcacgtacctgtaatcccaactacgggagaggctgaggcaggagaattgcttggaccctggaggtggaggttgttgcagtgagccgagagttcgccactgccctccaacctgagtgacagagtgagtgggacgccatctcaaaaaaagaaaaaaagaaaacatatgcacatgaaaaaatcatttaaaaaataaaagtgtcagtgcacagtgatccactaaacagaagcattccatcctaaattattccatcagagcttctaaaatttccaaatgtaatagatttttggttaccagt

SEQ ID NO: 678067 - DNA, 2779 bp, Homo sapiens
gaagactaaattaggagggcaaggctatcagacatttaatatagtatattatcctcatatttttataatagaaaatactggcatggcaatcgtatatgattatgaatagctatttatggaactggttcttgcgtctacacttaattacattctgtgtggaggttaacatattacaactgcagcttttattccaatctattcttatagtttttctttctcattaggacttagatcgctggtttgtaggatctcttgcttatgattttctctatttctgttttctattgctaggcctattctctagtgcattattcttgatgacttttaagtcatgtacggttagaagaaaagcaataattcatttttgccgtatgctggtcttgataaacaatgtatgtatatgctaaataaaaacatgctgtatattgtgtgattcctaatgaatacatttgatttttgtttagcttgtcttctgtctttaccctgctatctacctattctgctacaggatcataattcctaaagcctacccacctcaagtcacacaaatatacattgaaataatcatggatattcaccataaacatggaattgttcagtatgtttcatcgcttcatgtttcttcctatcctgcaaaataatttagagtcattcctttatttacaaatatcatagaattaatgcattttatgtaaccaataataagtctcaagaaagatgagactagattcatgtttccattaacatccttacttgacagcagcatgatttctgtaacgtctaacactatacctgacctaatcgttttcactatttagtaatcccttgctaagtactttacaaagttactctaaattatactggatgagactatttaaataaataaatcacataattgcattttattattattttatattacctagaaatgaagtcaatattatacttcataaattgaaaccatgtcttgctaacatgttatgatattccaaccaacaaataggttcttatttttactcatgggattctgtaatcaataactggctggtaaagaatatgtcgaaatcaatcaagttgtagatacacactcaatggatggatgaagagaggcactaggtctgctcataaaattgcactttccatctgacaatagaagctattttttcattagagttccaaatatctcagtgtttggggaagtctccaggtaatatatgcagtgaagaatattactaggcactgggaaacaataggcttccatcaatcaacatatatttgaatatgaacagcttttagggaagctttgggtattttttctttcactgacattgatgttaattaagtatcataatttaatgaacccccaagaagattgacatttgtacaattaatcttcacctggcacacaaacctgatcctctgaatcagaatttcagacaacaggtactgccgctgtgcacatacaattctgacaccgacttggcttctaagtctcccattatattcctaagcatggcagcataaaataaatgaagctagacaaggcttcagacacaatcttgctttactcacttgagatgagtatatagaatgagtagggacaccatcaactctgctaaggtttactaaaaatccagggcagccatggtgggataacaaaataataatttataaaatgtcttccattatatttgcatatgtttttacatgcattctcatttattctagattctggttaaggtatttgcttttacctgctcaaatttaccgagtaatttcccactggaggactcattacctctgaatttttattccgcctttgtttgggggataaaatgctcagctttcttaaaatagtcactggccagataatagactcacaatgaatggcttactccagtgtttttcagcttctagggtgacgcactgatgggttttttataacaatttgttgaagtgtaactagcatttgtttacttatggaatggaatggagtagactaaagtagaccagaatagaatagaacagaatagagtgaattgcacatagcaaagctaagtgtttttcagttatatagatgtgtgtgtatctgcattagattgtaatgcaacatgtatttttgcatgtatttatcattgtgggttgccaagttaaaaacatttgaaagtcacttgctttttctaatcaggactcactccaggagacaaggtattatagccgaactgcatgactgatatgtaagtgagagaagtgaaatggataatgagaagacaactccaatgcctacaatgatgaaattgtaacatgaccccaatttttaacctctccccttaaattgcagataagatctatggatatgatgagattactcctgagattaggttacttttttttttgagacagagtctcgctctgtcgcccaggctggagtgccctggcatgatctccgctcactgcaagctccgcctcccgggttcacgccattctcctgcctcagaytcccgagtagctgggactacaggtgcccgccatcacgcccagctaatttttttgtgtttttagtagagacggggtttcaccgtgttagccatgatggtctcgatctcctgacctcgtgatccgcccgtcttggcctcccaaagtgctgggattacaggcatgacccaccgcgcccagccgagattaggttactttataatgcaaagatgaatggattttgcaaatataattaaggtttctattgagttgtatttgtgttaatcaaaagaaagattatcct

SEQ ID NO: 678068 - DNA, 612 bp, Homo sapiens
gctgggactacaggcacaagccaccatgaccgactaatttttttttttttttgaggctgagtcttgctctgttgtccaggctggaatgcagtggtgcaatctcagctcactgcagcctccacctccggggttcaaacgattctgctgcctcagcctcctgagtagttgggactacaggcatgcaccaccacgcctggctaattttcatatttttagtagatagggcttcgccacgttggccaggctggtctggaactcctgacctcaggtgatccrcctgcctcggcctcccaaagtgttgggattacaggcgtgagccactgcaccggtcccagctaattttaaaaagtttttgtatagatatggtcttgccatcttgcccaggctggtctgaaactcctgggctcaagcaatcttcccacctcagtttcccaaagtgctgaggttataggtgtgagccaccacatctggccctaattttttttaagctaatgtccctaatttgattcatacacaagaaattctatattgaattattttgaataaaattattgatgcaataattaaactaagataattttttaacttattaaagagataaggcatataatt

SEQ ID NO: 678069 - DNA, 1878 bp, Homo sapiens
ctcagtaccattttagtgtggagattaagatatttggtaaaagtgtgaaattaaatatatttctgggaactctgaggttggcgtactatgtaaagaggagtcacgtgaatcaatgtaggtaattccccaacacagaaataagtaaacccaaggagggatattgtgctgagttctcccctactagtatttaccagtggaggaaaatagtattgctgattcctgaaaggaaatcagagagccctagggcagtattaaaggaagctccattgagaggtttactttcaatgagctaggatgctaagattggtaatgcactgaggccaaagagacatcatgtgaccagctatttgtaataagctggtgtgttgagttgaagactacacctccaaggttgaatggtccccaagatttctctatttactgcctaagttagagtctttactggaaaaactactaccatcatgcaatcttaccacatcaaccccacctaaaagtgtgctttcctgtctgtagcagctggactcaggaaatgcaagtttcagtgagcaatctcagccttcttcagtccgcaagtctgggggatatcccctttttccactatgggaaagaagaaactttaacaagtttggttcaggcagttacttgtcaattcccttactctatttaaatatgatcatctaattacatagtgatagaatgttcactctttatataatatttatacctctttgaagataaatgcatactcagtgaaagatgacttcttggtctctggatattaccattctccttaatcaacaggactgtatagcaggattgtgtgactttcccgagttcaaaatgttagtaagtggcagagctggtatacaaattcagatgcaaaaacccaaattctcaactacaacttcaattatcttggctaccataggaattggagttacaaataattctaatatagtgttgcattttaatcattttcgggccttacaaattttacatcttttcctacttgatgctttcttgatcttaacaaaaactgtgataagccttttttaatatatatttccaccttatctactacctttttaaaagtccccacatagaatactgagactaagagggccttcaagtgatactatttatcaatatatcctaaaatataagaatatgtttcatttaaacagattcagatacagagactgaatcttttcctattcagcagaaagtcatatttttattatgtaagtaaagtatacttgtgtatttcttcttataccagtttcaatacaaaatatttgttcaatgtcaatgccatctacacaatactgtaatcatatgagagcccaacctcaagtaaatttatggtgtttatggggtttgttttaggttaccaagttccttaattctacacaactttcacagatttaccttgcaggttgcagcactctcctttatcctcactgatacttatttgttcagggcatcctaaaattccagccttataagacagtcaactgccaagaatgaaatgacttcatggtagagtaattaatgtatatcattccttgtcgaagatatcctaagggatagtattatataaggtagacaaaatgagtgtggccacaatgagacacggagaatgtttaggagacagagtgaaatgtcatggctgaattttgacagagggatgaagttaagaaaatccaaagaataactacctagaagtgaaagctttgggggacctcagatctyaaagacagagcataaaaaatccaaagaagcaataagaaaatgaatccatgactcattgaaacagaactttaaaaaggaaaatagttctactataaatatggtcaaattgtgatacagtgataaata

SEQ ID NO: 678070 - DNA, 911 bp, Homo sapiens
  misc_feature 421, 438, 439, 440, 449, 450, 451, 452, 453, 454, 455, 456,457, 458, 459, 460, 461, 462, 463, 464, 465, 466, 467, 468,469, 470, 471, 472, 473, 474, 475, 476, 477, 478, 479, 480,481, 482, 483, 484, 485, 486, 487, 488, 489, 490, 491: n = A,T,C or G
  misc_feature 492, 493, 494, 495, 496, 497, 498, 499, 500, 501, 502, 503,504, 505, 506, 507, 508, 509, 510, 511, 512, 513, 514, 515,516, 517, 518, 519, 520, 521, 522, 523, 524, 525, 526, 527,528, 529, 530, 531, 532, 533, 534, 535, 536, 537, 538: n = A,T,C or G
  misc_feature 539, 540, 541, 542, 543, 544, 545, 546, 547, 548: n = A,T,C or G
tgtttgtattggcagtggtgttggcatgggggaagggaactgtcaagcatggagctaccagcctctgtgcatttggaccagctgcattggtagtgtggagttggtggcagggccactgccattcatgtacctatatacaccttggcaatgtcagcataagggcaacatgctgcctggcatggggctattggcctccatgttcacatttatgctggcaatggcagcttgttgaggggtgcgcactcacaccagcaacagtggtgtggtggaggggaggtgatatcctcccatgtgtgtgttgcagcaatgcagtgggggggtgtgatatggtttcaatctgtgtccctgcccaaatctcctgtcaagttgtcatctagtgttggaggtgggacctggtggagtgaaggaaagggatttgctngctctcgaagcggttcnnnccccagttnnnnnnnnnnnnnnnnnnnnnnnnnnnnnnnnnnnnnnnnnnnnnnnnnnnnnnnnnnnnnnnnnnnnnnnnnnnnnnnnnnnnnnnnnnnnnnnnnnnnacaaagcctccctctgtccctgcccaaatctcctgtcaagttgtcatcctagtgttggaggtgggacctggtgggaggtgaatggatcatgggggcagtttctcatcaatkgtttaacaccttccatcttgggtctgttctcatgacagtgagtgagttctcatgagatctggttatttaaaagtgtgtagcacctacccctgccttcctgctgctcgagtcatatgaagtgcctcgctcttcctttgccttcctttatgattggaactttctgaggccccaccaaaagcagaaagtgctatgctttttatacagcctgcaggaacatgagaaaattaaacctattttctttataaattactc
